United States Patent Application Publication US 2024/0327476 A1 - sequence listing, part 94

SEQ ID NO: 181155 - DNA, 1416 bp, synthetic construct
  misc_feature 1..1416: note = Description of Artificial Sequence: Synthetic coding sequence
  source 1..1416: mol_type = other DNA
atggagggcagcgccgacagctacaccagccggcccagcctggactcagatgtgtctttagaagaagatcgcgagtcagcaaggcgcgaagtggagagccaagcccagcagcagctggaaagggccaagcacaagccagtggcgtttgcggtgcgcaccaacgtaagttactgtggagtgctggatgaagaatgccccgttcaggggagcggcgttaattttgaggctaaggatttccttcatattaaagagaagtactcaaatgactggtggatcggaagactggtgaaagagggaggtgatatcgcattcataccaagcccccagcggctagaatctataaggctgaaacaggagcaaaaggctcgccggtcaggcaatccaagctctctaagtgacataggtaatagacgatccccaccacctagtcttgctaagcaaaagcaaaaacaggccgaacatgtcccaccatatgatgtcgtgccatccatgcgccctgtggtcctggttgggcccagcctcaagggttatgaagtcacagatatgatgcagaaggccctatttgattttttaaagcacaggtttgacggacggatctccattactcgtgtgactgctgacttatccctcgctaaacggtccgttttgaataatccaggcaaacggaccataatagagaggtcttcagctcggtccagtatcgctgaagtgcaatctgagatcgaaaggatcttcgaactggcaaagagcctgcagcttgtggttctggatgctgatactatcaaccaccctgctcaactggcaaagacctctctggcccccattatagtcttcgttaaggtttccagccctaaggtgctgcagcgactgatccggagccggggaaaatctcagatgaagcacctcacggttcagatgatggcctatgataaacttgtccagtgccctcccgagtccttcgacgtcattctggatgagaaccaactcgaggacgcatgcgagcatctggcggagtatctcgaggtctattggcgtgctacacaccatcctgctcctgggcctgggctgctgggccccccttctgcaattcccggtttacaaaatcagcagctcttgggcgagcggggagaggagcacagccctcttgagcgggactcattaatgccttccgacgaggccagcgaatcttcgcgtcaagcttggactggcagcagtcaaaggtcgtctcgtcatctcgaggaagattacgctgatgcctaccaggatctttaccagccccatcgacagcacactagcggtctgccatccgctaacggacatgaccctcaggaccgcctgctagcgcaggactccgaacacaaccactctgatagaaattggcaacggaaccgcccctggccaaaagacagctactag

SEQ ID NO: 181156 - DNA, 1332 bp, synthetic construct
  misc_feature 1..1332: note = Description of Artificial Sequence: Synthetic coding sequence
  source 1..1332: mol_type = other DNA
atgtacgacgacagctacgtgcccggcttcgaggacagcgaggccggctccgccgacagctatacctcacggccgagcctggatagcgacgtttccctggaagaagatagggagtctgctcgaagagaggtagaatctcaagcccagcagcaactggagcgtgcgaagaagtacagtaatgattggtggattggcaggctggtcaaagagggaggtgacattgccttcatacccagcccacagcggctggaaagcatccgcctgaaacaagagcagaaagcacgtcgctcaggaaacccaagctcgttgtctgacattggtaacagacgatcccccccccctagtctggcgaagcagaagcagaaacaggccgagcatgttcctccctacgacgttgtgccatctatgaggcccgtggtgctggtcggaccgagtctaaaagggtatgaggtgacagacatgatgcagaaagccttattcgacttccttaaacataggtttgatggaagaatttcaataacacgcgtcacagccgatttgtctctcgccaaacggagcgtgctgaacaaccccggcaaaagaaccatcattgaaagaagctctgcaaggtcttccattgcagaggtgcagtctgagattgaacgcattttcgaactggctaagtctctgcaactcgtggtgctggacgctgacacgatcaatcatcctgctcagttagctaaaacttctcttgcccccattatcgtatttgtcaaagtgagttcccccaaagtgctgcagcgactgatacgaagtcgtggtaagtcccaaatgaaacatctcaccgttcagatgatggcatacgacaaacttgtgcagtgcccacctgaatcatttgatgtgatcctggatgagaatcagctggaggacgcatgcgaacacctagcggagtatttggaggtgtactggcgcgccacacaccatccggcccccgggcctggccttcttggacctccctccgctattccaggactacagaatcagcaactcctgggcgaaaggggagaagaacactctcctctagagcgcgattcactaatgccatcggacgaagccagtgagagcagccgtcaggcctggacggggagttcacagcgcagctcacgacacctcgaagaggactatgcagacgcctaccaggatctttaccagcctcaccgccaacacactagcggactcccctcagctaacggccatgacccccaggatcgcctgctagcccaggatagtgaacacaatcacagcgatcggaattggcaaaggaacaggccctggcccaaagactcatactag

SEQ ID NO: 181157 - DNA, 1377 bp, synthetic construct
  misc_feature 1..1377: note = Description of Artificial Sequence: Synthetic coding sequence
  source 1..1377: mol_type = other DNA
atgagcagcagcagctacgccaagaacggcaccgccgacggcccccacagcccaacttctcaggttgcccggggcactactactaggcggtcccgcttgaagaggagcgacggatcaaccaccagcacttcatttatattgcgacaggggtccgctgactcgtatacctcacgccctagcgactcagacgtcagccttgaagaagacagagaggccatccgccaggagcgggagcaacaggctgctattcagctggagcgcgcgaagtcaaaaccagtggccttcgcagtgaagacgaatgtgagctattgcggcgccctggatgaagatgtgcctgtgccatccaccgctatctcatttgacgctaaggactttctacacattaaggagaaatacaataacgactggtggattgggcggttggtgaaggaaggctgcgagataggatttatcccctcaccgctgcgtttggaaaatatccgcatccaacaggagcagaaaagaggaagattccacggcggtaagtcaagcggaaattcctcttcatcattaggcgaaatggtgtctggaacctttcgggccacaccaactagcaccgctaaacaaaagcaaaaggtaaccgagcatattcctccctatgatgtggtaccttcgatgaggccagtggtgttggtcggtccatctctaaagggctatgaggtaactgacatgatgcagaaagctctcttcgacttcctgaaacacagattcgatgggcgtatctctatcacccgggttaccgccgatatcagtctcgccaaacgctcagttctgaacaatccaagcaagcgcgctattatagaacgttccaacacgaggtcaagcctggctgaggttcaatctgagatagaaagaatctttgaactggcccgctctctccagcttgtggtgctggacgctgatactattaatcacccggctcagttaattaaaacctcactggctccaataattgtccacgtgaaggtgtcttcgcccaaggttctgcagagactgatcaagagtcgcggcaagagtcagtctaaacacctgaatgtgcagctggtggccgccgacaaattggcacagtgtccaccaagtcagcgaatgaggcacagcaatcactcaacagaaaatagccctatagaacgacgtagtctcatgacgagtgatgagaattatcacaatgaacgcgctcgaaagtctcgtaaccgactgtcctcttcctcacagcacagccgggaccactaccctctagtggaggaggattaccctgatagctaccaggatacatataaacctcacagaaatcgtggctcgcccggaggctatagccacgatagccgccaccgtctctag

SEQ ID NO: 181158 - DNA, 1509 bp, synthetic construct
  misc_feature 1..1509: note = Description of Artificial Sequence: Synthetic coding sequence
  source 1..1509: mol_type = other DNA
atggacgtggtggcccggggcaccaccacccggcggagccggctgaagaggtccgatggctccacaacgtcgaccagttttatcttacgacagggttccgccgattcctatacaagtcggccctccgattcagatgtcagcctcgaggaagatcgagaagccattagacaggagcgggagcagcaggccgccatccaactggagcgcgcaaaatcaaagccagtggccttcgctgtgaagacaaacgtcagctactgtggagcgctagacgaggacgtgccggtcccatccaccgcaatcagctttgacgcaaaagatttcctccacattaaggagaaatacaataacgattggtggatcgggcggctagttaaagaagggtgtgagatcggctttatcccctcacccctgaggctcgagaatattcgcatacaacaggaacaaaagcggggccggttccatgggggcaagtcctctggaaacagctcatcttcattaggggaaatggtaagcggtaccttccgcgcaactcccacctccactgccaagcagaagcaaaaagtgaccgaacatatccccccatacgatgtagtgccttcaatgcgccccgtggttcttgtgggaccctcgctgaagggctacgaggtaacggacatgatgcagaaggctttatttgacttccttaagcaccggttcgacggccgcatctcaatcacccgagttaccgcagacatcagcttagctaagcggtcggtgttaaataacccatctaagagagcaataatcgaaaggtccaacaccagaagctccctcgcagaggtgcagagcgagatcgaaaggatcttcgaactggcccgcagtctccagctcgtagtgttagacgccgataccatcaatcaccctgctcaactgatcaagacctctttggcacccattattgtgcacgtgaaggtgtcatccccaaaagtgttacaaagactgatcaagtctagaggtaagtctcagtcgaaacatctgaacgtccagcttgttgctgccgacaagctagcccaatgtccaccagaaatgttcgacgtgatcctggatgaaaatcagctcgaggatgcgtgtgaacacctcggtgaatacctagaggcctactggagggctacacacaccacttcttccacacccatgacaccccttctcggtcggaatcttggtagtaccgctctttctccttatcctaccgcgatatcaggcttgcagtcccagcgcatgcgccatagtaaccattctacagagaatagcccgatcgagcgtcgcagtctgatgacctccgacgagaactatcataacgaacgagccaggaaaagcaggaatcgcctgtcctcgagttcccagcactccagggatcattacccactggtggaggaagactaccctgactcataccaggatacttacaagccacacagaaacagaggctcaccgggaggctattcccatgactccaggcatagactttag

SEQ ID NO: 181159 - DNA, 3438 bp, synthetic construct
  misc_feature 1..3438: note = Description of Artificial Sequence: Synthetic coding sequence
  source 1..3438: mol_type = other DNA
atggccgtgcccgcccggacctgcggcgccagccggcccggccccgcacgcaccgctaggccttggcctggatgtggacctcatcccgggcctggaacacgcagacccaccagtggacccccacgacctctttggctactgctgcccctgctcccgctgctcgctgctcccggggcttctgcctacagtttcccacagcaacacacgatgcagcactgggccaggcgactggaacaggaggttgatggtgtgatgcgcatattcggcggcgtccagcagctgcgtgagatctacaaggacaacaggaacttgtttgaagttcaggaaaacgagccgcagaagctcgtcgagaaagtggcaggcgacattgaatccctcctggacagaaaggtgcaagcacttaagcgactggctgacgcagctgaaaatttccagaaggcccataggtggcaagacaacatcaaagaggaagatatagtatactacgacgccaaagcagacgccgaactggacgaccctgagtcggaggatgtagagcggggatctaaagcctcgactcttcgcctggatttcatcgaggatcccaactttaaaaataaggtgaattactcctatgccgcggtgcagatccccaccgatatctacaagggatcgactgtcatcctgaatgagctcaactggacagaggctctggagaatgtatttatggagaacaggagacaggaccccacactcctgtggcaggtgttcggtagtgccaccggagttactcgctactacccagcaacgccttggcgggcccccaagaaaattgatctgtacgacgtgcgccgacggccttggtatatccagggggccagctctcctaaagatatggtgatcattgtggacgtctctggtagcgtgtcaggcctgactctcaagctaatgaagactagcgtgtgcgaaatgcttgacaccctgagtgatgacgattatgtgaatgtagcttctttcaacgagaaagcccagccagtttcatgcttcactcatctagtacaggccaatgtacgaaacaagaaggtctttaaagaagcagtccaggggatggtggctaagggcactactggttacaaagctgggttcgagtacgcctttgaccagttacagaacagcaatatcactcgagcgaactgcaacaagatgattatgatgtttaccgatggaggcgaggatagggtgcaggacgtgttcgagaaatacaactggcccaatcgaaccgttagagtattcacttttagtgtgggccagcataactatgatgtcactccactccagtggatggcatgcgcaaataaaggttattattttgagattcccagcattggcgcaatcaggatcaatacacaggagtacctcgacgttctggggagaccaatggtcctcgctgggaaggaagcaaaacaagtgcaatggaccaacgtttacgaggacgccctgggattagggcttgttgtcacgggcacgctgcctgtcttcaacctgacacaggatgggccaggtgagaagaaaaatcagcttatactgggtgtaatgggcattgatgtggcgctaaacgacataaaaaggttaacccctaattacaccctgggggccaacgggtacgtgtttgcaattgacctgaacggatacgttctgctgcatccaaaccttaagccacagactaccaacttccgcgaaccagtaaccctggatttcctcgatgcagagctggaggacgaaaataaggaggaaattcgcaggtctatgattgacggcaataaggggcataaacagatccgtaccttggttaaaagccttgatgagcgctacattgatgaggtgacccggaactatacttgggtgccaatcagatccaccaattattcacttggtctggtactgccaccttattccactttttatctccaggcgaacctgagcgatcaaattctccaggtaaagtacttcgagtttttactgccatctagctttgaaagtgagggccacgtttttattgccccgcgggagtattgcaaagatctgaacgcaagtgataataacaccgagttcctcaagaattttatcgagctgatggaaaaagtcacgcctgacagtaaacagtgcaataactttttactccataacctgattcttgataccgggatcacacaacagctggtggagcgcgtatggcgcgatcaagacctaaacacctacagcctgctggctgtgttcgccgctactgacggtggcatcacgagggtgttcccaaataaagcggcagaggactggactgaaaacccggagccatttaatgcatcattttatcggcgttcactggacaatcatggctatgtgtttaagcccccgcatcaagacgccctcctgaggccgctggagttggaaaatgataccgtgggtattctggtctccacggctgttgagctaagtctcgggagacggacgctgcgaccagcagtcgttggtgtcaaacttgatctggaggcctgggctgaaaagtttaaggttctggccagtaatcgcacacaccaggatcaaccccagaagtgcggtcccaacagccactgcgagatggactgtgaagtcaataacgaagatctcctgtgtgtcctgattgacgatggtgggtttttagtgttgtcaaaccagaatcatcagtgggaccaggtgggcaggtttttttctgaggttgatgcgaatctgatgcttgccctatacaataactctttctatactcgtaaagagtcttatgactaccaggctgcctgtgcaccccagcccccaggtaaccttggggcagcgcctagaggcgtgtttgtcccaactgtggccgacttcctgaacttagcttggtggacaagtgctgcagcgtggagcttgtttcaacagctgttgtacggacttatttatcactcatggtttcaggctgaccctgcagaggctgagggcagccccgaaacccgcgaaagctcttgcgtgatgaaacagacccaatattattttggtagcgtgaacgcctcttacaacgcaattatcgattgtggtaactgttccaggctcttccatgcccagcgcctcacgaatactaatctactgttcgtcgtcgctgaaaagccgctctgctcacagtgtgaagcagggcggctgctgcagaaggaaactcattgcccggccgatggaccagagcagtgcgaattggtgcagagaccacgttatcggcgaggaccccacatctgcttcgattataacgcgaccgaggataccagtgactgcggaaggggtgcatccttccccccttccctaggggtactggtgtccctgcagctattgctgctgctcgggcttccgcccaggccacaaccacaggtcctggtgcatgcatctcggcggctgtag

SEQ ID NO: 181160 - DNA, 3231 bp, synthetic construct
  misc_feature 1..3231: note = Description of Artificial Sequence: Synthetic coding sequence
  source 1..3231: mol_type = other DNA
atgcagcactgggcccggcggctggagcaggaggtggacggcgtgatgcgcatttttggtggagtgcagcagctgcgcgagatttacaaggataataggaatttatttgaagtccaagaaaacgagcctcagaaactggttgaaaaagtcgcaggtgacatcgagtctttgctggatcgaaaagtccaggcacttaaaaggctagctgatgctgcggagaattttcagaaagcccaccggtggcaggacaacattaaggaagaggacattgtttactacgacgccaaggccgacgccgaactcgatgacccagaatctgaggacgtcgaacgcggcagtaaggccagcactctgcgtctcgacttcatcgaagatccgaacttcaagaacaaggtgaactatagctatgcagcagttcagatccccactgacatctataagggctccaccgtgattttgaacgaactcaattggacagaggccctggaaaacgtgtttatggagaaccggcgccaagaccccacgctgctctggcaggtgttcggctcagccaccggcgttacaaggtattatccagcgaccccttggcgcgctccaaaaaagatcgatctctacgatgtcaggagaagaccatggtacattcagggggcatcttcccccaaggacatggtcatcatagtggacgtctcagggtcagtaagcggtctaaccctgaagttgatgaagacctcagtgtgtgagatgttggatacactctctgatgatgattatgtcaacgtggcatccttcaatgaaaaggcgcagccagtatcatgttttacccatcttgtccaggcaaacgtgcgcaacaaaaaggtgttcaaagaagccgtacaaggcatggtggcaaagggcaccactgggtataaagccggattcgagtacgcctttgatcagctccagaatagtaatattacgcgcgcaaactgcaacaagatgattatgatgttcacagatggaggagaagacagggtccaggatgttttcgaaaaatataattggcctaatcgcactgtgagagtcttcactttctcagtggggcagcacaattatgacgtgactcccctacaatggatggcatgtgctaataagggatattattttgaaatcccctccatcggagcaattaggattaatacccaggagtatctggatgtgcttggacgacctatggtactcgcaggcaaggaggcgaagcaagtgcagtggactaatgtgtacgaagacgccctggggcttgggctcgtggtgacgggtaccctgccagtgtttaatttgactcaagacggtcctggcgagaaaaaaaatcagctcatcctgggtgttatgggaatcgatgtggcacttaatgatatcaaaagactgacgcctaattatacactaggagcaaatggctatgtttttgccattgacttgaatggatacgtgctactgcacccaaatctgaaaccccagacgacaaattttagagagcccgtcactttggacttcttagacgccgagctcgaggacgaaaacaaagaggagattcgcagatctatgatcgacgggaacaagggccacaaacagattaggaccctggtgaaaagtctggatgaaaggtatatagatgaggtcaccagaaattatacctgggtgcctatcaggtcaacaaattatagtctgggcctggttctgcccccgtactccaccttttacctccaagcaaatctgtcggaccagattctccaagtcaaatacttcgagttcctgctgccatcgtcatttgagagcgaaggccatgtattcattgcaccaagggaatactgtaaggatcttaatgcctcagacaataacacagaatttctcaagaacttcatcgaactgatggagaaggtgacccccgatagcaagcagtgcaataacttcctgttacacaacctcatccttgacactggcataacacagcagctcgtcgagagagtgtggcgggaccaagatctaaatacttacagcttgctggccgtgttcgccgctaccgacggcggcatcacccgggtgtttcccaataaggctgccgaggactggaccgaaaatccagagcccttcaatgccagcttttatcggagatccctcgacaatcatggatatgtgttcaagccccctcaccaggatgcgttacttcgacccctggaactggagaacgacactgtcggcatcctggtaagtacggccgtggagctgtctcttgggagacgcaccctgcggccagcagtcgtcggcgtgaagctggatttggaggcatgggcagaaaagttcaaggtattagcatcgaatcgtacccaccaagatcagccccaaaagtgcggccccaattcgcattgtgaaatggactgcgaagtgaacaacgaagatctgctctgtgtcttgatcgacgacggcggcttcctggtcctctccaaccagaatcatcagtgggatcaagtgggccggtttttctcagaggtggatgctaatctaatgctggcactttacaataattctttttacacaagaaaagaatcatatgactatcaggctgcctgtgctccccagcctccaggaaatctcggggctgctcctcgaggggtgttcgttcctaccgtcgccgatttcttgaatttggcttggtggacgtccgctgctgcctggagtctttttcagcaattactgtatggcctcatatatcactcttggttccaggcggatcctgcagaggccgagggttcccctgaaactcgcgagtcgagctgcgtgatgaagcagacacagtattattttggcagtgtgaacgcctcctataacgctatcatagactgcggaaattgttcccgtctctttcacgcccaaagactcactaacaccaatctgctctttgttgttgccgagaaacctctgtgttcacagtgcgaggccggaagacttctgcaaaaggagacccactgcccagccgacggaccggagcaatgcgagctggtccagaggccgcggtaccgcagggggccacacatttgttttgactacaatgccacagaggacacctccgactgcggtcgcggcgcctccttcccccccagcctgggggttttggtttctctacagctcctgctgctcctgggtttaccacctcggcctcaaccacaggtattggtacatgctagcagacggctctag

SEQ ID NO: 181161 - DNA, 3441 bp, synthetic construct
  misc_feature 1..3441: note = Description of Artificial Sequence: Synthetic coding sequence
  source 1..3441: mol_type = other DNA
atggccgtgcccgcccggacctgcggcgccagccggcccggccccgctcggacagctcggccttggcccggatgcggcccgcatcctggaccaggcacaagacgcccaacgagcgggcctccccgccccctctggctcttgttgcccttgctccccttgctggcagcccccggcgccagtgcttacagctttcctcagcagcatactatgcagcactgggccagacggctggagcaggaagtcgacggggtgatgcgtatatttggaggtgttcagcagctgagagagatctataaggataacagaaacctgtttgaggtgcaggagaatgagccccagaagctggtagagaaggtagcaggcgacattgagtctttgttagatcgcaaagtgcaggcactgaaacggctggcagacgccgccgagaacttccaaaaagctcataggtggcaggacaacattaaagaggaggacatcgtgtactacgatgcaaaagctgacgcagagttggatgatccagaatctgaagacgtcgagcgggggagtaaagcttccaccttgagacttgattttattgaggatcccaactttaaaaacaaagtgaattactcttacgccgccgtacagattcctaccgatatatataagggctctaccgtgatactgaacgagctgaattggacagaggcccttgagaacgtcttcatggaaaatcgccgccaggaccctaccctgctgtggcaggttttcggtagcgccaccggagtgaccaggtactatcctgccacgccttggagagccccaaagaagattgacttgtacgacgttagaaggcggccctggtatatacagggagcatcatcccccaaggatatggtcataatagttgatgtcagcgggtccgtgtccggcctgaccctgaaacttatgaagaccagcgtatgtgagatgcttgacacccttagcgacgatgactacgtaaatgtggcctctttcaacgagaaggcacaacccgtcagttgttttacacacttagttcaggccaacgtgcgcaataagaaagtctttaaggaggctgtgcagggcatggtggctaaaggcacgactggctacaaagctgggttcgagtatgccttcgatcagctccagaacagcaacatcacccgggcgaactgcaataaaatgatcatgatgttcaccgatgggggcgaagaccgtgtacaagacgtgttcgagaaatataattggcccaaccggactgtgagggtctttacattctcagtgggacaacacaactacgatgttacgccgttgcagtggatggcttgtgctaataagggatactactttgaaattccgagtatcggagctattcggataaacacacaggagtacttggatgtgctgggacggcccatggtgctggccggtaaggaggccaagcaggtgcagtggacgaacgtgtatgaggacgccctaggactcgggctcgtggttaccggtaccttacctgtgttcaatcttacccaggacggcccaggtgagaaaaaaaatcaactcatactcggcgtcatgggaattgatgtagccttgaacgacatcaagaggctgaccccaaactacaccctgggggccaatggatacgtctttgccattgatctgaatgggtacgtgttgctgcaccccaacctgaaaccccaaacaaccaactttagggaaccagtaaccctggacttcctggacgccgagctggaggacgaaaataaggaggaaatcagaagatctatgatcgacggcaacaaaggccataagcagattcgaactttggtgaaatctctcgacgaacgttacatcgatgaagtgacacggaattatacatgggtgcctatacggagcaccaattatagcctgggacttgtcctgcccccatattccacattctatctacaagcaaacctgtctgaccaaatcttgcaggtaaagtacttcgagtttttgttgccctctagttttgaatcggagggccatgttttcatcgcacctcgggaatactgtaaggatctgaatgcctccgataacaataccgagttcctcaaaaactttatcgagctgatggagaaggtgacccccgactctaagcagtgtaataactttctcctgcacaatctgattctggatactggcattactcagcagctggtggaacgagtctggcgtgatcaggacctgaatacctatagcttgctagctgtcttcgcagccaccgacggcggcataactcgtgtcttcccaaataaggctgcggaggattggaccgaaaacccagagcccttcaacgctagtttctacagacggagcctagataatcatgggtacgtgtttaagcctccccaccaggacgctctgcttcggcccctggagttggaaaacgacacggtgggcatactcgtctcaaccgcggtcgagctttccctcggtcgacggacactgagacccgctgtcgtcggcgtgaaactggacttagaggcctgggcggaaaaattcaaagtactcgcctctaacagaactcaccaggaccagccccagaagtgtgggcctaatagtcactgcgaaatggactgtgaagtcaataacgaagacttgttatgtgtcctgattgacgacgggggatttttggttctctccaaccaaaaccatcaatgggaccaggtgggcaggtttttttccgaggtggatgcgaatctaatgctggccctttacaacaactctttttacacaagaaaagaatcttatgattaccaagccgcctgcgcaccccagcctcccggtaatttaggtgcagcacctaggggagttttcgttcccacagtcgcggacttcctcaatctggcttggtggacgagtgccgctgcctggtctttatttcagcaactgctttacggtctgatataccactcctggttccaagccgaccctgctgaagccgagggctcacccgaaaccagggagagctcatgcgtcatgaaacagacacaatactattttggctctgtgaatgcctcttataatgcaattattgattgcgggaattgcagccgtctctttcatgcacaaaggcttactaataccaatctgctatttgtggtagcggaaaagccactttgttcccagtgcgaggcagggcgtctgcttcaaaaagagacccactgttgccctgcagacggccccgaacagtgtgagcttgtgcagcgccctcggtataggcgcggtccacatatctgcttcgattacaacgcgactgaggatacctcagattgcggaaggggggcttcgtttcctcccagtctcggggtgcttgtgagtctccaactgcttctcctcctggggttgcctcctcgaccccagccacaggtgttggtgcacgccagccgccgtctttag

SEQ ID NO: 181162 - DNA, 3432 bp, synthetic construct
  misc_feature 1..3432: note = Description of Artificial Sequence: Synthetic coding sequence
  source 1..3432: mol_type = other DNA
atggccgtgcccgcccggacctgcggcgccagccggcccggccccgctagaaccgcccgcccctggcctggctgcgggcctcaccccggtcccggaaccaggaggcccactagcggccctcccagacctctgtggctgctactgcctctgctaccgctgctggcggcccctggagccagtgcttactcctttccccagcagcacaccatgcagcattgggcgaggagattggagcaggaagtggatggggtaatgcgcattttcggcggtgtgcagcagctgagggagatctataaagacaatcggaacctgtttgaggtccaggaaaacgaaccgcagaagctggtagagaaagttgccggggacatcgaaagcctacttgatcggaaggtgcaggccctcaaacgcttagctgatgccgccgagaactttcagaaagcccaccgatggcaggataacataaaagaggaggacatcgtgtactatgacgccaaagccgacgccgaactcgacgatcccgaatctgaggatgtcgaaagaggttccaaggcaagcactctgagattggattttatcgaagaccccaacttcaaaaacaaagttaactatagctacgctgctgtccaaataccaaccgacatctataagggctcaacagttattttgaatgagcttaactggactgaggccctcgagaacgtgtttatggagaatcggcggcaggatcctacattactctggcaggtattcggttcagctaccggagtcacccggtactatcccgccacaccctggcgggcacccaagaagatcgatctatacgacgtccggcggcgtccgtggtacattcagggagcttcctctcctaaggacatggtcataattgtggatgtgtccgggagcgtaagcggactcaccctcaagctgatgaaaacttccgtctgtgaaatgctggataccttaagcgatgacgactacgttaacgtcgcctccttcaatgaaaaggcccagccagtcagctgcttcacacatctggtccaagcaaacgtaaggaacaagaaagtgttcaaagaagcggtgcagggaatggtagccaaggggaccactggatacaaagccggtttcgagtatgccttcgaccagctgcagaacagcaatattactcgcgccaattgcaataaaatgatcatgatgtttaccgacgggggggaggatagagttcaagatgtgttcgaaaagtataattggcccaaccgcactgttagggtattcaccttctccgtcggtcagcacaattacgacgtgacacctctgcagtggatggcatgtgcaaataagggttattactttgagatcccgagcatcggcgccattaggataaacacccaggaatatctcgacgtcctcggccggcctatggttctcgcggggaaggaggctaagcaagtccagtggaccaatgtgtacgaggacgctctggggctaggcctggtcgtgacaggcaccttacctgtcttcaatcttactcaggatggaccaggtgagaagaaaaatcaattgatcctgggcgttatggggattgatgtcgctcttaatgacattaagcgcctcacccccaattatacactgggtgcgaatgggtacgtgttcgccattgacctcaatgggtatgtgctgttacacccgaaccttaaacctcagacaacaaacttcagagaacccgtgacgctagattttctcgacgcagaattggaggatgagaacaaggaagagattagaaggtctatgattgacggtaacaagggtcataagcagatccgtacactggtgaaaagtttggatgaacgttatattgacgaagtgacacggaattatacgtgggtgccaatcaggagtacaaattatagcctgggcctggtgcttcctccctacagcaccttctatctccaagctaacctgagcgaccagatactccaggtgaagtactttgagtttctgctcccttccagtttcgagtctgaaggacacgtgttcatcgcccccagagagtactgtaaggatctgaacgcatcggataacaatacagaatttctgaaaaatttcatcgaactgatggaaaaagtgaccccagactcaaagcagtgcaacaactttctgctgcataacctcattctcgacacgggaattacccagcagctggtggaacgcgtatggcgggatcaggaccttaacacgtattccctcctggctgtgtttgccgccacggatggtggtattactcgcgtgtttccaaacaaggccgcagaagactggactgagaatccagagccttttaatgctagcttctaccgcaggtctctcgataatcatgggtatgtcttcaagcctccgcatcaggacgcattgttgcggccattggaattggaaaacgatactgtgggtatcctggtgtccaccgcagtggaactctcactgggacgtagaacactcaggcccgctgttgttggcgtgaaactagaccttgaggcctgggcggaaaagtttaaggtgctagcctccaaccgcacacaccaggatcaaccccaaaaatgtggaccgaacagccactgtgagatggattgtgaggtgaacaacgaagacctcctatgcgtgctaatagatgatggaggtttcttggtgctctccaaccagaatcaccagtgggatcaagtgggccgattcttttccgaagtcgacgcgaacctcatgttggccttatacaacaatagtttttacacacggaaagagagttatgattatcaagccgcctgtgctccacaacctcctgggaacctgggtgctgcccccagaggggtttttgtccctaccgtggccgattttttgaatctggcctggtggacttccgcggctgcttggagtcttttccagcagctgctgtacggcctgatctatcacagctggttccaggccgatcctgccgaggctgagggaagtcccgagacccgagaatcttcatgcgtgatgaaacagactcagtattattttgggtccgttaatgcttcttataatgctatcatcgactgcggaaactgtagtcgattgttccacgcgcagcgcctgacaaataccaacctcctgttcgtggtggccgagaagccactctgctcacagtgcgaggccggacgcctcttgcagaaggagacgcactctgatggaccggaacagtgtgaactagtgcagagaccacgttaccgacggggaccccatatctgcttcgactataacgcaacagaggatacttctgattgtggtcggggcgcaagtttccccccctcactcggcgtgctggtgtccctgcagcttctgttactgcttggcttacctcctagacctcagccgcaggtcttggtgcacgcaagccgacggctttag

SEQ ID NO: 181163 - DNA, 3462 bp, synthetic construct
  misc_feature 1..3462: note = Description of Artificial Sequence: Synthetic coding sequence
  source 1..3462: mol_type = other DNA
atggccgtgcccgcccggacctgcggcgccagccggcccggccccgccagaacagcaaggccctggccaggctgtggaccgcatccagggcctggaactcgccgcccaacctcaggccccccacggcctctctggttactgctgcctttgcttcctctgctggccgctcccggggcctctgcttacagctttccccagcaacacactatgcagcactgggctaggcgcttggagcaggaggttgacggtgtaatgcgtatcttcggcggagtccaacagctgcgtgaaatctataaagacaaccggaaccttttcgaagtgcaggagaacgaaccacagaagctagtggaaaaagtagccggcgacattgagagcttgctagacagaaaggtccaggctctcaagcgtctcgcagatgctgcagagaattttcaaaaggcacatcgatggcaggataacattaaagaggaagatatcgtgtactacgacgccaaggcggacgctgagctggacgaccctgagtctgaagatgtggagcgcggcagcaaggctagcaccctccgccttgattttatagaagacccaaatttcaagaacaaggtgaactattcctatgctgcagtgcagattcccacggacatctataagggctctaccgtgatcctaaacgagctgaattggactgaggccctggagaatgtgtttatggagaacaggcgccaagacccaacgctcctgtggcaggtcttcgggagcgcgactggggtgacccggtattacccagcgacaccctggagagcacctaagaagattgatttatacgacgtgaggcgcaggccctggtatatccaaggcgcctcctcaccaaaagatatggttataattgtcgatgtgagcggttccgtcagcgggctaacactgaagctcatgaaaaccagtgtctgcgagatgctggatactttaagcgatgatgactatgtcaatgttgcctcctttaacgaaaaagcccagcccgtcagctgtttcactcacttggtgcaagcaaacgtgcgaaataaaaaagtcttcaaagaagctgttcagggaatggttgcaaaaggaaccaccggctataaggcagggttcgaatatgcctttgaccagttgcagaattccaatatcacccgcgctaattgtaataaaatgattatgatgtttaccgatggcggggaggaccgtgtgcaggatgtgttcgaaaaatataactggcccaatagaaccgtccgggtgttcactttctccgtgggacaacacaattacgacgtgactccgttgcaatggatggcttgtgcgaacaagggatactatttcgaaattcctagcatcggagccatccgtatcaatacacaagagtatctggacgtgctgggccggccaatggtccttgctggaaaagaagcaaagcaggttcagtggactaatgtgtacgaagacgccctgggtctcggcctggtagtgacaggaacactacccgtgttcaatctgactcaggatggccccggggaaaaaaagaatcaacttattctcggagtgatgggaattgatgtcgccttaaacgacatcaagcgcctcacacccaactacacactgggcgcgaatggttacgtttttgcaattgacctgaatggctacgtgctactgcatcctaatcttaagccacagacaaccaactttcgggagccagtcaccctcgatttcctggatgccgagctcgaagacgagaacaaggaagagattcgacggagcatgattgacggcaacaagggacacaagcaaatacggaccttggtcaagtcactggatgagagatacattgacgaagtcactagaaactacacatgggtgccaatcagatcgactaattattctctcggccttgtgctccccccttattccaccttctacttgcaggccaatttgtccgatcagatattgcaggttaaactgccgatctctaaactgaaggacttcgaatttcttctgccgagctctttcgagtcagagggccacgtcttcatcgcccctagggaatattgtaaagacctgaacgccagtgacaataacaccgagtttttaaaaaacttcatagagctgatggaaaaggtgacacctgacagcaagcagtgcaacaacttcctgctgcataatctgattctggacactgggatcacacagcagctggttgaacgtgtgtggcgcgaccaagatctcaacacatactcattgctggccgttttcgccgccaccgacggcggtattactcgcgtatttcccaacaaagctgccgaggattggaccgaaaaccccgagcctttcaatgccagtttctatcgccggtcgttagacaaccatggttatgtcttcaagccacctcatcaagacgcgcttctgcgaccactggaactggagaacgataccgtcggaattctggtctccacggcggtggagctgtccctgggcagacgcacgctgaggccagcagttgtgggagtgaaattggacctcgaggcctgggccgagaaattcaaagttctggcttccaatcgaactcatcaggatcagccacagaagtgtgggccgaacagtcattgcgagatggattgcgaagtcaataacgaggacttgctttgcgttctgatcgacgacggaggttttcttgtgttatccaatcagaatcaccaatgggatcaggtaggcaggtttttttctgaggtggatgcaaatcttatgctggctctgtataacaactcattttataccaggaaagaatcatacgattatcaggccgcctgtgctcctcagccccctggaaacttaggcgccgccccccggggcgtttttgtgccgaccgtcgctgatttcctgaatcttgcctggtggacatcagccgccgcgtggagtttgttccagcagctcctttacgggctgatttaccactcttggttccaggccgaccctgcagaggccgaaggctccccagagacgcgggagtcaagttgcgtgatgaagcagactcagtactactttgggtcggtcaatgcgtcctacaacgccataatagactgcggcaattgctcccgcttgttccacgcccagagactgactaataccaacttactgttcgtcgtggcagagaagcctctctgcagccagtgcgaggctggacgtctgctgcagaaggagacgcattgttgcccggctgatggacccgaacagtgtgaactggttcagagacccaggtaccgcagaggcccacatatctgttttgactacaacgccacagaagatactagtgactgtggtcgaggagccagttttcccccttcactcggggtgctagtgtccctccagctgcttctactgttgggcttgcccccccgaccccagccacaggtgctggtgcatgcatcacgaaggctgtag

SEQ ID NO: 181164 - DNA, 3453 bp, synthetic construct
  misc_feature 1..3453: note = Description of Artificial Sequence: Synthetic coding sequence
  source 1..3453: mol_type = other DNA
atggccgtgcccgcccggacctgcggcgccagccggcccggccccgcaaggaccgcccgaccttggcctgggtgcgggcctcaccccggcccagggaccaggcgacctacatctgggccacctcggcccctgtggttgctgctccctctattgccactgttggccgcgccgggagccagcgcttacagcttcccacagcagcatactatgcagcattgggcaagaagacttgagcaagaggttgatggcgttatgcggatttttgggggcgtgcagcagctgcgggagatttacaaggataaccgcaacctgtttgaagtccaagaaaatgagccacagaaactggtcgaaaaggtggccggcgacatcgaatctcttctcgaccggaaagtgcaggcattgaagcgtttagctgatgcggccgagaattttcagaaagcacacaggtggcaggataacatcaaggaagaagacattgtttattatgacgcaaaagcagacgcagaactcgatgatcccgagagtgaagacgtggagagggggtcgaaagcctcgacacttcgcctggactttatcgaggatcctaatttcaagaacaaggtcaattacagttatgccgccgtgcaaattcctactgacatatacaaaggcagcactgtgatcttaaacgagctcaactggactgaagccctcgaaaacgtgttcatggagaatcggaggcaagatccgacccttttgtggcaagtgtttggcagtgctactggagtaactaggtactaccctgctacaccgtggagggccccaaagaaaattgacttatatgacgtccgccgaagaccatggtatatccagggcgctagttcgcctaaagacatggttattatcgtcgacgtttccggctccgttagtggcctaactctgaagttaatgaagacctccgtgtgtgaaatgctagacaccttgtccgacgatgattacgtaaacgtggcatcattcaacgagaaggctcagccagtgagttgcttcacacatctagtgcaggcaaacgtccgaaacaagaaggtgtttaaggaggcagtccagggaatggtcgcaaaaggaactaccggctataaagcaggcttcgaatacgcctttgaccagctgcagaattccaacattactcgagcaaattgtaataagatgattatgatgtttactgatggtggagaggatagggttcaggacgttttcgagaaatataattggccaaaccgcacagtaagagtgttcacattttctgtgggccaacacaactacgacgtgaccccattgcaatggatggcttgtgccaacaagggctactattttgagattccctctattggcgctattaggattaatactcaggagtatctcgatgttcttggccgcccgatggttcttgcaggaaaagaagccaagcaggttcagtggactaatgtttacgaagacgccctgggattggggctggttgtaacaggtacattgcccgtgttcaacttgacacaagacggaccaggggaaaagaaaaatcaactgatcttaggagtgatgggcattgacgtcgcattaaacgatattaaacgccttacgccaaattatacattgggtgccaacggctatgtgttcgctattgatctgaacggttacgttctgctccatcccaacctcaaaccgcaaaccaccaacttcagggaacctgtcaccttggacttcctggatgcagaactggaggatgaaaacaaggaagagattaggcgatccatgattgacggaaacaaaggccacaagcagatcaggaccctcgtaaagtctctggacgaaaggtatatagacgaggttacgcgcaactacacctgggtgccaatccgtagcacgaactactcactcggcctcgtcctccctccatactctaccttctatcttcaggcgaacctgagtgaccaaatcctgcaggttaaactgcctatttcgaagttaaaagacttcgaattcttactcccgtcctccttcgagagcgagggtcacgtatttattgccccacgagagtattgcaaagatctgaatgcatcagacaacaacaccgaatttctgaaaaattttatcgagttaatggagaaggtgaccccagactctaaacagtgtaacaactttctgctacataacctgattcttgacaccgggatcacgcagcagcttgtcgagagggtgtggagagatcaggacctaaacacttactccctgctggcagtttttgccgcaacagatggcggaatcacaagggtgttccccaacaaggccgccgaggactggacagagaaccccgagccattcaatgccagcttttataggcgatcgctggataaccatggctacgtgttcaaacctcctcaccaggatgcattgcttagacccctggagctggaaaacgatacggttggcatcttagtgtcgaccgccgtggagctgagtctgggtagaaggacgcttcgtcccgccgtcgttggtgtgaaacttgacctagaggcgtgggcagaaaagtttaaagtgttggctagcaacaggactcatcaagaccaaccgcagaagtgcggtcccaacagccactgtgaaatggactgtgaggtcaataacgaagatctgctgtgtgtgcttatcgatgatggcggctttttggtacttagtaaccagaaccatcaatgggaccaggtgggacgattcttcagtgaggtggatgctaatctgatgctagccctgtataataactcattttacacgaggaaggagtcgtacgattaccaggcggcgtgcgctccacagcccccgggcaatctgggagccgcccctagaggggtgttcgttccaacagtcgccgacttcctgaatcttgcgtggtggacatctgcggccgcctggagtctgttccagcagctcctgtacggcctcatctatcactcatggtttcaggccgatccagctgaggcagaaggcagtcctgaaacgagggagtcctcttgcgtgatgaagcagacacaatattatttcggctcagtaaatgccagttataacgcgattatagattgcgggaactgcagcagattgtttcacgcccagcgcctcacaaatacaaacctcctgttcgttgttgcagagaaacctctgtgctcccagtgcgaggcaggccgactgctgcagaaggagacccattcagatggtcctgagcagtgcgagctggtgcagagaccacgttatcgccgcgggccacacatttgctttgactacaatgcaacagaggacacaagcgactgtgggagaggtgcttcatttcccccatcccttggggtgctcgtttccctgcaattgctactactgctaggactgccccccaggccacagccgcaggttctcgtgcatgcctctagacgactttag

SEQ ID NO: 181165 - DNA, 3276 bp, synthetic construct
  misc_feature 1..3276: note = Description of Artificial Sequence: Synthetic coding sequence
  source 1..3276: mol_type = other DNA
atggccggccccggcagcccccggcgggccagccggggcgccagcgccttgctggcagcagccctgctatacgcagccttgggcgacgtcgtgcggtcagagcagcagattccgctgtccgttgtgaagctttgggcatccgcgtttgggggagaaataaaatccattgccgccaagtactccggaagccagctcctgcagaagaagtacaaggaatacgagaaggacgtggccattgaggaaatcgacgggttgcagcttgtcaagaagctcgcgaagaatatggaagagatgttccacaagaaatccgaagccgtgaggaggctggtggaggcagccgaggaggcccatcttaagcacgaattcgatgccgaccttcagtatgaatacttcaacgccgttctgattaacgagagagataaggacggaaatttcctggagctgggtaaggagtttatcctggcgccaaatgatcactttaacaacctgcctgtcaatattagtttgtccgacgtgcaggtgcctacaaacatgtataataaggatccagccattgtgaacggggtatactggtctgaatcactgaacaaggtgttcgtcgacaattttgatagagatccttccctgatatggcaatattttggctccgccaagggcttcttccggcaatacccaggaattaaatgggagccagacgagaacggtgtgatcgcgttcgactgccgtaacagaaaatggtacatccaggccgcgacatctccaaaggacgtggtcattttagtggacgtaagcggatccatgaaaggactcaggctgactatcgcaaagcaaaccgttagttctattctcgatacacttggggatgatgacttctttaacatcatcgcatataacgaagagctgcactacgtggagccttgcctgaatgggaccttggtccaggccgatcgaaccaacaaagagcatttccgcgaacatctagataagttgttcgctaaagggataggaatgctcgacatcgccctgaacgaggcattcaacatcctgtccgacttcaaccacactggacagggctctatatgcagccaggccattatgcttattaccgacggtgccgttgacacctatgacactattttcgcgaagtacaactggcctgaccggaaggtgcgtatcttcacatatttgattgggcgggaagctgcctttgccgataatcttaagtggatggcttgtgccaacaagggcttttttacccaaattagcacgctggccgacgtgcaagaaaatgtcatggagtaccttcacgtgctgtcacgccccaaagtcatcgatcaggagcatgacgtggtgtggacggaagcttacatcgattctacgttgcctcaggcccagaagctcaccgacgaccagggaccagtcctcatgactactgtcgccatgccggtgttttctaaacaaaatgagacccggtctaagggaatcctcttgggagtggtggggacagacgtacctgttaaggagctgctgaagacaatccctaagtacaagcttggtatccatggttacgcatttgccatcacgaacaatggctatattctgactcacccggaactccgtcttctgtacgaggaaggtaagaaaagaagaaaaccgaattacagttccgtggatctgtcagaagtggaatgggaggacagggacgatgtgttacgcaatgctatggtcaaccggaaaaccgggaagttctccatggaggtcaagaaaaccgtggacaaaggaaaaagagtacttgttatgacaaacgactactattacacggacattaaaggaaccccctttagcttgggtgtggctttgagtcgcgggcacggaaaatatttctttcgtggcaatgtcaccattgaggaagggttgcacgacctggaacacccagatgtttccctggcggatgagtggtcctactgtaatacagaccttcatcccgaacaccggcacctgagtcagctcgaggccatcaagctgtacctcaaaggaaaagagccacttctccagtgcgacaaagagttaattcaggaagtcctgtttgatgccgtggtgtctgcaccgattgaggcctattggacctcactggcccttaataaaagcgagaactcagataagggggttgaagtggcatttctgggcacccgaacaggtttgagcagaataaacctgttcgtgggcgccgagcaactgactaaccaggacttcctgaaagcaggagataaggaaaatatttttaacgccgaccactttccactttggtatcgccgagccgctgagcagatccctggcagctttgtatactccatcccctttagtaccgggcctgtgaacaaatccaatgtagttacagcttctacgtccattcagctccttgacgaacggaagtcccctgtggtcgctgccgtcggaatccaaatgaaactagagttttttcaaagaaagttttggacggcgtcgagacagtgtgccagtctggacgggaaatgttcaatatcttgtgacgatgagaccgtcaactgctacctgattgacaacaacggcttcatcctcgtgtcagaggactatacccaaactggcgatttctttggcgagatcgagggggcagtgatgaataagctgctgactatgggttcattcaaaaggataactctctacgactaccaggccatgtgcagggccaataaggagtctagcgacggtgctcacggtcttctggacccttataatgccttcttatccgccgtcaaatggattatgacagagttagtcttgttcctagttgagttcaatttatgttcctggtggcactcggacatgaccgccaaggcccagaagctcaagcagactcttgaaccttgcgataccgaatacccagcatttgtgtccgagcgaactatcaaggaaacaacaggcaacatcgcgtgcgaggactgctcaaaatcatttgtgatccagcagatcccctcttcaaatctttttatggtagttgtggatagctcctgtctgtgcgaatctgtggcccccatcacaatggcgccaatagaaatccgctacaacgaatcgctgaaatgcgaaagactcaaggcacaaaagatcaggagaagacctgaatcctgccatggcttccacccagaagagaacgcccgagaatgcgggggcgccccatcattacaggcgcagaccgtgttactgttgctgccactgcttttgatgttgtttagtagatag

SEQ ID NO: 181166 - DNA, 2997 bp, synthetic construct
  misc_feature 1..2997: note = Description of Artificial Sequence: Synthetic coding sequence
  source 1..2997: mol_type = other DNA
atgggcgagctgcggcaggagcggagcaccgccctgcagcggctggtggaggcagctgaagaagctcacctaaagcacgaatttgatgccgatctgcagtacgagtatttcaacgcggtgttaattaatgagcgcgataaagatggtaactttttggaacttgggaaggaatttatccttgctcccaacgatcatttcaacaacctgcctgtgaatatttccctcagtgacgttcaggtacctaccaacatgtataataaggatcccgctatcgtgaatggggtgtattggagcgagtcgctcaacaaagtctttgtagacaatttcgaccgagatccaagtctgatttggcaatattttggctccgccaagggattctttcgccaataccccgggattaaatgggagccggatgaaaatggcgtgatagctttcgattgtcggaacaggaagtggtacatacaggccgcaactagcccgaaagacgtcgtgatcctggttgacgtgagcggttctatgaaggggctcaggcttacgatcgctaagcagactgtgtccagtatattagacactttgggggatgatgacttctttaatattattgcctacaatgaagagctgcactatgtggagccctgtctaaatggaacactggttcaggccgatcggaccaataaggagcactttcgcgagcatctcgacaagctgtttgccaaaggtatcggcatgctggacattgccctcaacgaagcctttaatatcctttcagattttaatcacacgggccaggggtcaatctgttcgcaagctattatgctcattaccgatggggccgtggatacttatgataccatctttgcaaagtacaactggcctgatcggaaagtcaggatctttacatatttaatcggacgcgaagcagctttcgcggataatctaaaatggatggcgtgcgcgaataaaggattcttcacccaaatctccaccctggcagatgtgcaagaaaatgtgatggaatatctccatgtgctgagccgacctaaagtaattgaccaggagcacgatgtggtgtggacagaggcatacatcgattccactgtgtcccaggcggagcagctcaccgatgaccagggacctgtgctgatgacaaccgtcgccatgcctgtgtttagtaagcagaatgagactcgctctaagggcattctgctgggagtggtggggactgacgtgccagttaaagaactgctgaagacaattcccaagtataaactcgggatccatgggtatgcctttgccattactaataacggatacatcctaacacaccccgagctacggctgctgtacgaagaggggaagaagcgacgcaaaccaaactactcttcagtagacctctctgaagttgagtgggaagaccgcgatgacgtgctgaggaacgcaatggtcaaccgcaagacaggcaaattctcaatggaagtgaaaaagaccgttgacaaggggaaacgggttctggtcatgactaacgactactactatacagatattaaaggcaccccgttttctctaggagtggcactttcgcggggccacgggaaatatttcttccggggtaatgtgactatcgaggaagggctgcacgatctggagcaccccgacgtgagcttagccgatgagtggagctattgtaacacggacctgcatcccgaacacagacacttgtctcagcttgaggcaataaaactctaccttaaaggcaaagagcccctgctgcagtgcgacaaagagctaatccaggaggtgctctttgacgccgtggtgtctgctcctattgaggcgtactggacctccctcgccctgaataaatccgaaaattccgacaaaggcgtagaggtggcttttttgggcaccagaacgggtctttctagaatcaatctgtttgtgggcgcagaacagcttactaaccaagactttcttaaagcaggagacaaagaaaacattttcaatgctgatcacttccccctgtggtacagaagagcagccgagcagataccgggatcctttgtgtactccatccctttttcgaccggccccgttaacaagtctaacgtggtcactgcctccacatccatccagctgctcgatgagcgcaaaagtcccgtcgtggccgctgtgggcatccagatgaagctggagttttttcagcgcaagttctggacagcatcacgccaatgcgctagtctggacgggaaatgctcaattagctgtgacgacgagactgtgaactgctacctcattgataataatggatttatcctcgtcagcgaggactacacccagactggagacttctttggagagatcgaaggtgccgtgatgaacaagctgctcactatgggctcatttaaacgcataacactgtacgactatcaggcaatgtgccgggccaacaaagaatcctctgacggcgcccacggcctgctagacccttataatgcctttctcagtgcggtgaaatggataatgaccgaactcgttttgtttctggtggagttcaatctctgtagttggtggcattccgacatgactgcgaaagcgcagaagttgaaacagaccctcgagccctgtgataccgagtatccagcctttgtgtctgagagaactattaaagagacgacaggtaatattgcctgtgaagactgctcaaagtctttcgtgatacagcagatcccttcttcaaaccttttcatggtggtagtggatagttcctgtctctgtgagtccgttgcgcccataactatggcccctatagagatttcccagcataacgagagcctcaagtgtgagaggttgaaagctcagaagattcggcgtaggcccgagagttgccacggattccaccctgaagaaaatgccagggagtgcggcggggccccttcacttcaggctcagacggtgttactgctgcttcctctgctcctaatgctgtttagccgttag

SEQ ID NO: 181167 - DNA, 3276 bp, synthetic construct
  misc_feature 1..3276: note = Description of Artificial Sequence: Synthetic coding sequence
  source 1..3276: mol_type = other DNA
atggccggccccggcagcccccggcgggccagccggggcgccagcgccctgttggccgccgctctcttgtacgccgcacttggggacgttgtgcggagtgaacagcagatccccctgagtgttgtgaaactgtgggcctctgcatttggcggtgagataaagtctatcgcggccaagtacagcggatctcagcttctgcagaaaaagtacaaggaatatgagaaggatgtggcgatcgaagagatagacgggctgcaattggtgaaaaaattggccaaaaacatggaagaaatgtttcacaaaaaatcggaggccgttcgccgcttggtggaagctgctgaggaagctcatcttaaacacgagttcgacgccgacctgcagtacgagtacttcaacgcagtactgattaacgaaagggacaaagatggcaactttctggagcttgggaaggaatttatcttagcccccaacgatcatttcaacaatctgcctgtcaatatcagcctgagcgacgtgcaagtgccaaccaacatgtataataaggaccccgccatcgtcaacggtgtgtattggtctgagagtttgaacaaagtgttcgtggacaattttgaccgcgaccctagcctgatttggcaatatttcggctcagccaagggcttcttccgtcagtatccgggaattaagtgggagccagatgaaaacggtgtcatagccttcgactgccgcaatcgaaagtggtacatacaggccgccacatcaccaaaagacgtcgtgatcctggtggatgtgtcagggagcatgaagggactccggcttaccatcgcaaagcagacagtttcttcaattctggacactttaggcgatgatgattttttcaacattatcgcatataatgaagaacttcattacgtcgagccatgcttgaacgggaccctcgtccaggccgaccgaaccaataaggaacacttccgcgagcacctggataagcttttcgctaaggggattggcatgctggatatcgccttaaatgaagccttcaacatcctgtctgacttcaaccacaccgggcagggcagcatttgttctcaggctatcatgctgatcaccgatggggcagtcgatacttacgataccatcttcgctaaatacaattggccggacagaaaagtgaggatcttcacatatcttatcggcagagaggcagccttcgcggacaatctcaagtggatggcatgcgctaataaagggtttttcacgcaaatcagtacattagcagacgttcaggaaaacgtcatggagtacctgcacgttctctcgcgacctaaagttatcgatcaggagcatgatgtggtatggactgaggcatatatcgactcgaccctgccgcaggcccagaaactgacggatgaccaaggaccggtcttaatgacaaccgtggcaatgccggtgttttctaaacagaatgagaccaggagcaagggaatcctgctcggagttgtgggaaccgatgtgcctgtaaaagaactgttgaagacaattccaaagtacaagctggggattcacggttacgctttcgcgatcacaaataatgggtacatcctgacccaccctgaactccggctcctgtacgaggagggcaagaaaaggagaaagccaaattactcctccgtcgacttgtcagaagttgaatgggaagacagagacgacgtcctgcgtaacgcaatggtcaatcgaaaaacgggtaagtttagcatggaagtgaagaagaccgttgataagggcaagcgtgtactggtgatgacaaacgattactattataccgatatcaagggcaccccattttcgctaggagtggcactgtccagagggcatggcaagtatttctttcgagggaatgtaaccatcgaagaggggttacatgacctggaacatcccgacgtgtcattggcagatgagtggtcatactgtaacactgacttacacccagaacatcgccacttgtctcaactggaagcgattaaactgtacctgaagggtaaggaacctctgcttcagtgtgacaaggagctgattcaggaggttctgttcgacgccgttgtgtccgcacctatcgaagcttattggaccagcctggctttgaataagtccgagaactctgacaaaggcgtcgaggtggcgttcctgggcaccaggaccggcctctctcggatcaatctgttcgttggggcagagcagctgaccaatcaagactttctcaaggccggcgacaaggaaaacatttttaacgcagaccacttcccactctggtatagacgcgccgctgagcagatccccggatctttcgtgtatagcattcccttctcgaccggacctgtgaataaaagcaacgtggtcacagcttctaccagtatccaacttcttgatgaaagaaagtccccagtcgtggccgccgttggcattcaaatgaagttggaattttttcagcggaaattttggacggcgagtcgtcaatgcgcatcacttgacggtaagtgtagcatttcttgcgatgatgagacagtgaattgttacctcatagacaacaacggtttcatcttggtgagtgaagattatacacaaacgggggacttctttggcgaaatagaaggggcggttatgaataagttactgaccatgggaagcttcaagagaattaccctctatgactaccaggccatgtgcagggctaataaagagtcatctgacggcgcccacggcttactggacccgtacaatgcatttctgtccgccgtgaagtggattatgaccgagcttgtgctattcttagtggaattcaatctctgttcttggtggcattcggatatgacggctaaagcccagaagctgaaacagacattggaaccatgcgatactgaataccccgccttcgtgtctgaacgtacaatcaaagaaactactgggaacatagcatgtgaggattgtagtaaatccttcgtaattcagcaaatcccgtcttcgaacctctttatggttgtagtggactcttcttgtctgtgcgagagtgtggctcccattaccatggcacccatcgaaatacggtataatgagtcattgaagtgcgaaagactgaaagcccagaaaattagaaggagaccggaaagctgccacggctttcacccagaggagaatgcccgagagtgtggtggggcccccagcctgcaagcccaaacagtgctgttgctcctgcccctactgcttatgctgttcagtcggtag

SEQ ID NO: 181168 - DNA, 1557 bp, synthetic construct
  misc_feature 1..1557: note = Description of Artificial Sequence: Synthetic coding sequence
  source 1..1557: mol_type = other DNA
gagatcctgttccaccagatgcagaaccagatcaagcggctggtggaggcggccgaggaggcacatttgaagcatgaatttgatgcagacctgcaatatgagtattttaacgctgtactgatcaatgagcgcgataaagatggcaacttcctggaactggggaaggaattcatcctggccccgaatgaccactttaataacctgcctgtcaatatcagtctgtccgatgtacaggtccctaccaatatgtacaataaggatcctgccattgttaacggggtgtattggtccgaaagcctgaataaggtgttcgtggacaacttcgacagagacccttccctcatctggcagtatttcggaagcgctaaaggtttcttccgccagtatcccggaattaagtgggaacccgatgaaaacggagtgatcgcctttgattgtagaaaccgcaaatggtatattcaggccgctacaagccctaaagatgtggtgattctcgtggacgtgtccggaagcatgaagggattgcgactaaccatcgcaaagcagacggtcagcagcatcctggatactctgggggatgatgacttcttcaacattatcgcctataacgaggaactgcactatgtcgagccctgtctaaatggcactctggtgcaggccgacagaactaataaagaacactttcgtgaacatttggataaactgtttgctaagggcattggcatgctagacatcgccctgaacgaagccttcaatattctgtccgattttaaccacactggtcagggaagcatctgctcacaggcaatcatgctgattactgacggtgccgtcgacacatacgacacgatcttcgccaagtataactggccagatagaaaagtgcgaatatttacttatttgatcggaagggaggcagcctttgcggacaatttaaagtggatggcttgcgccaacaagggtttctttactcagatctccaccctcgctgatgtccaggagaatgtgatggagtacttgcacgtgctgtcacgccccaaagtcattgatcaggagcacgatgtggtttggacagaagcctacattgactctacactcacagatgaccagggacctgtcctgatgaccactgtcgctatgccagtgttttcaaagcagaatgagacacggtctaaagggattctgctgggggtcgtcggaactgacgtccccgtaaaggaattgttgaaaaccattccaaagtacaagttaggcatccacggctacgccttcgccataacgaataacggatacatcctaacccaccctgagctgcggctgctgtacgaggagggcaaaaagagaaggaagcccaattattcctcagtggacctctctgaggtcgaatgggaagatcgagacgatgtcttgcgaaatgctatggtcaatagaaagaccgggaagttcagcatggaggttaaaaagaccgtggacaagggctttcgctgtggcgcgtttcagcggtcttgggaaattttcctgcctagagagtgcaatcacaggcgtcgtcccgcttag

SEQ ID NO: 181169 - DNA, 3276 bp, synthetic construct
  misc_feature 1..3276: note = Description of Artificial Sequence: Synthetic coding sequence
  source 1..3276: mol_type = other DNA
atggccggccccggcagcccccggcgggccagccggggcgccagcgccttgctcgccgctgctttactctacgccgcactgggggatgttgtgcgtagcgagcagcagatccccctgagtgtggtgaagctgtgggcttcagcttttggaggcgagattaaatctattgccgccaagtatagtggaagtcagcttctgcagaaaaagtacaaagagtatgaaaaggacgttgcgatcgaggagattgatggtctgcagctggtcaagaagctggccaagaacatggaagagatgtttcacaagaagtctgaagcagtgcggcggctggtggaggctgccgaggaagctcacctgaagcatgagtttgatgcagacctccagtacgagtattttaatgccgtgctgatcaatgaaagagacaaggacggaaatttcctggaactggggaaggaatttatcctggccccaaatgatcactttaacaatctcccagtaaacatatcactctccgatgtgcaggtcccaaccaatatgtataacaaagatcccgcaatcgtaaatggcgtttactggtctgagagcctgaacaaagtgtttgtggacaattttgatagagatcccagtctgatctggcagtattttggtagcgctaaggggttcttcagacagtaccccgggatcaagtgggaaccagatgagaacggtgttatcgccttcgactgccgaaacagaaagtggtacattcaggcggcaacttcacccaaagacgtcgtgattcttgtagacgtgagcggaagcatgaaagggcttcggttaacgatcgccaagcagactgtctctagtatccttgataccctcggtgacgatgattttttcaacattattgcatataatgaagaattgcactacgttgagccctgtctgaacggaactctcgttcaggctgatcggaccaacaaagagcacttcagagagcatctcgataagctgttcgctaaaggcatcggaatgttagacatcgcactgaatgaggccttcaacatcctgtccgattttaaccacactggacagggcagcatatgttctcaggcaatcatgctgattaccgatggggcggtcgacacatacgatacgatctttgccaagtataactggcccgaccgcaaggtaaggatcttcacatatctgatagggagggaggcagccttcgccgataatcttaaatggatggcatgtgcaaacaagggattctttacacaaatctccacgttggctgacgtgcaggaaaatgtcatggagtacctccatgttctcagcagacctaaagtcattgaccaagagcatgacgtagtctggacggaggcctatatcgactcaacactcccccaggctcaaaaattgacggacgatcaaggtccggtgttgatgaccaccgttgcgatgccagttttctcaaagcagaacgaaaccaggtctaagggaatcctcctgggtgtcgtcggaaccgacgtgccagtgaaagaactgctaaaaacgatacctaaatacaaattgggcattcatgggtatgcatttgccattactaacaatggttacatcttgactcacccagagctgcgcttgctttacgaagaggggaagaagcggagaaagcctaactatagttctgtcgacctgagcgaagtcgaatgggaggatcgtgacgacgtactgagaaacgccatggtgaaccgtaagactggaaagttcagtatggaggtgaaaaagactgtggacaaggggaaacgggtcctcgtgatgacaaacgattactactataccgatatcaaggggacaccattctccttaggagttgcactaagcaggggccacggtaagtatttctttcgggggaatgttactatcgaggagggacttcatgatttggagcaccctgatgtctccctcgcagacgagtggagttattgcaatacagaccttcatccagaacatagacacctcagtcagctggaggctatcaagctttacctcaaggggaaggagccactgctgcagtgcgataaggagctaatccaggaagtactctttgacgcagtggtcagcgctccaatagaggcttactggactagtttagccttaaataagtccgagaactccgacaagggcgttgaggtggcgttcctgggaactagaactggtttgagtagaattaacctgttcgtgggcgccgaacaactgactaatcaagactttctcaaggccggggacaaggaaaatattttcaatgccgatcacttccctctgtggtacagaagggccgccgaacagattccaggcagcttcgtttatagcatcccctttagtacaggcccagtaaataaatcaaacgtggtcactgcttcaacatctatccaactgctggacgaaaggaagtccccagtggtagctgccgtgggtatccagatgaagctggagttctttcaaagaaagttctggacagcgagtcgccagtgtgcaagtctggatggtaaatgctccatctcctgtgacgatgagaccgtgaactgttacctcatagacaacaatggctttatcttagtcagcgaagattatacccagactggagatttttttggtgagattgagggagccgttatgaacaagctactgacaatgggcagctttaagcgaatcaccctgtatgactatcaggctatgtgtagagctaacaaggagtcctctgatggcgcacacggtctattggatccttacaacgcttttttgtctgcggtgaaatggataatgactgagctggttctgttcctagtagaattcaatctgtgcagctggtggcactctgatatgacagccaaggcacagaaactgaagcagaccctggagccctgtgatactgagtacccagcattcgtttccgagagaacaatcaaggaaactacgggcaacatagcctgcgaggattgtagcaaatcattcgtcattcagcagatcccctcctcaaacctcttcatggtcgtcgtggactcatcatgtctttgcgagtcagtagcacctatcaccatggcacccatcgagattaggtacaacgaaagccttaaatgcgagcggctcaaagcgcaaaagatcagaaggaggccagagtcctgccacggctttcaccctgaggaaaatgctcgagagtgcggcggagccccgtcactgcaggcacagaccgtgttactgttattaccacttctattaatgttgtttagcaggtag

SEQ ID NO: 181170 - DNA, 1578 bp, synthetic construct
  misc_feature 1..1578: note = Description of Artificial Sequence: Synthetic coding sequence
  source 1..1578: mol_type = other DNA
atggaggagatgttccacaagaagagcgaggccgtgcggcggctggtggaagcggctgaagaggctcatctcaaacatgaatttgacgcggatctccaatacgagtatttcaacgcagtcctgatcaacgaacgcgacaaggatggcaacttccttgagctgggcaaagaatttatactggcgcccaatgaccacttcaacaacctcccagtcaacattagcctgtctgacgtacaggtgcccacaaatatgtataacaaggaccccgccatcgtgaatggagtctattggtccgaaagcctgaataaagtgttcgttgataattttgaccgagatccctctcttatatggcagtacttcgggtccgctaagggcttctttcgccaatatcccggaatcaagtgggaacctgatgagaacggagtgatcgccttcgactgtcggaacagaaaatggtacatccaggccgccacaagtccgaaagatgtcgttattctagttgacgtgtctgggagtatgaaagggttgcgattaacgatcgccaaacagacggtgtcttctatcctcgatacactcggagacgatgattttttcaatatcattgcttacaacgaggaattacactatgtggaaccatgccttaatgggacacttgtgcaggctgatcgcacaaacaaggaacatttccgggaacaccttgacaaacttttcgccaaaggtatagggatgttggatatcgccttgaacgaagccttcaacatcttgtccgatttcaaccacaccggtcagggatccatttgcagtcaggccattatgctgatcactgatggagcagtggatacatatgacaccatcttcgctaagtataactggcccgaccgtaaggttaggattttcacatatctgattggtcgagaagctgcattcgctgacaatctcaagtggatggcctgcgccaacaaaggcttctttacccagatttccacccttgctgatgttcaggagaacgtgatggaatacctgcatgtgctgagccggccgaaggtgatcgatcaggagcacgatgtggtgtggaccgaagcatatatcgattccacccttccgcaggcccagaaactgacagatgatcagggcccggtgttgatgacaactgtggccatgcctgttttttcaaagcagaacgaaaccaggagcaagggaattttattaggggtggtgggaacggacgtgcctgtgaaggagcttttgaaaaccattcctaaatacaaactcgggatccatgggtatgccttcgccattactaacaatggctatatactgacccaccctgaactccgactgctctatgaagagggcaaaaagcgccgaaagccgaattacagctcagtcgatttatctgaagtcgaatgggaggaccgcgatgacgttctcaggaacgccatggtgaatcgaaaaactggcaaatttagtatggaggttaagaagacggtcgacaaggggttcagatgtggtgcctttcaacgatcctgggagatcttcctgcctcgagagtgtaaccacaggcgcaggccagcctag

SEQ ID NO: 181171 - DNA, 2994 bp, synthetic construct
  misc_feature 1..2994: note = Description of Artificial Sequence: Synthetic coding sequence
  source 1..2994: mol_type = other DNA
atggaggagatgttccacaagaagagcgaggccgtgcggcggctggtggaggcagccgaggaagcacacctcaagcatgagttcgacgcagatctacagtatgaatattttaacgctgttctgattaacgagagggataaagacgggaatttcttggagctgggtaaggagttcatcctggctcccaacgatcatttcaataaccttcccgtgaatatttccctttcggacgttcaggtccccactaatatgtacaacaaggatccggctatcgtgaatggagtctattggagcgagagtctgaacaaggtgtttgtagacaactttgacagagacccatccttaatttggcagtattttggtagcgcaaaaggtttctttcggcaatatcccggaataaagtgggaaccagacgagaatggagtgatcgctttcgactgtcgcaacagaaagtggtatattcaggcagccacatcccccaaggatgtcgtgattttagtggatgtcagcggcagcatgaaaggactgcgcttgactatcgccaaacagacggtatcgtcaatcctggatactttgggggatgacgacttctttaacattatcgcttataacgaggagctgcactatgtcgagccctgtcttaatggtacgttggtccaggcagacagaactaacaaggagcacttccgggaacatctcgacaagttgtttgctaaaggtataggaatgttagatatagctctgaatgaagcattcaacatcctgtcggacttcaatcatactgggcagggatcaatttgctctcaggcaatcatgctgatcaccgatggcgccgtcgatacatatgacaccattttcgccaagtacaactggcctgacagaaaggtgcgcatcttcacttacctcattgggagagaagctgcgttcgcggataacctaaagtggatggcctgtgctaacaagggcttttttacccagatcagcacactagctgacgtgcaggaaaacgtgatggaatacctgcacgtgctcagccgacccaaagtcattgatcaggagcatgatgtggtgtggacagaggcgtacattgattctacactgcctcaggcccagaagctaacagacgatcaaggtccagtgctgatgaccacagtagccatgcctgtgttttctaaacagaatgagacccgctcaaaggggatccttcttggagtggtggggactgacgtgcccgtgaaagaacttttaaagaccattccgaaatataagctagggatccacggttacgctttcgccatcaccaataacgggtacatcctgacccatcccgagctcaggctgctgtacgaggagggaaagaagagacggaaacccaactattctagtgttgatctctctgaagtggaatgggaggacagggatgacgtcctgcggaacgctatggtaaatcgcaagactggtaaattctctatggaagtgaagaagacagtggataaggggaagcgcgtgctggtgatgacgaacgactactattatacagatattaaaggaacccccttctccctgggggttgccttgagcagagggcatggtaaatattttttccggggaaatgtgacaattgaggagggcctgcatgatctggaacatccagatgtaagtctggctgacgaatggtcttactgcaataccgacctccaccccgagcatcggcacctgtcacagttggaagcgatcaaactctacctgaaaggaaaagaacctctacttcaatgtgataaagaactgatccaggaggtgctgtttgacgcagtcgttagtgcaccgattgaagcatactggaccagtctcgccctcaacaaatccgagaacagcgataagggtgtggaagtggcgttcctaggaacaaggacaggcctctcaaggatcaacctgtttgtgggggccgagcagctgactaaccaggacttcctaaaggcaggtgacaaggaaaatattttcaacgcagaccactttccactgtggtatcgcagggctgccgagcagatcccgggtagcttcgtgtacagcataccatttagcactggacctgttaataaatcgaatgtggtgacagcgtctacatctattcaattacttgacgaacgaaaaagccctgttgttgccgcggtgggtatccagatgaagctcgaattcttccagcgcaagttttggaccgcttccaggcagtgcgcttctctggatgggaagtgcagcatatcctgcgacgacgagactgtgaactgctatctaatcgataataacgggtttatccttgtgagcgaggattacacacagaccggagatttctttggcgagatcgagggcgccgttatgaataaactgcttacaatggggagctttaagcggatcacactctatgattaccaggctatgtgtagagccaacaaagagtcatctgacggagcgcacggtttgctggatccctacaacgcattcctctctgcggtgaaatggattatgaccgaattggtgttgtttctggtagaattcaatctgtgctcatggtggcacagcgatatgacagccaaagcccaaaagttaaagcagaccctggaaccttgtgacactgagtatccagcattcgtgtctgaaagaaccatcaaggagaccacaggcaatatcgcttgcgaagactgctccaagagctttgtcattcaacagattccgagctccaacttgttcatggttgtggtcgactcaagctgtctctgtgagtcagtcgcacccatcacaatggcccctattgagattaggtataatgaatcccttaagtgtgaaagactcaaggcccaaaaaattcgcaggcgacccgagagctgccacggttttcaccctgaagagaatgcccgggagtgtggaggggccccctctctgcaggctcaaacagttctccttctgctaccacttcttctgatgctcttcagcaggtag

SEQ ID NO: 181172 - DNA, 381 bp, synthetic construct
  misc_feature 1..381: note = Description of Artificial Sequence: Synthetic coding sequence
  source 1..381: mol_type = other DNA
atggaggagatgttccacaagaagagcgaggccgtgcggcggctggtcgaagcggccgaggaggcccacctgaagcacgagtttgacgccgacctgcagtacgagtatttcaacgccgtactgattaacgagcgtgataaagacggtaacttcctcgagctgggcaaagaatttatcttggccccaaatgaccacttcaacaacctgcccgtcaacatctcattgagcgatgtccaggtgcctaccaacatgtacaataaggaccctgctattgtgaatggagtctactggtctgagagtctgaacaaggtcttcgtagataacttcgacagagaccccagtctgatttggcagtatttcgggagtgctaaaggtttttag

SEQ ID NO: 181173 - DNA, 2925 bp, synthetic construct
  misc_feature 1..2925: note = Description of Artificial Sequence: Synthetic coding sequence
  source 1..2925: mol_type = other DNA
atggtgtgcggctgcagcgccctgctgcccctgcccaacccccggcccaccatgccagctacacctaacttcctggctaatcctagctcctcttccaggtggattcccttacagccaatgccggtcgcctgggcctttgttcagaagaccagtgctctgctgtggctcctgctgctgggtacttccctgagccctgcctggggtcaggcgaagatacctctcgagactgtgaagttgtgggcagatacgttcggaggagatctttacaataccgtgaccaaatattcaggctcattgctgctccagaagaaatacaaggatgtggagtcctctttaaagattgaagaggttgacggacttgagcttgtcaggaagttctccgaagacatggagaatatgctgcgtaggaaagtagaagccgtgcagaacctggtggaagccgcagaagaagctgatttaaaccatgagttcaacgagtctctggtgttcgattactacaattctgttctgatcaacgagcgtgatgagaagggcaatttcgtggagcttggcgccgagttcctgctcgagagcaatgcccatttctccaatctgcctgtaaatacttcaatctcctcagtgcaattaccgacgaatgtgtacaacaaggacccggatattctgaacggcgtctatatgtcagaagcactgaacgctgtgtttgtggagaactttcagagggatccaacacttacgtggcagtattttgggagcgcaacagggtttttcagaatctatcccgggattaagtggacacctgacgagaacggggtgatcacatttgattgcaggaacagagggtggtacattcaggccgctaccagccctaaagacatcgtcattttggtcgacgtctcagggagtatgaagggactgagaatgacaattgccaagcataccataactactattctagacaccttaggagaaaacgactttattaatattatcgcctataacgactatgtgcactacatcgagccctgcttcaaaggaatcctcgtgcaggctgaccgcgacaatagggagcactttaagctcctggtagaggaattaatggtcaaaggcgtgggggtggtggaccaagctctcagggaggcctttcaaatactcaaacaattccaggaggctaagcagggaagcctctgtaaccaggcaattatgttaatctccgacggggcagtggaggactacgagcccgtatttgaaaaatataactggcccgattgcaaggtgcgggtgttcacatatcttatcggacgagaagttagttttgctgataggatgaaatggatcgcttgtaataacaagggatattacacccaaattagtaccctggctgacactcaggagaacgttatggagtatctccacgttctgagtcgccccatggtaatcaaccacgatcacgacattatctggacagaggcctacatggattccaagctgctgagctctcaggcccagtccctgacccttttgactacagttgccatgccagttttctccaaaaaaaatgaaacacgcagccacggaattctgctgggcgtggttgggtcagatgtggccttgcgggaattgatgaagctcgccccgcgttacaagctgggggttcatggctacgcttttcttaacacaaataacgggtatattctgtcccatcctgatctgcggcctttatatcgcgaagggaagaagctgaagcctaaacctaactataactctgttgatctgtctgaggtggagtgggaggatcaggccgagtctttgagaacagccatgatcaatagagaaacgggcactctgagcatggatgtcaaagtgcccatggataaaggtaagagagtgttgttcctgacgaacgattacttctttactgatatcagcgatactcccttctctctgggcgtggttctctcacgagggcatggggaatatattctcctggggaatacctcggtggaagaagggctgcacgatctattacaccccgatctagcactggccggggactggatctactgcatcaccgatattgatcccgaccacagaaaactcagccagctggaagcaatgatccgctttttgacgcggaaagacccagaccttgagtgtgacgaagaacttgtcagggaggtcttgtttgatgccgtagttaccgcgcccatggaggcgtactggacggctctggctctgaacatgtctgaagagagtgagcacgtggtggacatggcattcctggggacgcgggccgggctgctgcgctcttctctcttcgttgggagcgagaaagttagcgacaggaaatttctgactcccgaggacgaagcctctgtgtttacgctggatagatttcctctctggtaccggcaggcctcagagcatccagcaggcagcttcgtctttaatctccgctgggcagaggggcctgagagtgctggtgagccgatggtggttactgcttcgactgccgtggccgttacagtggacaaaaggaccgccatcgctgctgcagcgggtgtgcagatgaagctcgaatttctccagagaaagttttgggcagccacaagacaatgctcaacagtcgatggaccctgcacacagtcctgtgaagactctgacctagactgttttgtgatcgacaataatggattcatactgatcagcaaacgatcgagagagactggcagatttctgggcgaggtcgacggggctgtcctgacccaactgcttagtatgggggtgtttagccaggtgactatgtacgactaccaggccatgtgtaagcccagctcccaccatcactcagcggcccagcccctcgttagccctatcagcgcatttttgactgcgacaaggtggttgcttcaggagttggtcctgtag

SEQ ID NO: 181174 - DNA, 3414 bp, synthetic construct
  misc_feature 1..3414: note = Description of Artificial Sequence: Synthetic coding sequence
  source 1..3414: mol_type = other DNA
atggtgtgcggctgcagcgccctgctgcccctgcccaacccccggcctacgatgccagcaaccccaaattttctggcgaaccccagctcttcatctcggtggatccctctccagcccatgcccgtggcatgggcatttgtgcagaaaacctccgcactgttgtggctgctgctcctgggcacatctctctcgcctgcatggggccaagccaaaatccccctggagacagtgaagctctgggctgacacttttggcggggatctgtataacacggttacaaagtattctgggtcccttttgctccaaaagaagtacaaggacgtggagagttctctcaagattgaagaggtagatgggcttgaactcgtgaggaagttttctgaggacatggagaatatgttgcggcgcaaagttgaagccgttcagaacctggttgaggccgcagaagaggccgaccttaaccacgagtttaatgagtctcttgtgttcgactactacaatagtgtcctgatcaacgaacgggatgagaagggaaatttcgtggagctaggagcggagttcctgttagaatctaacgcgcactttagcaatctgcccgtaaatacaagcatcagctcagtccagctgcccacaaatgtatacaacaaggatcccgacatcctcaacggggtgtatatgagcgaggcgctcaacgccgtcttcgttgaaaattttcaacgggatcccaccttgacatggcagtatttcggctctgccactgggttcttcaggatttacccaggaattaagtggactccggacgagaacggagtgatcacgttcgattgtagaaaccgcggctggtatatccaggccgccaccagcccgaaagatatagtcattttggtcgatgtctccggctccatgaaaggcctccggatgaccatcgccaaacacacaatcaccaccattcttgatacgctgggcgaaaatgacttcattaatatcattgcgtacaacgactacgtccattacatagaaccttgttttaaaggtatcctagtccaggctgatcgggataaccgggagcatttcaaactgctggtagaagagctgatggtgaagggtgtgggagtggttgatcaggctctgcgtgaggccttccagattctgaagcagtttcaagaggccaagcaaggatctctgtgtaatcaggctattatgcttattagcgatggggctgtagaggattacgaaccggtattcgaaaaatacaattggcctgattgcaaagtacgtgtatttacatatctcattgggagggaggtctcattcgcagaccgtatgaaatggatcgcatgcaataataagggttactatacacagatctccactctggcagatacacaggaaaacgttatggaatatttgcacgtactctctcggcccatggtgatcaaccacgaccatgacataatttggactgaggcatatatggatagtaagctcttgtcgtcgcaggctcagtcactgacactcctaacaactgttgcaatgccagttttcagtaaaaaaaacgaaacacgtagtcatggcatactgttgggcgttgtcggaagcgacgttgccctgagggagttgatgaagttagctccaagatataaactcggcgtccatgggtacgcgttcctgaacaccaacaatggctacatcctgagccatcctgatctgaggcctctctatcgggaggggaaaaagctcaagccaaaaccaaattacaacagcgtcgacctttcggaggttgaatgggaggaccaggctgagtcactgcgtacagcaatgatcaatcgtgaaacaggaaccttatcgatggatgttaaagtgccaatggataaaggcaaaagggtcttattccttacaaatgactatttcttcacagacattagtgacaccccctttagcctgggcgtggtactctcccgcggtcacggagaatatatcttgctgggaaacaccagtgttgaggagggcctgcacgacctcctgcatcctgaccttgcattggctggcgactggatttactgtatcacggatattgacccagaccacaggaaacttagtcaattagaggcgatgattagatttctcacgcggaaggatcccgatctcgaatgtgatgaggaactagttcgagaggttctgttcgacgctgtggttaccgccccgatggaggcttattggaccgcacttgccctgaatatgtccgaggaaagtgagcacgtggtcgatatggcatttctcgggacccgggctggtctcctgcggtcatcactctttgtcggatctgaaaaggtatccgatcgtaagtttctaacaccggaggatgaggccagcgtgttcacactcgaccggttccccttgtggtatcgccaagcatccgaacatcccgctgggtcgtttgtctttaacctcagatgggccgagggccctgagtcggccggcgaaccaatggtagtgactgcctctaccgcggtggccgttaccgtagataaacggacggcaattgcagctgcggccggagttcagatgaaacttgagttccttcagcgcaagttctgggcggctactcgccagtgtagcacagtggacggtccatgtacacaatcgtgtgaagactcagatctggattgcttcgtgatcgataacaacgggtttatccttatctccaagcggtccagagaaactggccgttttttaggcgaggtggatggggccgtcctcactcagttgctgagtatgggagtcttttcgcaggtaaccatgtatgattatcaggccatgtgcaagccatctagccaccaccattcagctgcccagcctcttgtcagccccatctcagcttttctgactgctacgcggtggttgctccaggagttagttctgtttctgctcgaatggtccgtgtggggttcttggtacgacaggggagcggaggcaaaatctgtgttccatcactcccataagcataaaaagcaggaccctttacagccgtgcgacaccgagtaccctgtgttcgtttaccagccagcaattcgcgaggcaaacggtatcgttgagtgtggtccctgtcaaaaggtgtttgtggtgcaacaaataccgaactccaacctgctgttgcttgtgacggatcccacctgcgattgctctatttttcctccggtgcttcaagaagccactgaggttaagtataacgctagcgtcaaatgtgacagaatgaggagtcagaagctccggaggcgtcctgactcttgccacgcatttcacccagaagagaatgcccaggactgtgggggagcttctgacacctccgcaagcccccctctgttactgttgcccgtctgtgcttgggggctcctgccccaactgctgaggtag

SEQ ID NO: 181175 - DNA, 3222 bp, synthetic construct
  misc_feature 1..3222: note = Description of Artificial Sequence: Synthetic coding sequence
  source 1..3222: mol_type = other DNA
atggccgtggccctgggcacccggcggcgggaccgggtgaagctgtgggctgataccttcggcggcgacctgtacaacaccgttacaaagtattcgggaagcctgctcctgcagaagaagtacaaggacgtagaatcttccctgaagatcgaagaggtggacggcctcgagttagtaagaaagttttccgaggacatggaaaacatgttgagacgtaaggtggaagcagtgcaaaacctcgtcgaggcggccgaagaagcagacctgaatcacgagttcaacgagagcttggttttcgactattataacagcgtcctcatcaacgagcgagatgaaaagggtaacttcgtggaattgggcgccgaatttctcctggagtctaacgcccacttctccaacctaccagtcaatacgagcatctctagtgtacagctgcccactaacgtctataataaagacccagacatcctgaatggcgtgtacatgagcgaggccctaaacgccgtgttcgtcgagaacttccaacgagatccaaccctgacctggcagtacttcggatcagccacagggttctttcggatctatccaggtatcaagtggacccccgatgagaacggagtcatcactttcgattgcagaaaccgtggatggtatatccaagcggccaccagtcctaaggatatcgtgattcttgtggacgtcagcgggtcgatgaaagggttgagaatgacaatagcaaagcacacaatcaccaccatcctggatacccttggtgaaaacgacttcatcaacattatcgcatataacgattatgtgcactacattgagccatgttttaaaggcatcttggtgcaggccgaccgtgataaccgggaacatttcaaactgttggtggaagagctgatggtcaagggtgtgggtgtcgtcgaccaggcacttagggaagccttccagatcctcaagcaattccaagaggccaagcagggcagtctgtgtaatcaggcaatcatgctaatctcagacggagcagtggaggactatgagcccgtctttgaaaagtataattggccggactgcaaagttcgcgtctttacgtatttgatcggacgcgaggtttcgtttgccgacaggatgaagtggatagcgtgcaataacaaaggatattacacgcagatcagtaccctggctgacacgcaggagaatgtgatggagtacttgcatgttctttccaggcccatggtgattaaccacgaccacgacattatctggacagaggcctatatggactctaaactgctttcctctcaggctcagtctttaaccctgctgaccacggtggccatgcccgttttcagcaagaagaacgagacccgcagccacggaatcctcctaggtgtagtcggctcagatgtggcgcttagggagttaatgaaactggctcctcgttataagttgggagtccatggatacgccttcctgaacaccaacaacggttacatcctttctcaccctgatctgcgccccctctaccgcgagggcaagaaactgaagcctaagccaaattacaatagcgtcgatctaagtgaggtcgaatgggaagatcaagccgaaagccttaggactgcaatgatcaaccgggagaccggcaccttgagtatggatgttaaagtgcctatggataaaggtaaacgagtgctcttcctgactaatgactactttttcaccgacatttccgatactcctttttcattgggtgtagtgctttctaggggtcacggtgaatacattcttttgggaaatacgtccgtcgaagaaggcctgcatgatctgctgcaccctgacctcgccctcgcaggagactggatctattgcattactgacattgatcccgatcatagaaaactgtctcagctagaggcaatgatccggttcttgactagaaaagatccagacctggaatgcgatgaggagctcgttcgcgaggtgctgtttgatgccgtcgttaccgcaccaatggaagcctattggactgcgttagctctgaacatgtccgaggagtccgagcacgtggtagatatggcattccttgggactagggcaggtctgctccggtcctccctattcgtgggctctgaaaaagtgtcagaccgtaaattcctgacccctgaggacgaagcttcagtgttcacattagatagatttcccctttggtaccgacaggctagtgagcacccagccggaagttttgtattcaatctgcgttgggccgaggggcctgagtccgcgggagaaccaatggtagtgacagccagcactgccgtggctgtaaccgtagacaagaggactgccattgcagccgccgctggtgtgcaaatgaagctggaatttctgcagagaaaattctgggccgcgacccgacagtgctctacggtggatggaccctgcacccagagctgcgaagactcagacctggattgctttgtcattgacaacaatggattcatcttaatttccaagcggtccagggaaaccggcaggtttctaggggaagtggacggggccgtactgacacagctgttaagcatgggcgtttttagccaggtgaccatgtatgactaccaggccatgtgtaaaccatccagccatcaccactccgctgcccagcctttggtgtcacctattagtgctttcctgaccgccacccggtggcttctgcaggaacttgtgctcttcttgttagaatggtcagtttggggctcatggtatgataggggagccgaagccaagagcgtgttccaccactctcacaaacacaaaaaacaggacccactccaaccttgcgataccgaataccctgtgttcgtgtaccagccggccatcagggaagcaaacggaatcgtggagtgcgggccatgtcagaaggtctttgtggtgcaacagatccccaacagtaatcttctgctgttggtgacagatcctacttgcgactgcagcatctttcctcctgtgcttcaggaggccactgaagtgaaatacaacgctagcgttaaatgtgatagaatgcgatctcagaagctccggaggcggcccgactcctgtcatgcttttcaccccgaggaaaatgctcaggactgcgggggtgcatccgatacttcagctagtccacccctccttctgctgcctgtttgcgcctggggcctgctgccacagcttctccgatag

SEQ ID NO: 181176 - DNA, 615 bp, synthetic construct
  misc_feature 1..615: note = Description of Artificial Sequence: Synthetic coding sequence
  source 1..615: mol_type = other DNA
atgtacgactaccaggccatgtgcaagcccagcagccaccaccacagcgccgctcagcccctcgtcagccctatcagtgcattcttgaccgccacccgttggctgctccaggagctcgtactgtttctgctcgagtggtctgtatggggttcttggtatgaccgtggagctgaagcaaaaagtgtctttcaccactcccacaagcacaagaagcaagatcctctgcagccttgcgacaccgaatatcccgtcttcgtgtaccagccagctatccgagaagcaaatggcatcgtggagtgtggaccatgccagaaagtattcgtggtccagcagatcccaaattctaacctgcttctcctggtcacagaccccacctgtgattgcagcatcttcccaccagttctgcaggaagctacagaggttaagtacaatgcttcagtgaagtgtgataggatgcgtagccagaagctccggcgcaggccggactcttgccacgccttccatcctgaagagaatgctcaggactgcggtggagctagtgacacatccgcttctcctccgctacttctactgcccgtctgcgcatgggggttattaccccaactacttcggtag

SEQ ID NO: 181177 - DNA, 615 bp, synthetic construct
  misc_feature 1..615: note = Description of Artificial Sequence: Synthetic coding sequence
  source 1..615: mol_type = other DNA
atgtacgactaccaggccatgtgcaagcccagcagccaccaccacagcgccgcccagcccctcgtttccccaatcagcgcttttctgacagccacacgctggttgctgcaggagcttgttctgtttctcttagaatggagcgtgtggggcagttggtacgatcgcggtgcagaggccaagtctgtctttcaccattcccataaacacaagaagcaagatcccctgcaaccgtgtgataccgagtatcccgtttttgtatatcagccggcaataagagaagctaatggtatagtggagtgtggcccatgccaaaaggtgttcgtggtgcaacagatccccaactccaacctgctactcttggtcacagaccccacctgcgattgctcaatctttccccctgttttacaagaggccactgaggtgaagtacaacgcaagcgtgaaatgcgatcgtatgcgaagtcaaaaacttaggaggcgccccgacagctgccatgcttttcatccggaggaaaatgcccaggactgtgggggtgcttccgatactagtgcatctcccccactgctgcttcttcccgtttgtgcctggggcctgctgcctcaactattgcgatag

SEQ ID NO: 181178 - DNA, 804 bp, synthetic construct
  misc_feature 1..804: note = Description of Artificial Sequence: Synthetic coding sequence
  source 1..804: mol_type = other DNA
atgaagctggagttcctgcagcggaagttctgggccgccacccggcaggatctcgactgtttcgtgatcgacaacaatgggtttattttgataagcaagcgctccagagaaactggtagatttctcggggaagtggacggcgccgtccttacacagctgctgtccatgggcgtattctctcaggtgaccatgtacgactatcaggcgatgtgcaagcccagttcgcatcaccactccgccgcccagccccttgtgagtccaatttccgccttcttaacagcaacacggtggttattgcaggagcttgtcctgttccttctcgagtggtcagtttgggggagctggtatgatcgaggagcagaggcaaaaagtgttttccatcattcacacaagcataaaaagcaggaccctctgcagccttgtgataccgagtacccagtgtttgtctaccagccagcaatcagagaagctaacggcattgtcgaatgcggcccatgtcagaaggtgttcgtcgtgcagcagatcccaaactcaaatctgctgttgttggtgacagaccccacgtgtgattgtagcattttcccgcctgtcctgcaggaagccaccgaggtaaaatacaatgcttctgtaaagtgcgaccgaatgagaagtcagaaactgcgtcgccggccagactcttgccacgcctttcacccagaggagaatgcacaggactgtggtggggccagcgacacatctgccagcccccctctcttgctgctgcctgtgtgcgcatggggtctgctgccccaacttctccgctag

SEQ ID NO: 181179 - DNA, 615 bp, synthetic construct
  misc_feature 1..615: note = Description of Artificial Sequence: Synthetic coding sequence
  source 1..615: mol_type = other DNA
atgtacgactaccaggccatgtgcaagcccagcagccaccaccacagtgctgcacagccgctggttagccccatttccgcatttctgaccgctaccagatggctgctgcaggaattggtgttattcctgctcgagtggtccgtgtggggatcttggtacgatcggggcgctgaggccaagagcgtgtttcaccatagccataagcataaaaagcaggacccgctacaaccttgcgacactgaatatccagtcttcgtttatcagcccgcaatcagggaggcaaatggaattgttgaatgcggcccgtgtcagaaggtgttcgtcgtgcagcagatccccaactcaaatcttctcctgctggtgaccgaccccacatgcgactgtagtatcttcccacccgttttacaggaggcgaccgaggtgaagtacaatgcgagcgtcaagtgcgaccggatgagatcacagaaattgcgtcggcggccggatagctgccacgcctttcatcctgaggagaacgcccaggattgtggaggcgcgtcagacacgagcgcttcccctccccttctactgttgcccgtgtgcgcttggggtctgctgccacagttgctgcgatag

SEQ ID NO: 181180 - DNA, 1572 bp, synthetic construct
  misc_feature 1..1572: note = Description of Artificial Sequence: Synthetic coding sequence
  source 1..1572: mol_type = other DNA
atggtgcagaagaccagcatgagccggggcccctacccccccagccaagagatccccatggaggtgttcgacccttcaccccagggcaaatatagcaagcggaaagggagattcaagcggtctgatggatccacgagttccgataccacaagcaactcgttcgtgcggcagggaagcgccgaaagctatacgagccgccctagcgatagtgatgtgagtctggaggaggacagggaggccctcaggaaggaagccgagcgacaggcccttgcccagctcgagaaagccaagacaaagccagtggccttcgccgtgagaacaaacgtgggttataacccgtcacctggagacgaagtgccagttcaaggcgtggccatcacatttgagcctaaggactttttgcacattaaggaaaagtataataatgactggtggattggtcggctagtcaaagaaggctgtgaagtgggtttcattccttcccctgtcaagttggacagcctaagactcttacaggaacagaagctgcgtcagaatcggctcggctcctccaagtccggagacaactcctcgagttccctgggcgatgttgtcactggcactagaaggcccaccccacccgcctctgggaacgagatgaccaacttggctttcgagctcgaccccctcgagcttgaagaggaggaagcggaactgggggagcaatctggcagtgctaaaacaagcgtgagttctgttaccaccccgcctccccacgggaagaggatcccgttctttaagaaaacagaacacgtacctccatatgatgtggtgccctccatgcgcccaataatcctggtagggccttcactgaaggggtatgaggtgaccgatatgatgcagaaagcgctctttgatttcctgaagcataggtttgatgggcgtatttccatcacccgggtaacagccgatatctccttggcgaaacgctccgtgctcaacaacccttccaaacacatcattattgaacgttcaaatacccgctcctctctggcagaggtccagtccgagatcgagagaatttttgagctggctagaacactgcagctcgtggcactggacgcagatacgatcaatcaccctgcccaacttagcaagactagcctggccccaatcattgtatacatcaaaatcacctcacccaaggtgcttcagcggctgatcaagtcacggggcaaaagtcagagcaaacacctgaacgtgcagattgcagcctcggaaaaactggcccagtgtcccccagaaatgttcgatatcatcctcgatgagaaccagctcgaagacgcatgcgaacatttggcagaatatctggaggcatactggaaggccacacatccgccatcttcaacacccccaaatccactccttaatcgaaccatggcaaccgccgcactggcagcttcccccgcacctgtgagcaatctgcaggtgcaagtgcttacatcccttcgaagaaatttgggattttggggcgggctcgagagctctcaaaggggctctgttgtgccccaggagcaggagcatgctatgtag

SEQ ID NO: 181181 - DNA, 1797 bp, synthetic construct
  misc_feature 1..1797: note = Description of Artificial Sequence: Synthetic coding sequence
  source 1..1797: mol_type = other DNA
atggtgcagaagaccagcatgagccggggcccctacccccccagccaagagatcccaatggaggtgttcgatccttccccccagggaaaatattccaagagaaaggggcggttcaaaagaagcgacggatccacctcgagtgacaccacctccaacagctttgtccggcaaggcagtgcagagtcttatacaagccggccatctgattccgacgtgtccctggaagaagatagagaggcgttaagaaaagaagcagaaaggcaagctttggctcagttggagaaggcgaaaaccaaaccggtggcattcgccgtgaggaccaacgtaggctacaatcctagcccgggagatgaggttcctgttcagggtgtggcgatcacgtttgaaccaaaagatttcctacatatcaaagagaaatacaacaatgactggtggatcggccgactggtgaaggagggttgcgaagtgggcttcataccctcaccagtgaagttggatagtcttagattactacaggaacagaaactgcgacagaacagacttggaagcagcaagagcggcgataattcatcctccagtctgggcgatgtggttactggaacaagaaggccgacaccacccgcctcagcaaagcagaaacaaaagagtaccgagcatgtgcccccctatgatgtggtgccctcaatgaggccaattattcttgtggggcccagcttaaaaggatacgaagtcactgacatgatgcaaaaagccttgtttgactttctgaaacaccgctttgatggccgaattagcattacccgcgtcacagcagacatttctctcgccaagagatctgtgctcaacaacccatctaaacatattattatagaacggtcaaatacaagaagttctctggctgaagttcagagcgaaattgagaggatttttgagctggctcgcactttacagttggtggcactggatgcagacactatcaaccaccctgcccagctaagtaagacctccctggcccccatcattgtctatattaagattacctcccccaaggtcctgcagcgtctcattaagagtcgaggcaaatcccagagtaagcacttgaacgtccaaatagctgcaagcgagaagctggcacagtgccctccagagatgtttgacattatactggatgaaaatcagctcgaagatgcttgtgagcacctggctgagtatctggaagcatactggaaggcaactcaccctcctagtagcactcctcctaatcctttgctgaatcgcacgatggctaccgcagccctcgctgcctcacccgcgcccgtgagtaatctgcaaggaccctatctggcctcaggtgaccagcctctggaacgtgctactggtgagcatgcctccatgcatgagtatcccggtgaactgggccagccccccgggttgtacccttcttcccacccccctggtagagcagggactctgcgcgctctctctcgacaggacaccttcgatgctgatactcccggaagcaggaactcagcctacacagaactgggtgacagttgcgtggatatggagacagacccaagcgagggacccggacttggtgatccggcggggggaggtacgcctccggctcggcaaggatcttgggaggacgaggaggaggattatgaggaggagctgaccgataaccgaaaccgtggaaggaataaagcgcgatactgcgcggaaggaggcggccctgtccttgggcgcaacaagaacgaattggaagggtgggggaggggcgtgtatatccgctag

SEQ ID NO: 181182 - DNA, 1437 bp, synthetic construct
  misc_feature 1..1437: note = Description of Artificial Sequence: Synthetic coding sequence
  source 1..1437: mol_type = other DNA
atggtgcagaagaccagcatgagccggggcccctacccccccagccaggagatccccatggaggtatttgacccaagcccccaggggaaatatagcaaacgtaaagggcgctttaagcggtccgacggatcaacctcatctgataccacctctaactcttttgtgcggcagggttctgccgagagctatacatccagaccttcggattccgatgtgagcctggaagaagatcgcgaggccctccggaaagaggctgagcgccaagccctcgcacagcttgagaaagcaaagacaaagcccgtggccttcgcagtgaggacaaacgtgggctacaaccccagcccgggcgatgaggtccctgtgcagggagttgccatcacctttgagcccaaagactttttgcacattaaggagaagtataacaatgactggtggataggacgtttagttaaagaaggctgtgaagtgggatttattcccagtccagtgaagcttgattctctgcgactactgcaggaacagaaacttaggcaaaaccgactgggatcctcaaagtcaggtgacaattccagtagctcactcggagatgtcgtcacaggaacgaggcggcccacccccccagcaagtgctaaacaaaagcaaaagagcaccgagcacgtccctccctacgacgtggtaccgtccatgcgccccatcatcttggtgggtcctagcctgaagggttatgaggtaacagatatgatgcagaaggcactgttcgatttcctcaagcacaggttcgacgggcgtatctccatcacaagagtgacagcagacatcagtttggctaagaggtcggtgttgaataacccttcgaagcatatcatcatcgaacgctccaatacccgaagctccctggccgaggtgcaatctgagattgaaaggatttttgaactggcgaggactttgcaactggtggctctggacgccgacaccattaaccacccagcccagctgtccaagacttctctcgccccgatcatcgtgtatattaagattacaagcccaaaggtgttgcagaggctcataaaatcgcgtggtaagtcccaatccaagcacttaaacgtgcagatcgccgcaagtgagaagctggcgcagtgcccgccggaaatgttcgacatcatcctggacgaaaatcagttagaggacgcatgtgagcatctggccgagtaccttgaagcctactggaaggcaacccacccacccagcagtactccccctaacccactgcttaatagaaccatggccacggctgccctcgcagcctcgccagcacctgtgagcaatctgcaggtgcaggtcctgacttccttacggcggaacctcggattctggggggggctggagagctctcagaggggatctgtggttcctcaggaacaggaacatgccatgtag

SEQ ID NO: 181183 - DNA, 1290 bp, synthetic construct
  misc_feature 1..1290: note = Description of Artificial Sequence: Synthetic coding sequence
  source 1..1290: mol_type = other DNA
atggaggcccccagccggaccgtggtggtgggcagcgccgagagctacaccagccggccgagtgattccgatgttagccttgaagaagacagggaggcgctcaggaaggaagcagagaggcaagcactcgcccaactcgaaaaggcgaaaaccaaacccgtcgccttcgcagtgcgtactaacgtagggtacaacccgtcccctggagatgaagtcccggtccaaggcgtggccatcacctttgagcctaaagattttctgcacattaaggagaagtataacaacgactggtggatcggaaggctcgtgaaggagggatgcgaggtcgggttcattccctcacctgtgaagctcgacagtttgcggctgttgcaggagcagaagctaagacagaatcggctgggcagttccaaaagcggtgataactcctcttcctctctgggagacgtcgtgacaggtacacggcggcccactcccccagcctctgactcccccgtccagaccgaacatgtgcccccttatgatgtagtgcccagcatgcgcccaattatcttggtgggcccctcattgaaggggtatgaggtgactgacatgatgcaaaaggctctcttcgattttctaaagcaccgcttcgacgggaggatctctatcacaagagtcaccgcagacatctctctggctaaaaggagtgttctcaacaatccgtctaagcacataatcattgagcggagcaatacccgtagcagtcttgccgaggtacaatcagagatcgagcgcatattcgagttggcccggacacttcagctggtggccttggacgctgacacaatcaatcaccccgcccagttaagcaagacgtcccttgcccccattatcgtatatataaaaatcacctctcctaaggtgctccaaagactgatcaaaagccgcgggaaaagccagtccaagcatttaaacgtgcaaatcgcagcctctgagaagttagctcagtgccccccagagatgttcgacattatcctggatgagaaccaattggaggacgcttgcgagcacctggcagaatatctggaggcttactggaaggccacgcatccgccaagttctaccccccccaaccctttacttaaccgtactatggccactgccgcccttgccgcctcccctgctccagtgagcaacctgcaggtccaggtgcttaccagtctcagaagaaacctcgggttctgggggggtctcgaatccagccagagaggctcagtggtgcctcaggagcaggagcatgctatgtag

SEQ ID NO: 181184 - DNA, 1647 bp, synthetic construct
  misc_feature 1..1647: note = Description of Artificial Sequence: Synthetic coding sequence
  source 1..1647: mol_type = other DNA
agcggcagcctgtacttccagggcagcgccgagagctacaccagcaggccgtcagactccgacgtgagtctcgaagaagatagggaagctctcagaaaagaagcggaacggcaggccctggcacagttagagaaggccaagactaagcctgtggcattcgccgtgagaaccaacgtcgggtacaacccaagccccggtgacgaagttcccgtgcaaggagtggctatcaccttcgaaccaaaagacttcctgcacatcaaggagaagtataacaacgattggtggattgggcgactggtgaaggaagggtgcgaggtaggatttatcccttctccggtgaaactagactccctgaggctcctgcaggagcagaagttacggcagaacaggctggggagctcaaagtcaggggataactctagctccagcctcggcgatgtggttacagggacacgccgtcccactccccctgccagcggcaaaagccacagacatgcgaccgaacacgtaccaccgtacgacgtggtgccatctatgaggcccattatcctcgtcggaccttctttaaaaggctacgaggtaacagatatgatgcagaaagcccttttcgactttctgaagcaccgattcgacgggcggatttccatcacaagagtgactgccgacatcagcctggcaaaaaggtctgtgctgaacaacccttcgaagcatataatcatcgagcggagcaatacgaggtcaagcctggcagaggtgcagtcggagatcgaacgcattttcgagctcgcaaggactttgcagttggtcgcgctggacgctgacaccatcaatcaccctgctcagctctctaagacttcgttagcgccaattatcgtctacataaagatcactagccccaaagtcttgcaacggctaatcaaaagtcgtgggaaatcccagtccaaacacttgaacgtgcagatcgccgcctctgagaaattggcacaatgcccacccgagatgtttgatatcatcctggacgagaatcagctggaagacgcttgcgagcacttggcagaatatttagaggcctattggaaggccacacatcctccctcttctacccccccaaaccccctcctgaacagaaccatggctaccgcggctctcgctgcttcccccgctcccgttagcaacttgcagggtccttacttagccagtggcgatcagcccttagagagagctaccggcgaacacgcttctatgcatgagtacccaggcgaactcggccagcccccggggctttatccgtcctctcatccccccggtagggctggaaccctgagggcattgtcgagacaggacacatttgatgctgacacccctggatccaggaactctgcctatactgagctcggcgattcctgtgtagacatggaaacggacccctctgagggccccgggctgggcgaccccgcaggtgggggaactcccccagcacggcagggaagctgggaggatgaagaggaagattacgaagaagaactaacagacaatcggaacagagggaggaataaagctcggtattgtgctgaggggggaggccccgttcttgggcgtaacaagaacgaactggaaggttggggccgaggcgtctacatcagatag

SEQ ID NO: 181185 - DNA, 1899 bp, synthetic construct
  misc_feature 1..1899: note = Description of Artificial Sequence: Synthetic coding sequence
  source 1..1899: mol_type = other DNA
atgaaccagggcagcggcctggacctgctgaagatcagctacggcaagggggcaaggagaaaaaatcggttcaaaggcagcgatggctccacaagctctgacactacaagtaacagttttgttcggcagggaagcgccgactcttatacctctaggccatccgactctgatgtgagtctggaagaggatagagaagctgtcagaagggaggcggagagacaagcacaggcccaactcgaaaaagccaagacgaaacctgttgccttcgcagtgcgaactaacgtgagctattccgccgctcatgaagatgacgtgcctgtgcctgggatggctatctcctttgaggcaaaagactttctgcacgtcaaggagaaatttaataacgactggtggataggtcgcctcgttaaggagggatgcgagattggttttatcccatctcccgtgaagcttgagaatatgagattacagcacgaacagcgggctaagcagggtaagttttattcaagtaaatcaggagggaacagttcttcctctctgggagatatcgtcccatcgtccagaaaaagcacgccacccagttccgctatagatatcgacgctaccggccttgatgccgaggagaatgatatacccgctaaccacagaagccccaaacctagtgccaacagcgtcacctctccacatagcaaggaaaagaggatgcctttctttaagaagacagagcacacacccccatatgatgtcgtgccatctatgcgccctgtggtactcgtggggccatctctcaagggatacgaggtgacagatatgatgcagaaggccctgttcgacttcttgaaacacagattcgagggcagaatatccatcacaagagtgacagcagacatctcgctggctaagcgctcagtgctgaacaatccctcaaagcacgccatcatagagagaagtaacacccggtccagcctcgccgaggtccagtccgaaattgaacgaattttcgaattggcccgcaccctgcagctcgtcgttttggacgcagataccattaatcatcctgcccagctgtctaagacctccctcgctccaatcatcgtttatgtcaagatctcttcccccaaggtgctgcaacgacttatcaagagtcgagggaagagccaggcgaaacacttgaacgtccagatggtcgccgccgacaagctggcgcagtgccccccggagctttttgacgtgattctcgacgagaaccagctcgaggacgcgtgcgagcacctggcagactacttagaggcctactggaaggcgactcacccaccgtcttccagcttgccgaaccctctgctatcgagaacgcttgctacatcttccttgcccttatctcctacactggccagcaattcccaaggctctcagggggaccagcgcacggatcgtagtgcaccaatacgctctgccagccaggccgaagaggaaccctctgttgaacctgtcaaaaagtcgcaacatagatcctccagtagcgcaccacatcacaaccacagaagtgggacgtctcgtggcttatcgagacaggaaacctttgactcggagacacaagagagccgggattctgcctatgtggagccgaaggaggattattctcacgaccacgtcgatcattacgccagtcacagagaccacaaccaccgagatgagacacacggtagctccgatcaccggcatagagagagtagacaccgcagccgggatgttgatcgggagcaggaccataacgagtgcaacaagcagcgtagcaggcataagtctaaagaccgctactgcgaaaaggacggcgaagtgatttctaaaaagcggaatgaggctggggaatggaatcgggacgtgtacatacgccagtag

SEQ ID NO: 181186 - DNA, 1983 bp, synthetic construct
  misc_feature 1..1983: note = Description of Artificial Sequence: Synthetic coding sequence
  source 1..1983: mol_type = other DNA
atggtgcagcgggacatgagcaagagcccccccaccgccgccgccgccgtggcacaggaaattcagatggagcttctggagaacgttgccccggccggagctctgggagctgccgcacaaagttatgggaaaggcgctcgacgcaagaaccggtttaagggcagcgatgggtcaacatcttcagataccacgagcaacagtttcgtgagacagggatccgcagatagctacacttcaaggccatcggattcggatgtgagcctcgaggaagaccgagaggctgtgagacgcgaagcagaaagacaggcacaggcccaactcgagaaggccaaaacgaaacccgtcgcgttcgcagtgcggacaaacgtgagctatagcgctgctcatgaggacgacgttcccgttccagggatggctatcagcttcgaggctaaggacttcttacacgtgaaagagaaatttaataacgactggtggattggccgactggttaaagagggctgtgagattggtttcatcccaagcccagtcaaactggagaatatgcgtctccagcatgagcagagagctaagcaaggcaagttctactcgtccaaatccggagggaactcctcaagttccctgggggacatagtacctagttctcgcaaaagtactcccccctcctcggcgatcgatatcgacgccaccggactggacgcagaagaaaatgatatccccgccaatcatcgcagccctaaaccatccgccaactccgtcacctcacctcatagcaaagagaagcgcatgccgtttttcaaaaaaaccgaacatacgcctccctatgacgttgtgccctccatgcggcctgtagtactggtgggtccaagcctcaaggggtatgaagtcacagatatgatgcagaaagccttgttcgactttcttaaacatcgttttgagggaagaatatcgatcacgcgggtaacggctgacatcagtttagctaagcgcagcgtcttgaataatccaagtaagcacgcgattatcgagcggtccaacactagaagcagtctagccgaagtgcaatctgagatagaacggatctttgagttggcccgcacgctgcagcttgtcgtgctcgatgcagatactattaatcaccccgcacagctgagtaagacctcattagccccaatcatcgtctatgtcaagatctcttcaccaaaagtcttgcaaaggctgattaaaagccggggcaagtcccaggccaaacacctcaatgtccagatggtcgccgccgataagctggctcagtgtccacccgaactgttcgacgtgatcctggacgaaaaccagctcgaggatgcctgtgagcacctggcagattacctggaggcctactggaaggcaacacaccctcccagctctagcctgcctaacccactgctaagcaggacattagcaacttcctccctgcctctctcgccgacactggcgtctaattctcaagggtcacagggagatcagagaactgaccggagcgctcccattaggtcagccagccaggctgaagaagaacctagtgtagagcccgtgaagaaatctcagcatcggagcagctcatctgctccccatcacaatcaccgctccggaacttctagggggctctctcgccaggagactttcgatagtgaaacacaggaatctcgcgacagcgcttatgtggaaccaaaggaggactattcccatgaccacgtcgaccactatgcatcccaccgcgatcacaaccatagagatgagacacacggatcctccgaccatcggcatcgggaaagtagacataggtctagagatgtcgatagggaacaggatcacaacgagtgtaataagcagcgaagccgacataagtctaaggaccgctactgtgaaaaggacggcgaagtgatttcaaaaaagaggaatgaggccggcgagtggaacagggacgtgtacatcagacaatag

SEQ ID NO: 181187 - DNA, 1911 bp, synthetic construct
  misc_feature 1..1911: note = Description of Artificial Sequence: Synthetic coding sequence
  source 1..1911: mol_type = other DNA
atggtgcagcgggacatgagcaagagcccccccaccgccgccgccgccgttgcgcaagagatccaaatggagctcttggaaaatgtcgcaccagctggagccttgggtgcagctgcacagagctacggcaagggtgcgagaaggaagaaccgtttcaaagggagtgacggctcaactagctccgacaccacctcaaatagctttgtgaggcaggggagtgccgacagctataccagcaggccaagcgattcagatgtctccctggaagaagatcgtgaagccgtaaggcgagaggcagaacgccaggcacaggcacaactagagaaggcaaagacaaagccagtcgcctttgccgtgcgcacgaatgtgtcttactccgccgcccatgaggatgacgtcccagtccctggtatggccatttctttcgaggctaaagacttcctgcatgttaaagagaaatttaataacgattggtggatcggcaggctggtcaaagaaggttgcgagattgggttcatcccgtctcctgtgaagctagaaaacatgagactgcaacacgagcagcgtgccaagcagggcaaattctatagttccaagagcggggggaatagtagctcatcattgggggacatcgtgccttcatctagaaagagcacacccccctcttctggcgctaagtctgctgatgaacaggaccaatggaaaactgcgggacttttctggcgtttcactactgagcacaccccaccctatgatgtggttccgtcgatgcggcccgtagtgcttgttgggccttctctcaaggggtacgaggttaccgatatgatgcaaaaggccctgtttgatttcttgaagcacagattcgagggaagaattagcattaccagagtcacagcggacatttccctcgctaagcgctccgtgctgaacaatcccagcaaacatgccatcattgaacgtagtaatacccgctcctccctggctgaggtgcaatccgaaattgagaggatattcgagcttgctcgtaccctgcagctggtggtgctggacgctgataccatcaaccaccctgctcaactgtctaagaccagtttagctcccattatcgtctacgtgaagatttcaagtcctaaggtcctacagcggttgataaagtccagaggcaagtcccaggccaagcatctcaacgtgcagatggtggccgctgataagttggctcagtgcccacctgagctgtttgatgtgatcctcgacgaaaaccagctggaagacgcctgcgagcacctcgctgactatttggaagcttactggaaagcaacgcacccccccagttctagtctgccaaacccactcctctcacgtacactcgccacctcaagcctgcctttatccccaacattggcatccaactcacagggatcacagggggatcagagaactgacaggtctgcaccaattcgttccgcgagccaggcagaggaagagcccagcgttgagcctgtcaagaaatctcagcaccgatcttctagctccgcccctcaccataaccatagatccggcacttcccggggtctgtccagacaggagacattcgactcagaaacgcaagagagccgggactccgcatacgtggagcccaaagaggattactctcatgaccacgtcgaccattacgcctctcaccgggaccacaatcaccgggatgaaacacatggctcgagcgaccatcggcaccgggagtcgcggcataggtcgagggatgtggacagagaacaggatcataatgagtgcaacaaacagagaagtagacacaaaagtaaggatcgttactgcgagaaggacggtgaagttattagcaagaaaagaaacgaagccggcgagtggaaccgggatgtatatattcgtcaatag

SEQ ID NO: 181188 - DNA, 1839 bp, synthetic construct
  misc_feature 1..1839: note = Description of Artificial Sequence: Synthetic coding sequence
  source 1..1839: mol_type = other DNA
atgaaggccacctggatccggctgctgaagcgggccaagggcggcaggctgaaaaacagtgatatatgcggaagtgctgatagctacacatccaggccgagcgactcagacgtgtctctggaggaggaccgtgaagccgtacggcgcgaggcggagaggcaggcccaggcccagttggagaaggccaagaccaaacccgtcgctttcgccgttcggaccaatgtatcctacagtgctgctcacgaagatgacgttccagtgcctggcatggcaatcagttttgaggcgaaagacttccttcacgtcaaagaaaagtttaataatgattggtggattgggcgactggtaaaagaagggtgcgagatcggcttcatcccctcccctgttaagctggagaatatgcgcttacagcatgagcagcgggccaagcagggaaaattttactcttcaaagagcggaggcaattccagttctagccttggggacatcgtcccctcttcaaggaaatctacaccgccgtcttccgcgatcgatatcgatgcgaccggcctggatgcagaggaaaacgatattcctgctaaccacaggtcccccaaaccatccgcaaatagcgtcaccagccctcatagcaaggagaagaggatgcctttcttcaaaaaaactgaacacacacctccttatgatgtggttccctccatgaggcctgtggtgctggtcggtcctagcctgaaaggatacgaggtgaccgacatgatgcagaaagctctcttcgattttttaaagcaccgatttgaaggcagaatctcaattactagagtgacagccgatatttctttagccaagaggtccgtgttgaataacccttccaaacatgcgatcattgaacgtagcaacacgcgatcatctcttgctgaagtgcagagcgaaattgagcggatattcgagctcgccaggaccctgcagctagtggttctggacgcggacacaattaaccatcccgcgcaactctccaaaacaagcctcgcacctatcatcgtatatgtaaagatcagttctcccaaagtccttcaacgcctgataaaaagtcgggggaaatcacaggcaaagcacttgaacgtgcagatggtcgccgccgataagctggcccagtgcccgcccgagttatttgacgttatactcgatgagaatcagcttgaggatgcatgtgaacacctggctgactatcttgaggcatactggaaagccacacaccccccaagtagctccctaccgaatcctcttctcagcaggaccttggccacctcgtccttgccgctgtccccaacactcgcgtctaattcccaaggatcccagggagatcagcgcacggatcgcagcgccccaattcggtccgcctcccaggctgaagaggagccttctgtggaacctgtaaaaaagtcccagcacaggagcagttccagtgcaccccaccacaaccataggagcgggacatcccggggattgtccaggcaggagacatttgattcagagacacaagagagtcgagattcggcatatgtcgaacctaaggaggactatagccacgatcatgtcgaccattacgcatcccatcgcgatcacaatcatagggacgaaactcatggatcctcggatcatcgacatcgggagtcccgccatcgcagtagagacgttgatagggagcaggatcataacgagtgcaacaagcaacggagccgccacaaaagtaaagaccgctactgcgagaaggatggagaagtaatctccaaaaaacgtaatgaagctggcgagtggaaccgagacgtctacattcgccagtag

SEQ ID NO: 181189 - DNA, 1704 bp, synthetic construct
  misc_feature 1..1704: note = Description of Artificial Sequence: Synthetic coding sequence
  source 1..1704: mol_type = other DNA
atgcagtgctgcggcctggtgcaccggcggcgggtgcgggtgagctatggatccgccgactcttacacatccagaccgagcgactcggacgttagtctcgaggaggatcgcgaggcagtgagacgtgaggctgaacgccaagcccaggcacaactggagaaggctaagacaaagcccgtcgccttcgctgtacggacgaacgttagttacagtgccgcacatgaggacgacgtccccgtgccaggaatggcaatatcttttgaagccaaggactttcttcacgtcaaagagaagtttaataatgactggtggatcggtagactggttaaggagggctgtgaaatcggcttcatccccagcccggtgaaattagaaaacatgaggctccagcacgagcaacgtgcaaagcagggcaaattttattcctctaaatccggaggcaattccagttcttccctgggtgacattgtgcccagctctcgtaagtctacaccgccaagctccgcaaagcagaagcagaagtctacggaacacacacccccttatgacgttgttcccagtatgagaccagtggttctagtgggcccgtccttgaaagggtatgaggtgacagacatgatgcagaaagctcttttcgacttcctcaaacaccgttttgagggaagaattagtatcactcgagtcactgccgacatcagtttggccaaacgttctgtgctgaataacccatccaaacacgccattatcgagaggtctaataccagatcttctctggccgaggtccagagcgagattgagagaatttttgaactcgctcggactctgcagctggtcgttctggacgccgacactattaaccatcctgcccagctctctaagaccagtctggctcctattattgtttacgttaagatcagcagccctaaggtgctccaaaggcttataaagagccgcgggaagagccaggctaaacaccttaatgtacagatggtcgccgctgacaagctggcccagtgcccccccgagttgtttgatgtgatactcgatgagaaccagcttgaagacgcctgcgagcacttggccgactatctcgaagcatattggaaagcaacacatccaccgagtagtagcttgccaaatcccctactttcccggacactagctacaagttcattgcctttgtctcctacacttgcgtccaatagccaagggagtcaaggcgatcagcggactgatcggtccgccccaatccggagcgcttcacaggccgaagaggaaccctccgtggaaccggtgaaaaaaagccaacatcggtccagctcaagtgcaccacatcataatcaccgcagcgggacaagccggggcctgagccgacaggaaacatttgacagcgaaactcaggaatcccgcgactccgcctatgtcgagcccaaagaggactacagccacgatcacgtggatcattacgcgagtcatcgagatcacaatcatcgtgacgagacacacggttccagtgaccaccgccacagggaatccagacaccgtagccgcgacgtcgatcgtgaacaagaccataatgagtgcaataagcagcgcagtcgacataaatcgaaagaccgctattgtgagaaagacggcgaggtgatatctaagaaacgaaacgaagccggcgagtggaatcgtgacgtctacatcagacagtag

SEQ ID NO: 181190 - DNA, 1821 bp, synthetic construct
  misc_feature 1..1821: note = Description of Artificial Sequence: Synthetic coding sequence
  source 1..1821: mol_type = other DNA
atgctggaccggcggctgatcgccccccagaccaagtacatcatccccggtggatccgccgatagctacacgagtcgaccctctgatagcgacgtatccctggaggaggaccgtgaggccgtgcgtagggaagctgaaagacaggctcaggctcagctggaaaaggctaaaaccaagcccgtcgcattcgctgtccgtacaaacgtctcttacagcgctgctcacgaggacgacgtgcccgtacctggtatggccatcagtttcgaggccaaagatttcctccacgttaaggagaagttcaacaacgactggtggattgggcgactggtgaaagagggttgtgaaatcggcttcattccatccccagtgaagttagagaacatgagattgcagcatgagcaacgcgccaaacagggcaaattttattcatccaagagcggcggaaacagcagtagctctctgggtgacatcgttccaagcagtcgcaagtctacgccgcctagttctgccattgatatagatgccaccggcctcgatgcggaagagaacgacatcccagcgaaccacaggtctcccaaacccagcgcaaatagtgtcacctcacctcactcgaaagagaaaaggatgcccttttttaagaagaccgaacatactcctccatatgacgtggtacccagcatgcgcccagttgtgttggtgggcccaagcctaaagggctatgaagtaacagacatgatgcagaaggccctgtttgacttcctgaaacatagatttgaggggaggatctcgattaccagagtcactgccgatatctcgttagcgaaacgatctgtacttaataacccaagcaagcatgccattattgagagatcaaacacacgcagcagcctcgccgaagtccagtctgaaattgagcggattttcgagctagcccgaactctccaacttgtcgtgctcgacgctgacacaataaatcatccggcccagctttctaaaacaagcctcgcccctattatcgtttatgtcaagatctccagtccaaaggtgctgcagaggctgatcaagtcccggggaaaaagccaggccaagcacttgaatgtgcaaatggtggcggccgataagctggctcagtgtcctcccgagctgtttgacgtcattctggacgagaatcagttagaagatgcctgcgagcatttggctgattatctggaggcctactggaaagctacgcatccaccctctagctccctgccgaacccactattaagtaggactctggcaacgtcatcactgccgctgtccccaactctggccagtaacagtcagggatcccagggggatcagcggactgatcggtccgcgcctatccgtagtgcgagtcaggccgaagaggagccttcagttgaacctgtaaagaagtcgcagcacagatcttcttcttctgctccccatcacaaccaccgatccggcacaagtcgggggctgtcgcgccaggaaacatttgatagcgagacacaagagtccagagattccgcttatgttgagcccaaggaggattactctcatgatcatgtggaccactacgcttcccatcgcgaccataatcatcgtgacgagacacacgggagctcagaccaccgccatcgggagtctcggcatcgatctcgcgacgtggaccgggagcaggaccacaacgagtgcaataagcagcgatcccgacacaagtcaaaggatcgttattgtgagaaagatggagaagttatctctaaaaagaggaacgaggctggcgaatggaatagggacgtctacatacgtcagtag

SEQ ID NO: 181191 - DNA, 1827 bp, synthetic construct
  misc_feature 1..1827: note = Description of Artificial Sequence: Synthetic coding sequence
  source 1..1827: mol_type = other DNA
atgaaccagggcagcggcctggacctgctgaagatcagctacggcaaaggcgctaggcgtaaaaacagattcaagggatccgatggcagcacaagcagcgacaccaccagtaattcctttgttagacaaggttcagctgactcctatacctctcggcctagcgattctgatgtcagccttgaggaagatcgtgaggcggtgagacgtgaagccgagagacaagcccaagctcaactcgagaaagctaaaactaagccagtagcgtttgccgtacggactaacgtgtcctatagcgccgcccatgaggacgacgtgccggtgcctggaatggctataagctttgaagccaaggacttcttacacgttaaagagaagttcaataatgattggtggattggacggcttgtgaaggagggctgtgagatcgggtttatacccagtcccgtgaaactggaaaatatgcgactgcagcacgagcagagggcaaaacagggcaaattttactccagtaagagtggcggcaatagtagcagcagcttaggcgatatcgttccttcttcaaggaaatctaccccaccttcttctggggctaagtccgctgacgagcaggaccagtggaagacggctggtcttttctggaggttcactaccgagcacacgccaccttacgatgtggtgccatccatgcggcctgtcgtgctagttggccccagccttaagggctacgaagtgactgacatgatgcagaaagctctgtttgactttttgaaacacaggttcgagggcagaatttcaatcacgcgggttaccgccgatatctctctggccaagagatcagttctgaacaacccttctaaacacgccataattgagcgaagtaatactcggtcatcactggccgaggtacaatccgaaatcgaacggatctttgagctcgcccgcacactgcagttagtggtgctcgacgctgatactattaaccatcccgcgcagctatctaaaacctcgttggcccccattattgtctacgtgaagatctcttcccctaaagtgttacagagattaatcaagagcaggggcaaatctcaagccaagcacctcaatgtgcagatggtagcggcagataagctggcacagtgtccccctgaattgttcgacgtgatactagacgaaaatcagctggaggacgcttgcgagcacctggcagactatctggaggcttattggaaggccacccacccacccagttcctctctccccaaccctctgttgtcccgtactttggccacttctagccttccacttagtccaacactcgcaagcaacagccagggctcccaaggagatcagcggaccgaccgctcagccccaatccgcagcgcaagtcaggccgaggaggaaccttccgtcgagcccgtgaaaaaatcccagcaccgatcctccagctcagcaccgcatcataaccacaggagtggtacgagtcggggcttgtcacgacaggaaacattcgatagtgagactcaggagtcccgcgactccgcctacgtggagcctaaagaggactacagccacgaccacgttgatcattacgcctcacaccgcgaccacaatcaccgggatgagacccacgggtcctcagaccaccgccatcgggaatccaggcatagatcaagagatgtcgaccgcgaacaagaccataatgagtgcaataagcaacggagtagacacaaatctaaggatagatactgcgagaaagacggcgaggtgatttccaagaagaggaacgaagctggggagtggaaccgcgatgtatatatccgccagtag

SEQ ID NO: 181192 - DNA, 1818 bp, synthetic construct
  misc_feature 1..1818: note = Description of Artificial Sequence: Synthetic coding sequence
  source 1..1818: mol_type = other DNA
atgcagtgctgcggcctggtgcaccggcggcgggtgcgggtgagctacggatctgcagactcatacactagtcgtcctagcgactcagatgtatcactcgaggaggatcgcgaggccgtcagaagggaggctgagaggcaggcccaagcccagctcgaaaaggccaagactaagcccgttgcctttgcggtacgcacaaatgtctcttattccgcagcccatgaggatgacgtgccggtcccaggaatggcgatctctttcgaggctaaagactttcttcatgtgaaagagaaattcaataatgattggtggattggcaggcttgttaaggagggttgcgagattggattcattcctagcccagttaagctggaaaatatgcgtcttcaacatgaacagcgcgctaagcagggcaagttctactcctccaaatccggcggaaattctagctccagtctcggagacatagtccccagctccaggaaatcaacaccaccatcttccgctatagatatcgacgcaaccgggctcgacgctgaagaaaacgacatccccgcaaatcatcgatctcctaagcctagcgccaactccgtaactagcccccactccaaggagaagagaatgccttttttcaagaaaactgaacatacgccaccctatgatgtggttcccagtatgcgaccagtcgtgctcgtcgggcccagtctgaaggggtatgaggtgacagatatgatgcagaaggcactcttcgacttcctgaagcacaggtttgaaggtaggatttctataacaagagtcaccgccgatatctctctcgccaaaaggagtgtgttgaacaacccctcaaaacacgcaattattgagcgttctaacacccggtcttcactggccgaggtgcagtccgagattgagagaatctttgagctagcaaggactttacagctggtggttctggacgccgataccataaatcatcctgctcagctaagtaagacatccctggcccccatcatcgtgtacgtaaagatctcttctcctaaggtcctgcagaggctgattaaatcccgcggaaaatcgcaagcaaagcaccttaacgtgcagatggtcgccgcggataaattggcccagtgtccccctgaactatttgacgtaatacttgatgagaatcagttagaggacgcatgtgagcatttagctgactatctcgaagcgtactggaaagctacacatcctcccagctctagcttaccaaaccctctactctccagaacactcgcaacctcttctctgcccttatctccaacactggcctcaaactcacaaggaagtcagggggatcagagaaccgaccgcagcgccccgatacgctccgcctcgcaggcagaagaagaaccctccgtggagcccgtcaaaaagagccaacacaggagcagctcatcagcaccccatcacaaccatcgcagcggtacttcccggggcctctcccggcaggagacttttgattctgaaactcaggagtccagagacagtgcctacgttgaaccaaaggaggactacagtcacgatcatgtggatcattatgcctcccacagagatcataaccatagggacgaaacacatggctcttctgaccatcggcaccgggagagccggcacagaagccgggacgttgatcgcgagcaagaccataatgaatgcaacaaacagaggtctcgccacaaatctaaagaccgttattgcgaaaaggatggtgaagtcatttctaagaagagaaacgaagccggcgagtggaatagggacgtgtatattagacagtag

SEQ ID NO: 181193 - DNA, 1455 bp, synthetic construct
  misc_feature 1..1455: note = Description of Artificial Sequence: Synthetic coding sequence
  source 1..1455: mol_type = other DNA
atgtacgacgacagctacgtgcccggcttcgaggacagcgaggccggtagtgccgactcgtatacatcccgcccaagcctggatagcgatgtatctcttgaggaggacagagaatcagctcgacgggaggtagagtcacaggcccagcagcaattagagcgggcaaaacacaagcccgtagctttcgctgttaggaccaatgtgtcctactgcggcgtgttggacgaggagtgccccgttcagggatccggagtgaactttgaagcgaaagacttcctgcatatcaaggaaaagtatagcaatgattggtggatcgggaggttggtgaaggaaggcggcgatattgccttcatcccatcgccccagaggctggagagtatcaggttaaaacaggagcagaaagccagaagaagtggcaacccctcttctctgagcgatataggcaaccggaggtccccccctccatcacttgctaaacagaagcaaaaacaagccgaacacgtgccgccatacgacgttgttccctctatgaggccggtcgttctggtcggccccagtctcaaaggctatgaggtaacagatatgatgcaaaaggctctgttcgattttttaaaacatcgcttcgacggtcgcatcagcattacacgcgtcacggccgacttaagccttgcaaagagaagtgtccttaacaaccctggaaaacggacaataattgaacgatctagtgctaggagtagcatagctgaggtccagtccgagattgagcggatttttgagctggcaaaaagtctccagttggttgtgctcgatgcagacaccatcaaccatccggcacagctggcaaaaacgagtttggcccctattatcgtgtttgtcaaagtttccagtcctaaagtgctgcagcgcctcattagaagtagaggaaagagccagatgaaacacttaacagttcaaatgatggcttatgataagcttgtgcagtgtccacccgaatcattcgacgttatacttgacgagaaccaacttgaagacgcctgcgagcaccttgcagagtatctcgaagtctactggagggctactcaccacccggcaccagggccaggacttctcggaccgccgtctgccatccccggcctacagaaccagcagctgttgggagaacgaggggaggagcatagtccattggagcgcgactccctgatgcctagcgacgaggcctccgaatcctccagacaggcatggactggctccagccagagaagttcgcggcaccttgaggaagactacgcggatgcataccaggatctgtaccagccacatcgacaacacaccagtggtttgccatccgccaacggccatgacccgcaggacaggttactagcacaggactctgagcacaaccactctgacaggaattggcagcgcaacaggccatggcctaaggactcgtactag

SEQ ID NO: 181194 - DNA, 1566 bp, synthetic construct
  misc_feature 1..1566: note = Description of Artificial Sequence: Synthetic coding sequence
  source 1..1566: mol_type = other DNA
atgagcagcagcagctacgccaagaacggcaccgccgacggcccccacagtccgacatctcaggtggcgcgcggaacaacaacccgccggtcgcgcctgaagagatcggatgggtcaaccacgagtacatccttcatcttgagacaggggtcagccgactcatacacttcaaggcccagcgacagtgacgtgtcgctcgaggaagacagggaggccatcagacaggagcgggagcagcaggccgccatccagttagagcgtgccaaaagcaagcccgtggccttcgccgtgaagactaatgtcagttattgtggtgctctggacgaggacgtgcccgttccaagcacagcaattagctttgatgccaaggacttcctccacataaaggaaaagtataataatgactggtggataggtcggttggttaaagaggggtgtgaaataggcttcatcccatctccgctcaggctagaaaacataagaatccagcaagagcagaagcgcggccggttccacggcggtaagagttcagggaattcgtcgtcatcactgggagagatggtgagcggtactttcagagctacccctacgtctaccgtaaagatggtactgaaaatccataccgagcatatacctccatacgatgtcgtgccatccatgcggcctgtagtgctggtgggccctagcctcaagggctatgaggtgactgacatgatgcaaaaagcgctgtttgacttccttaagcatcgtttcgacggcagaatcagtattaccagggtgacagctgacattagcctcgcgaagagatcagtcctgaacaacccatcaaagcgcgcaatcatcgaacgaagcaatacccggtcctcccttgccgaagtgcagtcagaaatagaacggatatttgagctggcacgttcactacagctggtggtactggatgcagatacaatcaaccacccagcccagctgataaagaccagcctcgcccccatcattgttcatgtcaaggtatcttctcctaaggtcctgcagaggcttatcaagagccgaggtaagagccagtctaagcaccttaacgtccagttagtggcagcggacaagctcgctcagtgccccccggaaatgttcgacgtaatcttagatgagaaccaattggaggacgcctgcgagcatcttggcgaataccttgaggcctattggagagccacccacaccacctcttctaccccgatgacaccacttctaggtagaaatcttggttcaaccgctctcagcccctaccccacagccatcagtggcctgcagagtcaacgcatgaggcacagcaaccatagtaccgagaattcgccaatcgagaggcggtccctgatgaccagcgatgaaaactaccacaatgagcgggcccgcaaaagccgtaatcgtctgtcctccagctcccagcatagccgcgatcattatcctctcgtcgaagaagattatcccgatagctatcaggacacttacaaacctcatcggaatcgaggttccccaggcggctacagccatgattcccgacatagactgtag

SEQ ID NO: 181195 - DNA, 1464 bp, synthetic construct
  misc_feature 1..1464: note = Description of Artificial Sequence: Synthetic coding sequence
  source 1..1464: mol_type = other DNA
atgtacgacaacctgtacctgcacggcatcgaggacagcgaggccggatcagctgattcgtatacctccagaccctccgatagcgatgtgagtttggaggaggaccgcgaggccattagacaggaaagggagcagcaggctgcaatccagctcgaaagagctaaatctaaacctgtggcgttcgccgtgaagacaaatgtgtcatactgcggcgcccttgatgaggatgtcccagttcccagcacagctatcagttttgacgccaaagattttctccacatcaaggaaaaatacaacaacgattggtggatcgggaggctggtcaaggaagggtgtgaaattggatttatcccctcccctcttaggctcgagaacattaggatccaacaagaacagaaaaggggacggtttcacgggggaaaatcaagcgggaactcgagcagtagcctcggagagatggtctcagggacgttccgagctacgcccacctctacggtgaagatggtcctgaagatccataccgaacatatccccccatacgatgtagtgccctccatgaggccagtcgtgctggtcgggccttctctgaaaggatatgaggttacagacatgatgcagaaagctctgtttgattttctaaaacacagattcgatggtagaatctcaattaccagagtgacggctgatattagtctggctaagcggtcggtactgaataaccccagcaagagagcaataatcgagaggtctaacacgcggtccagcctcgcagaagtgcaaagcgagattgagcgtatctttgaacttgcgcgtagcttgcagcttgtcgtgctggacgctgatacaatcaatcacccagcccagctaatcaagacctcccttgcccccataattgtacatgtgaaggttagcagccctaaagtgctccagagactaattaaaagcagagggaagtcccagtcaaagcacttaaatgttcagctcgttgctgcagacaaactcgcccagtgccctcctgagatgttcgatgtcatactggacgaaaaccagctcgaagacgcctgcgaacatctcggagagtacctcgaggcatactggcgcgctacacacactacatcgtccacccctatgacacccctcctgggccgcaacctcgggagtaccgcactctccccctacccgacagcaatctccggtctgcagagtcagcgcatgcgacactccaatcattcgacagagaattcccccatcgagcgacgaagtttgatgacttctgacgagaactatcataatgagcgggccaggaaaagccgaaatcggctttcatcgagctcacagcattctcgggaccactatccactcgttgaagaggattaccctgacagctaccaggacacctacaagcctcatcgcaacagaggtagccccgggggatattcacacgactcgaggcaccgcttatag

SEQ ID NO: 181196 - DNA, 1461 bp, synthetic construct
  misc_feature 1..1461: note = Description of Artificial Sequence: Synthetic coding sequence
  source 1..1461: mol_type = other DNA
atgtacgacaacctgtacctgcacggcatcgaggacagcgaggccgggtctgcagattcgtatactagcaggccttccgactctgacgtctccctagaggaggacagggaggccattagacaggaacgtgagcagcaggcggcaatccagctggagagggccaaatctaagccagtggccttcgcagtgaagactaacgtcagctactgcggagcactggacgaagatgtgcccgttcccagcactgccatctccttcgatgccaaagatttcctgcacatcaaggagaaatataacaatgattggtggatagggcgtcttgtcaaagagggttgtgagattggttttattccgtcccccctgagattggaaaatatccgcatccagcaggaacagaagcggggacgatttcacggtgggaaaagtagtggcaactcgtcaagttctttgggggaaatggtgtccggaaccttccgagccacacccacatccaccgcaaaacaaaaacaaaaggtcacagagcatataccaccatatgacgttgtgccctctatgcgcccagttgtactcgttggcccctctctgaagggctacgaggtgaccgacatgatgcagaaggccttgttcgatttcctgaaacatcggtttgacggtcgaatcagcatcacccgagtgactgcagacatctccctggccaaaagaagtgtcctcaacaacccctctaagagagccataattgagagatcaaatacacgctcatcccttgctgaggtccagagcgagattgagagaatctttgaactcgctagatcgcttcagctcgtggttctggatgccgacaccatcaaccaccctgctcaactcattaaaacttccttagctcccatcattgtgcacgtgaaagtcagttcacctaaagtacttcagaggctgatcaagtcaagagggaagtctcagtccaaacatcttaatgtgcaattggtagcggccgacaagctggctcagtgccccccagagatgtttgatgtgattctcgatgaaaatcagctggaggatgcttgtgagcacctgggagagtaccttgaggcatattggcgggccacacacactacttctagtactccaatgactccactgctgggtagaaatctgggcagcactgctctcagcccatatccaaccgcaattagcggcctccagagtcaacgcatgagacacagtaatcattccactgaaaactcgccaatcgagaggaggtcccttatgaccagcgacgagaactatcacaacgaaagggcccgaaaaagtagaaaccgcctcagcagcagctcccagcattcccgcgaccactaccccctagtcgaagaagattatcctgacagctaccaggacacatacaaaccacatagaaacagggggtctcccgggggctattcccatgattccagacacaggttgtag

SEQ ID NO: 181197 - DNA, 1563 bp, synthetic construct
  misc_feature 1..1563: note = Description of Artificial Sequence: Synthetic coding sequence
  source 1..1563: mol_type = other DNA
atgagcagcagcagctacgccaagaacggcaccgccgacggcccccacagcccaacaagccaagtggcacgagggaccactacacgacggtccagattaaagcgttccgacggaagtacaaccagcaccagctttatattacggcaagggagcgcggattcatatacctcacgaccaagcgattccgacgtgagcctggaagaagaccgggaagccattaggcaggagcgggagcagcaagccgccatacagcttgaacgggctaagtccaaaccagtggccttcgctgttaagacaaacgtgagttactgtggggcccttgatgaggacgttcccgtccctagcactgcgatttcattcgacgccaaagattttcttcatattaaggagaagtataacaatgattggtggataggaagactggtgaaggagggttgcgaaatcggctttattccctcacccctgcgccttgaaaatattcggatccagcaggagcagaagcgggggaggtttcacggggggaagagctctggaaacagttctagcagcctaggcgagatggtgagcggaactttcagggctacaccaacctcgactgccaagcagaaacagaaggtcacagagcatattcctccctatgatgtggtgccgtctatgaggccagtggttctcgtgggaccttccctgaagggatacgaggtgacagacatgatgcaaaaggctctgtttgactttctgaagcaccggtttgacggacgcatcagcatcaccagagtgacggctgacatcagtctggcgaagagatctgttctgaacaatcccagcaagagggccatcatcgagaggtccaatacgcgcagttccctggcagaggtgcaatcagagatcgagcgcatttttgaactagctcggtctctgcagctggtggtactcgacgccgacacaattaatcatcccgcccagttgattaaaaccagcttggcgccaattatcgtccatgtcaaagtgtcctcaccaaaggtgctccagcggctaatcaagtctcgtggtaagtcgcaaagcaaacacctcaatgtccaactagttgctgccgataagttggcgcagtgcccccctgagatgttcgacgtcatcttagatgaaaaccagctcgaggatgcctgcgagcacctcggcgagtacctagaggcttactggcgtgccacacacactacttccagcacacccatgacccctctgctcgggagaaatctcgggagcaccgcactgtcgccctatcctacggccatttcaggcttacagagccaacggatgcgtcattccaaccattctactgagaacagcccgatcgaacggaggagcttgatgacaagcgacgagaactatcataatgaacgggctcgtaaatccaggaacaggttaagttctagcagccagcactcccgggaccattaccctctggtagaagaagattacccagactcttatcaggacacatacaagccacataggaaccgtggatcccctggcggctacagccacgatagcagacatagattatag

SEQ ID NO: 181198 - DNA, 1248 bp, synthetic construct
  misc_feature 1..1248: note = Description of Artificial Sequence: Synthetic coding sequence
  source 1..1248: mol_type = other DNA
ttctacttcctgtgccagggcagcgccgacagctacaccagccggccttcagacagcgatgtgtctctggaagaagatcgggaggcgattcgtcaggaacgcgaacagcaagctgcaattcagctggagcgcgccaagagtaaaccggtcgcattcgccgtcaaaaccaacgtgtcctattgcggcgccctggatgaggacgttcccgtgcctagcactgccatctccttcgacgctaaagatttcctgcatataaaggagaaatacaacaatgattggtggatcggccggctcgtaaaggaaggatgtgagatagggttcattcccagcccccttagactagagaatatccggatccagcaggagcagaagaggggccgctttcatgggggcaaaagcagtggaaatagctccagtagtcttggggagatggtgagcggtacctttagagccaccccaacatctaccgctaaacaaaagcagaaggtcacagaacatatcccgccttatgacgtggtcccaagcatgcgcccagtggtcctggtgggaccgtctctgaaaggctacgaggtgactgacatgatgcagaaggcattgtttgactttctcaagcatcggttcgacggcagaatctcaataacccgagttaccgccgacattagtcttgccaagcgctccgtgctgaacaatcccagcaagcgggcgattatagaacgcagcaacacacggtctagtttagctgaagtgcagtcggaaattgagaggatcttcgagcttgccagaagcctgcagctggtcgtcttggacgcagacacaatcaatcatccagcgcaactgatcaagactagcctggcgcctatcattgtccacgttaaggtaagcagcccaaaggtgttgcagcgcctgattaaaagtcgcgggaaatctcaaagcaagcatctgaatgtgcagcttgtagccgctgataaacttgcacagtgccccccttctcaaaggatgaggcacagcaaccactctacagagaattcaccaatcgaacggaggtccctcatgacttctgatgagaactatcacaatgagagagcacgaaaatctcgtaatcggctctcctcaagcagccagcactctcgggatcattaccctctcgttgaggaggattaccctgacagctatcaagatacttacaagccacacagaaacaggggctcgcctggaggatactctcacgattcccgtcaccgtctctag

SEQ ID NO: 181199 - DNA, 558 bp, synthetic construct
  misc_feature 1..558: note = Description of Artificial Sequence: Synthetic coding sequence
  source 1..558: mol_type = other DNA
atgagcggcagcttcgagctgagcgtgcaggacctgaacgacctgctgtcagacggctctggatgctatagcttgccatcccaaccatgtaacgaggtgacccctaggatctatgtgggcaacgcctcagttgcacaggatatacctaaactccaaaaactgggtatcacacacgtcctgaatgcagcagaaggacggagcttcatgcacgtgaataccaatgctaatttttacaaagacagcggcatcacctatttgggaatcaaggctaatgatactcaagaatttaatctcagtgcatacttcgagcgagccgcagactttattgatcaggcactagcacaaaaaaacggacgggtgctggttcactgccgcgagggctattctcggagccctactttggtgatcgcctatctgatgatgcgtcagaaaatggatgtcaagagcgctctgagcatcgtgcgccagaaccgagagatcggtcccaacgacggctttcttgctcagctatgccagttaaatgatcgtctggcaaaggagggaaaactcaagccatag

SEQ ID NO: 181200 - DNA, 972 bp, synthetic construct
  misc_feature 1..972: note = Description of Artificial Sequence: Synthetic coding sequence
  source 1..972: mol_type = other DNA
atgggcctgttcgaccggggcgtgcagatgctgctgaccaccgtgggcgcgtttgctgcattcagcctgatgaccattgcagttggaacagactattggctgtatagcagaggcgtatgtaagactaaaagcgtgtccgagaatgagacaagcaagaaaaatgaggaggttatgacccattcgggtctgtggagaacctgctgcttggagggaaacttcaaagggctctgcaagcaaatcgaccacttccccgaggacgctgactatgaggctgataccgcagaatacttcctgcgggccgttcgggctagctcgatcttccctattttgagcgtcatcctcttattcatgggcggcttgtgcatcgctgcatcagagttttataaaacaagacacaatataattctgagtgccgggattttcttcgttagtgccgggctaagcaatatcatcggcatcattgtgtacatctcagctaacgccggagatccgtcaaaaagtgattccaagaagaacagttatagctatggctggagcttctattttggtgccctttccttcatcatcgcagagatggttggggttctcgccgtgcacatgtttattgatcgccacaagcaattaagggccaccgcaagagcaaccgactatttgcaggcatcagctatcacgcgaataccctcatatcggtaccgctaccagaggcggagtcgatctagcagtcggtcaacagaaccttctcattcccgggatgcgtcacccgtgggtattaagggtttcaataccctgccctcgactgaaattagtatgtacaccctgtcccgtgacccgcttaaggcggccactactcctactgccacctataactccgaccgagataactccttcctgcaggtccacaattgcatacaaaaggaaaacaaagactcactgcactctaacaccgctaacaggagaactacacctgtttag

SEQ ID NO: 181201 - DNA, 948 bp, synthetic construct
  misc_feature 1..948: note = Description of Artificial Sequence: Synthetic coding sequence
  source 1..948: mol_type = other DNA
atgcggatgtgcgaccggggcatccagatgctgatcaccaccgtgggggcattcgccgcctttagcctgatgacgatcgccgtgggcacagactattggctgtatagtagaggagtctgccgtactaagtccaccagtgacaatgagacaagtcgcaagaatgaggaggttatgacgcattctggattatggcgcacctgctgtctggagggagcttttcggggcgtttgtaagaagattgatcacttccccgaggatgctgactacgagcaggacaccgcagaatatttactgcgtgctgtgagagcatcctcagtgtttccgatcctgagcgtgacgctgttatttttcggtggcctgtgtgttgccgccagtgaatttcaccgcagccgccataacgtcatccttagcgctggcatattttttgtcagtgctggcctatcaaatatcatcggcatcatcgtgtacatctcagccaatgcaggggatcccggtcagagggattccaagaaatcctactcatatggttggtctttttattttggcgctttctcctttatcatcgctgaaatcgtgggggttgtcgcggtgcacatatacattgagaagcaccagcaactgcgggctaagagtcatagcgaatttctcaagaagtcaacgtttgcccgccttccaccctaccggtatcggttccgtcggcgttcatcctcaaggtccacagaaccacggtcccgggacctgtctccaatatccaaagggtttcacaccataccctcgacggatatcagtatgtttacactctctagagacccttctaagattactatgggcacactgctaaacagcgacagagaccacgccttcctccaatttcacaatagtacccctaaggagtttaaagaaagcctgcataacaaccccgctaaccgccgtactactcctgtgtag

SEQ ID NO: 181202 - DNA, 891 bp, synthetic construct
  misc_feature 1..891: note = Description of Artificial Sequence: Synthetic coding sequence
  source 1..891: mol_type = other DNA
atgagcgcctgcggccggaaggccctgaccctgctgagcagcgtgtttgcagtgtgcggactgggattgttggggatcgcggtttctactgattattggctgtacctggaagaaggcgtgattgtacctcaaaaccagagtacagaaatcaaaatgtctctgcactctgggctctggcgggtgtgcttcttggcgggggaggaacggggccggtgcttcaccatcgagtacgtgatgccaatgaatactcagctgacaagtgaatccacggtcaacgtgctaaagatgattagatccgccactccttttcctctggtcagcctatttttcatgtttattggctttatactgaataatattggacatattaggccacatcgcaccattctcgctttcgtttctggtatttttttcatcctgagcggcctgtccctggttgtgggtcttgtgctgtatatctcaagtatcaatgacgagatgctgaaccgcactaaagacgcggagacgtatttcaattacaagtatggctggtcatttgctttcgccgctatcagtttcctgttgacagaggtgaaacccgtcacattgtcgatggatcgcctggggctgggcacagcaccactgagcaggggagagtggggctggggaaggcgcgacatcccacagccgttttggaccccagaccacccattatatttcccctcttcttctcagaatgtatctttaagttatttatcgggatctcccccggctcgcatgagtcctggaccctgttcttgtccacatgtgcatttcccaccgcattctagctgtgtgctgtgtcgtcctcaaccccgtgagatgcgacaggcacccgccgcatccccctcatccgctgtattctctctctag

SEQ ID NO: 181203 - DNA, 828 bp, synthetic construct
  misc_feature 1..828: note = Description of Artificial Sequence: Synthetic coding sequence
  source 1..828: mol_type = other DNA
atgagcgcctgcggccggaaggccctgaccctgctgagcagcgtgttcgctgtctgcggcctgggcctgttaggcattgctgtgtcaaccgattactggctctatctggaggaaggtgtcattgtgccacagaatcagtcaacagaaatcaaaatgtccctccattccggcctctggagagtgtgcttcctcgctggcgaggaacgcggacgttgctttaccatcgaatacgtgatgcccatgaatactcagctgacatccgagtctactgtcaatgtgctgaagatgattcggtctgccaccccctttcccctggttagtctgttttttatgtttattggatttatactcaacaacatcggccacattcgcccgcatcgaacgattcttgcttttgtgtctgggattttcttcatcctgtccgggctctcactggtagttgggttggttctgtatatcagttcaataaacgacgaaatgctcaatagaaccaaggatgctgaaacctactttaactataagtacggctggagctttgctttcgctgcgatttcattcctgctgaccgaatccgctggagtgatgtctgtctacctgtttatgaagcggtacacagccgaggacatgtacagacctcatcctggcttctatagaccccgcctgagtaactgcagtgattactctggccagttccttcatccagatgcctgggtgcgagggcgcagtccgtcagatattagctcagaggcctctctacagatgaatagcaactaccctgcactgctgaaatgcccagattacgaccagatgtcttcctcaccctgttag

SEQ ID NO: 181204 - DNA, 828 bp, synthetic construct
  misc_feature 1..828: note = Description of Artificial Sequence: Synthetic coding sequence
  source 1..828: mol_type = other DNA
atgagcgcctgcggccggaaggccctgaccctgctgagcagcgtgtttgccgtctgtggtctgggcctcttggggatcgccgtgtctactgattattggctgtacttagaggaaggagttatcgttccccagaaccagtccaccgagattaaaatgtctctgcattctggactttggcgagtatgttttctggctggggaggagagagggcggtgcttcaccattgaatatgtcatgcctatgaatactcagctcactagcgagtcaacagtgaatgtgcttaagatgatccgaagcgctactccatttcctctggtcagcctgttcttcatgttcatagggtttattttgaataatatcgggcacattcgccctcacagaaccatcttggcctttgttagtggaattttcttcatcctgtcaggactgagtctggtggtgggactggtgctctacatatcaagtatcaatgacgaaatgttgaaccgaaccaaagacgcagagacttacttcaactacaaatatggttggtcctttgcattcgcggccataagtttcctccttaccgaatcagccggtgtcatgtctgtgtacctgtttatgaagcggtacaccgctgaggacatgtacaggcctcacccaggattctacaggccccggctcagcaattgcagtgattactcagggcaattcctgcaccctgacgcatgggtgcgagggagatcaccctccgatatcagctccgaggcctcattacagatgaactccaactatcctgctctgctcaaatgtcccgattacgaccagatgtcttcatctccatgttag

SEQ ID NO: 181205 - DNA, 783 bp, synthetic construct
  misc_feature 1..783: note = Description of Artificial Sequence: Synthetic coding sequence
  source 1..783: mol_type = other DNA
atgatgtggagcaacttcttcctgcaggaggagaaccggcggcggggcgccgccggacggaggcgggcgcacggccagggtagaagtgggctcacccctgaacgtgaggggaaggtgaagctcgctctcttgctagctgcagtcggagccaccctagcggtgctctctgtcgggacggaattttgggtggaactcaacacttacaaagccaacggctcggcagtgtgcgaggctgcgcacttgggactgtggaaggcgtgcactaaacgactctggcaggccgatgtgccggtggaccgtgacacctgcggtcccgccgaactgcccggcgaagccaactgtacttacttcaagttttttactacaggggagaacgcacgtatctttcagaggacaactaaaaaggaagtgaacttagccgctgcggttatcgccgttctgggtctggctgtgatggcgctgggatgcttgtgcatcataatggtcctttccaagggagccgaattcctgcttcgcgtaggcgcagtttgcttcggtctcagcggacttcttctcttagtgtccctggaagttttccgtcacagcgtgcgcgccctcctacagcgcgtttcacctgaaccaccacccgcgcctaggttgacatacgagtacagctggagcctgggctgtggcgtgggagctggactgatactcctgctgggggctggttgttttctgctgttgaccctgccatcctggccatggggcagcttgtgccccaaacggggacacagggcaacctag

SEQ ID NO: 181206 - DNA, 645 bp, synthetic construct
  misc_feature 1..645: note = Description of Artificial Sequence: Synthetic coding sequence
  source 1..645: mol_type = other DNA
atgatgtggagcaacttcttcctgcaggaggagaaccggcggcggggtgccgctggcagaagacgggcgcacgggcagggacgctctgggctgacacctgaacgcgaaggaaaggtgaaactggcgctcttgctcgccgcggtgggggcaacactcgcggtcttgtccgtgggtaccgagttctgggttgagctaaacacttataaggccaatggttcagccgtttgtgaggccgcccacctaggcttatggaaggcttgtacaaagcggctgtggcaagccgatgtgcccgtggacagggacacatgcggccccgcagagttgcctggggaagctaattgcacttactttaaatttttcaccacaggcgaaaatgccaggatctttcagcgtacaactaaaaaagggctgttattgctggtgtctctcgaagtgtttcgacattccgtccgtgctctgttgcagagagtgtcccctgagcccccacctgcaccgcgactaacgtacgaatatagttggtcactgggctgtggagtgggcgctggcctgattctcctcttgggcgcagggtgtttcctcctgctgacgctcccatcttggccttggggaagtctctgccccaaaagaggtcaccgggcaacttag

SEQ ID NO: 181207 - DNA, 570 bp, synthetic construct
  misc_feature 1..570: note = Description of Artificial Sequence: Synthetic coding sequence
  source 1..570: mol_type = other DNA
atgatgtggagcaacttcttcctgcaggaggagaaccggcggcggggggccgctggccgaagaagggcccacggtcagggcagatcaggcttaactcccgagcgcgaaggtaaggttaaactcgcactcctactggctgccgtgggcgctactttggctgtgcttagcgtgggaaccgaattttgggtcgagctgaatacctataaagctaacggctcagcagtttgtgaggccgcccacctggggctttggaaagcttgcactaagagactgtggcaagccgacgttcccgtggacagagacacatgcggccctgcggaacttcctgggggactcctcctgctggtgagtttggaggtatttaggcactccgtgagggccctgctgcaacgagtttcccccgaacctccccccgcgccccgcctgacatatgagtatagctggtctctgggatgtggcgtgggggcaggactcatccttctgttaggagcgggttgtttcctacttctgaccctcccatcctggccttggggatctctttgtcctaagcgcgggcaccgggctacctag

SEQ ID NO: 181208 - DNA, 321 bp, synthetic construct
  misc_feature 1..321: note = Description of Artificial Sequence: Synthetic coding sequence
  source 1..321: mol_type = other DNA
atgagcaccaacaacatgagcgacccccggcggcccaacaaggtgttaagatataagcccccaccctcagagtgtaatcctgcgcttgatgaccccacgcctgactacatgaatttactggggatgatattcagcatgtgtgggcttatgcttaagctgaaatggtgcgcctgggtagctgtctactgtagcttcatttccttcgccaacagcaggagctctgaagacacaaaacagatgatgagctcctttatgctgagtattagcgcagtagtgatgtcatatctccaaaaccctcagccaatgactcctccatggtag

SEQ ID NO: 181209 - DNA, 828 bp, synthetic construct
  misc_feature 1..828: note = Description of Artificial Sequence: Synthetic coding sequence
  source 1..828: mol_type = other DNA
atgagccactgcagcagccgggccctgaccctgctgagcagcgtgtttggcgcttgtgggcttctgttagtgggcattgccgtgagcacagactactggctttatatggaggaaggcacggtgctaccccagaaccagaccaccgaggttaaaatggccctgcatgcaggactgtggcgcgtctgctttttcgccggcagagagaagggacgttgcgttgcaagcgagtattttctcgagccagaaataaatctggtaacagagaatacagaaaacattctgaaaacagtgaggacggcgacacccttccccatggtgtcattatttttagtgttcaccgcctttgttataagtaacattggccatatacggccccaaagaacgatcctggcgtttgtgtcagggatcttcttcatcctatccggtttatccttagtggtggggctggtgctgtacatttcttctatcaacgacgaagttatgaaccgtccatcttcgtctgagcagtactttcattacagatatggctggtcctttgcctttgccgcttcatcttttttactgaaagaaggtgcaggagtgatgtccgtctacctttttacgaagcggtacgccgaggaagaaatgtatcgaccgcatcctgccttctataggcctcgccttagcgactgtagtgattactctgggcagtttttgcagcctgaggcgtggcgcagaggccggtcgccatcagacatctcatccgatgtctccattcagatgactcagaactatcctccggccattaagtacccagatcaccttcatataagcacttctccctgctag

SEQ ID NO: 181210 - DNA, 1278 bp, synthetic construct
  misc_feature 1..1278: note = Description of Artificial Sequence: Synthetic coding sequence
  source 1..1278: mol_type = other DNA
ctggagagcctgaagcggtggaacgaggagcggggcctgtggtgcgaaaagggggtccaagtgctgctcacaacggtcggcgcattcgccgcatttggtctcatgactatagctatatccactgattattggctctacacaagggcccttatttgcaatacgaccaacctgactgcggggggtgatgatggcacccctcatcggggtgggggcggagcgtcagaaaagaaagatccaggagggttgactcatagcggtctgtggcgcatctgttgcctggaaggcctcaagaggggtgtgtgtgtgaagataaatcacttccccgaggacacagactatgatcatgacagtgccgagtacctcctgcgggtagttcgggctagctcaatctttccaatactgagcgctattctgctattgctgggaggcgtgtgcgttgctgccagccgtgtttacaagtcaaagagaaacattattctaggtgctggcatcctctttgtggctgcaggcttatctaacataattggcgttattgtgtacatctccgctaatgcaggggaaccaggacccaagagagacgaggaaaagaagaaccactattcgtatggatggtctttctacttcggtggtctgagtttcattctggctgaggtgattggcgttctagccgtcaatatctacatcgaacgtagcagagaggcccattgtcagtcgaggtcagaccttctgaaagcaggtggcggtgccggcggttcaggtggatctggcccctctgccatcttgaggttaccttcctatagattccgctaccgtcgcaggagccgctcgagtagtcgctcctctgaacccagtccatccagagatgcatccccagggggcccggggggacccggcttcgcatccacagatatctctatgtatacactgtccagagacccttcaaagggctctgtggctgccggtctggctggagcaggtggcggaggtggcggtgctgttggcgctttcgggggggccgccgggggcgccggtggaggcggcggagggggggggggagcaggggctgagcgggatcggggtggagcctccggattcctcacactccacaatgcttttcctaaagaagccggcggcggtgtcaccgtcaccgttactgggcctccagccccaccggcgcctgcccccccagcacccagtgcaccggcgccagggacgctggcaaaagaagccgcggcatctaacaccaacacattaaaccgaaagactactccagtctag

SEQ ID NO: 181211 - DNA, 6540 bp, synthetic construct
  misc_feature 1..6540: note = Description of Artificial Sequence: Synthetic coding sequence
  source 1..6540: mol_type = other DNA
atggtgaacgagaacacccggatgtacatccccgaggagaaccaccagggctccaactacggctccccccggccagcccacgctaatatgaatgcaaacgcagcagcaggcctggcacccgagcatatacctacacccggcgccgccctgtcatggcaggctgctatcgacgctgcccgacaggctaaattgatgggtagcgctggcaatgctacaatcagcaccgtgagtagcactcagcgaaagcgacaacagtacggaaagcccaaaaagcaaggttcaactactgcaactagaccaccacgggctctgttatgtctcaccttaaaaaaccctattagacgtgcctgcattagcattgtcgaatggaaaccttttgaaattatcatcctgctaactatctttgcgaactgcgtcgccctggccatctatatccccttcccggaagatgactctaacgcaaccaattctaatttggagcgggtggagtatctgtttctcattatctttacagtggaggctttcttgaaggtgatcgcatatggactcctgttccatccaaatgcctacctgcgtaatggttggaatctcttggacttcatcatcgtggtagtcggactgtttagcgctattttggagcaagccacaaaggccgacggcgctaatgccctgggcggcaagggtgcaggctttgatgttaaggcgctgagagcttttcgagtactgcggccgcttcgtctggtgagcggagtcccttcgctgcaagtggtcttgaattccattatcaaagcgatggtccccttattacatattgccctgcttgtgctatttgtaattatcatctacgctatcatcggcttagagcttttcatgggcaaaatgcataagacgtgctataatcaggaagggatcgccgatgtccccgcggaggacgaccccagcccctgcgcgcttgagacaggccatggtcgccagtgtcaaaacgggaccgtttgcaaaccaggctgggatggacctaaacacggcatcaccaacttcgacaattttgcttttgccatgctcaccgtatttcagtgcatcactatggaaggctggacagatgtcctgtactgggtcaacgatgccgtcggaagagactggccatggatctactttgttactctcattataatcggatcttttttcgttttgaatctggttttgggtgtacttagcggcgaattcagtaaggaacgggaaaaagcgaaagcaaggggcgatttccagaaattaagggaaaagcaacagctcgaagaagatctgaaaggatatctcgattggatcactcaggccgaggacatcgatccagagaatgaggacgagggcatggacgaagagaaaccacggaacatgtcaatgccaacatctgaaaccgaaagtgtcaacacagaaaatgttgcaggaggggacattgaaggggaaaattgtggagccaggctggcccaccgaatctctaagtccaaattcagtcgctattggcgaagatggaatcggttttgccggaggaaatgcagagctgccgtaaagtctaacgttttttattggcttgtaatctttctggtatttttaaacactctgaccatcgcaagcgaacactacaatcaacctaattggctgactgaggtgcaggatacggcgaacaaggcgctgttagccttatttaccgcggaaatgttactgaaaatgtattcactgggcctgcaggcttatttcgttagcctgtttaaccgctttgattgttttgtcgtctgcgggggcatcctcgagacaattctggtcgagaccaaaatcatgtctccactgggcatttcagtcttgcggtgcgtccgtctgcttcggatattcaaaattacccgatactggaatagcttgtccaatctcgtagcttcccttctgaactctgtacgctccatcgcaagcctattgctcctacttttcttgttcatcatcatcttcagcttgctgggaatgcagctgttcgggggaaaattcaacttcgacgagatgcagacgcgacgctccacctttgataatttcccccagtcattactaacggtcttccagatcctcactggtgaggattggaactctgtgatgtacgatggcatcatggcttatggcggaccctccttccccggtatgctcgtttgcatctattttataatcctgtttatctgcggaaactatatccttctgaacgttttcctagcaatcgctgttgacaatttggctgacgccgagtccctgaccagcgctcagaaggaagaagaagaagaaaaagagcggaagaaactggcgcggaccgcatctccagagaaaaagcaagaattagtggaaaagcctgccgttggcgaatcaaaggaggagaagatcgagcttaagagcattaccgctgatggtgaatctccacctgccactaagataaatatggacgatttgcagcctaatgaaaatgaagataaatctccatacccgaatccggaaaccacaggagaggaagatgaagaagagccagaaatgcccgtgggaccacggcctaggcctttatcagaactccaccttaaggagaaggccgtccccatgcccgaggcttctgctttttttatttttagttcaaacaacaggttccggctccagtgccacagaatcgtgaatgacacgattttcacgaatctcatcctctttttcattttactgagttctattagcttggccgccgaagatcccgtccagcacacgagcttcagaaaccatattttgttctattttgacatagtcttcacgacaattttcacaatcgaaatcgcattaaagatgaccgcatacggcgcttttctgcacaagggcagtttttgcagaaactacttcaacatcctagatctgctggttgtgagcgtgtctttgatctcattcgggatccagagttccgcgattaatgtggtcaaaattctgcgcgtccttcgcgtgttacgtcccctgagggctattaatagggcgaaggggctgaagcatgtcgtccaatgcgtgttcgtggctataaggacgatcgggaatatcgttattgttaccaccctccttcagttcatgtttgcctgcatcggagtgcagctgttcaagggtaaattgtatacttgtagcgacagtagcaagcagacagaggccgagtgtaaggggaattacatcacgtacaaggatggggaagtggaccatccaataattcagccaaggtcttgggagaacagcaagtttgacttcgacaatgtgcttgcagccatgatggctctattcacagtgtctactttcgagggatggcccgaactcctgtaccgctctatagacagtcatacggaggacaagggcccaatctacaactatagggtcgagatcagcatcttctttattatttacattattattatcgccttttttatgatgaacatctttgtcgggtttgtgatcgtgactttccaggaacagggcgagcaggaatataaaaattgcgagcttgataagaaccaacgccaatgtgtcgaatacgcgttgaaggccagacctttgcgtcgctatatccccaagaaccagcatcaatataaagtttggtatgtggtcaactccacttatttcgagtacttaatgtttgtattgatcctgctgaacaccatttgtctggccatgcaacattatggacagagttgcctcttcaaaatcgctatgaacatactgaatatgctcttcaccggtcttttcaccgtggagatgatcctgaagctgatcgcctttaaacccaaacattatttttgcgatgcctggaatacattcgacgcactgatagttgtcggctcaatagtggatatcgccattacggaggtcaatcctgcagagcacacccaatgttccccatctatgggcccttcatgctcccaccctcccctcgcagtgttgaccgcccctcctgtggccgatggctttcagaatgctgaggagaattcacgaatctccatcacattcttcaggctcttcagggtaatgcggctagtcaaactgctctcccgcggggagggcatccggactctcctctggaccttcattaagtcatttcaggcgctgccttacgtcgccttgttaatcgttatgctgttcttcatttacgccgttatcgggatgcaagtgtttggcaaaattgccttgaacgacacaacagagattaacagaaataataacttccagaccttccctcaggctgtactcctcttgttccggtgcgcaaccggagaagcctggcaggacatcatgctggcttgcatgcccggtaagaaatgcgcgccagagtcagagcccagcaatagcacggaaggggaaacaccttgtgggtcctcctttgcggtgttctacttcatcagtttctacatgctgtgcgcctttcttataatcaacctgttcgtcgctgtcatcatggataactttgattacttaaccagggattggagcattttgggccctcaccatctcgatgagtttaaaaggatttgggcagaatacgacccggaggccaaaggtcgtattaagcacctggatgtcgtgacgttgcttcgccgtattcagccgcccctcggattcgggaaactgtgtccccaccgagtcgcatgcaagcggctggtatccatgaacatgcctttaaacagcgacgggacggtcatgtttaacgcaacactgtttgccctggttcgcacagccctccgcataaaaactgaagaaggtcctagtccatccgaagctcaccagggcgctgaagacccatttagacccgccggcaaccttgaacaggctaatgaggaattgagagcaattattaaaaagatatggaagcgtacgtccatgaaactactggaccaggtggtgccaccggcaggtgacgatgaagtcacagtcggtaagttttacgctacctttctgattcaagagtattttaggaagtttaagaaacgaaaggagcagggcctcgtgggcaaaccatcacagagaaatgcactgagcctgcaggccggactcaggacccttcacgatattggacccgagatcagaagggctatcagtggcgacctgactgccgaggaggagctggataaggctatgaaggaagcagtgtccgcggcttcagaagatgatattttcaggcgtgcgggggggctttttgggaaccacgtctcatattatcaaagtgatggaaggtcagcttttcctcagaccttcacaactcagcggcctctacacattaataaggctgggtcctctcaaggcgacaccgagtcaccaagtcatgaaaaactggtggatagcacctttactccctccagttatagttccacaggcagcaacgcaaatattaataatgccaacaacacagcactgggtaggctgccaaggccagctgggtatccctctactgtaagcactgttgagggacacgggccaccgctgtccccagctatcagggtacaggaagtggcgtggaagctcagctctaaccggtgccactcgcgtgaatcccaagccgcaatggctggacaggaagagacatcccaggacgaaacctacgaggttaagatgaatcacgacaccgaggcctgcagcgagcccagcctgctgtcaaccgaaatgttgtcttatcaagatgacgaaaaccggcagctgacgctgccggaagaggacaagagggatatccggcaaagtccaaagcgtgggttcttgcgctccgcctctttgggacgaagggcgtcattccaccttgagtgcctcaaaaggcagaaagatcgaggaggggatatttcccagaagacagttctgccgttgcacctcgttcaccatcaggcccttgccgtggcagggctaagtcccctgctacagaggagccattcccctgccagttttccccgcccattcgccactcctcctgctaccccagggtctcgcggctggccccctcagcccgtgcctactctgcggctggaaggagtagaaagctcggaaaagctgaatagctctttcccttctatccactgcggctcctgggccgagacaacacccggcggcggggggtcatctgcagcccgaagggtacggcctgtgtctcttatggttccctcgcaagctggcgctcccggcagacaatttcatggatctgcttcttctctggtggaggctgtcctcatcagtgaaggcttagggcagtttgcgcaggacccaaagtttattgaggtgaccacgcaggagttggccgatgcttgcgacatgacgatcgaagagatggagtccgccgccgacaacatcttatcaggcggcgctcctcaaagtccgaatggagctctgctgccctttgtcaactgccgcgacgctggtcaggatcgagcaggcggggaggaggatgcgggttgcgtgcgggcgcgcggccgtccttctgaggaagagctccaggactctcgggtgtacgtatcgagtttgtag

SEQ ID NO: 181212 - DNA, 6561 bp, synthetic construct
  misc_feature 1..6561: note = Description of Artificial Sequence: Synthetic coding sequence
  source 1..6561: mol_type = other DNA
atggtgaacgagaacacccggatgtacatccccgaggagaaccaccagggatccaactacggatcacccagaccggctcatgccaatatgaacgcaaacgctgcggctgggctcgcccccgaacatatccctactccaggcgccgccctgagctggcaggctgccatcgacgccgctcggcaagccaaactcatgggctcagccggtaacgccacaattagtaccgtttcttctactcagcgcaagaggcaacaatatggtaagccgaaaaaacagggtagtactactgcaaccaggcccccccgagccttgctctgcttaactcttaaaaaccccatccgtcgagcctgcatcagcatcgttgagtggaagcccttcgaaatcatcatccttctgaccatctttgccaactgcgtggccctggctatatatatccccttcccagaggacgattccaatgcaaccaacagcaaccttgaacgggtggaatatttgttcctgattatctttaccgtagaagccttcctgaaagtgattgcctatggccttctttttcaccctaacgcatatctaaggaacggctggaatctgctggactttattattgtggtagtgggcctatttagcgctattctggaacaggcaacaaaagccgacggagccaatgccctcggcggcaagggagccggcttcgatgtgaaggcactgcgggcttttagggttctgagacctttgcgccttgtgtctggtgtgcccagtttacaggtggtactgaattccattataaaggcaatggtgccactcctccatatagctctcctcgttctattcgtgatcattatatacgccatcatagggctggagctgtttatgggcaagatgcacaagacgtgttataaccaagagggaattgccgacgtccccgcagaggacgaccccagcccgtgtgcactcgagacaggtcatggccgccagtgccaaaatggtactgtatgtaagccgggttgggatggccccaaacacggcatcacaaatttcgacaactttgcgttcgcaatgttaacggtcttccagtgtatcacgatggagggttggaccgacgtgctgtattgggtgaacgacgccgtgggaagggattggccctggatctactttgtcacccttattataattggatctttcttcgttctgaatctggtactgggtgttctctctggtgagttctctaaagagcgagagaaggccaaggccagaggcgattttcagaaactgagagaaaagcagcagctggaggaagacctcaaagggtacttggactggatcacccaggcagaggatatagaccctgagaacgaggacgaaggcatggatgaagaaaagccccgaaatatgagtatgccaacgagcgagaccgagtccgtcaacacagagaatgtcgctggtggtgacatagagggagagaattgtggggcgcgcctggctcatcggatcagcaaaagcaaattctcacggtattggcggagatggaatcggttctgcagacgcaagtgtcgagcagccgtgaagtcaaacgtcttctactggctagttatctttctggtgttcctcaacacattgacaattgcatccgaacattacaaccagcctaattggctcaccgaggtacaagataccgccaacaaggccctgctcgccctgtttacggccgaaatgcttctgaaaatgtatagcctgggactgcaggcgtattttgtgagcctgtttaaccgctttgactgtttcgtcgtgtgtggcgggattctagagacgatcttggtggagaccaagattatgtccccactcgggatctcagtgttgcgatgcgttcgcttactccgcattttcaaaataacaaggtattggaactcactaagcaacttggtggccagcttgctgaattccgtgcgaagcattgcctctttattgctgctcttgttcctgtttatcatcattttctctttgctgggaatgcagctttttggaggtaaattcaactttgatgaaatgcaaacgcgcagaagcactttcgataattttccacagtctctcctcacagtgttccagatcctgacaggcgaagactggaactctgtcatgtatgacggtattatggcctacggcggtccttcatttccgggaatgctggtatgcatttattttattatactgttcatatgtggcaactatatcctccttaatgttttccttgcaattgctgtggacaacctcgccgatgctgagagtttaaccagcgctcaaaaagaggaggaagaagagaaagaaagaaaaaagttggctaggaccgcttctccagagaagaagcaggagctggtggagaagccagctgtgggagaaagtaaagaggagaagatcgaacttaagtccattaccgcagacggcgagtcgccacctgccaccaagatcaacatggatgaccttcaacctaacgagaatgaggataagtcaccataccctaatcccgagactacgggcgaagaagacgaggaggagcccgagatgcctgtggggccccgtccgaggccactcagcgaactgcatctaaaagagaaagctgtgcccatgcctgaggcgtcagcgtttttcatcttctcctccaacaatagatttcgactgcagtgtcaccggatcgtgaatgatacaatattcactaatcttattttatttttcattctactgtccagcatttccctggccgccgaggacccagtgcagcacacgtcctttcgtaaccatatactgttttactttgatatcgtctttacaacaatatttactatcgaaattgctctgaagatactcgggaacgctgattacgtgtttaccagtatctttaccctcgagattattctgaaaatgactgcttacggcgctttcctgcataagggctcgttctgccgcaactattttaacattctagacctgctagttgtttccgtatctctgattagcttcggtatccagagtagcgccataaacgtagtgaaaattctgcgcgtgctcagagtgctgagaccactgcgggcaataaacagagcgaaaggattgaagcacgttgtgcaatgcgtgttcgtcgccatcaggacgatcggcaacatagtcatagtgaccacactgttgcaatttatgtttgcttgtatcggagttcaattgttcaagggcaagctgtatacttgctctgactccagcaaacagaccgaggccgagtgtaaggggaactacatcacctataaggatggcgaagtcgatcatcctatcattcaacctagatcatgggagaattccaagttcgacttcgataacgtgcttgccgctatgatggccttgtttacagtgagtacctttgagggctggcccgaactcctctaccgatctatcgattcccacacggaggacaaaggaccaatctataactatcgagtagaaatctccatcttttttattatttacattattattatagccttctttatgatgaacatcttcgtagggtttgtaatcgtcacatttcaggagcagggcgagcaggagtacaaaaattgtgaactggacaaaaatcagagacagtgtgtagaatacgcactgaaagctaggcccttacgacgttacatcccgaagaaccagcatcagtataaagtatggtacgtggtgaacagtacttatttcgaataccttatgttcgtccttattctactgaacaccatctgcctcgcaatgcagcattacgggcaaagctgtctttttaagatcgctatgaacatcttgaatatgctgttcactgggttgttcacagttgagatgatcctcaagctgatcgctttcaaaccgaagggctactttagcgatccctggaacgtgttcgactttctgatcgtgatcggaagcatcatcgatgtcatcctctcagagactaatcactacttttgcgacgcctggaacacctttgacgccctcattgtggttgggagtatcgtcgacatcgccatcacagaggtgaaccccgcggaacatacacaatgttcaccctccatgaacgccgaggaaaattcacgaatctccattacatttttcagactcttcagagtcatgcgccttgtgaagctgctgtctaggggggaaggcatcaggacactgctttggacctttataaagtctttccaggcgcttccgtatgtggcgctgctcatcgttatgttgttctttatctacgcagtgatcggaatgcaggtgttcggcaaaattgctctgaatgataccacagagatcaatcgcaacaacaactttcaaacgtttccgcaggccgtcctcctattgtttaggtgtgcaactggagaggcttggcaggacataatgctggcctgcatgcccggcaagaagtgtgctcctgagagcgaaccgtccaattccactgaaggggaaacaccatgcgggtcctcgtttgcagtgttctatttcatatcattctacatgctttgcgctttcctcatcatcaacctgttcgtggccgtgatcatggacaattttgactatctcactcgagactggagcattctggggccacaccacttggacgagttcaagaggatatgggccgagtacgaccctgaagccaaggggcgcataaagcatctggatgtcgtgacactcctgcgaaggatacagccacctctggggtttggcaaattatgtcctcacagagtggcctgtaagaggctcgtgagcatgaatatgccccttaactctgacgggaccgtcatgttcaatgcgactttgttcgctctggtgcgcacggccctgcgcataaagacagagggaaacctcgagcaagccaatgaagagttgagggccatcatcaaaaagatatggaaacgaacaagtatgaagctactggaccaggtggtacccccggccggggatgacgaggtgactgtgggcaagttttacgccaccttcctgatacaggaatactttagaaaatttaagaagcgaaaggaacaagggttagttgggaaaccaagccaaaggaacgctctcagcttgcaggctggccttcgaaccctgcatgacattgggcctgagatcaggcgtgcaatttcgggagacctgacggccgaagaggagttggataaggcgatgaaagaagctgtcagcgctgcgagtgaggacgatatattccggcgtgcaggtggtcttttcggcaaccacgtgtcatactaccagtctgacggccgttccgcgttccctcagacgttcaccacccagcggccgctgcacatcaataaagcggggtcatcccagggcgatacagagtcaccttcccatgaaaagctagtagattctaccttcactccctcgtcctatagctctacaggatctaacgccaacattaacaatgccaacaacaccgccctcggccggctgcctcggccagctgggtatccctccaccgtaagtactgtggagggtcatggtcccccgttgagcccggcaatcagagtccaggaggtggcctggaagctctcttctaacaggtgccactctcgcgagtcacaggccgccatggccggtcaagaagagacaagccaggatgaaacctacgaggtgaagatgaaccatgacacggaagcatgttcggagcccagccttctgtccacggagatgctgtcctaccaggacgacgagaaccggcagctgacgctgccggaagaggacaagcgggacatcaggcagtctcccaagagaggcttcttgcggtccgcctccctcggaagacgggcgtcattccacctcgaatgtctcaagcgccagaaggataggggcggggatatctcacagaagactgtcctgcccctccacctggtgcaccaccaggcactggccgtggctggactttcccctcttctccagcggagtcattccccggcaagctttccgagaccttttgccactccacccgctactcccggcagccggggatggccaccccagcccgtgcctactctgcggcttgagggcgtcgagagttctgagaagctgaatagcagcttcccttccattcattgcgggtcatgggctgagacaacaccagggggcggcggatcatctgcagcacgacgggtgcggccggtgtctctaatggtgccctcccaagcaggcgcccctggtcgccagttccacggatccgccagttctctagtagaagcagtcctcatcagcgagggacttggtcagttcgcccaggatcccaagttcattgaggtgaccacacaggaactggcagatgcttgcgacatgactattgaagaaatggaaagcgcagccgacaatatcttaagcggcggcgccccgcagtcgccaaacggggcactactgcctttcgtaaattgccgagacgcaggacaggaccgcgcaggcggtgaggaggatgccggctgcgttcgggccagggggcgcccctcagaagaggaattgcaagacagccgggtgtatgtgagctcattgtag

SEQ ID NO: 181213 - DNA, 6441 bp, synthetic construct
  misc_feature 1..6441: note = Description of Artificial Sequence: Synthetic coding sequence
  source 1..6441: mol_type = other DNA
atggtgaacgagaacacccggatgtacatccccgaggagaaccaccaggggtcgaattatggttctccccggccggctcacgcaaatatgaatgctaacgctgccgctggcctcgccccagaacacatccctactcctggagccgcgctatcatggcaagccgcaattgatgcagcccgccaagccaaactcatgggctcagccgggaatgctactatctctacagtcagctccacccagcgtaaacggcagcagtatggtaaacctaagaagcagggaagcacgaccgcaactcggccccccagagctctcctttgcctgactctgaagaacccaatccgaagggcatgtatttcgattgtcgaatggaagcccttcgaaattatcattctccttacgatatttgccaattgcgtggccctggcaatatacattcccttcccggaggatgattccaacgctactaactcaaatcttgagcgggtcgagtatttatttttgatcattttcacagtcgaggccttccttaaagtcatcgcgtatggattactgttccaccctaatgcttatcttcgtaacgggtggaatctcctggatttcattattgtagtggtcggcctcttcagcgctattctggaacaggcaaccaaagcggacggagctaacgctctgggaggcaaaggagctggcttcgatgtgaaggctcttcgcgctttcagagttctgagacctcttcgcttagtaagcggggtaccctcactgcaggtcgtgttaaactcaatcatcaaggctatggttcctttactgcacattgccctgctggtactgttcgtcatcatcatttatgccataatcggtcttgagctgtttatgggcaaaatgcacaaaacatgttacaatcaagaaggaatcgcggacgtgcccgcagaggatgatccctcaccctgtgctctggagactgggcatgggagacaatgtcagaacggcacagtctgtaaaccaggttgggacgggccaaagcacggaattactaactttgacaactttgccttcgctatgcttaccgtgttccagtgcatcaccatggagggttggactgatgtgctctattgggtcaatgatgccgtcggacgagactggccttggatttacttcgtcaccctgattataattggttcgtttttcgttctcaacctcgtcctcggcgtgttatcaggcgagttctctaaggagcgcgaaaaagccaaggccaggggggattttcagaagttgcgggagaagcagcagttggaggaggacttgaaggggtacttggattggatcacgcaggcagaagacatcgatccggagaacgaggatgaaggcatggacgaggagaagccacggaacatgtccatgcctaccagcgagacagagtccgtaaacaccgagaatgtcgccgggggagacattgaaggcgagaattgtggcgctcggcttgcgcaccggattagcaagtccaaattttcacgctattggcggcggtggaatcggttctgtcgacgaaaatgccgggccgccgtcaagagcaatgtcttctattggctggtgattttcctagtctttctgaacacactcactattgcctctgagcactataaccagccaaactggctgactgaagtacaggatacagctaacaaggccttacttgccctgtttacggctgaaatgttgcttaaaatgtattcgctgggtttgcaggcttactttgtgtcactcttcaataggttcgattgttttgtcgtgtgtggtggtattctggagaccatcttagtggagaccaagatcatgtctcccttaggaatttctgtgctgaggtgcgttaggcttctgcgcattttcaagatcacacgatattggaactctctctcaaatttagtagccagcttactgaacagtgtccgaagcatcgcaagcctgcttttattattgttcctctttattatcattttttcgcttctcggaatgcagctctttggaggcaagtttaatttcgacgagatgcagacacggagaagcaccttcgacaacttcccccagtcattgctaactgtgtttcagatcctcaccggagaagactggaatagcgttatgtatgacggcatcatggcctacggggggccctcttttcccgggatgttggtgtgtatttattttatcatactctttatttgcggaaactacatcttgttaaacgtgtttcttgccattgctgtcgataatttagcggacgctgaaagcctgacctctgctcaaaaggaggaggaggaagagaaagaacgtaagaagctggccaggaccgcttctcctgagaagaaacaggagctggtcgaaaagccagctgtcggtgagtcaaaggaggaaaaaattgagttgaagtccatcaccgccgacggggaatctccacctgcaacaaagataaacatggatgacctgcaacctaacgaaaacgaggataagagtccctacccaaaccctgaaacaactggcgaggaagacgaggaggaacccgagatgcccgttggtccacgaccccgccctctaagtgaactgcaccttaaggagaaggctgtgcctatgcctgaagccagtgcattttttatcttctcctctaacaataggttcaggttgcagtgtcacaggattgtaaatgacacaatttttactaacctcatcctgtttttcatcctgttgtcatccatctcgctggcagccgaagatcctgtgcagcatacctcatttagaaaccatattttaggtaacgctgactatgtgtttacgtccatcttcacgcttgaaattattttaaaaatgacagcctacggcgcttttcttcataaagggtcattttgcaggaattatttcaatatacttgatttgcttgtggtgagcgttagtctcattagctttggtatacagagctccgccattaatgttgttaagatcctgcgcgtgctgagagttctgaggccccttcgtgccattaaccgggcgaaaggactcaaacatgtagtacaatgtgtgttcgttgctatccgaaccattggcaacatcgtgattgtcaccacacttctccagtttatgtttgcttgcatcggggtgcaactgtttaaaggtaagctatacacctgcagcgactcctccaagcaaaccgaggccgagtgcaaggggaactacatcacctacaaggacggcgaggtggaccaccctatcattcaaccaagatcttgggaaaattcaaagttcgactttgacaatgtcctagcagccatgatggctctatttacagtgtctaccttcgagggatggcccgagctgctgtacaggagcatcgattctcatactgaggataagggacctatctacaactacagggtcgagatttcaatcttttttatcatatacattatcattatcgcattttttatgatgaacatctttgtaggattcgtaattgttacgttccaggaacaaggggaacaagagtacaagaactgcgagctggacaaaaaccaacgccaatgcgttgagtatgcccttaaggcacgcccgttacggagatatatccctaagaatcagcaccagtacaaagtttggtatgtggtgaacagtacatattttgagtaccttatgttcgtgcttatactgctcaacacaatctgtctcgcaatgcagcattacggccagagctgcctcttcaagattgcgatgaatattctgaacatgctgtttactggattgtttaccgtggagatgatcctgaaactgatcgctttcaaaccaaagcactatttttgcgacgcctggaacaccttcgacgccttgattgtcgtgggctctattgtagacatcgcaatcaccgaagttaataacgctgaagaaaatagcagaatttctatcacctttttccggctgtttagagtgatgcgtctagtgaaactactctctcgaggggagggcataaggactctactgtggactttcattaaatcctttcaggcattaccctatgtcgctctactaattgtgatgcttttcttcatctacgcggtcatcggcatgcaggtctttggcaagattgctcttaatgacaccactgagatcaataggaataacaattttcagacattcccccaggcagtcctgttactctttcgatgtgccaccggggaagcatggcaagacatcatgctggcctgtatgcctggcaagaaatgcgcacctgaaagtgaaccctcaaattccaccgagggggagaccccatgtggcagctcgtttgcagtgttttacttcatctccttctatatgctgtgtgccttcctgatcattaatctgttcgtagcagtaatcatggataactttgactacttgacccgtgactggagcatcctcgggcctcaccatctcgacgaattcaaaagaatctgggcagaatatgatccagaggctaaaggcagaattaaacacttagatgtggttactctgctgcggcggatccagccaccactaggctttggaaagctttgccctcatcgcgtggcatgtaagcggcttgtcagcatgaatatgccgctgaactcagacggcaccgtgatgttcaatgcaaccctgtttgcccttgttcgaactgcactgcggattaagactgaagaggggccatccccctcagaagcgcaccagggcgctgaagacccttttaggcctgctgggaatctggagcaggcaaacgaagagcttcgggcaattatcaaaaagatatggaaaaggacaagcatgaagttgctcgatcaagtggtacctcctgccggtgacgacgaagtaacggtgggcaagttctacgcgaccttcctgattcaggaatactttagaaaattcaagaagcggaaagaacaaggcctggtgggaaaaccctcccagcgaaatgctcttagcctgcaggccggactcaggactttgcacgacatcggtcccgagattaggagagcgattagcggcgacctgacagccgaggaagaactcgataaagccatgaaggaagccgtgtccgcggcaagcgaggatgacattttccgccgtgctggtggcctgttcggcaaccatgtgtcttactaccaatcagatggcagatcggccttccctcaaacattcacaactcaaaggcctctgcacatcaacaaagctggaagcagtcagggtgacacagaaagcccatctcatgagaagcttgtggacagtacatttacaccctcttcatactcttccacaggatctaatgctaatatcaataacgctaataacactgcacttggtcgactgcccagacctgccggctatccttctacagtcagcactgtggaaggccatggcccgccattgtcccccgctatccgcgttcaagaggtggcctggaagctatccagtaaccggtgccatagcagagagagccaggcagcaatggccggccaggaagaaacgtcccaggatgagacctatgaggtaaagatgaatcatgataccgaggcttgtagtgaaccaagcttgctctctaccgaaatgctgagctatcaagatgatgagaaccggcaactgacactgcccgaagaggataaaagagacatcagacaaagtccaaagagaggcttcctgcgcagcgcgagcttgggacgtagagcgagctttcacctcgagtgtctgaagcgccagaaagaccgcgggggggacataagtcagaagaccgtgctgccgctgcacctcgtacatcatcaagcccttgcagtggcagggctgtccccgctgttgcagagatctcatagcccagcctcattccctcggccattcgccactccgcctgcaacacctggatcacgcggctggccaccccaacccgtgcctacacttcgccttgagggcgtggagtctagcgaaaagctgaacagctcttttccttcaatccactgcgggagctgggctgagacaacacccgggggcggtggcagcagcgcagcccgtagggtgcgccctgtgtccctcatggtgccgtcacaggctggggcacctgggaggcagttccacgggagcgcgagcagccttgttgaagcagtcctgatcagcgaggggttgggccagttcgcacaagatcccaaattcattgaggtgaccacacaggagctggccgatgcatgcgatatgaccattgaagaaatggaaagtgccgccgataacattcttagcgggggcgcgcctcaaagtcctaatggagctctgttgccatttgtgaactgccgtgacgctggtcaggaccgagctgggggtgaggaggatgctggatgtgtacgggcccggggccggcccagcgaagaagagctgcaggattcacgtgtgtatgtgtccagcctctag

SEQ ID NO: 181214 - DNA, 6441 bp, synthetic construct
  misc_feature 1..6441: note = Description of Artificial Sequence: Synthetic coding sequence
  source 1..6441: mol_type = other DNA
atggtgaacgagaacacccggatgtacatccccgaggagaaccaccaaggctcaaactatggctccccccgacccgctcacgctaatatgaacgccaatgctgccgcaggccttgctccagaacatatccctacaccaggggcggcgttatcatggcaagcagctatagacgctgccagacaggcaaagctcatgggctccgctggcaacgctacaatcagcacagtctcttctacccaaagaaaacgtcagcagtatggtaagcccaagaaacagggcagtaccacagccacccgacctccaagagctctattgtgcttgactcttaagaatccaataagacgggcctgcatctccattgtggagtggaaacccttcgaaatcataattctcctgaccatctttgcaaactgcgtcgctctcgcaatatacatcccttttccggaggatgacagtaatgcgaccaattccaacctcgaaagagtggagtatctctttttaataattttcactgtggaggcctttctgaaagtgattgcatacgggctgctttttcaccccaatgcctaccttcggaacggctggaacctgctggacttcattatcgtcgttgtggggctgttctccgccatcctggaacaggccacaaaggctgacggagccaatgctcttggcggcaaaggcgcaggatttgacgttaaggctctcagggctttccgcgtcctcagacctctgcgcctcgtaagcggtgtcccatctcttcaagtggtgctgaacagcatcatcaaagcaatggttcccttattacacatcgctctgcttgtactgtttgtgattatcatatatgctatcattggactcgaactgtttatgggtaagatgcataagacatgttacaaccaggagggcatcgccgacgtgcctgctgaagacgacccaagtccctgcgccctagagaccggtcacggaaggcagtgccagaacggcaccgtatgtaaacctggctgggatggccctaaacatggcatcactaatttcgataatttcgcttttgccatgctcactgttttccagtgcatcaccatggaagggtggactgatgttctctactgggttaatgatgccgtaggccgtgactggccttggatctacttcgttaccctgattataatcggaagtttcttcgtcctaaatttggtgttgggggtgctgtctggcgagttcagcaaagagcgggagaaggccaaggcacgaggtgatttccagaagctgcgagaaaaacaacagctagaagaagacctaaagggctatctagattggattacacaggctgaagacatcgacccagagaacgaagacgaaggcatggacgaagagaaacctcgcaacatgagtatgcccacttctgagacagagtccgtcaacacagagaacgtagcgggaggagatatcgaaggggaaaactgcggagcacggctagcccatcgcatctcaaaatcgaagtttagccgctactggagacgttggaaccgcttctgcaggcgaaagtgccgtgccgccgtgaagagcaacgttttttactggctggtgatctttctggtattcctaaacaccctcaccattgcctccgaacattacaatcagcccaactggttgaccgaagtccaggacacagcaaataaagctcttcttgcactgttcaccgctgaaatgctcctaaaaatgtactctctcggtctgcaggcctacttcgtcagcctgttcaacagattcgattgcttcgtggtgtgtggaggaatcttagagaccatactggtggaaacaaagatcatgtcacccttaggtataagcgtcctgaggtgcgtgcggctgctccgcatttttaaaattactcgatattggaattcactgagcaatctcgtggcatcgttactgaactctgtcaggtccatcgctagcctgcttcttctgctctttcttttcattatcatcttctccttgctcgggatgcagctgtttggcggaaaattcaacttcgatgagatgcagacaagaaggagtacatttgacaacttcccccagtctctgctgactgtgtttcagatcttgacaggcgaggactggaacagtgtgatgtatgacgggataatggcctatggagggccgagctttcccggcatgctcgtgtgtatctactttattatcctgtttatatgtggcaactatatcctgctcaatgtctttcttgccattgctgtcgacaatttggcagacgccgagagcctgacctcagctcaaaaagaggaggaagaagaaaaagagcggaagaaactagccaggacagcctctcccgaaaagaagcaggaattagtcgagaagccagctgttggcgagtcaaaggaagagaaaattgaactcaaaagtattacagcagacggtgaatccccaccagcaaccaagatcaacatggatgacctccaacctaatgagaatgaagacaaatctccataccccaaccccgagactacaggcgaggaagatgaggaggaacctgaaatgcccgtaggacctcgtcctcggcccctgtcagaactgcacctgaaggagaaggctgtgcccatgcctgaagccagcgccttctttattttttcctctaacaaccgattccggctgcaatgccatagaattgttaacgatacaatctttaccaatttgattctctttttcattttgcttagttccatttccctggcggctgaggatcccgtgcagcacacaagcttcagaaaccatatcctgttttatttcgatattgtgttcactactatctttaccattgaaatcgccttgaaaatgactgcttacggtgccttcctgcataagggctcattttgtagaaactacttcaacatccttgacctacttgttgtttcagtgtcgttaatcagttttggcatccagagctcagctatcaacgttgtcaagatcctccgcgtgctgagggtgctgcgccccctaagagctatcaaccgcgccaagggcctgaaacatgtagtgcagtgcgtgtttgtcgcaattaggacgatagggaatatagtaatcgtgacgacactgttgcaattcatgttcgcatgcataggcgtccagctgttcaagggaaagctgtacacctgcagcgatagctctaaacagacagaggccgaatgcaaaggtaattacataacttacaaggacggcgaggtagatcaccctataattcaacctagatcttgggaaaattcgaagttcgacttcgataatgtgctggctgccatgatggctctgttcacggtctcaacctttgaagggtggccggagctgctataccgctcaatcgactcccacaccgaggacaaagggccaatctacaattacagggtagaaatctcgattttttttattatttatatcatcatcattgctttcttcatgatgaacatttttgtagggtttgtgattgtcacttttcaggaacagggtgaacaagagtacaaaaactgcgaactggataagaatcaaagacagtgtgtggaatatgccttgaaagcacgccctctccgccgatacatacccaaaaaccagcatcaatacaaggtgtggtatgtagtcaactctacctattttgaatacctgatgttcgtgttgatactactaaataccatttgtctggcaatgcagcattatgggcaaagctgcctgttcaaaatagccatgaatattctaaacatgttatttacaggtttatttactgtggagatgatactgaagctgattgccttcaagccaaagcattatttttgtgatgcatggaataccttcgacgcccttatcgttgtagggtccatcgtcgacattgccatcacggaggtcaacaatgccgaagaaaattcccgcattagtatcactttttttaggcttttcagggtgatgagactagttaagctgttgtccaggggggagggcattcggactcttctctggacatttatcaagtcattccaggctctgccatatgtggccctcctcatcgtcatgttgttcttcatctacgctgtgataggcatgcaggtgtttggcaagatcgccctcaatgataccaccgaaatcaatagaaacaacaattttcaaaccttcccgcaggcagtactgctactcttcaggtgtgctaccggtgaggcctggcaggacataatgcttgcttgcatgcccggcaagaaatgtgctccggaatcagagccaagtaacagtaccgagggcgagactccttgtgggtctagcttcgccgtcttttacttcatttccttttacatgttatgcgcattcttgatcatcaacctcttcgtcgccgtgatcatggacaacttcgattatcttacccgtgactggtctatccttgggccccaccacctggatgaattcaagaggatctgggcagaatacgaccccgaagccaagggaaggatcaaacacctggatgttgtcaccctgcttagacggatccagcctccccttggctttggaaagttgtgtccccaccgagttgcttgcaagcggctggttagcatgaatatgcctttaaatagtgacgggaccgtgatgttcaacgccaccttgtttgcgctggttcggaccgccctccgcattaaaaccgaggagggtccatccccgagcgaggctcatcagggcgctgaggacccttttcgtcctgccggcaatcttgagcaggctaacgaagaactacgcgccatcattaagaagatctggaagcgtacatccatgaagctgctcgatcaggtggtgccgcccgcgggcgacgatgaagtcaccgtgggcaaattttatgcgacattcctgattcaggaatacttcagaaagttcaagaaaagaaaggagcagggcctcgtggggaagccgtcccagcgcaacgccctatctctccaggcaggcttacgcaccctccacgacattggccccgagatccgcagggcgattagcggcgacctgacggctgaagaggagctcgacaaggcaatgaaagaggctgtctccgctgctagcgaggatgatatatttcgacgagccggcggcctgttcggaaaccatgtatcatactatcagtcggatggacggtccgcttttccgcagacattcaccacacaacggccactgcacataaacaaagcggggagctcccagggtgatactgagtccccctcccacgagaaactggttgatagcaccttcaccccctcatcttactctagcaccggctccaatgctaatatcaacaacgcaaacaacaccgctctcggcagactgccgcggccggcaggatatcccagcactgtgtccaccgttgaaggacatggcccgccacttagtccggctatccgagtgcaggaggtagcttggaagctctcaagtaacaggtgccatagccgcgaatcccaggctgctatggcaggtcaggaggagaccagccaggacgagacctatgaagtgaaaatgaaccacgacacagaggcatgcagtgaaccctcgctcttgtctactgagatgttgtcatatcaggacgacgaaaatcgccagttgacactgcccgaggaagacaagagggacatccggcagtctcccaaaagaggcttccttcggagcgccagcttagggaggagagcctcttttcacctggagtgtctgaagcggcagaaggacaggggcggcgatatcagccaaaaaaccgtactgcctctccacctggttcatcaccaggcactggccgttgcgggactgtcaccgctcctgcagcgttcccacagtcctgctagtttcccgagaccttttgcaacacctcctgcaacccctgggtctcggggatggcccccccagccggtgcccacgcttaggttagagggcgtggagagttctgagaagttgaatagctctttcccatctatacactgcggctcctgggccgagactacaccaggaggagggggatctagtgccgctcgtagagtacgacctgtgtctctgatggttccttcccaggcaggggcccccggtcggcagttccacggctcagcctccagtctggtcgaggccgtactaattagcgaaggactggggcaattcgcacaggatcccaaatttattgaggttacaacacaggagctcgcagatgcttgtgacatgaccatcgaggaaatggaatctgctgccgataatattctatcaggcggagccccacagagcccaaacggggcactactaccattcgtaaactgccgagacgcaggacaagaccgggctggcggggaggaagacgcaggttgtgtgcgggcgaggggccggccttccgaggaggagttacaggactctagggtctatgtgagcagtttgtag

SEQ ID NO: 181215 - DNA, 6417 bp, synthetic construct
  misc_feature 1..6417: note = Description of Artificial Sequence: Synthetic coding sequence
  source 1..6417: mol_type = other DNA
atggtgaacgagaacacccggatgtacatccccgaggagaaccaccagggatccaactacggtagcccgcgcccagctcatgccaatatgaatgcgaatgctgctgccggcttggcccctgagcacattccgaccccaggcgcggccttatcctggcaggcagcgatcgatgccgcccgtcaggctaaactcatggggagcgccggaaatgcaactatttctactgtgagctctactcagcgcaaacgtcagcagtacggaaaacctaaaaaacagggcagcacaacagctacccgacccccccgtgcgttgctctgtttgaccttgaagaaccccataagacgcgcgtgtatcagcattgtggagtggaagccgtttgaaattataattcttctcaccatcttcgcaaactgcgtggctctcgctatttacattccattcccagaagatgacagcaacgccactaatagcaacctggagcgtgtggagtacctatttcttattatcttcactgtcgaggctttcctcaaagtgatcgcttacggattactcttccatcctaatgcctatctgcggaacggctggaacctgctcgactttattatcgtcgtggtggggctcttcagtgctattctcgaacaagccacaaaagccgacggggctaacgcccttgggggcaagggggccggctttgatgtaaaggctctccgcgccttccgagtgcttcgtcccttgcggctggtgtcaggcgtcccaagtctgcaggttgtgctcaacagtatcattaaggcaatggtacccctgctgcacatagccctgctggtgctattcgtgattatcatctacgcaattataggactggaactgtttatgggcaaaatgcataagacatgttataaccaggagggcattgcagatgtgcctgcggaggacgacccctccccttgtgccctggaaaccggacacggccggcagtgtcagaatggcactgtgtgcaaacccggatgggatggcccaaagcacggcattactaacttcgataactttgcctttgccatgttgacagtgtttcaatgcatcactatggagggatggaccgatgtgctctactgggtaaacgacgccgtgggccgggactggccatggatatactttgtaacactcattattataggaagctttttcgtactcaatctcgtgcttggggtcctaagcggagagttctcgaaggagagggagaaggctaaggcgcggggtgactttcagaagctgcgtgaaaagcagcaactggaagaagacttgaagggatacctggattggatcacccaggctgaagatatagacccggagaacgaggatgaggggatggatgaagagaaaccccgcaacatgtcaatgccaacctcagagacagaaagcgtcaacacggagaacgtcgccggtggtgacattgagggtgagaattgtggtgcgcgccttgcccacaggatttcaaaatctaaattttctaggtactggcgccgctggaatcgtttttgccgcaggaagtgccgagcagctgttaaatccaacgttttctactggttagtgatcttcctcgtgttccttaatacactgacgattgctagtgagcattacaaccagccaaattggctgactgaagtacaggacaccgctaataaagctctcctggctctattcaccgctgagatgctcctcaagatgtatagcctgggcctgcaagcctattttgtttccctgttcaaccggtttgattgcttcgtggtctgtggaggaatcttggagaccatactggtagaaacgaaaatcatgtctcccctgggaatttctgtgttgcggtgcgtgcggctgctcaggatttttaagataacaaggtactggaatagcctgagcaacttggtggcatcattgctcaactcagttcgaagtattgccagcctgctgttacttctgttcctttttattataatattcagcctgttggggatgcaactgttcggtggaaagttcaatttcgatgagatgcaaacacggcggtcaaccttcgataatttcccccagagtctccttactgtgtttcagattctcacaggagaggattggaactccgtgatgtacgacggtatcatggcctacggcggtccctcctttccggggatgctagtgtgcatttacttcattatcttattcatatgtggcaattatatccttctgaatgtctttctcgcaatagccgtggacaacctggccgatgccgagtctctgacaagcgcacagaaggaagaagaggaggaaaaagagaggaaaaagcttgcaaggacagcatctcctgagaaaaagcaagagctggtcgaaaaaccggctgtcggcgagagcaaagaagagaagatcgaactgaagtccattacagccgacggggagagcccgccagcaaccaaaatcaacatggacgatctgcagcccaatgagaatgaagataaatccccgtatccaaaccccgagactactggcgaggaggatgaagaggaaccggaaatgcctgtgggccctcggcctcggcccctatcagaactccaccttaaggaaaaggccgtgccaatgccagaagcctctgccttcttcatattcagttccaataatcgatttaggcttcagtgccatcggatagtgaacgatactatcttcaccaatctcatcctctttttcatcctgctgtcaagcatttccctggccgccgaagatcccgttcagcacacttcgtttcgcaaccacattctgttttattttgacatcgtgttcacaacaatcttcacaattgagatagccctaaaaatgactgcttacggcgcctttcttcacaagggcagtttctgtcggaactattttaatattctggaccttctggtggtgtctgtttcactgatcagtttcgggatccagagctcagccataaacgtggtgaagatcctgcgagttctcagagtgctgaggccgctgcgcgccatcaaccgggctaaaggcctcaagcacgtcgtgcaatgcgttttcgtagctatcaggactatcggaaacatagttatcgtgactacattactccaattcatgttcgcgtgcattggtgtgcagctgtttaaggggaagctttatacctgtagcgacagtagcaagcaaaccgaagctgaatgcaaagggaactacatcacgtacaaagatggagaagtggaccaccccatcatacagcctagatcctgggagaattccaagtttgatttcgacaacgtgctggccgccatgatggccctcttcacggtgagtacttttgaaggatggcccgagcttctctacagaagtatcgactcccacactgaggataagggtcccatttataactacagagtggagatttcgatatttttcatcatttacattatcatcatcgccttcttcatgatgaacatattcgtgggcttcgttatcgtcacattccaggaacagggagaacaagaatacaaaaattgcgaactggacaagaaccagaggcagtgtgtggagtacgcattgaaagctcgcccgctgcggcgatacatacctaaaaatcagcaccagtacaaggtttggtatgtcgtaaattctacgtacttcgaataccttatgtttgtgcttatcctcctgaataccatttgtctagcaatgcaacactacgggcagtcatgcctgttcaagatagccatgaatatcctgaacatgctctttacaggcctgtttacggtggaaatgatcctgaagctgatcgcctttaaaccaaagggctatttcagtgacccgtggaatgttttcgactttctgatcgtcattggcagcataatcgacgtgatccttagtgaaacaaatcctgcagagcacacacaatgcagcccttccatgaacgccgaggaaaatagtcgtatttcaatcaccttcttcagactctttagggtcatgaggcttgtcaagctacttagcaggggcgagggcattaggacgttgctctggacctttatcaaatcctttcaggccctcccatatgtagcactgctcatagttatgctgttcttcatctacgcggtcatcggtatgcaggtgttcggaaagatcgcactcaatgatacaactgagataaaccggaataacaattttcagacatttccccaggccgtgctgctcctgttcagatgtgcaaccggggaagcctggcaggatataatgctcgcatgtatgcccggtaagaaatgtgctcccgagagtgagccctccaattccaccgaaggcgagaccccttgcggcagcagttttgcagtgttttatttcatctccttttacatgttatgcgctttcttaataattaatttatttgtggccgtgatcatggataactttgattatctcacacgggattggtccattcttggcccacaccatctggacgaattcaagagaatttgggccgagtacgatcccgaagccaagggaaggatcaagcacctggacgttgtgacactcttgcgcaggatacagccacccctggggttcggcaaactgtgtccccaccgtgtggcctgcaagaggctggtcagtatgaatatgcctttaaactccgatgggaccgtgatgtttaatgcaaccttgtttgcactggtgcgcactgcactgcgcatcaagacagaggggaatttagagcaggccaatgaagaactccgcgcaattatcaagaaaatttggaagaggacgtccatgaaactattggatcaagtcgtcccgcctgctggcgatgatgaagtcaccgtggggaaattttatgctaccttcctgatccaggagtactttaggaagttcaagaagcgcaaggagcagggacttgtcgggaaaccctctcagaggaatgccttgagcctccaggccggcctccgcacattgcacgatatcggcccagagatcagacgggctatctccggggacctgactgcagaggaagagctggacaaagctatgaaggaggctgtgtcggctgcctctgaagatgacatatttcgccgggccggcggactgtttggaaaccatgtcagctactatcagtctgatggccggtctgcctttccccaaacatttactacacagagaccgctccacatcaataaggctggttccagccagggagataccgagagccccagccacgagaagctggtggattccacatttacgccatcctcctatagcagtacgggatctaatgctaatataaataatgccaacaatacagcactgggtcgactgccaaggccggctggttacccatcaactgtctccaccgtcgagggccatggccctcctttaagtccagcaattcgggtgcaagaggtggcttggaaactttcaagcaatcgatgccattctagagaatctcaggccgccatggccggtcaggaggagaccagtcaggatgagacctacgaggtgaagatgaaccacgacaccgaggcatgctcggaacctagccttctaagcacagagatgctcagctatcaggacgatgagaatcgtcagcttacacttcccgaggaggataagcgggatatccggcagtcccccaagcgtggatttctgagatccgcttctttaggtagacgcgcgtcgttccatttggagtgcttaaaacgacagaaggaccgggggggagatatcagccagaagactgtcctgcctttgcacctagtccaccatcaggccctggctgtcgcggggctctctccccttttgcagcgatctcacagtcccgccagcttccccaggcccttcgcaaccccacccgccaccccaggaagcagagggtggccacctcagccagtgccaactctgcgtttggagggagttgagtctagtgagaaactaaattcttcattcccctcaatccactgcgggtcctgggcagagaccactcccggcggcggtgggtcctcagcagcaaggcgggtcagaccagtctcgcttatggtccccagtcaagccggtgccccgggtcggcaatttcacgggagtgcgtcatcactcgttgaggcagtgctgatcagcgaaggattaggccagttcgctcaggatcctaaatttatagaagtaacaacccaggagctggccgatgcttgcgacatgacaatcgaggaaatggagtcagctgccgacaatatattgagcggcggcgccccgcagtctcccaacggagcactgttgccgttcgtgaactgcagggatgcaggccaggacagggccggcggagaagaagatgctggctgtgtaagagcgcgcgggcgtcctagcgaagaggaactgcaggattctagggtgtacgtgagttctctgtag

SEQ ID NO: 181216 - DNA, 6417 bp, synthetic construct
  misc_feature 1..6417: note = Description of Artificial Sequence: Synthetic coding sequence
  source 1..6417: mol_type = other DNA
atggtgaacgagaacacccggatgtacatccccgaggagaaccaccagggtagcaactatgggagcccgagaccggcacatgcaaacatgaacgctaatgccgctgcaggccttgcgcctgagcatattcccacacccggtgctgcactcagctggcaggccgccattgatgcagcacgccaagctaagctgatgggttccgccggcaacgcaacgatttcgaccgtgtctagcacccaaagaaagcggcaacagtatgggaaacccaaaaaacaagggagcacaacggcaacgcggcccccccgcgccttgctgtgtttgactctgaaaaatcccatcagacgggcctgcatcagcatagtagaatggaaaccattcgagatcattattcttttgacaatctttgccaactgcgtggcattggccatttatattccatttcccgaagatgacagtaacgccactaacagcaacctcgaaagagtagagtacctgtttctgatcatttttaccgtggaggcctttttaaaagtaattgcttatggcttgctcttccacccgaacgcttatctgcgaaacggatggaatctgctggactttattattgttgtggttgggctgttttccgctattctcgagcaggcaactaaagctgatggggcaaatgctcttgggggcaaaggagctggctttgacgtgaaagcgctccgcgcatttcgcgttctccgccccttgcgcctggtctccggagtgccatcgctgcaggtcgttctcaattctattatcaaagctatggtgcccctgctccacattgcattactggtcctattcgttatcattatatacgcaataataggcttagagctattcatgggaaaaatgcataagacttgttacaatcaggaaggaattgcagacgtgccagctgaagacgacccctccccctgtgcactggagacaggccatggcaggcagtgccaaaacggcacagtgtgcaaaccagggtgggacggccctaagcatggaattacgaactttgacaacttcgcctttgccatgctgacagttttccaatgcatcaccatggagggctggacggacgtactgtactgggttaatgatgcggtgggacgagactggccttggatctacttcgtcacccttatcatcatcggatcgttctttgtactcaatttagtgctgggagtgctctccggcgagttttcaaaagagcgggagaaagcaaaagcccgcggcgactttcaaaagcttcgcgaaaaacagcagctcgaagaagatctgaaggggtatttggactggatcactcaggcagaggatatcgatcctgagaatgaagacgaggggatggacgaagagaagccccgcaacatgagcatgcccaccagcgagacagaaagtgtcaacaccgaaaatgttgccggcggcgacatcgagggagagaactgcggggctagattagcccatcgaatctccaagtccaaattctcgaggtactggcggcgttggaaccgtttctgtagacgaaaatgtcgcgcagcagttaaaagtaatgttttttactggctcgtcattttcttagttttcttgaataccctgaccatcgccagcgagcattataatcagcccaactggctgactgaagtacaggacaccgccaataaggcgctactggcccttttcacagccgaaatgcttctgaagatgtacagcctaggccttcaggcgtacttcgtatccctgttcaatcggtttgactgtttcgttgtatgtggcggcatcctggaaaccatcctggtcgaaacgaaaatcatgagccctctcggtataagcgtgcttcgctgtgtcagattgctgcgcatttttaaaatcacaaggtattggaactcattgtctaatctggtggctagcctgcttaactccgttcgatccatagccagtctccttttgctattattcctgttcattatcatattcagtcttctgggcatgcagctatttgggggtaagttcaactttgacgagatgcagactcggagatctacctttgataacttcccacagtctctgctgacagtctttcaaattctgacaggggaggactggaactctgtgatgtacgatggtatcatggcatacggggggccaagtttccctggtatgctcgtgtgcatctattttatcatactctttatttgcggaaactacatcttgctgaacgttttcctggccatagccgtcgacaacttagccgatgcagaatccctcacctccgcccagaaggaagaagaagaagagaaggagaggaaaaagctcgctagaacggctagtccggaaaaaaagcaggagctggtggagaaacctgccgtaggtgaatcaaaggaggaaaaaatagaactgaagtctataaccgccgatggggaatcgccccccgcaaccaaaatcaacatggacgatctgcagccgaatgaaaacgaggacaagagcccatatccaaatccggaaactactggcgaagaggacgaagaagaaccagagatgccggtcgggccccgtccaagacccttgagcgagctgcatctcaaggagaaggcggtgcctatgccagaagcgagcgctttcttcatctttagctcaaataacaggttcagactgcagtgccacaggatagtgaatgacacaatctttaccaatctgatcctgttcttcatactgttgagcagcatatcactcgccgcagaggatcctgtccagcacacttcgtttaggaatcacatactgggtaacgctgattacgtatttacctccatatttaccctggagatcatccttaaaatgacagcttatggtgcgttcttgcacaagggcagcttctgtaggaactactttaacattctagatcttctagtagtctccgtgagcctcatctcctttggaatacaaagctcagccatcaacgtagtgaagatactccgggtgctcagggttttgcgcccactccgagccataaaccgcgccaaaggcctgaagcacgttgttcaatgcgttttcgtggcaatccgcacaattgggaatatcgtgattgtcacaactctgctgcagttcatgtttgcctgcattggtgtgcaactgttcaagggaaaactctatacatgctcagattcatctaagcagaccgaggctgagtgcaagggcaattacattacgtataaagacggtgaagtggatcacccaataattcagccccgatcatgggaaaatagtaagtttgattttgacaatgttctggccgcgatgatggctctgtttacggtgagtactttcgaaggatggcccgaactgctgtaccgcagcattgatagccataccgaggataaaggccccatttacaactaccgggttgagatctccatctttttcataatatacatcatcataattgccttctttatgatgaacatcttcgtgggctttgtgatcgttaccttccaggaacagggggaacaggagtacaagaactgcgagctcgacaaaaaccagcggcaatgcgtggagtatgctctcaaggcccggcccctacgcagatatatcccaaagaatcagcaccagtataaagtttggtacgtggtgaactcaacttactttgagtatcttatgtttgtactgatcttgctgaacactatttgcctcgccatgcaacactacggacagagttgcctcttcaaaattgccatgaatattctgaacatgttgtttacaggcctgttcaccgtggagatgattctgaagttgattgcttttaagcctaaacactacttttgcgatgcttggaatacctttgacgcccttattgtcgtaggcagtattgtcgacattgcgattacagaggtgaacccagccgagcacacccaatgctctccgagtatgaacgccgaagaaaactcacgcatcagcattacattcttcaggctgtttcgagttatgaggctagtgaaactacttagccgtggggaggggatccgaaccctgctgtggacatttattaaaagtttccaagcccttccatacgtggctttgcttattgtcatgctgttctttatttacgcagtcattggtatgcaggtgttcggtaaaattgcacttaacgacacaacagagattaacaggaataacaattttcagactttcccacaggctgtgctgctgctctttcgctgcgccaccggcgaagcctggcaagacatcatgttggcgtgtatgcccggcaagaaatgcgccccagagtccgaacctagtaacagcaccgagggcgaaaccccttgtggcagctcattcgcagtcttctactttatttctttctacatgctttgcgccttcctgatcataaacctgtttgtggctgtcattatggataactttgactacctcaccagagattggtcaattctcggaccccatcatctggatgagtttaaaagaatttgggctgaatacgatcccgaggccaaagggagaataaagcatctcgacgtagtcaccctgcttaggcggatccagccccccctgggcttcgggaaactgtgcccgcaccgcgtagcctgcaaaaggctcgtgtctatgaatatgccgttgaacagcgacgggacagtcatgtttaatgctaccctgtttgcactagtccggactgcactccgtattaagacagaaggcaacctagaacaggccaatgaagagctgcgcgctattataaagaaaatctggaagcgcacatcaatgaagttattggaccaggtcgttccccctgctggcgacgacgaagttacagtcggtaagttctatgccacttttctgatccaagaatactttagaaagtttaagaagcgcaaggagcaagggctggtgggcaagccatcgcagaggaatgccctgtcactccaggctggactcaggaccttacacgacattgggccagaaatcaggcgagcaatttctggcgatctaacagccgaagaagagttggacaaggcgatgaaagaggccgtttccgccgcttcagaggacgatatcttcagaagagccggggggcttttcggaaatcacgtttcatattaccagtctgacggaagatctgcctttccccaaacattcacaacacagagacctctccatataaacaaagcagggtcatctcagggcgacacagaatctccatctcacgaaaaactcgtggatagcacatttacccctagttcctatagtagtacgggcagtaacgccaacatcaacaacgcgaataatacagctctcggtcgcctcccccgacctgctgggtaccctagcacggtctctaccgtggaaggccacgggcctcctctgtcaccagcaatccgggtgcaagaagttgcatggaagctctcctccaatagatgccactctagagagagccaggccgctatggcagggcaggaagagactagtcaggatgagacatacgaagtaaagatgaaccatgacacagaagcctgctccgagccctctcttctttctacagagatgttgtcatatcaagatgacgagaaccgccagctcactcttccagaagaggacaagagagatattcgacagtctccaaagagggggtttctccgcagtgcaagcctaggccggagggcaagtttccacctcgaatgcctgaagaggcagaaagatcggggtggagacatttcacaaaaaactgtgttgcctttgcatctggtgcaccaccaagcgctcgcagtcgcaggcctctcaccactcctgcagaggtctcacagtcccgcaagtttcccaaggccgttcgctaccccacccgctactcccgggagcaggggttggccccctcaacctgtgccaaccctccgccttgagggagtagagtcctcggagaagctgaatagtagcttcccaagtatccattgcgggagttgggccgagacaactcccggcggcggaggcagctctgccgccaggagggtccggcccgtttctctgatggtcccttctcaagctggcgctcccggcagacagttccacggtagcgcttcaagcctggtagaagctgtgctcatcagcgaaggactgggccaattcgcccaagaccccaagttcatcgaagttaccacgcaggaactggcagacgcctgcgatatgactattgaggaaatggagagtgccgccgataatattctgtcaggaggagctccacaatctccgaacggagcactacttcctttcgtgaattgtcgggatgccggacaggatcgcgcaggtggcgaggaggacgcaggttgcgtgagggccagaggcagacccagtgaagaggaacttcaggacagccgcgtttacgtctcatccctttag

SEQ ID NO: 181217 - DNA, 6417 bp, synthetic construct
  misc_feature 1..6417: note = Description of Artificial Sequence: Synthetic coding sequence
  source 1..6417: mol_type = other DNA
atggtgaacgagaacacccggatgtacatccccgaggagaaccaccaggggtctaactatggatcacctaggcccgcgcacgcaaatatgaatgcaaacgcagctgccggtctagcaccagaacatatccccacccccggagcagcactctcttggcaggccgccatagacgccgccagacaggccaaactcatgggctctgcgggaaatgcgactatctccaccgtgtcaagcacacaaaggaaacggcagcagtacggcaagccgaagaaacagggttccacaactgcaacgcggccccctagagctttgctgtgtctaacccttaaaaaccccattcggcgtgcttgcatttccatagtcgagtggaagccattcgagattattatccttctcacaatctttgcgaactgcgtagctttagcgatatacattccctttcccgaggacgattcaaatgccaccaattccaatttagagcgcgttgagtatctttttttgatcatcttcaccgtggaggcctttctgaaggtgatcgcctacggattgctgtttcatccgaacgcctacttaaggaacggttggaatttgctggattttatcattgtcgtcgtcggcctgttttctgcaatactcgagcaggcgacaaaagccgatggggcaaacgccctaggcggcaagggagccggttttgatgttaaagctctgagagccttcagagtgctgagacctctgcgcttggtctcaggtgttccatccctccaagtggtcctgaactccatcatcaaagccatggttccactgctgcatatcgcgctgcttgtgctttttgtgattataatatacgccatcatcggactggagctgttcatgggtaaaatgcataaaacatgctataaccaagaggggatagctgacgttcccgccgaggacgatccaagtccctgcgcactggagacaggtcacggccgacagtgtcagaacggaacagtctgcaagcccggatgggacggccccaaacacggtattaccaatttcgacaattttgcgttcgccatgctcactgtgtttcagtgcataactatggaaggctggactgacgtgctgtattggatgcaggacgctatggggtacgagctgccttgggtgtatttcgtgtctttggttattttcggctccttttttgtattaaatctggtgcttggcgtgctgtcaggggagttctctaaagaacgcgagaaagccaaggctagaggagattttcaaaagttacgtgaaaagcagcagctcgaagaagatttgaagggttacctggattggattacgcaggcagaagacatagacccagagaatgaagatgaaggtatggatgaggagaaaccacgcaacatgtcaatgcccactagtgagactgagtccgtgaatacagaaaatgtagcgggcggcgatatcgagggagaaaattgcggtgccaggcttgctcaccggatcagtaagtctaagttttcacggtattggcgaagatggaatcgcttctgcagaagaaagtgtcgtgctgcggtgaaaagtaacgtgttttactggctagtgatctttctggtattcctgaacaccctgactatcgctagcgagcactacaaccagccaaactggcttactgaggtccaagacacagcaaacaaggctcttttggccttgtttactgctgagatgcttctcaagatgtactccctgggactgcaggcttactttgtatctctctttaaccgatttgattgctttgtcgtttgcggcggcatcctcgagactattcttgtcgagacaaaaattatgagtcccctgggaatttctgtgctgaggtgtgtgcgtctcctacgcattttcaaaatcacaagatattggaatagcctgtctaacctcgtcgccagcttactcaactcagttcgctccatcgcttctttgctgctgctcttgtttcttttcattatcatctttagcctgcttggtatgcaactgtttgggggaaaatttaacttcgacgagatgcagaccagaagatcaactttcgataactttccacagtcattgctgactgtttttcagatcttgacgggcgaagattggaactctgtcatgtatgatggcatcatggcttatggagggccctcatttcctgggatgctggtgtgtatctactttataattctttttatctgcgggaactatatcctcctgaacgtatttttagcaattgcagtggataatttggctgatgcggaaagcttaacatctgcgcaaaaagaagaggaagaagaaaaggagagaaagaaactggctcggacagctagtcctgaaaaaaaacaggagctagtggaaaaacccgcggtcggagagtccaaggaggagaaaatcgagctgaaatccatcaccgctgacggtgaatcacctcccgctacaaaaataaacatggacgacctccagcccaacgagaatgaagataaatcaccgtaccctaaccccgaaacgaccggagaggaagacgaagaagagccagaaatgccggtgggccctagacctagacccctgtctgagctgcacctgaaagagaaggcggtacctatgcccgaggcctccgctttcttcatcttctcttctaacaataggttccggctgcagtgccacaggattgtcaatgataccattttcactaatctcattctattttttatcctcctctcctccatcagcctcgctgccgaggaccctgtgcagcatacttcctttcggaaccatatcctgttttacttcgacatcgtgtttacaacaatattcactatcgagattgccctcaaaatgacagcatacggggctttcctacacaaggggtctttctgccggaattattttaatatccttgatctgcttgttgtgtcggtctctctcatttcttttggaattcagagctcagctattaatgttgttaagatcttgagggttctcagggtgctgagacccttacgggccatcaaccgggccaaagggcttaagcacgtcgtgcagtgtgttttcgtcgcaatccgaactataggcaacatcgtgatagtgacgactctgctgcagttcatgtttgcttgcatcggggtccagctgtttaagggcaagctgtatacgtgctccgactccagcaagcagacagaggctgaatgtaagggcaattatattacatataaggatggcgaagtggaccatcctatcattcagccccgctcatgggaaaattctaagtttgattttgataacgtgttagccgcgatgatggcactgttcacagtgagcacgtttgagggttggcccgaacttctataccggtctatcgacagccataccgaggataaagggccaatctataattatcgggtagagatctccatcttttttatcatctacatcatcatcattgctttctttatgatgaacattttcgttggcttcgtgatcgtgaccttccaggaacagggtgagcaggagtacaagaattgtgagttagacaagaaccaaagacagtgtgtcgaatacgctctgaaggctcggccactgaggaggtacatccccaagaatcagcaccagtataaggtgtggtacgtcgtgaattctacttactttgaatacctgatgtttgttctaatcctactgaacaccatctgtctggcaatgcagcactacggccaatcttgtcttttcaaaatcgctatgaacattctcaacatgctcttcaccggtctgttcactgtagagatgatcctcaaattgatcgcgtttaaaccaaagggctatttttctgacccctggaatgtcttcgattttctgattgtgatcgggtccatcatcgacgtcattttgagtgaaacaaacccagctgaacacacacaatgctctcctagcatgaacgccgaggagaatagccgtatttcaataaccttctttagactatttagggtcatgcggctggtcaagctgctgtcccgaggagaaggcatccgcactctgctgtggacatttataaagtcttttcaagccctgccatatgtcgccctgctgattgtgatgttgttttttatctatgccgtcatcgggatgcaggtcttcgggaaaatcgcattgaatgataccaccgagatcaaccgcaataataattttcagacatttccacaggctgtgctccttctgtttagatgcgctacaggtgaagcttggcaagatattatgctcgcttgtatgccgggcaaaaagtgtgcacctgaatccgaaccttcgaattccaccgaaggggagacaccttgcggctcatcctttgcagtgttctacttcatcagtttctacatgctgtgtgcatttctgatcatcaatctttttgtcgcagttatcatggataatttcgactatctgacacgcgattggtccatcctggggccccaccacctcgacgaattcaaaagaatttgggcggagtacgaccctgaggccaaaggccgcatcaagcacctggacgtggtaactctgctccggcgcatccagcctccactaggtttcggtaagctttgcccgcacagagttgcctgtaaaagattagtgagtatgaatatgcctctcaatagcgatggaaccgttatgtttaacgccaccctgttcgccctggtcaggacagccctgcgcattaagactgagggtaacctggagcaggccaacgaggagttaagagccattataaagaagatatggaaacggacctctatgaagctcttggaccaggtcgtgccacctgccggggacgacgaggtaactgtaggaaagttttacgccacattcctgatccaagagtacttccgcaaattcaagaaaagaaaggaacagggactggtaggcaagccaagccagcgtaatgcactgtctctgcaggccgggttgagaacattgcacgatatagggcccgagattaggagggccatcagcggggatctaactgccgaagaggagttggacaaagccatgaaggaggccgttagtgcagcttcagaggatgacattttcagaagagcaggcgggctatttggaaaccatgtgagctactaccagtccgatggaaggtccgcgtttccacagacctttaccactcagcgacccctgcacataaacaaggctggctctagccagggggataccgagtcccctagtcacgaaaaattggtggactctacttttaccccatcaagttacagcagtaccggttcgaacgctaatattaataacgccaacaacaccgcattgggccgactacccaggcctgcgggctatccgtctaccgtcagcacagtggaaggacatggtccccctctgtccccagcaatcagggtccaggaagttgcctggaaacttagcagcaaccgttgtcactctcgtgagtctcaggcagctatggccggacaggaggaaacttcacaggacgaaacctacgaggtgaaaatgaatcacgatacagaggcctgtagcgagcccagtctcctgagcacagagatgctcagttaccaggacgatgagaatcgacaactgaccctgcccgaagaggataagcgcgatatcagacagtcacccaaacggggcttccttagatctgctagcctgggtcgtcgagcctcattccacctggagtgtctaaagcggcagaaggatagaggaggagatatctcacagaagacagtcttgcctctgcatcttgtgcatcaccaggcactcgcggtagccgggctcagtccactgcttcagaggtcccattccccagctagtttccctcgccccttcgccacacctcctgccacccccggaagccgcggctggccacctcaacctgtgccaaccctgagactggagggcgtcgaaagttctgagaagcttaatagctcattccctagcattcactgtggctcgtgggcagagaccacccccggtggaggcgggagcagtgctgcacgccgtgtgcgaccagttagcttgatggtgccctcgcaggccggcgccccaggacgacagtttcatggttccgcgtcaagcctcgtggaggccgtcttgatatctgaaggcttgggacaatttgcacaggatcctaaattcatagaggtgactacccaagagctggcagacgcttgcgacatgacaatcgaggagatggaaagcgccgcagacaacatcctcagcgggggagccccccagtccccaaacggagccctcttgccctttgtgaactgtcgggatgccggacaggatagggctggtggtgaggaggacgctggttgtgttagagccaggggtcgaccctccgaggaggagctgcaggacagtcgggtatacgtgtccagcctgtag

SEQ ID NO: 181218 - DNA, 6477 bp, synthetic construct
  misc_feature 1..6477: note = Description of Artificial Sequence: Synthetic coding sequence
  source 1..6477: mol_type = other DNA
atggtgaacgagaacacccggatgtacatccccgaggagaaccaccaggggtccaattatggctcgccacggcccgctcacgcaaatatgaatgctaacgctgcggccggtttggctccggagcacattcccactcctggggccgcactgtcctggcaggctgccatcgatgctgcccggcaagccaaactaatgggttcagcaggaaatgcaaccatcagcacagtgagttccacacagcgaaaacgccagcagtatggaaagcctaagaaacagggcagtacaacggctacccgaccccctagagcactgctgtgcctgaccctgaagaaccctattcggagggcatgcattagcatcgtagaatggaagcccttcgaaataatcatcctcctaaccatatttgctaactgcgtcgcacttgccatttatataccctttccagaagatgatagtaacgctaccaacagcaatcttgagcgcgtcgaatacctgttcctcataatttttacggtcgaggcctttcttaaggtcattgcctatggcctgttatttcatccaaacgcgtatctgcgtaatggatggaatctcctagactttatcattgtagtggtcggcctattttccgccatactggagcaagccactaaggcggacggcgctaatgctcttggcggaaagggagccggattcgacgtgaaggccttgcgggcatttagagtgctcaggcctctgcgtctagtcagcggcgttccttcccttcaagtggtgctcaattctatcattaaggccatggtgcctctgctgcatattgctctgctggtattgttcgtaatcatcatttatgcaattatcggcctggagctctttatgggcaagatgcataagacgtgttataaccaggaaggtatcgcagacgtacccgccgaggacgacccctccccctgcgccctggagactggtcacgggcgccagtgtcagaatggaactgtttgtaaacctggttgggacggccctaagcacgggattacgaacttcgataattttgcattcgctatgctgacagtcttccagtgtattaccatggagggatggactgacgtgctgtactgggtcaatgacgccgtgggtagagattggccctggatctacttcgtcactctaatcattataggttctttctttgtcctcaaccttgttctgggcgtgttatcaggcgagttctctaaagagagagagaaagcgaaggctaggggcgacttccagaagctgcgtgagaagcaacagcttgaggaagacctgaaagggtacctcgattggatcacccaggcagaagatattgaccccgagaacgaagatgagggtatggatgaggagaagcccagaaacatgtcaatgccaactagcgaaaccgaaagtgtgaatactgaaaacgtggccggtggggatatagaaggagaaaactgcggcgcgagactggcacacaggatttctaagtctaaattttcacgctactggcgaaggtggaaccgcttttgcaggaggaaatgccgtgcagccgtgaaatcaaacgtcttttattggctcgtaatctttcttgtattccttaacacgttaactatcgctagcgagcattataaccagccaaactggctcaccgaggtgcaggacacggccaataaggcccttctggccctgtttaccgccgagatgttactgaagatgtactctctgggtctgcaagcgtatttcgtcagcctcttcaaccggtttgattgctttgtggtgtgcgggggtatcctcgaaaccatcctggtcgagactaagataatgagccctctcgggattagcgtgctgagatgcgtgagattgcttcgaatttttaagatcacccgatactggaatagcttgtcaaatctcgttgctagcctgttgaactcggtccgcagcatagccagcttacttcttctgctctttttattcatcataatattttccctgttgggcatgcagttgttcggcggcaagtttaacttcgacgagatgcagaccagacggtctacattcgataactttcctcagtccctcttgaccgtctttcagattctgaccggggaggactggaacagcgtgatgtatgacggcataatggcctacggcggtccgtcttttcctggcatgctcgtctgtatttatttcatcatactgtttatctgtggaaattacatcctgctgaacgtcttcctcgccatcgccgtggataatctggctgacgctgagagcctgacatccgcccagaaagaggaagaggaagaaaaagaacgtaaaaaacttgccagaactgcgtctcccgaaaagaagcaggagctggtagagaagccagccgtcggtgagagcaaagaagaaaagattgagttgaagtctatcaccgccgatggggagagccctcccgccactaagattaatatggacgacctccagcctaacgagaatgaggataagtctccatatcccaatccagagaccactggagaggaggatgaggaggaaccagagatgccagtcggcccccgcccaagacccctgagtgagctgcaccttaaagagaaggccgttccgatgcctgaagccagtgcctttttcattttcagtagcaacaatcgcttcagactgcaatgccaccggatagtgaacgacacaattttcaccaacctgatacttttttttatcttattgtcttctatttcactggccgctgaagatcccgtgcaacatacctcttttcgcaatcatatacttttttactttgatatcgttttcacaacaatcttcactatagaaatcgcattgaagatcctggggaatgccgactacgtgtttaccagcattttcactctggagattattctgaaaatgactgcttacggagcttttctgcacaagggctcgttctgtcgaaattatttcaacattcttgatctattagtcgtgagcgtcagtttgatttccttcggcattcagtcttcggccatcaatgtggttaagattctgcgagtgctcagagtgctgagacctctgcgcgcaattaatcgcgccaagggcctcaaacatgtggtgcagtgtgtcttcgtggcaatccggacaatcggcaatatcgtcatcgttaccaccctgctccagttcatgtttgcctgtatcggcgtccagctgtttaaaggaaagctttacacctgtagcgattcctcaaagcaaaccgaagcagagtgtaagggaaattatatcacgtacaaagacggcgaagttgatcatcctatcatccagccgcgatcctgggagaattctaagtttgatttcgacaatgtgctagctgcaatgatggcgcttttcactgttagcacctttgagggctggccggagctcctatatcgaagtattgactcgcacacagaggataagggacctatctataactacagggtggagataagcatttttttcataatatacatcattataatcgccttctttatgatgaacatttttgtgggtttcgtaattgtgacgttccaagaacagggagagcaagagtacaaaaattgcgaactggataaaaaccagcgccagtgcgtggagtacgcgttaaaagcccgcccacttaggcggtatataccaaaaaatcaacaccaatataaagtttggtacgtggtgaattcaacttactttgagtacctgatgtttgtccttatcctgttgaatacaatctgcctcgcgatgcagcattacggacagtcatgcctttttaagatcgctatgaacattttaaatatgttgtttacgggcttgtttacggttgagatgatactgaaactgattgccttcaaacctaagcactatttctgcgacgcatggaatacctttgatgcacttatcgtggtgggctctattgttgatatcgcaataacagaagtgaatcccgctgagcatacccagtgcagcccttccatgaatgctgaggagaattctcggatttccatcacttttttcaggctgttccgcgtgatgaggctcgttaaacttcttagtagaggagagggcattcgcacactgctctggacctttattaaatccttccaagccctgccttacgtagccctgcttatcgtgatgctgtttttcatttatgccgtaattggcatgcaggtcttcggcaagattgccttaaatgataccaccgaaattaaccgtaataacaatttccaaaccttcccacaggctgttcttctcctctttcgatgcgcgaccggagaggcctggcaggacatcatgctggcatgcatgcctgggaagaaatgcgcgcccgagtccgaaccaagtaatagcacggaaggggagactccctgcggcagcagctttgccgtcttctactttatcagcttttacatgctgtgtgcatttcttattatcaacctgttcgtcgccgttatcatggataatttcgactatctgacaagagactggagcattctggggccccatcatctcgatgaattcaaacgtatttgggctgaatacgatcctgaagccaaggggcggataaaacatcttgatgtggtgaccctcctgcgccgcattcagccccctcttggctttggcaaactatgtccccatagggtggcctgcaaacgtctggtgtctatgaacatgccgctgaacagcgacggaaccgtgatgtttaacgctacactgttcgccctggttaggaccgccctgaggatcaaaactgagggaaacctcgaacaggccaatgaggagctgcgggcgattatcaagaagatctggaagcgcaccagtatgaaactgttggaccaggtggtgccaccagctggagatgacgaagtgactgtgggcaaattctatgccacctttcttatccaagaatactttcggaagtttaagaaacgcaaagaacagggcctagtggggaaaccttcccagagaaacgctcttagtctgcaggctgggctcaggactttacacgatataggccctgagatcagaagggctatcagtggcgatctgactgcagaagaggagctcgacaaagctatgaaggaagctgtgagcgccgcctcggaggacgacatttttaggagagctgggggcctgttcggaaatcatgtctcttactaccagtccgatggaaggagtgcttttccacagacgtttaccactcagagaccgctacacatcaataaggctggctctagtcagggcgatactgagtcccccagccacgaaaagctggtcgactcaacattcacgcctagttcctactcctcaaccggttccaacgctaacataaacaatgccaacaataccgccctgggaaggctgccccgcccagctggctacccctctactgtctcaaccgtggaaggtcacggaccccctctgagcccagctattcgagtccaggaagtggcgtggaagctgtcttccaatcggtgtcacagtagggagagccaggcagccatggccggacaagaggaaactagccaggacgagacttatgaggttaaaatgaatcacgacacggaagcgtgttctgagccctccctcttgagtaccgagatgctttcgtatcaagacgatgagaatcggcaattgacgttgccagaagaggacaagagggacattcggcagagccctaagcgcggcttcctccggtctgccagcttgggacggagggcgtcttttcatctcgaatgtttgaagcgacaaaaggaccggggcggtgatatctcccaaaagacggtcctgcctttgcaccttgtccaccaccaggctctcgccgtggcaggcctctcccccctgttacagagaagccatagccccgctagcttccctagacccttcgccacaccacctgcgacgcccggttctcgcggttggcctccccagccggtgccaacattgcgcctggagggtgtagagagttcagaaaaactgaacagttcatttccttccattcattgcggtagctgggctgagacgactcccgggggcggcggcagctctgctgcccggcgcgtgcgccccgtgtcattaatggtgccaagccaggccggtgctcccgggcgccaattccacggtagcgcatctagcctggtggaggccgtcctgatctcagaagggttgggacagttcgcacaggaccccaagtttatcgaagtgacaacacaggagttggctgatgcctgtgacatgacaattgaggagatggagagcgctgccgacaatatcctgtctggtggagccccacagtcccccaatggagcccttctccccttcgtgaattgtagagatgccggacaggatcgcgccggcggtgaggaggacgccggctgtgtgagagctcgcggacgcccttcagaggaagagcttcaggactctagggtctacgtgtcatctctctag

SEQ ID NO: 181219 - DNA, 6522 bp, synthetic construct
  misc_feature 1..6522: note = Description of Artificial Sequence: Synthetic coding sequence
  source 1..6522: mol_type = other DNA
atggtgaacgagaacacccggatgtacatccccgaggagaaccaccaggggagcaactatggtagtccccgccctgcgcatgcgaacatgaacgctaatgccgccgcaggcctagcccctgaacatataccaactcctggggccgccctcagttggcaggccgcgatagatgccgcaagacaggccaaattgatggggagcgctgggaacgccactatttccaccgtcagtagcacccagaggaaacgacagcagtacggcaaaccgaagaaacaaggatccacaacagcaactaggcccccgagggccctattgtgtcttaccttgaagaaccccatccgtcgagcgtgtatttccattgttgaatggaagccctttgaaatcattattctgttaacaattttcgccaattgtgtggccctcgccatttatatcccctttccagaggacgactccaatgcaaccaactccaatctcgaaagagtcgagtatctgttccttattatctttaccgtcgaggcctttctgaaggtcatcgcctatggtctgctgttccatcctaatgcttacctccgaaatgggtggaacctgctggacttcattatcgtggtcgtcggcctattctccgctatcctcgaacaagctacaaaagccgatggcgccaatgcactaggaggcaagggtgccggttttgatgttaaggccttaagggccttcagggtcctgcgcccgctccggcttgtgagtggcgtgcccagcctccaggttgttctcaattccattattaaggccatggtcccactgcttcacatcgcgctgttggtgctgttcgtcattatcatctatgcaatcatcggcttggaactgttcatgggaaaaatgcataagacctgttataaccaagaagggatcgccgacgtgcccgctgaagatgatccaagtccatgcgccctcgagactgggcatggccgccagtgtcagaacggaacagtctgcaaaccgggctgggacggccccaagcatggaatcactaatttcgacaacttcgcctttgcgatgctgaccgtcttccagtgcattacgatggaggggtggactgacgtgctgtactggatgcaagacgccatgggctatgagctgccttgggtgtactttgtgtcccttgtcatcttcggctctttcttcgttcttaatctggtgctcggggtgttgagcggcgagttttcaaaggaacgggagaaagccaaggctagaggcgacttccagaaacttcgtgaaaagcagcagctggaagaagacctcaagggctatttggactggatcacccaggccgaggacatcgaccccgagaacgaggatgaaggaatggacgaagagaagcccagaaacatgtcaatgccaacaagcgagacagagagtgtgaacacagaaaacgtggccgggggagacatcgagggggagaactgcggtgcgcgcctggcccatagaatcagtaagagcaagttttctcggtactggaggcggtggaacagattctgcagacggaagtgcagagctgccgttaaaagcaatgttttctactggttggttatctttctggtgttcttaaacacacttacaatcgcttcagagcattataaccagccaaactggcttactgaggtgcaggacaccgcgaataaagccctattggcactgttcaccgccgaaatgcttctgaagatgtactctttgggcctgcaggcttattttgtgtcactgttcaaccggtttgactgttttgtggtctgcgggggtatcctggaaaccatcctggttgaaacaaaaattatgtccccactgggtattagcgtcctgcgctgtgttcgcctgctgaggatcttcaaaatcacccgttattggaacagtctctctaacctggttgcctcccttctgaattccgtacgcagcatcgcgagtctgctcttactgctgtttctctttatcatcatcttctcactgttaggaatgcagctcttcggggggaaattcaactttgatgagatgcagacccgacggagtaccttcgataacttcccacagagcctgctgaccgtgtttcagatactgactggcgaagactggaattccgttatgtatgacggaatcatggcctacggcggacccagctttcccgggatgctcgtttgcatatactttattatcctttttatatgcggcaactatattttactgaatgtgttcctggctatcgccgttgataacctggctgatgcagaaagcctgacatccgctcaaaaagaggaggaagaggaaaaggagcgcaagaagctggcccgaactgcgagcccagagaaaaagcaggagctggtcgagaagcctgcagtgggcgaaagcaaggaggaaaagatcgaactgaaatctatcacagctgacggcgagagtccccctgccacaaaaattaatatggacgacctgcagcccaatgagaatgaagataaaagcccgtaccccaaccccgagactaccggagaagaggatgaggaagaacccgaaatgcccgtgggtccccggcctaggcctcttagtgaattgcacttaaaagagaaagcggtgcccatgcccgaagcatccgccttttttatcttctccagtaacaatcgcttcaggctacagtgccatcgcattgttaatgataccatctttacaaacctcattctgttttttatattgctttctagcataagtcttgccgctgaggacccagtccaacacacaagtttccggaatcatattctgttttacttcgacatcgtgttcactactatcttcacaatcgagatagcactgaagatgacggcctatggggctttcctgcataagggcagcttctgtagaaactattttaatattctggacttattggtcgtctccgtgtctctgatctcctttggtattcaatcaagcgccataaacgtggtgaagatactgcgcgtgctccgggtccttagacctcttcgagcaattaacagagccaagggcttgaaacacgtggtccagtgcgtgtttgtggcaattaggaccattgggaatattgtgatagttaccactctattgcaatttatgtttgcctgcataggcgtccagctctttaagggcaagttgtacacctgttctgacagctcgaagcagaccgaggccgagtgtaaaggtaattacatcacatataaggatggagaggtcgaccacccaatcattcagccgcgcagctgggagaactcaaaattcgactttgataatgtgctggcggccatgatggcactattcaccgtctccacattcgaggggtggccagagcttttgtacagatccattgatagccacaccgaggataaaggcccgatctacaattacagagtcgagatctctatatttttcattatctacattatcatcatcgcatttttcatgatgaatatcttcgttggctttgtgatcgtgacatttcaggaacagggagagcaggagtataagaattgcgagctggataagaaccaacgtcaatgcgtagaatacgctttaaaagcccgccctttaaggcgctacatccctaaaaatcagcaccagtacaaggtgtggtacgttgtgaactcaacatattttgaatatttgatgtttgtgctcatcctgttaaatacaatctgcctcgctatgcagcattatggccagtcttgcctgtttaagattgccatgaatattctaaatatgctttttactggactgttcactgtggagatgatcttgaagctaattgcattcaagcctaagggatatttctccgacccatggaacgtgttcgacttcttgatagttatcggtagcattatagatgtgatcctgagtgagaccaatccagcggagcatacccagtgttccccgtcgatgaacgccgaggagaattccagaatctctattactttttttcgactgtttagggtcatgagactggtcaaactgctcagtcgtggggagggcatccgaaccctgctgtggacctttatcaaaagttttcaagccctcccttacgtggcattgttgatcgtgatgctcttttttatttacgccgtgataggcatgcaggtcttcggcaagatcgccctgaatgacacgacagagattaatagaaacaataacttccagacctttccacaggcggtgttgctccttttccgatgcgctaccggggaagcctggcaggatatcatgctcgcttgcatgcctgggaagaagtgtgcgcccgagtcagaaccttctaacagcaccgagggtgaaacgccctgtgggagcagtttcgcggtgttttactttatcagtttctatatgctttgcgcattcctgatcatcaacttgtttgttgctgttatcatggacaattttgactatctgacccgcgactggtctatcctgggaccccaccatctcgacgagtttaaacgtatttgggccgagtacgatcccgaagctaaaggccgaatcaagcatctcgacgtcgtgacgctgctgcggcgcattcagccccctctcggcttcggcaagttgtgtccacatcgagtagcctgcaaacgtctggtctctatgaacatgccccttaacagcgatggcactgtcatgttcaatgccacattgttcgctctggtccgcaccgctctgcgaataaagaccgaaggaaatttagagcaggctaatgaggagctcagagcgatcattaagaagatctggaagcgaaccagtatgaagctgctggaccaagtcgtgccaccggccggagatgatgaggtgacagtcggaaagttctacgcaacatttctcatacaggagtatttccgaaaattcaaaaaaagaaaagagcaggggctcgtcggaaagcctagccagcgcaatgccctgagcctccaggctggcctgcgaacgctgcacgacattggccccgagataagacgtgcaatctctggagatctgacggccgaggaggaattagacaaagctatgaaggaggcggtttcagcagcgagtgaagacgacatcttccgtcgggccggcggcctattcggcaatcatgtgtcttactaccagagcgatggccgatcagcattcccacagacattcaccactcagagacctctgcacattaataaggctggatcttcccaaggagataccgaaagtcccagccacgagaagttagttgactcaactttcactcctagttcatattccagcactggatcaaacgcaaacataaataatgccaacaatacagccttgggccgcctcccgaggcccgcgggataccccagtacagtttcaacagttgagggtcacgggcctcctttgtctcccgccatccgcgtccaggaagttgcctggaagcttagttctaatagggagagacacgtccctatgtgtgaagatttggagctgcgtcgggattctggcagcgcagggacccaagcacattgtttgctgctacgcaaggcaaaccccagtcggtgccattccagagagtcccaagccgcaatggcaggacaagaagagacttcacaggacgaaacctacgaggttaaaatgaatcatgataccgaggcctgcagtgaaccttcgctgctgtccaccgagatgcttagttaccaggacgacgaaaaccggcagcttacattgccggaggaagataagcgagacatccggcagtcccctaaacgaggatttttgagatctgcctccctgggccgccgtgcgtctttccacctagaatgcttaaaacgacagaaagatcgaggcggcgatatatcacagaaaaccgtgctgccactacatctcgtgcaccaccaggctctggccgttgcgggacttagccccctgctccagaggagccactcaccagcctctttccccaggccctttgctacgccccccgcaactccgggctctcgcggctggcccccgcaacccgtaccgactctgagattggagggggtggagtctagcgaaaaattgaactcttcatttcctagcatccactgcgggtcttgggctgagactactccaggagggggcggcagcagtgccgcgaggagagttcggcctgtgtccctgatggtaccctcccaagccggcgctcccggtcggcaattccacggatcagcttctagcctggtagaagccgttttaatctccgagggcctgggacagttcgcccaggaccctaagttcatagaagtgaccactcaggaattagccgacgcgtgtgatatgaccatcgaggagatggagagtgcggccgacaatatactatcaggcggtgctccgcagagtcccaatggcgcactactcccttttgtgaactgtagggacgcagggcaggatagagctgggggggaggaggacgcgggatgcgtgcgggccaggggtagaccatccgaggaggagctacaggactctagggtctacgtaagcagcctctag

SEQ ID NO: 181220 - DNA, 6474 bp, synthetic construct
  misc_feature 1..6474: note = Description of Artificial Sequence: Synthetic coding sequence
  source 1..6474: mol_type = other DNA
atggtgaacgagaacacccggatgtacatccccgaggagaaccaccagggcagcaactacgggtcccctagacccgcccacgcaaatatgaatgcgaacgcagcggccgggttggcccccgagcacatacctacccctggcgcggcactgagctggcaagctgccattgatgccgcccgtcaggctaaactgatggggtctgcaggaaatgccactatttcaacggtatcctccacgcagagaaagcgacaacaatatggcaagccaaagaagcaagggtcgactactgccaccaggcccccacgggctctcttgtgcctcacactgaaaaaccctattcgtagagcctgcattagcattgtcgagtggaaaccttttgagatcattattctcctgacaatcttcgccaattgtgtcgccctggctatttacatcccatttcctgaagacgattctaacgcgacaaatagcaacctcgagcgcgtggaatatttgtttctcattatctttaccgtcgaggcctttcttaaagtaattgcatacgggctgcttttccatcccaacgcctatttacgcaatggatggaaccttttggacttcattatcgttgtggtcggcctcttttccgcaatactcgagcaggcaaccaaagcagacggagccaacgcactgggcggcaagggggccgggtttgatgtcaaggcactgagagcctttagggtgctccggccgctgagacttgtcagcggggtaccctcgctccaggtggtgctcaatagcattatcaaggcgatggttccgctgctgcacatcgccctgctggtactgttcgtaattataatttacgccatcataggcctcgaactttttatgggcaaaatgcataaaacctgttacaaccaggagggaatcgcagatgtgcctgccgaggacgacccctcaccgtgtgcactggaaactggccatgggaggcagtgtcagaatgggacagtgtgtaaacctggctgggatggtccgaagcacggaataaccaatttcgacaactttgccttcgcaatgttgaccgtctttcaatgcattacaatggagggctggactgacgttctctactgggtcaacgatgccgtgggccgagactggccctggatctactttgttacgctgattatcataggctccttctttgtgctgaatctagttttaggcgtgcttagcggcgagtttagcaaagagagagagaaagcaaaggccaggggagactttcagaagctgcgggaaaagcagcagctagaagaagacctgaaaggctatctggactggatcacccaggccgaagacattgacccagaaaatgaggatgagggaatggatgaggagaaacctaggaacatgtcaatgcctacctcggagactgaatcagtcaatacggagaatgttgcagggggcgacattgagggggaaaactgcggcgcaaggctggctcacagaatctccaagagcaaattcagtcggtactggaggagatggaaccgattctgtcggcgaaagtgccgtgccgctgtgaagagtaatgtgttttattggctggtcattttcctggtgtttttgaataccctgacaattgcaagcgaacactacaatcagccaaactggctgaccgaagtccaggacacagccaataaggcactgttggctctgttcaccgcagagatgctgttaaagatgtactctctgggcttgcaagcttacttcgtgtcactgttcaaccgattcgattgtttcgtcgtgtgtggaggcatactggagaccattcttgtcgagactaaaatcatgtcccccttggggatcagcgtacttcgctgtgtccggctgttgcggattttcaagattaccagatattggaatagcttaagtaatctcgtggcgagcctccttaatagcgtccgcagcatcgcaagtcttctcctcctgctgtttctgttcataatcatcttttctctcctgggaatgcaacttttcggaggtaaattcaatttcgacgaaatgcagacccggaggtctacattcgataacttcccacaatctctgttgactgtctttcagatactgaccggcgaggattggaactcggtgatgtatgatgggattatggcttatggaggcccttccttccctggcatgctggtgtgtatctatttcatcattctgtttatctgcggaaactacattctgctgaacgtgttcctcgccatcgcggtcgacaacttggcggatgcagagtcacttaccagcgcccagaaggaagaggaggaagaaaaagagcggaaaaagctcgcccggaccgcaagtcccgagaaaaaacaagagctcgtcgagaaaccagcagtgggtgagtctaaggaggagaaaatcgaattaaaaagcataaccgccgatggagagtcacccccagccaccaagataaatatggacgatcttcagccaaatgagaatgaggacaaatccccctatcccaatcccgagaccaccggagaggaggacgaagaggaacccgagatgccggttggcccaagacctaggccattgtcggagctgcacctaaaggagaaggctgtgcctatgccagaggcttctgccttttttatatttagtagcaacaatcgcttcaggttgcagtgtcaccgcattgtaaacgacaccatatttactaatcttatcctgttcttcattctgctgagttctatctctttggctgcagaggatccagtgcagcacacctctttccggaatcacattctcttttattttgatatcgtgtttacgactatcttcactattgagatcgcattaaagatgacagcctacggagctttcttgcacaagggatccttctgcaggaactactttaatattctagacctattggtcgtgtccgtgagcttaatctcctttggtattcagtcatccgcaatcaacgtcgtcaaaatcctcagagtgttacgggtgttacgccccctgagagccatcaatagagccaagggcctgaagcacgtggtgcaatgcgtctttgtggccattagaactattggtaatattgtcattgtgactactctgttgcagttcatgttcgcatgcattggggtgcagttattcaagggcaaactctacacttgctctgattctagcaagcagacagaagctgaatgtaaaggcaactatattacttataaggatggcgaagtcgatcacccaattattcagcccagatcatgggagaattctaagttcgattttgataacgttctggctgctatgatggccttattcaccgtgtcaacgttcgaaggatggccagagctactataccggagcatcgacagccatactgaggataagggtcccatttacaattaccgcgttgagataagtattttcttcattatttatataatcattatcgccttttttatgatgaacatatttgtcggtttcgtcattgtgaccttccaagagcagggagaacaagagtataagaactgtgagctggacaagaatcaaaggcagtgtgtggagtatgccttgaaagcccgccctctgagacgttatattcccaaaaaccagcatcagtataaggtctggtacgtggtaaattcaacctactttgagtacctgatgttcgttcttatactactcaatacgatatgtctagcaatgcagcactacggtcagagctgcctctttaagatagctatgaacattttgaacatgttgtttactggactgttcacggtggaaatgatcttgaagttaattgctttcaaacccaagcattacttctgcgatgcatggaataccttcgatgcgctgatagtggtgggttcaatcgtggacatcgctatcacggaggtgaatcccgctgagcacacccagtgtagcccttcaatgaatgctgaagagaacagtcgcatttctattactttctttcggctgtttagagtaatgcggcttgttaagttactctcgcgaggcgaagggatccgtactctactatggacgtttattaagtctttccaggcattaccttacgtggccctgttgattgtgatgctgttctttatttacgcggtgattggcatgcaagttttcggcaagattgcacttaatgatactacagagataaaccgaaataacaacttccaaacgttccctcaggccgtgttgttattattcagatgcgctacaggagaggcctggcaggatattatgctggcatgtatgcccggtaaaaagtgcgctccggagtctgaaccaagcaacagcacggagggagaaaccccttgcggcagttcatttgctgtgttctactttatttctttctatatgctgtgtgctttcctcataatcaatttgtttgtggcagtcatcatggataacttcgactatctgaccagagattggtccatcttgggtccccaccatctcgatgagttcaaaagaatctgggcagagtatgaccccgaagctaagggaaggatcaaacacctggacgtggtgacactactaagacggatccagccaccgttgggttttgggaagctgtgcccacatcgcgtagcttgtaaacgtctcgtctcgatgaatatgcctctgaactctgacggtaccgtcatgttcaacgccaccctgtttgccctggtccggaccgccctgcgtatcaaaaccgaggaagggcctagcccctcagaggcccaccaaggggcggaggatccatttcgacccgccggtaacttagagcaggccaacgaggaactcagggccatcattaagaaaatctggaagcgcacatcaatgaagcttttggaccaggtagttccaccagccggcgacgacgaggtcacagtgggcaagttctacgccacatttctgatacaggagtactttcggaaattcaaaaagaggaaagagcaggggctggtggggaaaccgagccagcggaatgcactgtctctacaagctgggcttcgaaccctgcacgatattgggcctgagatccgtagggcaatctctggggatctcactgccgaggaggaactcgacaaagctatgaaagaggccgtgagcgctgccagcgaagacgatatcttcagacgtgccggcggtcttttcggaaatcacgtgtcgtattatcagagtgacggtcgttctgcctttcctcagacctttactacccagaggccactgcatatcaacaaggccggtagctcacaaggcgacacagagagcccttctcatgagaagcttgttgactccaccttcacaccgtcttcatacagttccaccggatccaatgcgaacataaataatgcaaataatacggccctgggcaggctgcccagacccgcaggctatccttctacagtgtccaccgtggagggtcacgggccccccctgagtcccgcaattagagtacaagaggtcgcttggaaattgagttcaaaccgctgccatagccgagaatctcaggccgccatggctggccaggaagagacttctcaggatgagacctatgaggtcaaaatgaaccatgacactgaagcctgttccgaaccctccctgctatccacagaaatgctgtcataccaagatgacgagaaccggcagcttacactgccagaggaagacaaaagggacattcggcagtcccccaagcggggctttctgagatccgcctctttagggcgccgtgcctccttccatctagaatgtttgaaaagacagaaagacaggggaggcgacattagccagaagactgttctgcccttgcatttggtgcatcatcaagccctggcagtggcgggcttgagccctctccttcagagatctcattctcctgccagcttcccaaggccattcgctaccccgcccgccacgcctggctcaagggggtggccaccgcagccagtgcctacactccgtttggagggcgtggagagctctgaaaaactgaactcgtctttccccagtatccactgcggatcctgggcagaaaccactccaggagggggaggctcctctgctgcccgcagagtgcgccccgttagtcttatggttccttcgcaggccggcgcccctggtcgccagtttcatggctccgcttctagcctggtggaagccgtcctaatctctgagggcctgggacagttcgcccaggaccccaaatttatcgaggtcactactcaggaactcgccgacgcatgtgatatgacaattgaagaaatggaatccgcggctgacaacatactttctggcggcgctccccaatccccgaatggggctttactcccatttgtaaactgccgtgatgctgggcaggaccgtgctggcggagaagaggacgcgggctgtgtgcgggcgagaggccgtccctcagaggaggagctgcaggattctcgcgtgtacgtgtcatcactgtag

SEQ ID NO: 181221 - DNA, 6468 bp, synthetic construct
  misc_feature 1..6468: note = Description of Artificial Sequence: Synthetic coding sequence
  source 1..6468: mol_type = other DNA
atggtgaacgagaacacccggatgtacatccccgaggagaaccaccagggcagcaattacggctcacctcgccccgcacacgctaacatgaatgccaatgccgcggccggactggctccagagcacatccctacacctggagccgcactgtcgtggcaagccgctattgacgcagctaggcaagccaagcttatggggtccgcaggcaatgcaacaattagcacagtctcaagcactcagcggaagcgtcaacaatatggaaagcccaagaagcagggttcaactacagctaccagacctccacgggccctgctatgccttacactgaagaatcccatcaggagggcatgtatttccatcgtggaatggaagccctttgagatcattatactgcttacaatattcgccaactgtgtcgctctagctatctacattccatttcccgaagatgattccaacgctacgaacagcaacctggaaagagtggagtatctctttcttataatcttcacggtggaagcgttcctgaaggtaatcgcctacgggctgctgttccaccccaatgcttatctcagaaatggatggaatctcctggatttcataatcgttgtggttggcttgttttccgccatccttgagcaggcaaccaaggcagacggcgccaacgctctgggcggtaagggagctgggttcgatgtcaaggccctcagagccttccgagttctacgcccccttaggctcgtgagtggcgtgccttccctgcaggtcgtcttaaatagtataattaaggccatggttccacttctgcatatagccctgctcgtcttgtttgtcatcatcatttacgcaatcataggactcgagctcttcatgggcaaaatgcacaagacctgctataaccaagaggggattgccgacgttccggccgaagatgaccccagcccctgcgccctggaaacaggacacggtaggcaatgccaaaacggcacagtttgtaagccgggttgggacggccctaaacacggaatcactaacttcgataatttcgcttttgcgatgctcacggtcttccagtgtatcaccatggagggctggacagatgtgctgtattgggtgaatgacgcagttgggagggattggccttggatctactttgttaccctaattatcattggcagctttttcgtactcaacctggtgctcggcgtattgtcaggcgagttttccaaggagcgggaaaaagccaaagcccgtggcgatttccaaaagctgcgagaaaagcaacaactggaagaggacctgaagggctatcttgattggattacacaggcagaagacatcgaccccgagaatgaggatgaaggtatggatgaagagaagccgcgaaatatgtctatgccaaccagcgaaactgagagcgttaacaccgagaacgttgccggcggggacatcgaaggagagaattgtggcgcccgcctcgctcacagaatttccaaatccaagttttccaggtattggcgacggtggaataggttttgtagaaggaaatgccgcgccgctgtcaagtctaatgtcttctattggctggtgatatttcttgtgttcctgaataccctgaccatcgctagcgagcactacaaccagccaaactggctcactgaagtacaggacactgccaacaaggcattactggctttattcaccgcagagatgttgcttaaaatgtatagcctggggctgcaggcctacttcgtcagcctgtttaatagatttgactgttttgtggtatgcggggggatactggagacaatactcgtggaaacaaagataatgtcaccattgggaataagcgtgttgcgctgcgtgcgcctgcttcggattttcaaaatcacaagatattggaatagcttgtcaaacctcgtagcaagcttgctgaattcggtgaggtctatagcttcattactgctgctcctgtttctatttatcattatttttagcctcttgggaatgcagctgttcggcggcaagtttaatttcgacgagatgcagacgagacggtctacctttgataattttccacagtctctgctcacagtgtttcagatcctcaccggagaagactggaactcagttatgtatgatggcattatggcatacggcgggccttcattccctggcatgctagtgtgtatatactttattattctcttcatttgtgggaactacattctcttgaacgtcttcctggccatagccgtggataatttggcggacgccgaatcacttacctcggcacaaaaggaagaagaggaggaaaaagaaaggaagaagctggctcgtaccgcttcaccggagaagaaacaggagcttgtcgagaaaccggccgtgggggaatcgaaggaggagaaaatcgaattaaagtctatcaccgccgatggcgagagcccacccgctactaagataaacatggacgatttgcagccgaacgaaaatgaggacaagagcccctacccaaacccggagaccacgggcgaggaagacgaagaagaacctgagatgccagtgggcccgcggccccggccactgtcagaactccacctgaaagagaaggcagtcccaatgcccgaagccagtgcattctttatattctcctctaataacagatttagactccaatgtcacaggattgtcaacgatactattttcaccaatctcatcctattcttcatacttttaagctcgatcagtttggccgctgaggatccagtccaacacacaagttttcgcaaccacattctaggaaatgcagactacgtgttcacttccatctttacactggagatcatactgaagatgacagcatacggtgctttcctccacaagggctctttttgcagaaactactttaatatactggacctgctggtagtgtctgtctctcttatctcattcggcattcagtcaagcgcaatcaatgttgttaaaattctgcgcgtcctccgcgtgttgcgccccctgagagcaatcaacagggcaaaggggcttaaacacgtcgtccagtgtgtgttcgttgccatcaggacaatcggaaatattgttatcgtgacaaccctactgcagttcatgttcgcttgcatcggagtgcaactttttaagggcaaactgtatacctgttccgatagctccaaacagacggaagcggagtgcaagggaaactatatcacctataaagatggtgaagttgatcatccgataattcagcctcgtagctgggaaaactcgaagttcgactttgacaacgtgctggctgcaatgatggctctgttcaccgtgtcgacttttgagggatggcctgagctgctgtatagaagcatcgacagccataccgaggataaagggcccatatacaactaccgggtggaaattagcattttcttcattatttacatcattatcattgctttctttatgatgaatatttttgtaggatttgttatcgttacattccaggagcagggtgagcaggagtacaagaattgtgaactcgacaagaaccaaaggcaatgtgtggagtacgcactcaaagcccgccctctgagaaggtatattccaaaaaaccagcatcaatataaagtctggtacgttgttaactctacatatttcgaatacctaatgtttgtgctgattctgctgaacaccatttgcctggccatgcagcactacgggcaatcgtgtctgttcaagattgctatgaacatactgaacatgctctttacagggctatttactgtggaaatgatactcaaactgatagccttcaagccgaaagggtactttagcgatccttggaacgtatttgacttcctgattgttatcgggagcatcatcgacgtgatcctatccgagactaatcattatttctgtgatgcttggaatacattcgatgccctgatcgttgtgggcagtattgtggacattgcaatcacggaggtcaacaatgccgaggagaatagtaggatttcaattacctttttccgtctgtttcgcgttatgaggctggtgaagctcctgagtaggggcgaggggatccggaccctgctatggactttcattaaaagtttccaggccctgccatacgtggcactgctaattgtcatgctgtttttcatatacgctgttatcggtatgcaggtgtttggaaagatcgcactgaatgacacgaccgaaataaacagaaacaataatttccaaacgtttccacaggcggtgctgttactctttcgctgtgcgactggcgaagcttggcaggatattatgctggcctgtatgccgggcaaaaagtgtgcacccgagagtgagccatccaattccacagaaggggagacaccttgtggctcatcttttgcagttttttacttcatcagtttctacatgctgtgcgcctttttaattataaacctcttcgtggctgtgattatggataatttcgactacctcaccagggactggagcattctgggccctcatcatcttgatgaatttaaacgcatctgggctgagtacgaccctgaagctaaaggacgcatcaaacacctcgacgtggtgaccctgctacgtcgaattcagcccccgttgggctttggtaaattatgccctcatagggtcgcgtgcaagcggctggtctcaatgaatatgcctctcaacagcgatgggaccgttatgttcaacgccacactttttgctctcgtaagaaccgccctgcgcataaaaaccgagggtaatctggagcaggccaatgaggaacttagagctatcattaaaaaaatatggaagcgtacatccatgaagttactggaccaggtggttcccccggcaggagatgacgaagtaaccgtgggaaaattctacgcaacctttctcattcaggagtatttccgaaaattcaagaaacgaaaggaacaggggcttgtcggcaagcctagccaacggaatgcattgtcattacaggctggactgcgcaccctgcacgacatcgggccagaaatccgacgggcaattagcggggacctgacagccgaagaagagctggacaaggccatgaaagaagccgtcagcgccgcctccgaagacgatatattcagaagggctggcgggctctttggaaatcatgttagctactaccagagtgacggccggtctgctttccctcagaccttcacaacccagaggcccctgcacatcaataaggccgggtcatctcagggggataccgaatcacctagccatgaaaagctggtcgactccacatttacgccttcatcctacagctccaccggctccaacgccaatatcaataacgccaataacaccgctctgggcagacttcctagacctgctgggtatccgagtaccgtctccaccgtggagggccacggacccccactttcacctgctatacgcgtccaggaggttgcctggaaattgtcaagcaatcgatgccactcccgtgaaagccaagcagccatggcagggcaggaggaaacctcccaagacgagacatacgaggtcaaaatgaatcatgacacagaagcatgttcagagccgagcctgctgtccaccgagatgttgtcatatcaggatgatgaaaatcggcaactgacccttcctgaggaagacaagcgggacattcggcagtccccgaagaggggcttcttgcggagtgcatctctaggcagaagggcctccttccatctcgaatgtctgaagagacaaaaagataggggaggggatatctcacagaaaaccgttctccccctccacttggtccatcatcaggcactcgccgtggccgggctctcgccactactgcagagatctcatagccccgcttcttttccaagaccgttcgccacacctcctgccacccctggttccaggggctggcccccccaacccgtaccaaccttaagacttgaaggggttgagtctagcgaaaaactgaactcatctttcccctccattcactgtggatcttgggcagaaactactcccggcggaggaggctcatccgcggctcgaagggtaaggccagtgtcccttatggtaccctctcaggcaggggcccctggcaggcagttccatggttccgcatcatctttagtggaagccgtgctgatctcagagggattaggccagttcgcgcaggatcctaaattcatcgaagtgactacccaagaacttgccgatgcatgcgatatgaccatcgaggaaatggagtccgctgccgacaatattctgagtggaggggctccacaatctcctaacggagcactcctgccatttgtgaactgcagagatgctggtcaagacagggccgggggcgaggaagacgctggctgcgtgcgggctagagggcggcctagcgaagaggagctgcaggactccagggtttacgtgtcctcactctag

SEQ ID NO: 181222 - DNA, 6630 bp, synthetic construct
  misc_feature 1..6630: note = Description of Artificial Sequence: Synthetic coding sequence
  source 1..6630: mol_type = other DNA
atggtgaacgagaacacccggatgtacatccccgaggagaaccaccagggcagcaattacggctctccccggcccgcacatgcaaacatgaacgcgaacgccgccgccgggttggctcctgaacacatccccaccccaggagccgccttatcctggcaggctgccatcgacgctgctcgccaggctaaattaatgggatcggcgggaaatgctacaatctcaaccgtctcatccacacaacgcaagaggcagcagtatggcaagcccaaaaagcagggcagcactaccgccacccggccaccaagggccctgctttgtcttacactcaagaatcccatacggcgagcctgcatttctatcgtggagtggaagccctttgaaatcatcatcctccttaccatttttgcaaactgtgttgcacttgcaatttacatcccttttcccgaggacgattctaatgccacaaactcaaacttggagcgggtggaatatctgttcctaatcatttttacagtggaggcctttctcaaggtaattgcttacggtcttttattccatccaaacgcataccttcggaacggctggaacctcctcgattttatcattgtagttgtgggcttattttcggcgattctggaacaggccactaaagctgacggtgccaatgccctggggggtaaaggggcaggctttgacgttaaagcgctgcgggctttccgggtcttgcgcccactgaggctggtgagcggcgtcccctcactccaagtggtgctcaactctattatcaaagccatggttcccctcctgcatatagcgttacttgtgctgtttgttatcattatatacgctattattgggttagagctgtttatgggcaagatgcacaagacctgttataatcaggaaggtatcgccgacgtcccggcagaagatgatcccagtccttgtgcactggaaacaggccacgggcgacagtgccaaaatggcactgtctgtaagcctggttgggatggaccaaagcacggcattactaacttcgacaattttgctttcgctatgttgacagtctttcagtgcatcactatggagggttggactgacgttctgtactggatgcaggatgccatgggttacgagctgccatgggtttattttgttagtctcgtgatttttggcagcttcttcgttctgaatttggtccttggggttctgtctggcgaattttctaaggagcgagagaaagccaaggcccgaggtgattttcagaagcttagggagaaacaacaactggaggaagatctgaagggctatctcgattggatcacccaagctgaagacatcgaccctgaaaatgaggatgagggaatggatgaggaaaaacccaggaatatgtcgatgccgaccagcgagaccgagtccgtcaatacagagaacgttgccggcggagacatcgaaggcgagaattgcggggcacgccttgcccatcgtatttctaagtctaagttctccagatactggagaaggtggaataggttttgtagacgcaagtgtagggccgccgtcaaatccaatgtgttctattggcttgtgattttccttgtcttccttaacaccctgactatcgcttcggaacattataaccagccaaattggcttacagaagtccaggataccgccaataaggccctgctggctctgttcaccgctgaaatgctactgaaaatgtactccttgggcttgcaggcctatttcgtgtctctgttcaatcggtttgactgcttcgtcgtctgcggcggaatcctagagactattctcgtagagacaaaaatcatgtccccactcggcatttcagtcctgcgatgcgtcaggctgctgcggatattcaaaataacacgttattggaatagtctgtctaacctggtggcctcactcttgaactcagtcaggtcaatcgcctctctgctgctcctcctattcctttttatcatcatcttcagtttgctgggcatgcagttattcggcggcaagtttaacttcgacgaaatgcaaactcgcaggagcactttcgataattttccccagagtttactgactgtcttccaaattctgaccggagaggactggaacagtgttatgtacgatggcattatggcctatggcgggccctccttcccagggatgttagtttgtatctatttcatcatactgttcatctgcggaaattacattcttttgaatgtgtttctggcaattgccgttgataaccttgcggacgccgagtcattgacatccgcgcagaaggaggaggaggaggaaaaggagcgcaaaaaactagcccgaaccgccagcccagaaaaaaagcaggaactggtggaaaagccagctgtgggagagtccaaagaggagaagattgaactcaagagtataacggctgacggcgagtcgccccccgctacaaaaatcaacatggatgatctccaacctaatgagaacgaagacaagtcgccctacccgaacccagagaccacgggcgaggaggacgaggaagaacctgagatgcctgtgggccctcgcccccgccccctttctgaactgcatcttaaggagaaggcggtcccgatgcccgaggcatcagccttttttatattcagctccaataatcgcttcaggttgcagtgccatcgcattgtgaatgacactatctttaccaatctcatactgttcttcattctcttgagttcaatttctctggccgcagaagacccagttcagcacacatcttttcgcaaccatatcctgttctactttgatatcgtcttcacaacaatctttacaatcgagatcgccctgaagatgacagcctacggcgcatttctgcataagggaagcttctgtcggaattactttaacatcctggatttgctggtggtctccgtcagtctgatcagcttcggaattcagagttccgcaattaatgtagtgaagatcctgagggtgctcagggtgcttagacctttgcgcgccatcaacagggccaagggactgaaacacgtggtgcagtgtgtattcgtggcaattcgcacaataggaaatattgtgatcgtgaccacgcttctgcagtttatgtttgcatgcattggagttcagctcttcaagggtaagctgtatacatgttcagatagttcaaagcagacagaggccgaatgtaagggaaattacatcacatacaaagatggagaagtggaccatcctatcatacagccacgaagctgggaaaactctaaattcgatttcgataatgtcctggctgccatgatggcactgtttaccgtgagtactttcgagggctggcctgagcttctgtaccgcagcattgattcccatacagaagacaagggcccaatctataactaccgcgtggagatatctatattcttcattatctacattattataatcgcattttttatgatgaacatctttgttgggttcgtgattgtgacgttccaggagcagggcgaacaagaatataaaaactgcgaattagataaaaatcagcgtcagtgtgtcgagtacgccctgaaggctaggcccttgagaagatatatcccaaaaaaccaacaccagtataaagtttggtacgtcgtcaacagtacgtattttgaatatctgatgtttgtcttgattctgctcaacaccatttgccttgccatgcagcactacggccagtcatgtctgttcaaaattgctatgaacatcctgaacatgctcttcaccgggcttttcactgtcgaaatgatactgaagctgattgccttcaagcccaagcattacttctgcgatgcctggaacacattcgatgcattaattgtcgtgggaagcattgtggatatagctatcaccgaggtgaaccccgcggaacacacccaatgttctccatccatgaatgcagaggagaattcaaggattagtatcacttttttcagactcttcagggttatgaggcttgtcaaattgcttagcaggggcgagggtattaggacgctgttgtggactttcattaagtctttccaggcactcccctacgtcgccttattgattgtgatgttgtttttcatatacgccgttattggcatgcaggtcttcgggaaaatagctctgaatgataccacggaaattaaccggaacaataattttcagactttcccccaagccgtattgctgctgttcaggtgtgccactggagaagcctggcaggacatcatgcttgcatgcatgcccggcaagaaatgcgcaccagagtccgagccttcaaactcaacagaaggcgagaccccctgtgggtcctcatttgcggtgttttattttatctccttttacatgttatgcgcttttctcattattaaccttttcgttgcagttatcatggacaattttgactacctcactagagactggagcatactggggccgcaccacctggacgaatttaagaggatctgggccgagtatgaccccgaggctaagggtcgaatcaagcacctggacgttgtgaccctcctacgacgaatccaaccccctttagggttcggcaagctctgtccccatcgcgtggcatgtaagcgcttggtgtcgatgaatatgcctctgaatagtgatggcaccgtcatgttcaatgccacattgtttgccctggtgaggaccgcacttcggattaagaccgagggaaacctggaacaggctaacgaagagctgcgggcaatcatcaagaaaatttggaagcgcacctctatgaagttgctcgatcaggtcgtacctcccgctggcgacgatgaggtcacagttggtaaattctatgccaccttcctgatacaagagtacttccgaaagtttaaaaaaagaaaagagcaaggcctggtgggcaaacccagccagcggaacgccttgagcctgcaggccggcttgcgcaccctgcatgacattggccctgagattaggcgagcgatttccggagacctcaccgccgaggaggaattggataaagcaatgaaggaggccgtctccgccgcctcggaagacgatatttttaggcgcgccggcggcctgtttggcaaccatgtctcatactaccagtctgatggacgcagcgcattcccccagaccttcaccacccagagaccccttcacatcaacaaggcgggttcttcccaaggggacacagagagtcctagccacgagaagctagtggactctaccttcaccccatccagctactcttcaaccgggagtaacgctaatattaacaacgcaaacaacactgccctaggtcgcctgccgcgacctgctggatatccaagtactgtttctaccgtggaagggcatggcccaccattgtcccccgctatacgcgtgcaggaggttgcctggaagctgagcagcaaccgaatgcactgctgcgatatgctggacggtggaacattcccaccagctctcgggccacgccgcgccccaccctgcctgcaccagcaactgcagggatctttagctggcctaagggaggacacaccttgtatagttcccggccatgcatccctgtgctgcagtagcagagtcggcgagtggctcccagccggatgtacagctccccagcacgccaggtgtcactctagggagtcacaggccgccatggcgggtcaagaggaaacctcccaagacgaaacgtatgaagtcaagatgaatcatgacaccgaggcgtgttctgagccgtcccttctctcaacggaaatgttgagttatcaggacgacgaaaacaggcaactcactctgccagaggaggacaaacgggatatccggcaatcccccaaacgtgggtttctaagaagtgcctccctgggtcgaagggcttctttccacttagagtgtctgaagcgtcagaaagataggggcggagatatttcacagaaaaccgttcttccgctgcacctggtgcatcaccaggcattggcagttgcgggcctttcaccgcttttgcaaaggagtcactcgccagcttctttcccccgaccattcgccactccccctgcgactcctggctcgaggggatggccaccacaaccagtgcctaccctgcggctcgagggtgtcgagagttcagagaagttgaatagctctttcccctccattcactgcggttcatgggcagaaacaacgccaggaggcggcggatcaagcgccgcgagacgagtgaggcctgtgtccttaatggttccttctcaagccggggcccctggaaggcagttccatggttcagcatcctccctcgtagaggccgtgttgatttccgaaggtctcggacagttcgctcaggatccgaagtttattgaagtcaccactcaggaactggccgacgcgtgcgacatgacaattgaagagatggagagcgccgccgacaacatcctctctggaggggcaccacagtcccctaatggcgctctgctgccattcgtgaattgccgcgacgcggggcaagacagggcagggggcgaggaggacgctggctgcgtacgagcacggggacgtccttctgaagaggagcttcaagacagccgggtctacgtcagtagcctgtag

SEQ ID NO: 181223 - DNA, 6474 bp, synthetic construct
  misc_feature 1..6474: note = Description of Artificial Sequence: Synthetic coding sequence
  source 1..6474: mol_type = other DNA
atggtgaacgagaacacccggatgtacatccccgaggagaaccaccagggctcaaattacgggagtcctcggccagcgcacgccaatatgaatgccaacgcagccgcagggctagcccctgaacacatcccaacgccaggcgctgctttgtcttggcaggcggccattgatgccgctcgccaggcgaaacttatgggtagcgctggaaatgccacaatctctaccgtcagttcaacacaacgtaagagacagcaatacggcaagcctaagaagcaggggtcaaccaccgcaactaggcctcccagggccctgctttgtctgaccctgaaaaatcccattcgtcgtgcatgcatctcaattgtcgagtggaagccctttgaaataatcatcttgctgactatcttcgctaattgtgtagcccttgccatttatataccctttcccgaagatgattctaatgcgactaactccaatctggagcgcgtggaatacttgttcctcatcatatttacagtggaggcttttctaaaggtgatcgcctatggactgctatttcaccctaacgcctatctgcgtaatggctggaatctgttggactttatcatcgtggtggtgggcctgttttccgccatcctcgagcaggccacgaaagctgatggggctaatgctctgggaggaaaaggcgcgggttttgacgttaaagcgctgcgagctttcagggtcctgaggccgctgcggctagtgagtggagtcccttccctgcaggtagtactcaacagtatcattaaagccatggttccactgcttcacatagcacttcttgtcttgtttgtaatcataatttacgccatcatcggtcttgagctgttcatggggaagatgcataagacatgttataaccaagagggcatcgcagacgttcctgctgaggacgatccatccccctgcgcactggaaacaggtcatggacggcagtgccagaacggaaccgtttgcaagcccggttgggacggcccaaagcacgggattaccaactttgacaatttcgcttttgcaatgctgactgtgttccagtgcatcaccatggagggctggaccgatgtgctatactgggtgaacgatgccgtggggcgggattggccttggatctactttgtgaccctgattatcatcggaagctttttcgtactcaacttagtgctcggcgttctgagcggcgaattttcaaaggagcgagagaaggctaaagctagaggcgattttcagaagctgcgggagaaacagcagttggaggaggatctgaaaggatatctggattggatcacacaggctgaggacatcgaccctgaaaatgaagacgagggcatggatgaggagaagccaaggaatatgagcatgccaacgagcgagaccgagtccgttaacacagaaaacgtcgcaggcggcgatatagagggcgaaaactgcggagcgagactggctcaccggatttctaagagtaaattctctcgatattggaggcgctggaaccgattctgtcggagaaaatgtagagctgccgtaaagtccaatgtattttactggctcgtaatcttcctggtatttctaaatacccttacaatcgcaagtgaacattataatcaaccaaactggttgactgaggtccaagataccgccaacaaagccctgctggcgttattcacggccgaaatgctgctcaaaatgtacagcttgggtctccaggcctacttcgttagtttattcaatagattcgattgcttcgtggtgtgcggtggaatcttagagacaatcctggttgagaccaagatcatgtctccactggggatctccgtgttgagatgtgtgcggttgctccggatttttaagataactaggtactggaatagtctgagtaacttggtggcctcattgttaaatagtgtgcgcagcatcgcctcacttctgctgctactgtttctattcatcatcatcttcagcctgctgggcatgcagctgttcggcggtaaatttaacttcgacgagatgcaaaccaggagaagtaccttcgacaatttcccccagagcctgctgacagtctttcagatcctgactggagaggactggaattcagttatgtacgatggtataatggcatacgggggcccctctttcccaggcatgttggtgtgcatctatttcatcatcttatttatatgtggcaattacatcctgctcaatgtgtttctagctattgccgtagacaacctggctgacgcagaaagtcttacttcggctcagaaagaagaggaggaagagaaggaaagaaagaagctggcccggaccgccagccctgagaaaaaacaggagttggtggagaagccggccgtgggagaatctaaggaggagaaaatagaattgaaaagcatcacggctgatggtgagtcaccaccagctacaaagattaacatggatgacctgcaacccaacgagaacgaagataagagcccgtatcctaacccagagaccaccggagaggaggacgaagaagagcctgaaatgccggtgggacctcggccccgtcccctgagcgaacttcacttgaaggagaaagccgttcctatgcctgaggcatctgcattcttcatattcagctccaacaacagatttcgactgcagtgccatagaattgtcaacgacacaatcttcactaatctgatcctattttttatcctgctttcctcaatctctctggcagcagaagaccccgtgcaacacactagctttaggaaccatattctgggtaatgctgactacgtgttcacgagcattttcactctagaaataatccttaaaatgacagcatacggtgcatttctccacaaagggtctttctgtaggaattacttcaacatcctggatctactcgtagtgtcagtgagtctgatatccttcggcattcagtcatccgcgatcaacgttgtgaaaattctgagggtgttacgagtgttgcgtccactgcgcgccataaacagggccaaaggactaaagcacgtcgtgcagtgcgtctttgtggccatcaggaccattgggaacatagtcatagtgacaactctgctgcagttcatgtttgcctgcataggcgtgcagctctttaagggaaaactctacacgtgtagcgactcaagtaaacaaaccgaggcggagtgtaaggggaactatattacctataaggacggcgaggtggaccatcccatcatccagccaaggagctgggaaaactctaagttcgactttgacaacgtgttagcagctatgatggccttgtttactgtttccacattcgaggggtggccggagctgctgtatcgaagtatcgatagtcacactgaggacaaagggcctatttacaattaccgcgtggagattagtattttcttcattatttacattatcattattgctttcttcatgatgaacatctttgtcggctttgtcattgtgaccttccaggaacagggtgagcaagaatataagaactgcgagctggacaaaaatcagagacagtgcgtggaatatgccctgaaggcgcggccactcaggcgctatatccctaagaatcaacaccagtataaagtctggtatgtggtgaactccacttattttgagtatctgatgttcgtgttgatcctgttgaacacaatctgtctagccatgcagcactacggccagagttgcctcttcaagattgcaatgaatatcctcaacatgctgttcacgggactcttcaccgtcgagatgatcctgaagctgatagccttcaagcccaaacactacttctgcgacgcctggaatacattcgacgcgctcatcgtcgtggggtccattgtcgatatcgcaatcaccgaagtaaacccagcagagcacacccagtgtagcccctccatgaatgcagaggaaaacagcaggatctctattaccttttttagactctttcgggtgatgcgccttgttaagctcctgtccagaggcgaaggcatccggacactcctctggacctttattaaatcctttcaggccttgccatacgtggccctgctgatcgtgatgctgttttttatctacgccgtgatcggcatgcaagtgtttggaaagatcgctctgaacgatacaactgagattaacagaaataacaattttcagacgttcccacaagctgttctcctgctgtttcgatgcgctacaggggaggcatggcaggacattatgttggcgtgtatgcccggaaagaagtgcgctcccgagagcgaaccaagcaactctactgagggagagaccccctgtggtagtagttttgctgtgttctacttcatctctttttatatgctgtgtgcctttttgattatcaacttgttcgttgcagtgatcatggacaacttcgattatttgactcgcgactggagcatcttgggaccacaccatctagacgagttcaagcggatctgggcagagtatgacccagaggcgaagggccggatcaagcacctggatgtggtgactctgctgcgtcgcattcagcctcccctgggatttgggaaactatgtccccacagagtagcctgtaaaagattggtgtctatgaatatgcccctgaatagcgatggaaccgtgatgtttaacgctaccctatttgcactggttcggacggctctcaggattaagacggaagaaggcccttcaccctccgaagcccatcagggagccgaagacccatttaggccggccggaaacctggagcaggcgaacgaagaactgcgtgcaataatcaaaaagatctggaaaaggacctctatgaagctgttagatcaggtcgtaccccctgccggggatgacgaagtgaccgtgggcaagttttatgccactttcctcattcaagagtatttcaggaagtttaaaaagcggaaagaacaggggttggtgggaaagccttcccagcggaatgcattgagcctccaagcaggactccgcactctacacgatatcggaccagagattcggcgcgccatatcaggcgacttgacagcagaggaggagcttgataaggccatgaaggaggctgtgtccgctgcatctgaggacgacatatttcggagggcagggggactgttcggtaaccacgtcagctattatcagtcagacgggcggtctgctttcccgcagacttttaccactcagcggccactgcatattaataaagcaggatcgagtcagggtgacaccgagtcaccgtctcatgaaaagctagtagacagcacctttaccccatcctcatatagctcaaccggcagcaatgccaacatcaataacgcaaacaataccgccctgggccgcttgccccgtcccgccggatatccatctactgtttccacagtcgaaggccacggcccccccctgagcccggccattcgggtgcaggaagttgcatggaagctgtcctctaatcggtgccactcccgggaaagccaggcggctatggcgggccaggaagagacatctcaagacgagacatatgaagtcaaaatgaaccatgatacagaagcgtgctctgagccgtcccttctctccacggagatgctgtcttaccaggacgacgaaaatcgccaactgacgcttcccgaagaggacaaacgggacattagacagagccccaaacggggcttcctaagaagtgccagtctgggtaggcgcgcaagctttcatttggaatgtttgaaacgccaaaaagaccgagggggggatatctcacaaaagactgttctgcctctgcacttggttcaccatcaggcactagccgtcgccggtcttagcccgctgctgcagcgtagtcatagccccgccagtttccctcggccttttgccacacctcccgccaccccaggctcaaggggatggccccctcagccagtgcccactctcaggctcgagggggtggaaagcagtgagaagcttaactcatcatttcctagtattcactgcggatcttgggcggagaccaccccaggggggggcggaagctctgcagctaggcgagtccggcccgtgtctctgatggtgcccagtcaggccggggcacccgggcggcagttccatggtagtgctagctctctcgtggaagcagtgctgatctccgagggtctggggcagtttgcacaggatcccaagttcatagaggttactacacaggagctcgccgacgcgtgcgatatgaccattgaggagatggagtcggcggctgataacatcctgtctgggggcgccccccagtcccccaacggcgcgctgctccctttcgtaaattgccgggacgccgggcaggaccgggctggaggcgaggaagacgctggatgtgtaagagctagaggccgtcccagcgaagaagagctccaagatagccgggtctatgtgagctctctctag

SEQ ID NO: 181224 - DNA, 6501 bp, synthetic construct
  misc_feature 1..6501: note = Description of Artificial Sequence: Synthetic coding sequence
  source 1..6501: mol_type = other DNA
atggtgaacgagaacacccggatgtacatccccgaggagaaccaccaagggtcaaattacggcagcccccgtcccgctcatgccaatatgaatgccaacgctgccgcgggtctcgcacctgagcacattcccaccccaggagctgccctctcttggcaggccgctatcgacgcggccaggcaagccaagttgatgggaagcgctggcaatgccacgattagtacagtgtccagcacccaacggaagaggcagcagtacggcaagcctaagaaacaggggtccactactgcgacacgacccccaagggcacttctgtgtctaactctgaagaatccgattagacgagcctgtatcagcatagtggaatggaagcctttcgaaataatcatcctactgacaatttttgctaattgcgtcgccctggcaatctacataccatttcctgaggacgattctaacgctactaactctaacctcgagagggtcgagtatctgttcctaattatcttcactgtagaagcgttccttaaagtcatcgcctatggcctgctgttccatcctaatgcttacctgcgcaacggctggaatctcctggactttatcatcgtcgtggtggggctcttctctgctatcctcgagcaggctacaaaggccgacggggccaacgccctcggggggaagggagcaggcttcgacgtcaaggcattacgcgccttcagagttctgcgcccactccggctcgtgtccggagtgccttcactgcaggtggtcctgaattcgattattaaagccatggtcccattgctgcacattgcgctcctggtacttttcgttattatcatttacgcaatcatcggtctcgaactgtttatgggcaagatgcataaaacttgttataaccaggagggcattgctgacgtcccagcagaggacgacccgtcaccctgcgcccttgagactggccacggacgacaatgtcaaaacggaaccgtgtgcaaacccggctgggacggtcccaagcatgggataaccaactttgacaatttcgcctttgccatgctgacggttttccagtgcattactatggagggttggaccgacgtgctgtattgggtcaacgacgcagtgggccgggactggccctggatctacttcgtgacactgattatcattggatccttctttgtgcttaacctcgtgctcggcgtgctgtctggggagttttctaaggaacgagagaaggctaaggcccgcggcgacttccagaaactcagagaaaagcaacaattggaggaagacttaaaaggttaccttgattggattactcaagctgaagacattgacccggagaatgaggacgagggaatggatgaggagaaacctcggaacatgagtatgcccacctctgaaaccgagtcagtgaacacagagaatgtggcaggaggggatattgagggagaaaactgtggagcccggctcgctcacagaatcagcaaaagcaagttttcacgctattggaggcgctggaaccgcttctgcaggcgcaagtgtagggccgccgtgaagtctaatgtgttttattggttagtgatttttttggtctttctcaacacattgaccatcgctagcgaacattacaaccagcccaattggttgacagaagttcaagacaccgccaacaaagcgctcctcgccctattcaccgcagaaatgctgcttaaaatgtactctctggggcttcaggcttacttcgtcagcctgtttaacaggttcgactgctttgttgtgtgtgggggaattctggaaacaattctggtggagactaagattatgagtccattgggaatctcagtgctgaggtgcgtgcgacttctgcggatctttaagataaccagatattggaacagcctctcaaacctcgtagcatccttattaaactcagttcggtccatagcctctctgctattacttctctttctgtttattataattttctctctgctgggcatgcagctgttcgggggaaaattcaactttgatgaaatgcagacacgccggtccactttcgacaactttccccagagcctcctcacagtgtttcaaattcttaccggggaggactggaattctgtgatgtacgacggtattatggcctacgggggacctagcttcccaggtatgctggtgtgcatttatttcatcatcctttttatctgtggcaattatattctgctgaacgtattcttggccattgccgtcgacaaccttgctgacgctgaatccctcacaagcgctcagaaagaggaggaagaagagaaggaaagaaaaaaactagcgaggaccgctagtcccgagaaaaaacaagagctggttgagaagcccgccgttggggagtcgaaggaagagaaaattgagctgaaaagcatcacagcagacggggaaagcccgcctgccactaagataaatatggatgatttgcagccaaatgagaatgaggataaaagtccgtaccctaaccccgaaacaacaggtgaggaagatgaagaagagcccgagatgccagtggggcctcggcctagacctctatctgagctgcacctcaaagaaaaggctgtacctatgccagaagcctcggccttcttcattttttcctctaataacagatttagattacagtgccaccgcattgtcaacgacaccatcttcacgaacctaatacttttctttattctactctcatccattagtctcgcggcggaagatcctgtgcagcacacttcctttcgcaatcacatcttgttttattttgatatcgtgtttaccaccatctttacgatcgagatcgccttgaaaatgaccgcttacggtgcctttctccataagggaagcttttgccgcaactatttcaacatcctggatttgctggtggtgagcgtgagcctcatttcatttgggatccagtctagcgccattaatgtggtaaagattcttcgggtactgcgagtgctccggccgctgagggcaatcaacagagcgaaagggctgaaacatgtcgttcaatgcgtgtttgttgctatccgaacgattgggaacatcgtgatcgtcaccaccctcctccagtttatgtttgcttgtataggcgtccagttgtttaaaggcaagttgtatacgtgttctgactccagcaagcagacggaagctgagtgcaagggcaattatattacgtacaaagacggcgaagttgaccatcccatcattcagcccagatcatgggagaactcaaagttcgacttcgataatgtgctggccgcaatgatggccctatttaccgtgagtacattcgaggggtggccggagctactgtaccggtctattgactcccatactgaggacaaggggcccatctataactatcgcgtagaaatctcaatattcttcataatttatattatcataattgccttttttatgatgaatatcttcgtaggttttgtaatagtaacgtttcaggagcagggcgaacaagagtacaagaattgtgagttggataagaatcagcgccagtgtgttgaatacgctctcaaagcacggccgctccggaggtatatcccgaagaatcagcatcaatacaaggtgtggtatgtggtgaacagtacctactttgagtacctgatgttcgtgttgatcttactgaacactatatgcctggcgatgcaacattatggacagagctgtctttttaagattgcgatgaatatactgaatatgcttttcactgggctttttaccgtggaaatgattctcaaactcatagcgttcaagcccaaagggtacttcagcgacccctggaatgtcttcgatttcttgatcgtgataggcagcattattgatgttatcttgtctgagaccaaccactacttctgcgacgcctggaatacatttgacgcgctgattgttgttgggagcatcgtcgacatcgctataactgaagtcaaccccgccgagcatacgcagtgttcaccttctatgaacgctgaagaaaactccaggatcagcataaccttcttccggctctttcgggttatgcgattggtcaagctgcttagccgaggcgaaggcatccgaacgctactttggacatttattaaatcattccaggccctgccatatgtggccctgctgatcgtgatgctgttctttatttacgcggtgattggaatgcaggtgtttggcaaaatagccctaaatgacacaaccgaaattaacagaaataataatttccagactttcccacaggccgtactgctcctcttccgctgtgcaactggcgaggcttggcaggacattatgttggcttgtatgcccggaaagaagtgtgcccccgagtcggagccctctaactctactgagggagaaacgccatgtggtagttctttcgcagttttctacttcattagcttctacatgctctgcgccttcctcatcatcaacttgttcgtagctgtgatcatggataacttcgattacttgacacgcgactggagcatcttggggccccatcatctggacgagtttaaacggatctgggccgaatatgacccagaggcaaagggcaggatcaaacatttggatgtggttaccctgctacgccggatccagcccccactgggttttgggaaactgtgcccacatagagtcgcatgcaagcgcctggtgtcaatgaatatgcctcttaacagcgacggcaccgttatgttcaacgccaccctcttcgcactggtccgaactgcccttaggataaagaccgaaggtaacctggaacaggctaatgaagaactccgcgctatcatcaagaagatctggaagagaacctccatgaagctcttggatcaggtggtaccgccagccggggatgatgaggtcacggtgggcaagttctatgccacttttctgatccaggagtactttcgcaagttcaaaaaacgcaaagaacaaggtctcgtgggcaagccctcccagcgcaacgcactgtccctgcaggccggcctgcgcaccctgcacgatatcggaccagagatacgtcgagccatctctggcgacctgaccgctgaggaagaactggacaaggcaatgaaggaggccgtgtctgcagcctcagaggatgacattttccggcgtgccgggggactgtttggtaaccatgtgagctactaccagtccgatggccggtcagccttccctcagacctttacaacccaacgcccactgcatattaataaagctggatcttcccagggagatactgagagcccttcccatgagaagttagtggacagcacctttacaccaagttcttatagttcgactggcagcaacgccaacataaacaacgccaacaatacagcattgggcagactcccacgtccggctggatacccgtccactgtcagtacagtggaagggcatggacctccattatctccagccattcgggtgcaagaagtggcgtggaagctttctagcaaccgatgccacagccgggagtcccaggcggcaatggctggacaagaggaaacctctcaagacgagacctatgaggtgaagatgaatcacgataccgaagcttgttccgaaccctccctgctgtctacagaaatgctaagctaccaggacgacgaaaatcggcaattgacactgccagaagaagataagcgggatatccggcagagcccgaagcgcgggttcctgcgctctgcgtcgctcggccgccgcgcaagtttccatctagagtgcctgaagcggcagaaggacaggggcggggatatctcccagaagacagttctgcccctgcatttagtacatcatcaggccctggccgttgccgggctttctcccctgctgcagagatcacactctcctgccagctttccgcgcccgttcgccacccctccagccacccctggcagcaggggctggcccccccaacctgtccctaccctcagactggaaggtgtcgagtcctctgaaaagctgaactcctccttcccatctatccattgtgggagttgggccgagacaactccaggagggggtgggagttccgccgcaagaagagttcgaccagtctccctcatggttccttctcaggctggagcaccaggccggcagttccatggatctgcttctagtctggttgaagccgtcctcataagtgaaggtctgggacaatttgctcaggaccccaaattcattgaggtcacaactcaagagctcgcagacgcctgcgacatgacgattgaggaaatggagtctgcagctgacaatatcctctcaggaggcgcccctcaatcgccaaacggtgcactgctcccctttgtgaattgccgggatgcgggccaggatcgtgctgggggagaggaggacgcgggctgcgtacgagcccggggcagaccctcagaggaggagctccaggacagcagagtgtatgttagtagtctgtag

SEQ ID NO: 181225 - DNA, 6417 bp, synthetic construct
  misc_feature 1..6417: note = Description of Artificial Sequence: Synthetic coding sequence
  source 1..6417: mol_type = other DNA
atggtgaacgagaacacccggatgtacatccccgaggagaaccaccaaggttccaactacggctcgccccgtcctgctcacgcgaatatgaacgcaaacgcggccgctggactggcacctgagcacatcccgactcccggggccgcactcagttggcaagccgctatcgacgcagctagacaagccaaactgatgggctcagctggcaacgctacaatatctaccgtcagcagcacacagcggaagaggcagcagtacggaaaacctaagaagcagggatcaactactgccactcggcccccacgagctctgctctgtctaacacttaagaaccccatccggcgggcctgcattagcattgtcgaatggaagccttttgagatcatcatcttgttgacgattttcgctaactgcgtggccttggctatctatatacctttcccagaagatgacagtaacgccactaactctaacctggagagggtggagtacctgtttctgataatcttcaccgtggaagccttcttaaaggtgatcgcttacggactcctatttcatccaaatgcgtacctcaggaatgggtggaatcttctggatttcatcatcgtggtagtgggactgttttctgccattctggaacaggccaccaaagccgatggcgctaacgccctgggcggcaagggagctggcttcgatgtaaaggccctccgcgctttcagggtcctgaggcccctacggctcgtctccggagttccgtctctgcaagtggtactgaattccattatcaaagcaatggtgccactgttgcacatcgccttactcgttcttttcgtgataatcatctatgctatcataggtctcgagttatttatgggtaaaatgcataagacctgttataaccaagaaggcatcgccgatgtcccagctgaagacgacccttctccctgcgcgctcgaaacaggacatgggaggcagtgtcagaacggcacggtctgcaaacccggatgggatggccccaagcacggtataaccaacttcgacaactttgcatttgccatgttaaccgttttccagtgtattaccatggaaggctggacggatgtcctctattggatgcaggatgctatgggctacgagttaccgtgggtctacttcgtgagcctcgtgattttcggctcgttcttcgtcttgaatttggtgctgggagtgctgtcaggcgagttttctaaggagagggagaaagcaaaggccaggggggatttccagaagctgcgggagaaacaacaacttgaggaggacctgaaggggtatctggactggataacccaggctgaggacattgatccggaaaatgaggacgagggcatggacgaagagaagccaagaaatatgtcgatgcctacaagtgaaacagagtcagtgaatacagagaatgtggcgggaggcgacatcgaaggcgagaactgcggagcacgcctggcacatcggatttctaagagcaaattctccaggtactggagacggtggaataggttttgccgccgaaagtgccgcgcggctgtcaaatctaatgtcttctattggctggtgatctttctggtgtttctgaacacgttgacaatcgcttctgagcactacaatcaacccaattggctgactgaggtgcaggatactgccaataaggctctgttggccctgtttactgccgagatgctccttaaaatgtattccctgggtctccaggcttattttgtgtccctgtttaatcggttcgattgctttgtggtgtgcggcggcattttggagaccatattggtagagactaaaattatgtctcctctcggaatcagcgtgttgagatgcgtgaggctccttcgcatttttaaaattacacgctactggaattcactgtccaacttggtggcctcgcttctgaactctgttcggtcaatcgctagtttgctgctgctcctgttcctgtttattattatctttagcttgttgggcatgcagctgttcggcggtaaattcaattttgatgagatgcagactcgccgaagcacctttgataatttcccccagtcccttcttacagtgttccagatcctgactggcgaggattggaactccgttatgtatgacggcattatggcctatgggggccctagctttcccggaatgctggtgtgcatctacttcatcatcctcttcatttgtggcaactatatcctgctgaatgtgtttctggcaattgccgtagacaatctagccgatgcagaatctctgactagtgcacagaaggaggaagaggaagagaaagaacgaaaaaagctcgctcggacagcctccccggaaaaaaaacaagaattggtagaaaagcctgccgtcggtgagagtaaggaggaaaagatagaactgaagagtattaccgccgacggggagagtcctcccgccaccaaaattaacatggacgacctacagccgaatgaaaatgaggacaagtctccttacccaaatccggagacgacaggagaagaagacgaggaggaacctgagatgcctgtgggtcccagacccaggcctttatctgagctccatctcaaggagaaggccgtgcccatgccggaagcttcggctttttttatcttttcgtcaaacaatcgctttcgcctgcaatgccatcgcatcgtcaacgacactatattcactaacctgatcctgttttttattctgctttcttccattagcctagcagcagaggaccctgtccagcacactagtttcaggaatcatatcctgggaaatgccgattacgttttcacctctattttcacactagagatcattctgaagatgacggcatatggagccttcctgcataaaggctccttttgccgaaattattttaatattctggacctactcgtggtgtctgtgtccctgatctcatttggaattcaaagctcagctatcaacgtggtgaagattctgagagtgttgagggtcctcaggcctctgcgcgccatcaaccgcgcgaaaggcctgaagcatgtcgtgcagtgtgtatttgtcgctattcgaaccattggaaacattgtcattgtcacaactctactgcagttcatgttcgcgtgcataggagtgcagttatttaagggtaagctctacacatgctctgacagcagtaaacagacagaggcggagtgcaaaggaaattatataacttataaggacggcgaggtcgatcacccaattatccaacctaggtcctgggaaaacagtaagttcgatttcgacaacgttctggccgccatgatggctcttttcactgtttcgaccttcgaaggttggcccgagctgctgtaccggtccatcgacagccacaccgaggacaagggacctatctataattaccgggtagagatttccattttcttcattatctacatcataatcattgcatttttcatgatgaatatctttgtcggctttgtaatcgtcacatttcaggaacagggggagcaggagtacaagaattgcgagctggataagaatcagagacagtgtgtcgaatatgcattgaaggccaggccactgcgccgttacatacctaagaaccagcaccaatacaaggtttggtatgttgtcaacagtacatatttcgagtacctcatgtttgtcctgatcctcctgaatactatctgtctcgccatgcagcactatggccaaagctgtctgttcaaaatagcgatgaacatcctgaacatgctgtttaccgggctctttaccgtggagatgatcctgaaactgatcgccttcaagccgaaacactatttttgcgatgcatggaacacctttgatgcactgatagtggtcggatccattgtcgacattgctataactgaagtgaatcctgctgaacacacccagtgtagcccatcaatgaatgcagaggagaacagtcgtatttctattacttttttccgcttgtttcgcgtcatgagactcgtgaagcttctgtctcgaggcgaagggatccgaactttgctgtggacattcataaaatctttccaggctctgccatatgtcgccttgttgatcgtgatgctgtttttcatttacgccgtgattggcatgcaggtgttcggaaaaattgccctgaacgatacgacagaaatcaaccgcaataacaactttcaaaccttcccgcaggctgtactgctgcttttccggtgtgccaccggcgaagcctggcaagacatcatgctggcgtgcatgccaggcaaaaagtgtgcgccagagtcagaaccatctaacagcacagagggagagactccttgcggttccagttttgccgtgttctattttatctcgttttatatgctgtgcgcattcttgattataaacttattcgtcgccgtcattatggataattttgattatctcactagggactggtccattctgggccctcaccatctcgatgagtttaaacggatctgggcagaatatgaccccgaggcgaaggggcggataaagcaccttgacgtggtgaccttgctgagaagaatccaaccaccattgggcttcggcaagctctgtcctcatcgggtcgcttgcaaaagattagtgagtatgaacatgcccctgaacagcgatggcacagtgatgtttaacgctactttgtttgctttagttagaacagccctccgcatcaaaaccgagggaaacttggagcaggccaatgaggagttgcgagccatcataaagaagatctggaagcgtacctccatgaagctccttgaccaagttgtgccccccgctggggacgacgaagttaccgtgggcaaattctacgcaactttcttgattcaggagtactttcgtaagttcaaaaagcgcaaggagcagggcctcgtgggtaagccctctcagcgaaacgccctgtctttacaagccggcctacgaacccttcatgatattggtccagagatccgaagagccatctctggcgacctgacagcggaagaagagctggataaagctatgaaggaagcagtctcagctgcaagcgaggacgatatcttccgaagggctgggggcttattcggtaaccatgtttcctattatcaatcagacggcagatcagccttcccgcagacgtttaccacgcagaggcctctccacattaacaaagctggatcttcacaaggcgacaccgaaagcccctcacacgagaagcttgtagacagtacctttacaccatcgtcctactctagtacaggaagtaatgctaatataaacaatgccaacaataccgctctcggtaggcttccgaggcccgcggggtacccttctaccgtatcaaccgtggaggggcatggacctcctctgtcaccagctattagagtgcaggaggtcgcctggaaactgtcctcgaaccgatgccacagtcgggaaagtcaggctgcaatggccgggcaggaagagacctctcaggacgagacttacgaggttaaaatgaaccacgacaccgaagcctgttccgagccatccctgctcagtactgaaatgctgtcatatcaggatgacgaaaacagacagctgaccctgccagaggaagataaacgcgacatccgccagagccccaagagggggtttctaaggtccgcatccctgggccggcgagcatcctttcatctggagtgccttaaacggcagaaagaccggggaggcgacattagccaaaagacagtcctgccactgcatctggtgcaccatcaagccctcgccgtggcaggactcagccccttattgcagcgctcgcattctccagcttctttccctcgaccgtttgctactcctccggctaccccaggaagccgggggtggccccctcaaccagtgcccacgcttcgcctggagggagtggaaagtagcgagaagttaaacagttcgtttcccagtatccactgtggttcgtgggccgagaccactccaggtggcggggggtcctccgccgctaggagagtgcgtcctgtgtcactgatggtgccttcccaggcaggagcccctggacggcagttccatggatccgcttcctctttggtagaagccgtgctgatatctgaaggactggggcagttcgcacaggaccccaagttcatcgaagttaccacccaggagttggctgacgcctgtgatatgacaatcgaggagatggagtccgcagccgataatatcctctccggcggcgcaccccagtcccccaatggagccctgcttcccttcgttaactgtcgggatgccggccaggatagagccgggggtgaggaagatgctggttgtgtcagagctagaggtcggccctcagaagaggagttacaggattccagagtttatgtgagttcgctctag

SEQ ID NO: 181226 - DNA, 6417 bp, synthetic construct
  misc_feature 1..6417: note = Description of Artificial Sequence: Synthetic coding sequence
  source 1..6417: mol_type = other DNA
atggtgaacgagaacacccggatgtacatccccgaggagaaccaccaaggttcaaattacggaagtccaaggcccgctcacgcaaacatgaatgccaacgctgcagctgggctggcccccgagcatatcccaactccgggcgcagcactctcttggcaggctgctatcgacgcggcgcgacaggcaaagttgatgggaagcgccggtaacgcaacaatctccaccgtcagctctacccagcgaaagaggcagcagtacgggaaacccaagaaacaaggaagcactactgctacccggccccccagggcattactctgccttacactgaagaatcctataaggcgggcctgcatttccatcgtggaatggaaacctttcgagatcattatcttgctgacaatttttgcgaattgcgtcgctctggcaatttatattccgtttcccgaggatgatagtaatgccactaactcaaacctcgagagagttgaatatctgtttctcataatcttcactgtcgaggccttcctcaaggtgatagcatacggcctgttgtttcatccaaacgcatatctgagaaatggctggaacctactggactttatcatcgtggtggtagggctttttagtgccatcctggagcaggcaacgaaagctgacggtgctaacgctctgggcggaaaaggtgccgggttcgacgtaaaagcgctgagagcatttcgcgtcctgcgcccactacggctggtgagtggcgtcccgagtctgcaggtggtgcttaattccataatcaaggccatggtgcctttgttgcatatcgcgctactcgtgctatttgtgatcattatttatgctatcattggtttagagcttttcatgggaaagatgcacaaaacctgctacaatcaggagggcatcgcagatgtgccagccgaagatgacccatcgccgtgcgccctggaaacgggacacggccggcagtgccagaatggtaccgtttgcaaaccagggtgggatggcccaaaacacgggattacgaattttgacaacttcgcgtttgctatgctaacagtattccaatgtattaccatggagggatggaccgacgtcctgtactgggtgaacgatgcagtcggacgagattggccctggatatatttcgtgaccctaataatcattgggtcattcttcgtgttaaatcttgtgcttggggttctgtccggagaattttctaaagagcgcgagaaggctaaggccagaggagacttccagaagctgcgtgagaagcagcagctagaagaagacctgaagggctacctcgattggattacacaggcagaagatatcgacccagaaaacgaggatgagggtatggatgaggagaagcccagaaatatgtccatgcctacttctgaaactgagtccgtgaatacagagaacgttgccggcggagatatcgagggcgagaactgcggcgccagactggcacatcgcattagtaagagcaagttttcacggtactggcgcaggtggaaccgcttttgtaggcggaagtgtagagctgcagtcaaatctaacgtgttttactggctggtcattttccttgtgttcctcaatactcttacaatcgcgagtgaacactataatcagccaaattggttaacagaagttcaggacaccgccaacaaagcgctcctggcccttttcacggccgaaatgctcctgaaaatgtactccctcggtctccaagcttatttcgtgtccttgttcaataggtttgattgcttcgtcgtgtgcggcggcatactggaaactattctggtggagaccaaaattatgtcccctctgggaatttcagtgttgcgctgtgtgagactgctgagaattttcaagattacgcggtactggaattctttgtctaacctcgtcgccagcctgctgaactctgttcggagtatagcttcgcttctcctactgctgtttctgtttattattattttttctttactaggcatgcaactgtttggagggaaattcaatttcgacgagatgcagacacggaggtctaccttcgataactttccccaatccctgctgacggtgtttcaaatcctgacaggtgaggattggaattccgtaatgtatgatggcatcatggcttatgggggcccaagctttcccggtatgctggtttgcatctactttatcattctttttatctgcggcaactacattctgcttaacgtgtttttggctatcgctgtcgataaccttgccgacgcagaaagccttaccagtgcccaaaaagaagaggaggaagaaaaagagaggaagaaactagctcgaacagcttcccccgaaaaaaagcaggaacttgtcgagaagccagccgttggagagagtaaagaggaaaaaattgagctgaagagtattacagcagatggagaaagtcctccagcaacgaaaataaatatggacgacctccagcccaatgagaatgaagacaaaagcccctatccgaatcctgagaccaccggggaggaggatgaggaagagcctgaaatgcccgtggggccgagacctcgccccttgagtgagctgcacctcaaggaaaaggcagtgcctatgcccgaggcctcggccttctttattttcagctccaataaccggtttcgccttcagtgccacagaattgtgaatgatacaattttcacaaatctgatcctgttctttatcctgctcagttcaatcagcctggctgccgaggaccccgttcaacacacgtcctttcgcaaccatattctgggtaacgccgactatgtttttacaagcatatttaccctcgagataatcctgaaaatgactgcctacggggcctttctccataagggtagcttttgtcgtaactacttcaatatcctggacctcttggtagtcagtgtatcacttatcagcttcggcatccagagttctgctatcaatgtagtcaaaatattacgggtactgcgcgtgctgcgtcccttaagagctattaaccgagctaaaggactgaaacatgtggtacaatgcgtttttgtggcgatccgaaccatcgggaatattgtgattgtgacaaccttactgcagttcatgtttgcatgtatcggcgtgcagctgttcaagggtaaactgtatacctgttctgacagcagtaaacagaccgaagccgagtgtaagggcaactatatcacctacaaggacggcgaagtggatcaccccatcatccaaccaaggtcatgggagaattctaagttcgactttgataacgttttagccgctatgatggcactgttcacagtgagtacttttgaagggtggcctgaactcctgtatcggtctatcgactcccatactgaagacaagggccctatttacaactatagagttgaaatctctatatttttcatcatctacattattatcattgctttctttatgatgaacattttcgtgggcttcgttatcgtcacattccaggagcagggcgagcaagagtacaagaactgcgagctggacaaaaatcagcgccagtgcgtggagtatgccttaaaggcccgtcccctccgaaggtacatcccaaagaatcaacatcagtacaaggtttggtatgtcgtgaactcaacctacttcgagtacctcatgtttgttctaatcttgttaaataccatatgcctcgccatgcagcactatggacagagctgcctctttaagattgccatgaatattttgaacatgctgttcacggggctgtttactgtagaaatgattctgaagcttattgctttcaagcccaagggctacttctctgatccttggaatgtatttgacttccttattgtgattggctctatcattgacgtcatattgagtgagactaaccccgccgagcacacgcagtgctctccatccatgaatgccgaggagaacagccgcatctctatcactttcttccggttgtttcgagttatgcgcctggtcaagcttctcagcagaggcgaagggattagaacgctgctgtggacttttattaagtcatttcaggccctgccgtatgtagctttgctgattgttatgctgtttttcatctatgccgtgattggcatgcaagtcttcggcaagatagccttaaatgacaccactgagatcaaccgcaataataactttcagacctttccccaggccgtgctgctcctattccgctgcgcgactggtgaggcttggcaagacatcatgcttgcgtgcatgccagggaaaaaatgcgcgcccgagagcgagcccagcaattctactgaaggggaaaccccctgtggttctagcttcgcagttttctactttatcagcttttatatgctgtgcgctttcctgattattaatctgtttgtggctgtgattatggataattttgattacctgacccgcgactggagcatccttggtccgcaccacttggatgaattcaagagaatttgggctgagtacgaccctgaagcaaaaggccggatcaagcacctcgatgtagtgacattgctgcggaggattcagccacccctgggattcgggaaattatgtccgcacagagttgcctgtaaaagactggtgtctatgaacatgcctcttaactctgatggcaccgtcatgttcaacgcaaccctgttcgctctggtgcgcaccgcactccggatcaaaaccgagggtaatctagaacaagccaacgaggaactgcgggctataatcaagaagatctggaaacgcacctcgatgaagctgctcgatcaagtcgtgcctcccgccggggatgacgaggtaactgtgggaaagttctatgcaacatttctgattcaggaatacttccgaaagtttaagaagaggaaggaacagggtctcgttggcaagccaagtcaacgaaacgcactgtcgctgcaggccggactaaggacgctgcacgacataggtcccgaaattcgcagggctatatctggggacctgacagcagaggaggagctcgacaaggctatgaaagaggccgtgtccgcagcctcggaggatgacatctttcggcgggccgggggcctattcggcaatcacgtgtcatattatcagagtgacggtcgctctgctttccctcagactttcaccacacagcggcctctgcacattaacaaggccggcagcagccagggtgatactgagagcccaagccacgagaagctggtggattcaactttcactcctagttcatacagctctacaggtagtaacgccaacattaacaatgcaaacaacaccgccctgggtcgcctcccacggccagctgggtacccttccactgtaagcaccgtggagggacatggaccgcctctgagtccggccatccgggtgcaggaggtcgcgtggaagttaagctccaataggtgccattcaagggagtcacaggccgcaatggctggacaagaagaaacgagccaagatgagacctacgaagtcaagatgaatcatgataccgaagcctgctcagagccctcattactgagtaccgagatgctttcctaccaggatgacgagaatagacaactcacactgccagaagaagataagcgcgatatccgacaaagtcctaagcggggttttctgcggagcgccagtctgggacggcgggcatcatttcatttagagtgcctcaagaggcaaaaagacagggggggcgacatttcacaaaagaccgtattacctttgcacctggtgcatcaccaggcgttggccgtggctggcttgtctccactgctgcaacgttcacactcgcccgcctccttcccccgaccttttgcgacacccccagctacacccggaagccgaggctggccaccccagcctgtgcctacccttagactggagggggtcgagtcgtctgaaaaattaaatagctcatttccatcaatccattgtggctcctgggctgagaccacaccagggggaggcggaagcagtgccgccaggagggtcagacccgtctccctcatggttcctagccaagccggggcccccggaagacaattccatggctctgcttcttccctcgtggaggctgtgttaattagcgagggattagggcaattcgcccaggacccaaaatttatcgaggtcaccacgcaggagctggccgacgcttgcgacatgaccattgaagaaatggaaagtgcggctgataacatcctgtccggaggcgccccgcagtctcccaacggcgcccttttaccatttgtgaactgccgcgatgcagggcaggacagggccgggggggaggaggacgcaggctgtgtgcgggcgcggggcagacctagtgaagaggaactgcaagactcgcgcgtctacgtatccagtctttag

SEQ ID NO: 181227 - DNA, 6435 bp, synthetic construct
  misc_feature 1..6435: note = Description of Artificial Sequence: Synthetic coding sequence
  source 1..6435: mol_type = other DNA
atggtgaacgagaacacccggatgtacatccccgaggagaaccaccagggctctaactatgggagcccacgcccagcacacgcaaacatgaacgcgaatgccgccgccggccttgcacccgagcatattcccacaccgggcgctgctctttcctggcaggctgcgatcgacgccgcccggcaggctaaactaatgggctccgcaggcaacgcaacaatttccactgtgtcctcaactcaaagaaagcgccagcagtacggcaaacctaagaagcaggggtcgactaccgcaactcgtccaccaagggcgcttctatgtctgacattgaagaaccccatcaggcgcgcctgcatctctatcgtggagtggaagcctttcgagatcattatcttgcttacgatctttgccaactgcgtcgccctcgccatttatataccatttcctgaggatgactcgaacgcaaccaacagtaatcttgaaagagtcgagtaccttttcctgattatctttacggtggaggcttttctcaaggttattgcttatggtcttctgttccaccctaacgcctacctgaggaacgggtggaacctgctggatttcattattgtggtggtcgggctgttttctgccatcctggagcaggccaccaaagctgacggagcaaatgcactggggggtaaaggcgctggtttcgacgtaaaagcactgagagcatttcgcgttctgcgtcccctcagactggtgtctggggtgccaagtcttcaggtggtcctgaacagcattattaaagctatggtgcctctcctacatattgctctacttgtactgttcgtaatcatcatctatgctatcattggactggaactctttatgggcaaaatgcataaaacctgctacaatcaggagggcatcgctgacgtgcccgctgaggacgatccatcaccatgcgctcttgagacaggtcacggtaggcaatgtcagaacggaactgtatgtaagccaggctgggatggacctaaacacggaatcaccaacttcgacaatttcgccttcgcgatgctgacggtcttccaatgtataacgatggagggttggacagacgtcctctactgggtgaacgacgccgtcggaagggattggccctggatctatttcgtcaccctcatcataataggctccttcttcgtgctgaatcttgttttgggagtcctgagcggagaattcagcaaagagcgtgagaaagctaaagctcgcggagactttcagaagttaagagagaaacaacaactagaggaggacctgaagggttatctagattggattacgcaggccgaagacattgatcccgagaacgaggacgaaggaatggacgaggagaaacctcggaacatgagtatgcccacaagcgagacagagtctgttaacactgaaaacgtggcaggaggggatatcgagggggaaaactgcggtgctaggttggcccatcgcatcagcaagtcaaaattctccaggtactggcggaggtggaacagattttgtcgtcggaaatgccgggctgcagttaaatccaacgtgttctactggctggttatctttttagttttcctgaacacactaaccatcgcctctgagcattacaatcagcccaactggctgacagaagttcaagacactgctaacaaagctctgctggcactgtttactgcggaaatgttactaaaaatgtactcactgggcttgcaggcctatttcgtaagtctatttaaccgctttgattgttttgttgtgtgtgggggtattttggagaccatactagtggagaccaagatcatgtcacccctggggatttcagtgttgaggtgcgtacggctgcttcgtattttcaaaattacaaggtactggaactcccttagcaatttagtggcttcacttttgaattctgtccggagcatcgcttctttgcttctgctgttattcctcttcattatcatcttttctcttttgggcatgcagctcttcggcggtaaatttaatttcgatgaaatgcaaacacgtaggtcaacctttgataactttccacagagtctcctaactgtcttccagatcctgaccggtgaggactggaattccgtgatgtacgacgggattatggcctatgggggccccagcttccccggaatgctagtgtgcatctactttatcattctttttatttgtgggaactatattctgctgaatgtctttctggcaatcgccgtggataatctggcagacgccgaatctctcactagcgcccagaaagaagaggaggaggagaaggagcggaaaaaacttgcaagaactgcgtctccagaaaagaaacaggaactggttgaaaagccggccgtgggagaaagtaaagaggaaaagatcgagctgaagagcattacggcggacggcgaatctccccctgctaccaagattaacatggacgacttgcagcccaatgaaaacgaagacaagtccccatatcctaacccggagaccacaggcgaagaggacgaggaggaacccgaaatgcccgttggccccaggccaaggccgttgtcagagcttcacctgaaagagaaggctgtgcctatgccagaagccagcgctttctttatcttcagctctaacaacaggttccgacttcaatgtcaccgcatagttaacgataccatttttactaatcttatcctatttttcattctcctgtcttctatcagcttggcagctgaggacccagtgcagcacacgtcctttaggaaccatatcttattctacttcgatattgttttcacaactatttttactatagagatcgctctgaaaatgacagcgtacggcgccttcctgcacaaggggagtttttgtcggaattattttaatatcctagacttattagtggttagcgttagcttgatttctttcgggatccaatctagcgccatcaacgttgtgaagatactcagggttctgagggtcttaaggcccctgcgcgccatcaaccgcgcgaagggactcaaacacgttgttcagtgcgtgtttgtcgcgataaggaccatcgggaacattgttatagtgacaaccctgctccagttcatgttcgcttgtattggcgtgcaacttttcaagggaaaactgtatacatgctcagatagctctaagcaaacagaggcggaatgcaagggtaactacatcacgtacaaagacggggaggttgaccacccgattattcagccccggtcttgggagaactccaagttcgactttgacaacgtgttggccgccatgatggctctgttcacagtctcaactttcgagggatggcctgagctgctgtacagaagtatagatagtcacaccgaggacaaggggcccatttataactatcgggtggagatctcaattttcttcatcatctacatcatcatcatcgcattctttatgatgaacatcttcgtgggctttgtaattgttacctttcaggagcagggggaacaggagtacaagaactgcgaacttgacaagaaccaaaggcagtgtgtggagtacgccctgaaggcccgaccgttgcgacgctatatcccaaaaaaccagcaccagtataaagtgtggtatgtggttaactcaacatatttcgagtaccttatgttcgttctgatcctcctcaatactatctgtctggcgatgcagcactacggacaaagctgtctctttaagattgctatgaacatcctgaacatgctctttaccggccttttcacagttgagatgatccttaagctgatcgcctttaaacctaaacactatttctgtgatgcctggaacacctttgatgctcttatcgtcgtgggtagtattgtagacatcgcaataaccgaaaacgccgaagaaaatagccgtatctccattacgttctttcgtttatttagggtgatgcggctagtgaaactcttaagtagaggtgagggaatacggaccttactgtggacatttattaagtcgttccaggctctgccttatgtggccctcctaattgtgatgctctttttcatctatgccgtcattggaatgcaggtgttcggcaaaattgccctgaacgacacgaccgaaatcaatcgtaataataattttcaaacctttcctcaggctgttcttctgctctttaggtgtgcaaccggagaggcttggcaggatatcatgctagcctgcatgcccggcaagaagtgcgcacccgaaagcgaaccgagtaatagtactgaaggcgagaccccatgtgggtcatcttttgcagtcttctattttatttccttttacatgctttgcgccttcctaatcataaatctctttgtggccgtcatcatggataattttgattatctgacgagggactggtccatcctggggccgcaccatctagatgaattcaagagaatttgggcagaatacgatcccgaagctaaaggacgaatcaagcacctggatgtggtaaccctcctgagacgcatccaaccccctctgggctttggaaagttatgtcctcaccgcgtcgcttgcaaacgtctcgtttcaatgaatatgccactcaacagtgatgggacggtcatgttcaacgcaacattgttcgccctggtgaggacagcactcagaatcaaaaccgaggagggtccttccccgtctgaagcccatcaaggtgccgaggatccattccgccccgctggcaacctagaacaggccaacgaagagctcagggctatcattaaaaaaatttggaaaaggacctctatgaaacttctagatcaggtggttccacccgccggagatgacgaggtgacagtgggtaagttttacgcaaccttccttattcaagagtattttcggaaattcaaaaaaagaaaagagcagggattggtgggaaaaccaagccagagaaatgccctgtctttacaagctgggcttagaaccttgcatgacattgggccagaaattcgaagagcgatatccggggacttaaccgccgaagaggagttagacaaggccatgaaggaagccgtgtctgccgcatccgaagacgacatcttccggcgagccggcggcctcttcggcaaccatgtttcctactatcagtctgatggccgaagcgcgttccctcagacattcacaacccaacgccctctacatatcaataaggccggatccagtcaaggcgacaccgaatcaccttcgcatgaaaaattggtggactccacctttacacccagcagttattcaagcactggatctaatgccaatattaacaatgctaacaataccgcactggggcgattgccaaggcccgcagggtacccctctacggtgagcacagtggagggccatgggccaccattgagtcctgccatccgggtccaggaggtggcgtggaagctctcatcgaaccgctgccacagcagggagtcacaggccgctatggccggccaggaggagacctctcaggatgagacatacgaagtcaaaatgaatcatgatactgaggcatgcagcgaaccttctctattgagcaccgaaatgctttcgtaccaggacgacgaaaatagacagttgacactaccggaagaagacaagcgggatattaggcagtcaccgaaaagagggtttctccgctccgccagtttaggccggcgggctagttttcatcttgagtgcctgaaaaggcagaaggacagaggaggcgacatatcccagaaaaccgtgttgcccctgcatctggtccaccaccaggcactggccgtcgctggccttagtcccttgctccagaggtcccattcccccgctagcttccccagaccattcgctacacctccggccacgcctggatcacgcggatggccaccacagcctgtccctaccctgcggcttgagggagtcgagtcatcagaaaagctaaacagctcatttccctcgattcattgtggtagttgggcagaaaccacccctggcggaggtgggtcctcagccgcgcgaagagttcggccagtgagcctcatggtacctagccaggctggtgcgccaggaaggcagttccatggtagcgcatcctcactggtggaggctgtactgatatcggagggattgggccagttcgcacaggaccctaagttcattgaggtgactacgcaggagctggcagatgcctgtgacatgacaattgaggagatggagagcgccgcagacaatatactgtccgggggcgcaccacagagtcccaacggcgcgctgttgcctttcgtgaattgcagagatgccggacaggatcgcgctggaggggaggaggacgcaggctgtgtccgcgcccgggggaggccttccgaggaggaacttcaggatagccgcgtgtatgtttccagcctctag

SEQ ID NO: 181228 - DNA, 6417 bp, synthetic construct
  misc_feature 1..6417: note = Description of Artificial Sequence: Synthetic coding sequence
  source 1..6417: mol_type = other DNA
atggtgaacgagaacacccggatgtacatccccgaggagaaccaccagggttcaaattacggctccccgcggccagcacatgcaaatatgaacgctaatgctgccgccgggctggcccctgaacatattcctactccgggggccgccctgtcctggcaagccgcgattgatgcggctcgacaggccaagctcatggggtcagcgggcaacgccacaatctccacagtgagctccacacagagaaagcggcagcaatacggcaagcccaaaaagcaaggctcgacaaccgcaactcggccgccgcgggccctattgtgcctgaccctgaagaatcctatccgccgggcgtgtatcagcatcgtggaatggaagccattcgagattattatcctcctcacaatctttgccaactgcgtcgcgctggccatctatatccctttccccgaagacgactcgaatgctaccaatagcaatctggagcgcgtcgagtacctgttcctgatcatcttcaccgtggaagccttcctcaaggtgattgcctacgggctcttattccaccccaacgcttatcttaggaacgggtggaatctgctcgattttattatcgttgtggtgggtctgttctccgccattcttgaacaggctactaaggccgatggagctaacgcgctgggcggcaaaggagccggctttgatgtgaaagcattgcgggctttccgcgtacttagacctctccgcctcgtaagtggggtgccctcacttcaagtcgttctgaacagcataattaaggcaatggtgccactgttgcacattgctttgctcgtgctgtttgtcatcatcatatacgccataattggtctcgaattgttcatgggtaagatgcataaaacatgctataaccaggaaggtatcgcagacgtacctgccgaggacgatcctagcccgtgcgctttagagaccggacacggaaggcagtgtcagaatggcaccgtctgcaagccaggctgggatggccctaaacatggaatcaccaatttcgacaattttgccttcgccatgctgacggtcttccagtgtattactatggagggatggactgatgtgctgtactgggtaaacgatgccgtcggccgtgattggccctggatttattttgtcactttgatcatcatagggtccttctttgtactaaatctggtgctgggagtgctctctggagaattctccaaggaacgggagaaagccaaagcacgcggagattttcagaaactgagagagaagcagcagctggaagaggacctgaaaggctacttggattggatcacccaagcagaggatattgatcccgagaacgaggacgagggcatggatgaagagaagcccaggaatatgagtatgcccacgtccgagactgaatcagtgaacacagagaacgtggcaggaggggatattgagggagaaaattgcggcgcgcggctggcgcatagaatttcaaaatccaagttctcacggtactggaggagatggaacaggttctgtcggagaaagtgtcgagccgcagtgaagagtaatgtgttctactggctggttattttcctggtttttttgaacactctgacgatcgcttctgaacactataatcagcccaactggctcacggaagtacaggataccgccaataaggcacttctggcactgtttaccgccgaaatgctgcttaaaatgtactccctcggactccaggcatattttgtctccctttttaataggttcgactgcttcgtagtgtgtgggggcattctcgaaactatattggtcgagaccaagatcatgtcacccctggggattagcgtactgaggtgcgtgaggctcctgagaatcttcaagattacaagatactggaattccctttccaacctcgtcgcttcgctgctcaatagcgtgcgctctatagcatccctgctgcttctgctcttcttatttattatcattttctccctgttagggatgcagctcttcggtggaaagttcaatttcgacgagatgcagacaaggagatccacattcgacaattttccccagagcttactgacggtgtttcaaatcttaaccggagaagattggaactcagtcatgtacgacggcataatggcatatggcggcccttcctttcctggaatgctggtgtgcatttattttatcatcctgtttatttgcgggaactacatcttgctgaacgtgtttctggctatagcagtggataacttagccgacgccgagtccctgacatccgcacagaaagaggaagaagaagagaaagaaaggaagaagttagctcgcactgctagcccagagaagaaacaggagctggtagaaaagccagcggtcggcgaatccaaagaggaaaagattgagcttaagtcaattacggcagacggggagtctccccctgcaaccaagattaacatggatgacttgcagccaaatgaaaatgaagacaagagtccctacccgaatcccgaaacgactggcgaggaggacgaggaagagcctgagatgccggtgggcccccgccctcgtcctctatctgaattacatttaaaggaaaaagcggttcccatgcccgaagcctccgccttttttatcttttcatcgaataacagattcaggttgcagtgccaccgcatcgtgaatgatacaatttttactaatctgatactcttttttattctactttcttccatctcactcgcagccgaggaccctgtccagcacacctcatttaggaatcatatcttgttttacttcgacatcgtctttaccacaatcttcacgatcgagatcgcactaaaaatgactgcttatggcgccttcctccataaaggatcattctgtcgcaactattttaatatccttgatttgctcgtggtgagtgtttcactgatcagctttggcattcagtcatcagctataaatgtcgtgaagatcctgcgcgtgcttagagtgcttcgcccactaagggctataaacagggccaaaggattaaaacacgtagtccaatgcgtcttcgttgccattagaactatcgggaacatcgtgatcgtaacgaccttgttgcagttcatgtttgcttgtatcggggttcagctattcaaagggaaattatacacctgtagcgacagcagcaagcagacagaggccgagtgtaaagggaactatatcacctacaaggacggggaagtcgaccaccccattatccaacctaggagttgggaaaatagcaagttcgatttcgacaacgtgcttgccgccatgatggcattattcaccgtgtctactttcgaggggtggcctgagttactctatagatctatagatagccacactgaggacaagggtcccatctataactatcgagtggagatatctatcttctttatcatatatatcattataatcgctttctttatgatgaacatcttcgtgggctttgtgatcgtgacatttcaggaacaaggagaacaggagtacaaaaattgtgagctcgataaaaatcagaggcaatgcgtggagtacgccctgaaggcccgacctctcaggagatacattccaaaaaatcagcaccaatataaagtgtggtatgtggtgaattccacctacttcgagtacctcatgttcgtcctgattctcctaaatacgatctgtcttgcaatgcagcactatggtcagtcatgcttgttcaaaattgcaatgaatatactgaatatgctgtttacaggcctgtttaccgtcgaaatgatactaaagctgatcgcttttaagcctaagcactacttctgtgacgcttggaataccttcgacgcgctaattgtggtagggagcatcgtcgacattgcaattacggaagtgaaccccgctgagcatactcagtgcagtccaagtatgaacgcggaggagaattccagaatctctattacttttttccgattattcagagtgatgcgactggttaagcttctctcccgcggagagggaatcaggacgctgctctggacattcatcaaatccttccaagcactgccatacgtggcactactgattgtgatgttgttctttatttacgccgtaatcggaatgcaagtgttcggcaaaatcgcactcaacgatactaccgaaataaaccgtaacaataattttcagacttttcctcaagcggtgctgttattgtttaggtgcgctaccggcgaagcatggcaggacatcatgctggcctgcatgccaggtaaaaaatgtgcgcctgaatccgaacctagtaattcaaccgaaggtgagacaccctgtggctcttccttcgccgtgttttacttcataagtttctacatgctgtgcgcatttctgatcattaacctatttgtggccgtgatcatggacaatttcgactatctaaccagagactggagcattttgggcccacaccatcttgacgagttcaaacgaatttgggctgagtacgatcccgaagcaaaaggacgaatcaaacacctcgacgtggtgacgcttctgcgacgcatccagcctcctctgggtttcgggaagctgtgcccccaccgggtggcctgcaaacgactggtctccatgaacatgccattaaactcagatgggaccgtgatgttcaacgccactctgtttgcacttgtaagaacagcactgcgcataaaaaccgaagggaacctggaacaggcaaacgaagagttgcgggccatcatcaaaaagatctggaagcggacttccatgaaactgctcgatcaggtggtacccccagccggcgatgatgaggtgacggtcgggaagttctatgcaacatttttgatccaggaatactttaggaaatttaagaagcggaaagagcagggattagtgggaaagccaagtcagcggaatgccctcagtcttcaggctggcttgcgcactctgcacgacatcggtccagagatccggcgtgccatctccggtgatcttaccgcggaggaggaactggataaagcaatgaaggaagcagtgtcagccgcaagcgaagacgatattttccgccgggcaggtggcctgttcggtaatcatgtgagttactatcaaagcgatggccgatcagcttttccgcagacatttacaacacagagacccctgcatattaataaagcaggaagctcacaaggcgatactgagagcccttcgcatgagaaactggtcgactcaacattcaccccaagttcctactcctctacagggagtaatgccaacattaacaatgcaaataataccgctctaggccgcctgccaaggcccgcaggatatccctcaactgtgagcaccgttgaggggcacggtccgcccctcagtcctgccatccgcgtccaggaggttgcatggaagctatcaagtaacaggtgtcactcccgggagtcccaagcagctatggctggacaggaagagacctcacaagatgagacatacgaagtgaagatgaatcacgacaccgaggcctgctctgagccctccctattgtctacggaaatgctatcttatcaagatgatgaaaaccgtcagctaactttacctgaagaggacaagcgagatatccgccagtcccccaagagaggtttccttcgctccgcttctctaggcaggcgggccagcttccacctggagtgcctaaaacggcaaaaggatagaggaggggatatatctcagaagaccgtgctgcccctgcacttggtgcatcaccaagccttggcggtcgcaggtctgagccccttgctccaaagatctcattctccggccagcttccctaggcccttcgcaactccccccgccacccctggcagccgaggctggccacctcagcccgtgccaacactgcggctcgaaggtgtcgagagttcagagaagctcaactcaagttttccgagtattcactgtgggtcttgggcggagactacccctggcggcgggggcagttcagccgctcgccgcgtgcggcctgttagcctgatggtgccctctcaagccggtgcaccaggacgccagttccacgggtctgcctctagccttgttgaggcggttctgatctccgaaggattaggacagttcgcacaggatcccaagtttattgaggtgaccacacaggagttagccgatgcatgtgatatgacaattgaagagatggaatctgcagccgataatatcctttcaggaggagcaccccagtccccaaacggcgcactgctaccattcgttaactgccgggacgcaggccaggatcgtgctggtggcgaggaagatgcagggtgtgtacgggctagaggacggccttccgaagaagagctgcaggatagccgggtgtatgtgtcttctctgtag

SEQ ID NO: 181229 - DNA, 6474 bp, synthetic construct
  misc_feature 1..6474: note = Description of Artificial Sequence: Synthetic coding sequence
  source 1..6474: mol_type = other DNA
atggtgaacgagaacacccggatgtacatccccgaggagaaccaccaagggtccaattatggctcacccagacctgcccacgccaatatgaatgcaaatgctgcagcaggcctggcaccagagcacattcccaccccgggcgcagccctatcttggcaggccgcaatcgacgccgcaagacaggccaaactgatgggctctgcgggcaacgcaactatctctactgtgagttctacacagaggaaaagacaacagtacggcaagccaaagaagcagggttctactacagcgacaagacctccacgcgccctgctgtgtctgaccctgaagaatcctatccggagagcttgcatttcaatcgttgagtggaaacctttcgagatcatcattctactcacaatcttcgccaactgtgtggccctggcaatttacattcctttcccagaggatgactcaaacgcaaccaattcaaatctggagcgcgtagagtacctgtttctgataatctttactgtggaggctttcctcaaggttatcgcctatgggctgctgtttcatcccaacgcctacctacgcaatgggtggaatcttcttgattttataattgtcgtggtgggactgttcagcgcaattttggagcaagcaaccaaggcagatggagcgaatgctcttggagggaaaggggctggattcgacgtcaaggccctccgcgcattcagagtcctgcggcctctacgacttgtctctggggttccatccctacaagttgtgcttaatagtataataaaagcaatggtcccattactgcatatcgcacttttggtcctctttgtcatcattatctatgcaattattgggctcgagctctttatggggaagatgcataaaacctgttataatcaagaggggattgccgatgttcctgcagaggacgacccatctccctgtgctctagagaccggacatgggcggcagtgtcaaaacgggactgtgtgtaagcctggatgggacggaccaaaacacggaataaccaattttgacaatttcgcatttgctatgctgaccgtatttcagtgcatcacaatggaggggtggacagacgtcctgtactgggtcaacgacgctgttggtagggactggccgtggatttattttgtcacgctgataatcatcggttcgttttttgtactgaacctggtcctcggggtgctgtcgggcgaattctctaaggaacgcgagaaggcaaaagcgcgcggagatttccagaagctccgcgagaagcaacagttagaggaggacctgaaggggtacctggactggataactcaggctgaggacatagacccggagaacgaagatgaggggatggacgaggaaaagcctcgcaacatgtcaatgccaactagcgagaccgagtctgttaatacagagaacgtggctggcggcgatatcgagggggagaactgcggagccagactcgcccatcgaatcagcaagtctaagttctcgcggtactggcggaggtggaaccggttctgcaggcggaaatgccgcgccgcagtaaaaagcaacgtgttctactggctcgtgattttcctggtgtttcttaatacacttaccatcgcatcagaacattacaaccagcctaactggcttacggaggtccaagacacagctaacaaagcccttctcgctctcttcactgccgagatgctgcttaaaatgtattctctcggtctgcaggcgtactttgtgtccctgtttaacaggttcgactgttttgtggtttgtggtgggattttggaaacaatcttggtcgagaccaaaattatgtctccgctcggaatctcagttctcaggtgcgttcgccttctgcggatcttcaagatcacaaggtactggaactccttaagcaatctggtggcttctctgctgaactccgtcagaagcatcgcttctctgctactgcttttgttcctctttatcattatcttctctttgctcggaatgcagctattcggcggtaagtttaacttcgacgagatgcaaacccgccggagcacattcgacaattttccacaaagcctcttaacagtttttcagattttgacaggggaggattggaactcagtgatgtatgatggcatcatggcctatggcggtcctagcttccccgggatgttggtctgcatctatttcattatactgtttatttgcggcaattacatcttgcttaatgtgtttctcgcgatcgctgttgataatcttgccgatgcagagagtctgacttccgcccaaaaagaggaagaagaagagaaggagcggaaaaaactcgcgagaaccgcttctcctgagaaaaaacaggagctcgtggagaaacccgcggtgggcgagagcaaagaagaaaagattgaactgaaatccatcaccgcggatggagaatcaccaccagcaaccaaaatcaacatggacgacctacaacccaacgagaatgaagacaagtcaccttacccgaatcccgaaaccacaggagaggaggatgaagaagagcctgagatgcctgtgggacccaggccacggcctctaagtgagttgcaccttaaggagaaggctgttccaatgcctgaagcttctgctttctttattttcagttcaaacaatcggtttcggctgcagtgtcatagaatagtcaacgatacaatatttaccaatctgatcttgttcttcattttactgtcttctatatcactcgctgccgaagaccccgttcagcacacgtcctttcggaatcacatcctgttctatttcgacatcgtgtttaccactattttcaccatagagattgccttaaaaatgacagcatacggcgccttcttgcataagggttctttctgccgtaactacttcaatattcttgatctgctggtcgtctctgtgtcgctgatctcattcggcatccaatcttcagccattaatgtggtcaaaatcttaagagttctccgagtgctgcgcccactgagggcgattaatcgcgccaagggtctaaaacatgtggtgcagtgtgtatttgttgctatccgcaccatcggcaatatcgtaattgtaaccacactgttgcagttcatgtttgcatgtatcggcgtgcagctttttaaggggaaattgtacacctgctcagacagttccaaacagacagaagctgaatgtaaagggaactacatcacttacaaagatggggaagtcgatcacccaatcatccagccccgctcttgggagaactctaaatttgacttcgataacgtgttggcagcaatgatggcattatttaccgtgtcgacttttgaggggtggccggagctcttgtaccgaagcatcgatagccacacggaggacaagggacccatctacaattaccgcgtggagatatccatctttttcatcatctacattatcattattgcattttttatgatgaacatcttcgtaggtttcgttatcgtcacatttcaggagcaaggagaacaggagtataaaaattgcgagctggataagaatcagaggcagtgcgtggaatatgcactcaaggcccgccccctgaggcgctatataccaaaaaaccagcaccagtacaaggtgtggtatgtcgtcaacagtacgtacttcgaatatctgatgttcgtgttgatcttgctgaacacaatatgtctggctatgcagcactacggacagagctgtctttttaaaattgctatgaacatcctgaatatgttgttcacaggtctctttaccgttgagatgatcttaaagctcatcgcattcaagccaaagggctattttagtgacccctggaacgtgttcgactttctaatcgtgatcggctcaatcattgatgttatcctttcagagactaatcctgccgagcacacacagtgtagcccgtcaatgaacgcggaggaaaactcccgtattagcatcaccttttttcgactgttcagggtgatgcgcctggtgaaactgcttagtaggggtgagggcatccgaacgctgctgtggactttcatcaagtcctttcaggcattgccttacgtagcattgctgatagtgatgcttttcttcatttacgccgttatcggaatgcaagtgtttggaaaaattgcgttgaacgacacaaccgagattaacagaaataacaatttccagaccttcccccaggcagtattattattgttcaggtgtgcgaccggcgaagcctggcaggatataatgctcgcttgtatgcctgggaaaaagtgtgcccctgaatccgagccctcaaatagcacagaaggagagaccccttgcggctccagctttgccgtgttctacttcatcagcttctacatgttatgcgcatttctcatcatcaatcttttcgttgctgtgattatggataacttcgactatctgacccgcgactggtccattctcggaccgcaccatctagacgagtttaaaagaatttgggccgaatacgaccccgaggccaagggccggattaagcacctggacgtagtcactctcttgcggaggattcaaccccccctgggctttggcaagttgtgtccgcatagagtcgcttgcaagcggttggtctcaatgaacatgccactgaacagcgacggaactgtgatgtttaacgctactctattcgccttggtccgcaccgccctaaggattaagaccgaagaaggtccctcccctagtgaggctcaccagggcgccgaagacccattcaggcctgctggcaacctggagcaggccaatgaggaacttagggccattatcaaaaagatctggaagagaacctctatgaagctcctggatcaggtggtacctcctgccggggacgacgaagtgacggtcggtaaattctatgccacttttctgatacaagagtacttcaggaaattcaagaagagaaaggagcagggacttgtgggcaaaccctcccagagaaatgcgcttagccttcaagcaggcctccgtacactgcatgacatcggccccgaaattaggcgggccatcagcggagatctcaccgcagaggaagaactcgacaaagccatgaaagaagccgtgagcgcagctagtgaagatgatatctttcggcgcgctggaggattatttgggaaccatgtcagctactaccagagcgacggacggtcagcctttccacagacgttcacaacacaacggcccctccacatcaacaaggcaggatcatcgcagggggatactgaatctccctcacatgaaaaactggttgacagcacattcactcctagttcctatagctccaccgggagcaatgctaatatcaataacgccaataacactgctctcgggcgccttccgaggccagcaggttacccttccactgtgagcacagtggagggccacggtccaccactttcaccagctatccgtgtgcaggaggtggcatggaaattatctagtaataggtgtcacagcagagagtcacaggcagctatggcgggccaggaggaaaccagtcaggatgagacatatgaggttaaaatgaatcatgatacggaggcatgctctgagccatcactgttgtcaacagaaatgctctcgtaccaggatgatgaaaaccggcagctgacactcccagaggaggataaacgtgatatccgccagagtccaaaacgcggattcttgcggagcgccagccttggcaggcgagcatctttccatctggagtgtctgaaaagacagaaagaccgcggcggcgacatatcccaaaaaaccgtgttacctttacacttagtccaccaccaggccctagccgtcgccggcctgtcccctctattgcagagatcccactcgcctgcttcctttccacgaccattcgccaccccccctgctacacccggcagccgcggctggcccccgcagcctgtaccgactctgcggctggaaggagtggagagctccgaaaagctgaactcttcgtttccctcaatccattgcgggagctgggccgagaccactcctggcggcgggggtagcagcgcagccagacgcgtgcgccctgtttccctcatggtgccatctcaagctggcgcccccggccggcagttccacggttctgcctccagtctcgtggaagcggttcttatctcagaaggattaggccagttcgctcaggatccgaaatttattgaggtgaccacccaagagctagccgatgcatgcgacatgacgatcgaggagatggaatccgcggccgataatatccttagtggcggcgccccacagtctcctaatggtgctcttctgcctttcgtgaattgcagagatgctggacaggacagggccggaggcgaggaggacgcaggttgcgtacgtgcaagaggcaggcccagcgaagaggagttacaggacagccgggtgtacgtcagttcactctag

SEQ ID NO: 181230 - DNA, 6630 bp, synthetic construct
  misc_feature 1..6630: note = Description of Artificial Sequence: Synthetic coding sequence
  source 1..6630: mol_type = other DNA
atggtgaacgagaacacccggatgtacatccccgaggagaaccaccagggaagcaactacggatcacccaggcctgcgcatgctaatatgaacgctaatgctgccgccggactggcacccgagcacattcctacgccgggcgcagccctttcctggcaggctgcaattgatgctgcaaggcaggcaaagctgatgggctctgcagggaacgcaaccattagcaccgtctccagcacccagcgcaagaggcagcaatacggcaaacctaaaaagcagggaagcacaactgccacaaggccccctagagcactcttgtgcctcaccctcaagaatcctatcagaagagcctgcatcagcatagtggagtggaagcccttcgagatcattatactccttacaatcttcgccaattgcgtcgctctcgcgatctatattccgttcccagaggatgatagtaacgcaactaattcaaatctcgaaagagtcgagtatttatttttgataattttcaccgtggaggcttttcttaaggtgatagcttacgggcttcttttccacccaaatgcataccttagaaatggctggaacctgctggactttatcatagtcgtcgtaggccttttttccgcaatcctcgaacaggctaccaaggcagatggagctaacgcactcggtgggaagggagcaggatttgatgtaaaagccctgagggccttccgggtgctacgcccccttcggctcgtaagtggcgtcccaagcctacaggtagtactgaactcgatcataaaagctatggtgcctctgttgcatattgcgttgctggtgctgttcgtaataatcatttacgccatcattggattggaactgttcatgggaaagatgcacaaaacatgttacaaccaagaggggattgctgacgtgcctgcagaggacgatccctccccctgtgctttggagactggtcacgggcgtcagtgccagaatggcacagtgtgtaaacccggctgggacggccccaaacatggcatcacaaacttcgacaatttcgcattcgcaatgctgacggtgtttcagtgtatcaccatggaaggctggacagacgttctgtattggatgcaggacgcgatgggctacgagctaccttgggtctactttgtcagcctggtcatcttcggaagcttctttgtgctcaacctggttctaggggttcttagcggtgaattctctaaggagcgcgagaaggcaaaggcgaggggggatttccaaaagctgagggaaaaacagcagctggaggaggacctcaagggataccttgattggatcacccaggccgaggatatcgatccagaaaatgaggatgagggcatggacgaggaaaaaccacgtaatatgtctatgcctacctccgagactgagtcagtgaacacagagaacgtggctggaggagatattgagggggagaattgcggcgcccgtctggctcatcggattagcaagagcaagttttcccggtactggcggcgatggaatagattttgtcggagaaaatgtcgcgcggctgttaaatcaaacgtcttttactggttggtcatctttctcgtctttctcaacaccctgacgatcgcttcagaacactacaatcagcctaactggctaacggaggttcaggatacagcaaacaaggcactactcgctctgtttactgccgagatgctgctcaagatgtacagtctgggtctccaggcttactttgttagcctgtttaacagatttgattgttttgtcgtgtgcggggggatcttagagaccattctcgtcgagacaaaaataatgtcacccctgggcattagtgtattgcggtgcgttaggttattgcgcattttcaagattacgaggtactggaatagcctgtccaatctggtcgcatccctcctgaacagcgtgaggtccattgcttccctgttattactgctttttctcttcattattatattttctctactcggaatgcagctgtttgggggaaagtttaactttgacgaaatgcagacccgaagatctactttcgataactttcctcagagtctccttactgtgttccagatcctgaccggggaggactggaatagcgtaatgtacgatggaatcatggcatacggaggcccctcttttcctggcatgctggtttgtatctacttcattatcctcttcatctgtggcaactatatcttgttaaatgtgttcctggcaattgctgtggacaaccttgctgacgcggaatcgctgacatcagcccagaaagaggaggaggaagaaaaagaacggaagaaactggcaagaaccgccagccctgagaagaagcaagagctggtcgaaaagccggcggtcggagagtccaaagaggaaaagatcgagctcaaatctatcacagccgatggggagtcacctccagccacgaaaataaacatggatgaccttcagcccaacgaaaacgaagataaatcgccatatcccaatccagagaccaccggggaagaggacgaggaagagcccgagatgccggtaggcccccggccaaggccgctgtccgaacttcacctcaaagaaaaagctgtccccatgcctgaagcttctgctttcttcatcttcagctcgaataaccggttcaggctccaatgccataggattgtcaatgacacaatctttaccaatctaattctgttctttatacttttgagctctattagcctggctgctgaagacccggtgcagcacacatcgttccggaatcacatcctcttctacttcgacatcgtgtttaccaccattttcaccatcgaaatcgccctcaagatgacagcttacggagccttcctccacaaagggtcattttgcagaaactacttcaacattctggacctgctggtcgtgagtgtgtcgttgatcagcttcggaatccagtcgagtgcaatcaacgttgttaagatcctgcgggtgctgagggtgctcaggccccttagagccattaatcgcgccaaagggcttaagcacgtagtccagtgcgtctttgttgccattcgtacaattggaaacatagtgatcgttactacgctcttgcagttcatgttcgcgtgcatcggagttcagcttttcaagggcaagctatacacatgttctgattcttcaaagcagacagaggccgagtgtaagggaaattacatcacatacaaagatggagaagtggaccatcccatcattcagcctagatcatgggaaaatagcaagttcgattttgacaacgtgttggctgccatgatggcattgttcaccgtatctaccttcgagggctggcctgagctcctgtatcgtagcatcgactctcataccgaggataaaggacccatttacaattatcgagtagagatatcaattttttttataatatacatcatcataattgccttttttatgatgaatatctttgtcggttttgtgatagtcacgttccaggagcagggggagcaggagtacaaaaactgcgagctcgacaaaaatcagcgtcagtgcgttgagtacgccttgaaggcaagaccactgcgtaggtacatccccaaaaaccagcaccaatataaggtgtggtatgtggtaaacagtacctatttcgaataccttatgtttgtactgatcctgctcaacacaatttgtctagcaatgcaacattacggacagtcttgcctgtttaagatagcgatgaatattctaaacatgctgtttacagggttattcaccgtcgagatgatcctgaaacttatagccttcaagccaaaggggtacttctccgacccctggaacgtgtttgatttccttattgtcataggctctataattgacgttattttgtccgagaccaacccagccgaacacacccagtgcagtccctctatgaatgctgaagagaactcccgcattagcattaccttctttcgcctcttcagagtgatgagactggtgaagcttctgagtagaggggaaggaattcggactctcttatggactttcataaaatcctttcaggcactgccgtatgtggcccttctgatcgtgatgctcttctttatctacgctgtgatcggaatgcaagtgttcgggaagatagcccttaacgacaccacagaaattaatcgaaataacaatttccagacttttccacaggcggtcctgctgctcttccgatgcgcaacaggcgaggcttggcaggacatcatgttggcatgcatgcccgggaagaagtgtgccccggagtccgaaccaagcaatagcacagaaggcgagaccccctgtggatccagcttcgcagtattctatttcatttctttctacatgctgtgcgcattcctgatcattaatctgtttgttgccgtgattatggacaacttcgactatctgactcgcgattggtctatccttggacctcaccatctcgacgagttcaaacgtatttgggcagagtacgaccccgaggcgaaaggccgcattaagcacctggacgtggttacacttctccgaagaattcagccacctctgggtttcggcaagttgtgccctcatcgcgtggcctgcaagcgactcgtgtcaatgaacatgcccttgaattctgatggtacagttatgtttaacgctaccttgtttgccctcgtgcggacggcccttcgtatcaagactgaagggaacctggaacaagccaacgaagaactgagggctataattaagaagatatggaaaaggacatctatgaaattgttagatcaggttgttccgccggccggggatgatgaagtgacagtgggcaaattctacgccacttttctcatccaggaatattttagaaagtttaaaaaaagaaaagagcaagggctcgttgggaagccatctcagagaaacgccttgtctctacaggcaggcctccgcacgttacatgatataggccctgaaatcagaagagccatctcaggggacctcacagcagaggaggagctggataaggcaatgaaagaagctgtaagcgcggcaagcgaggacgatatctttaggagagcggggggtctgtttggaaatcacgtatcctattaccagtctgatggaaggtccgcttttccccaaactttcaccactcagagacctctgcacattaacaaagctggcagctctcagggtgacacagaaagtcctagccacgagaagctggtcgatagtacctttactccgtcaagttattcttcaactgggagcaatgctaacatcaataacgcaaataacaccgccctaggtcgtttacctcgccctgccggatatccttccactgtgagcactgttgagggccacgggcctccactatccccagcaattagagtccaagaagtcgcctggaaattgagttcgaaccggatgcattgctgtgacatgctcgatggtggcacgtttccccccgccttgggccctcgcagagccccgccatgcctccatcaacagcttcaaggttcgctggcagggttgagagaggatacaccttgtattgtccccggacatgcgtctctatgttgctcttcaagggttggtgagtggcttccggccggttgtacagctccacagcacgcgcggtgtcacagccgcgagagccaggcagcaatggcaggccaggaagagacctcccaagatgaaacttacgaggtcaagatgaaccatgatactgaagcatgtagtgagccgtccctcctgtcaaccgaaatgctctcataccaggatgatgaaaataggcagctcacactgcccgaggaagataaacgcgacattagacagagtcctaaacgggggttcctcagaagcgccagcctaggccgtcgggctagttttcaccttgaatgtctcaagcgacagaaggaccgaggaggtgacatatcacagaaaacagtcctgccacttcacctcgtccaccatcaagccctggccgtggccgggctctcacctctactgcagcggtcacacagtccggccagcttccctaggcccttcgccactccgccagcaactcccgggtctcgggggtggcccccacaacccgtgccaaccttgaggctcgagggcgtagaaagtagcgaaaaattgaatagtagtttccctagtatacactgcggctcttgggccgagactacccccggtggcggagggtctagcgccgcccggagggtgcgcccagtgtccctgatggtgccatctcaggctggggcccccggccgccagtttcacgggtctgcctcatccctcgtggaagctgttcttataagcgaaggcctgggacagtttgcccaggaccccaagtttatcgaagtaacaacacaggaactggcggatgcatgcgacatgacaatagaagagatggagtcagctgcggacaacatcctttccgggggggcacctcaaagcccaaatggcgcactgctccctttcgtgaactgtcgcgacgctggtcaggacagagcaggcggtgaggaagacgcgggatgcgttcgggctaggggccgaccatccgaggaggaattgcaggacagccgggtttacgtgtcctccctttag

SEQ ID NO: 181231 - DNA, 3840 bp, synthetic construct
  misc_feature 1..3840: note = Description of Artificial Sequence: Synthetic coding sequence
  source 1..3840: mol_type = other DNA
atggtgaacgagaacacccggatgtacatccccgaggagaaccaccaggggtctaattacgggagtccacgcccagctcatgccaacatgaatgccaatgctgcggctgggttagcaccagaacacatccctacacccggtgccgccttatcctggcaagcagccattgatgccgctagacaggccaaattaatgggcagcgcgggcaacgccacgatctccaccgttagcagtacacaacgcaagagacagcagtatggaaaaccaaagaaacagggtagcacaactgctaccagacctccgcgagccctgctttgcctgactcttaagaatcctatcagaagagcttgtattagcatcgtggaatggaaaccattcgaaattataattctcttaaccatattcgctaattgcgtcgccctggcgatttatatccccttccccgaggatgattcgaacgcgactaattctaatctcgagagagtggaatacctcttcctcatcatcttcaccgtggaggctttcctgaaggtgatcgcatatggattgttgttccaccccaatgcatacctgaggaacggttggaatctgcttgattttatcattgttgtggtgggcttgtttagtgctatcttggagcaggcaaccaaagccgacggcgccaatgcactgggaggcaagggcgcaggatttgacgttaaggctctcagggctttccgggtgctgagacctctgaggctcgtgtctggagtgccttccttgcaagtagtgcttaattccataattaaagctatggtgccactgctccacatagctctgctggtgctattcgtgattattatctatgcaattataggattagagctctttatgggtaagatgcataagacttgctacaatcaggagggcattgccgatgttcctgcggaagacgacccaagcccatgcgctctggaaacagggcacggtcggcagtgccaaaatggtaccgtgtgcaaaccaggctgggacggccctaaacacgggattacaaacttcgataattttgcgtttgcaatgctcaccgtcttccagtgcataaccatggaagggtggacagacgtcctatactgggtcaatgacgccgtcggaagggactggccgtggatttacttcgtcacccttatcatcatcgggagctttttcgtgctcaacctggtgctcggcgttctgtctggggaattttctaaagagcgcgaaaaggccaaagccagaggagatttccagaagttgcgcgagaagcagcagctagaggaggacttaaaagggtacctggactggatcacacaagccgaggacatcgatcccgagaatgaggatgaaggtatggacgaagagaaacctaggaatatgagcatgcccacatctgagaccgaatccgtgaacaccgagaacgtggcgggcggcgacattgaaggcgaaaattgcggtgcccgtctggcccatcgaatatcaaaatctaagtttagtcgctactggcgtcgctggaatcgtttttgccgccgtaaatgcagagccgcagtgaagagtaatgtattctattggctggtgattttcctggttttcttaaataccctcacaatcgcgagtgagcattacaaccagcccaattggcttacggaagtgcaggataccgccaataaagctctgctagcattgtttaccgccgagatgctcttaaagatgtactcactgggcctacaggcctactttgtttccttattcaaccgcttcgattgctttgtggtgtgcggaggcatcctcgaaactattcttgtggagaccaagataatgagtccgctcgggatcagtgtccttcgctgcgtgagactgctccgcatcttcaagattacccgatattggaattcgttatctaatttggtagcttctctgctgaactcggtcagatccatcgccagcctgctcctgctcctcttcttattcataatcatcttcagtcttttgggcatgcagctctttggcggtaagttcaatttcgacgagatgcagacgcgacggtcaacgtttgataactttccccaatctcttttaaccgtgttccagattttaacgggcgaggattggaactctgtgatgtatgacggtatcatggcctacggcgggccatcattccccggcatgctggtgtgtatctactttatcatcttattcatctgcggcaattacatccttcttaacgtgttcctcgctatcgctgtagataacctggcggatgccgaatccctgactagtgctcagaaagaagaggaagaggaaaaggagcgcaagaagctagcccggaccgcctcgccggagaagaagcaagaactcgtcgaaaaacctgcagtgggggaatcgaaggaggagaagattgagctcaagtccataactgcagacggggagtcaccaccggccaccaagattaatatggacgatctgcagccaaacgagaatgaagataagtccccttatcccaatccagagacaacaggggaggaggacgaagaagagcctgaaatgccagtcgggccacgacccagacccctgagcgagctgcacctgaaggagaaggcagtcccgatgcccgaagccagcgctttcttcattttttcctccaataacagatttagactacagtgtcataggatcgtgaatgataccattttcaccaacctgatcttattttttattctgctgagctccatcagcctggctgctgaggaccctgtccaacacacctctttcagaaatcatatacttggaaatgctgattacgtgtttacctcaatttttacgcttgagataatactcaaaatgactgcctacggtgcctttctgcataaagggagtttctgccgcaattactttaatatccttgacctgcttgtggtgagcgtgtctttgatctcctttggtattcagagttctgcgattaacgtggtcaagattctgcgtgtcctccgggtgctgcggcctttgagggcgattaaccgggccaaggggttaaaacatgtcgtccagtgcgtcttcgtggcgattaggaccatcggcaatatagttatcgtgactactctgttgcagttcatgtttgcctgcattggtgttcagcttttcaagggaaaactctacacttgttccgactcgtctaaacagacagaggcggagtgtaaagggaattatatcacgtacaaggacggggaggttgaccacccgatcatccagccaaggtcctgggagaattctaaattcgatttcgacaatgtcctagccgccatgatggccctgttcaccgtgagtacatttgagggatggcccgagctcctttacaggagcatcgactctcatacagaggataaagggcctatctacaattacagagtggagatctcgatttttttcattatttatatcatcataattgcgttcttcatgatgaacattttcgtcggcttcgtaatcgtcactttccaggaacagggggagcaggaatataaaaattgcgaactcgacaaaaatcaacgccagtgcgtggaatatgcgcttaaagcgaggccacttcgtcgctatattcccaaaaatcaacaccaatataaagtatggtacgtggttaacagtacatactttgagtacctgatgttcgttttgatactgttgaacactatctgtttggccatgcagcactatggccagtcctgcctgttcaaaatagctatgaacatcctcaatatgctgtttacaggtctgtttaccgtcgaaatgatcctgaaactcattgcgttcaaacccaaagtggggctgtag

SEQ ID NO: 181232 - DNA, 6546 bp, synthetic construct
  misc_feature 1..6546: note = Description of Artificial Sequence: Synthetic coding sequence
  source 1..6546: mol_type = other DNA
atgatgatgatgatgatgatgaagaagatgcagcaccagcggcagcaacaggctgaccacgcgaatgaagcaaactacgctcgaggaaccagattgcctctgagcggcgagggccccacgagtcaacctaacagttcaaagcagacagtcctgtcatggcaagcagctattgatgccgcccggcaggctaaagcagctcagaccatgagtacatctgccccacctccggtcggatcgttaagtcaacgcaagagacagcagtacgccaagagcaagaagcagggtaattcctccaactcccgcccagccagagcgttattttgtttatcactcaacaatcctatacgtagagcttgcatttccatcgtggaatggaagccttttgacatctttatcctgctggccattttcgccaattgcgtggctctggccatctatatcccatttcccgaggatgactcaaatagtacaaatcataaccttgagaaggtcgaatacgctttcctgatcatctttacagtagaaaccttcctgaagatcatcgcttacgggcttttacttcacccgaacgcctatgtgcgtaatgggtggaacctgttggatttcgtcatcgtgatagtgggcttgttttctgtgattttggaacaactaactaaagaaacggagggcggtaatcattcatcgggaaagtccggcggattcgacgtaaaggccctgcgtgccttccgcgtgcttaggccattacggctggtttcaggagttccatcgctgcaggtagtcctcaactcaataataaaagccatggtgcctctgcttcatattgcactattggttctgtttgtgattataatttacgctatcatcggcctagagcttttcattggaaaaatgcataagacatgtttctttgctgacagcgatatcgtcgcagaagaagatcctgcgccctgtgctttcagcggcaacggccgtcagtgcacggccaacgggacagagtgccggtccggatgggtaggtcccaacggggggatcacaaactttgataactttgcgtttgcgatgctgacagtattccaatgtatcactatggaggggtggacagatgtcttgtattgggtaaacgatgcaattggctgggaatggccatgggtctactttgtttctctgatcatactgggctccttcttcgtcctgaaccttgtgctgggagtgttatcaggagaatttagcaaggagagagagaaggccaaagcacggggagattttcaaaagctcagagagaaacagcagctggaagaggacttaaaagggtacctggactggatcacccaggccgaggatatcgaccctgaaaacgaagaagaagggggcgaggagggaaagcgtaatacaagtatgcctacttccgagaccgaatcggttaacacggaaaacgtgtccggtgagggcgagaatcggggctgctgcggttccctctggtgttggtggcgtcgacggggagccgcaaaggcaggaccgagtgggtgccgccgatggggacaggccatcagcaaatccaagctgtcaaggagatggcggcgatggaaccgattcaataggcgtcggtgtagagctgcagtgaaatctgtgaccttctactggcttgtcatcgtgctcgtatttctgaacactctgacaatcagcagcgaacattacaatcagcccgactggctgacccagattcaggatattgctaacaaggtccttctggccctgtttacctgcgagatgctggtcaagatgtattcacttggtcttcaagcttacttcgtgtccctgtttaatcggttcgactgcttcgtggtctgcggtggaatcactgaaacaattttggtggagctagagattatgtccccacttgggatcagcgtgtttcgctgtgttagactgctgaggatctttaaggtcactcgccactggacctctttgtcaaacttggtggcttccctcctcaattctatgaagtctatagccagtcttctgttactgctctttcttttcattattattttttccctgctcggcatgcagctcttcggtgggaagttcaatttcgatgagactcagacaaaacgaagcacgttcgacaacttcccccaggctctgctgaccgtgttccaaatcctgacgggggaagattggaatgctgtgatgtacgacggaatcatggcttacggcggtcccagttcatctgggatgatcgtctgtatctacttcatcatcttatttatctgcggaaactacattctcctcaacgtattccttgctatcgctgtcgacaacttggcagacgcagaaagcctcaacaccgcacagaaggaagaggccgaagaaaaagaacgcaagaaaatcgctcgcaaggagtcgctggagaacaagaagaataacaagcctgaggtgaatcagattgcaaactccgacaacaaagtcaccattgatgattaccgggaggaagacgaggataaagacccctatccaccgtgcgatgtgccagtgggagaagaggaagaagaagaagaggaagatgagccagaggtgcccgccggccctaggccaagaagaatatccgaactcaatatgaaggaaaagatagcccctatccccgagggcagcgcctttttcatcctctcaaagacgaatccaatcagagtggggtgtcataaactaattaatcaccacatttttacaaatctgattcttgtatttattatgctaagctcggctgcacttgccgcggaagacccaatccggagtcattcttttcgcaatacaattttgggatactttgattacgcattcactgctatcttcacggtcgagatcctgttaaaaatgaccacctttggggcttttctgcacaagggcgccttctgccgcaactatttcaaccttctcgacatgcttgtcgtcggcgtgtctctcgttagttttgggattcaatctagcgctatttctgtggtgaaaattctgagagtacttagggtcctcagaccactacgagctatcaatagggctaaagggcttaaacacgtggtccagtgcgtttttgtggcgatccgcaccattgggaatattatgatcgttaccacactgcttcagtttatgttcgcatgcatcggcgtgcagttgttcaaaggcaagttctaccggtgcacagatgaagccaagtctaaccctgaggagtgtcgcggcctgtttatcctgtacaaggatggggatgtggactcaccagtggttagggagcgtatttggcaaaatagtgacttcaatttcgacaatgtgctgtctgctatgatggcactgtttacggtatctacctttgagggatggcccgcactcctgtataaggccattgattccaatggcgagaatatcgggccaatctataatcacagggttgagatttccattttttttattatctacattatcatcgtggcctttttcatgatgaacatttttgtgggtttcgtcatcgtcacattccaagagcagggagaaaaggaatacaagaactgtgagctcgataagaaccagcggcagtgtgtggagtacgcgttaaaagctaggcccttgaggcggtatatacctaaaaatccgtatcaatacaaattctggtacgtggttaattcgtctccttttgagtatatgatgttcgtgctgatcatgttgaataccctttgccttgccatgcagcattatgagcagagtaaaatgttcaatgatgctatggatattctgaacatggttttcacaggcgtctttaccgtagaaatggtgctgaaagtcatagctttcaagcctaagggttatttttccgacgcgtggaatacattcgattccctgattgttattgggtcgatcatcgatgtggcactgagtgaggctgacccgaccgagtctgaaaacgtgcccgttccaacagccactcccggcaatagcgaggaatcaaatcgtattagcattaccttttttcggctgttcagggtgatgaggctggtaaaactgttaagtagaggtgaaggcattagaacgctcctttggacattcatcaagtcctttcaggccctgccatatgtcgcacttctgatcgctatgctcttctttatttatgcagtgataggcatgcaaatgttcggtaaagtagcaatgcgagacaataaccagatcaacaggaataataactttcagacattcccccaagccgtgttgctgctctttcggtgtgccactggagaagcctggcaggaaatcatgctcgcctgcttgccaggcaaattgtgcgatcccgagagcgactacaatccaggagaggaatacacatgcggaagcaactttgccatcgtgtattttattagcttttatatgctatgcgcctttctgataattaacctattcgttgctgtgataatggacaacttcgactacctgacccgtgactggtctattttgggtccacaccacctggatgagtttaaaagaatctggagcgagtacgatccagaagcaaagggccgtatcaaacatctagacgtggtgaccttgttgcgccgcattcaacccccacttggattcggcaagctctgcccacatcgggtggcttgtaaaaggttggtagctatgaatatgcctctaaacagtgacggtacagtgatgttcaatgctacattgtttgctctggtgagaaccgcattaaagatcaagacagaaggcaacttagagcaggctaacgaggaactgcgagcagtcataaagaaaatctggaagaaaacaagtatgaaactcctggatcaagtcgttccccccgcgggcgacgacgaagtcactgttggaaagttttatgcaacgtttctcatccaagactatttccggaagtttaaaaaaaggaaggagcaaggtttggttggaaaatacccagccaaaaacaccactatcgcactgcaagccggtcttagaactttacatgacattggccccgagatacgtcgcgccattagttgtgatcttcaggacgacgaaccagaggagacaaaacgtgaagaagaggacgacgtgtttaagcggaatggagcccttctgggcaaccacgtgaatcacgttaattcggaccggagagattcactacagcagacaaatacaacccaccgtcccctgcacgtgcaaaggcccagcatccctcctgcaagcgatactgaaaagccactgttccctccagccggtaactctgtctgccacaaccatcacaaccataactcgattggaaaacaggtgccaaccagtacaaacgcaaacctaaataatgctaacatgtccaaagctgcccacgggaagcggccaagtatcggcaatctggaacatgtgagcgaaaacggccaccattcctctcataaacacgaccgtgaacctcagcgccgctcctccgtgaaaagaaccagatattatgagacctacattagatccgattccggcgacgagcagctcccaacaatctgtcgagaagatccagaaattcatggatattttcgcgatccgcattgcttaggggaacaagaatattttagtagtgaggaatgttatgaggacgacagcagtcccacatggagtcgtcaaaactatgggtattacagtagataccctggccgaaatatagatagtgaacgccctcgcggataccatcatcctcaggggtttcttgaggacgacgactctcctgtgtgttatgacagtagacgcagccctcgcagaagactgctcccaccaacaccggcctcccaccgtagaagtagcttcaattttgagtgtctccggaggcaaagcagccaggaggaagttccatcttcccccattttcccccacaggactgccctccccctgcacctgatgcagcagcagatcatggcggtagctgggctggacagtagcaaggctcagaaatattccccgagccatagcacacgctcctgggctacacctccagccacaccaccgtatcgtgattggacaccgtgttacaccccattgattcaggttgaacagtctgaagccctagaccaggtgaatggttctctgcctagcctgcaccgctcgagttggtacacagacgaacccgacataagttacaggactttcactcctgcttcactgactgtgccttcctctttccgaaataaaaattcagacaagcagcgttctgcagattccctcgttgaagcagtcctgataagtgaggggctgggtaggtatgcacgtgaccctaaattcgtgtctgccacgaaacacgagatagctgacgcttgcgacctgacaatagacgaaatggagtcagccgcctctactctgttgaacggtaacgtccggccaagggcaaatggagacgtgggcccgttgtcccaccgccaagactatgagctccaagatttcggccccggctactcagacgaagagcccgacccaggccgtgacgaggaggatctggcagacgagatgatctgcattacgacactgtag

SEQ ID NO: 181233 - DNA, 6486 bp, synthetic construct
  misc_feature 1..6486: note = Description of Artificial Sequence: Synthetic coding sequence
  source 1..6486: mol_type = other DNA
atgatgatgatgatgatgatgaagaagatgcagcaccagcggcagcagcaggctgatcacgccaacgaggcaaattacgccagaggcactcgcttaccactttccggcgagggtcccacttctcagcccaactcgagcaagcagacagtcctatcctggcaagctgccatcgacgcggctaggcaggccaaagcagcccagacgatgtcaacaagcgcgccccctccagtcggaagcctttctcagcgcaaaaggcagcagtatgccaagtctaagaaacagggaaactcgtccaattctaggccggcaagggccctgttttgtcttagcctgaataatcccatccggcgggcctgcatctcaatcgttgaatggaaaccgtttgacatcttcatcttactggccatatttgctaactgtgtcgccctcgcaatttacataccttttcccgaagacgattcgaacagcacaaaccacaacttggagaaggtggaatacgcgttcctcattatttttaccgtggaaacgttcctcaaaatcattgcttacggactgctactgcatcccaacgcgtatgttagaaatgggtggaacctgctggactttgtaatcgtgatcgtgggattattctcggtcatcctcgagcaactaactaaagaaacggaaggtggcaatcacagctctggaaagagtggtggtttcgacgttaaagcactgagggcattccgggtgctgaggccacttcgactcgtcagtggagtgcccagcctccaggttgtacttaattccatcattaaagccatggtacccctgctgcacattgctcttcttgtgttgttcgtcatcattatttatgctattattggtctggaactctttattggcaagatgcacaaaacttgcttcttcgccgacagtgatattgtagctgaggaagatccggcaccttgcgcattttccgggaacgggcgccaatgcactgctaacgggaccgaatgcagatctggttgggtcggcccaaatgggggtatcacaaattttgacaactttgcgttcgcaatgctgacagtgttccagtgtataactatggagggctggacagatgtactgtactggatgaatgacgctatgggctttgagcttccctgggtgtattttgtcagccttgtgattttcggctcttttttcgttttgaacctggtgctcggagtattgtctggggaattcagcaaggaacgtgaaaaagccaaagctagaggggattttcagaagttacgcgaaaagcagcaactagaggaggatctgaagggctacctggactggatcacccaggcagaggacatcgatccagaaaacgaggaagagggtggggaggagggcaagcgtaacacatccatgcctacatcagagacagagtccgtgaataccgaaaatgtatcaggagagggagaaaatcggggctgctgtggttccttgtgccaggctatctccaaatctaagctgtcccggcgctggcgtagatggaaccggtttaacaggcggcggtgccgcgcagctgtgaaaagtgtaacattctattggttagttatagtcctggtgtttctaaacactcttaccatctcatcagaacattacaatcagcctgactggttgacccagatacaagacatcgctaacaaggtactgcttgccctcttcacctgtgaaatgctagtgaagatgtattcccttggtctgcaggcttattttgtgtctctgttcaaccgattcgactgtttcgtggtatgcggtgggataaccgagaccatcctggtagagctggaaatcatgtcccccctgggcatatccgtgttccggtgcgtgcggttactacgaatcttcaaagtgacaaggcactggactagcctgtctaacctagtggcctcgttgctgaacagcatgaaatcaattgcctccctgctgctgttgctgttcctgttcatcattatcttttccttactgggaatgcagttgtttggcggaaagtttaacttcgatgagacgcagacaaagcgttccacatttgacaactttccacaggcgctcttgactgtctttcaaatcctcactggggaagattggaacgccgtgatgtacgatggaatcatggcatacggtggcccctcatcaagtggtatgatcgtgtgcatttacttcattatactattcatctgtggaaattatattttgcttaacgtgtttttagctattgccgtggataatttagcggacgctgaaagcctgaacaccgctcagaaggaagaggctgaagagaaggagcggaaaaagatagcccggaaggagagcctggaaaacaagaagaataataagcccgaggtcaatcagattgcaaattccgacaacaaggtgacgatcgatgactatcgagaggaagacgaagacaaggacccgtacccaccatgcgacgttccagtgggagaggaggaagaagaggaggaggaggacgagcccgaagtccctgcaggccccaggccacgaagaatctcagagcttaacatgaaagagaaaattgcccccattcctgaaggttctgctttttttatcctgtcgaaaaccaatcctatacgggtgggctgccacaagctaatcaatcatcacatattcacaaacctcattctggtgttcatcatgctgtccagtgccgctttggccgcggaggatccaatccgatctcactcattcagaaatactattcttggttattttgactatgcttttacggccatatttaccgttgaaattctccttaaaatgacaacctttggcgccttcctgcataagggggcgttctgtcgtaactattttaatctgctggacatgctggtggttggggtctctttggtcagctttggaatccaatctagcgccatctcagtggtaaagatactgcgcgtcctccgggttctgagacctctgcgtgcaataaaccgagcaaaaggcctgaaacacgtcgtgcagtgtgtgtttgtcgccattcgtacaattggtaatattatgatcgtcaccactctcctgcagttcatgtttgcctgtattggagtgcagctcttcaaaggcaagttttaccgctgtaccgacgaggcaaaatccaatccagaggagtgcagaggactctttatcctgtacaaggatggagacgtggattccccagtggtgagggagcggatctggcagaattctgacttcaactttgacaacgtgctgtcagccatgatggcactgtttactgtgagtaccttcgaaggctggcccgccctcctgtataaggccatcgactccaacggagaaaacatcggccctatctataaccatcgggttgagatctctattttttttattatatacatcatcattgtggctttcttcatgatgaacatttttgtcggcttcgtgatcgtgacctttcaggaacagggggaaaaagagtataagaattgtgagctggacaaaaatcagcgacagtgcgtggagtatgctctcaaggctaggcctttaaggagatatattcccaaaaacccatatcagtacaagttctggtatgtggtgaattcatctcctttcgagtacatgatgttcgtgctgataatgttaaataccttgtgtcttgcaatgcagcactacgaacagagtaagatgtttaatgatgcaatggatatcctcaatatggttttcaccggagtgttcacagtcgaaatggttctcaaggtcattgcctttaaacccaaaggttacttctctgacgcttggaatacatttgactcacttatcgtgataggctctatcatcgacgtggcactcagcgaggctgaccccacagaatccgaaaatgtgcccgtgccaacagcaacacccggcaattccgaggagagcaacagaatttccattacattttttcggctctttagagtcatgcgcctcgtgaaactcctgagcagaggggaaggtattaggacactgttgtggacattcattaagtcatttcaggcactaccttatgtggcgctgctgatcgccatgctctttttcatttatgcagtgattgggatgcagatgttcggcaaggtggcaatgagagataacaaccagatcaatcgcaacaacaactttcagacatttccacaggccgtgcttctgcttttcagatgtgccaccggagaggcctggcaggagattatgttagcctgtttgcccggcaaactctgcgaccctgagtctgattacaatccgggagaagaatacacctgcggtagcaatttcgccatcgtgtatttcatcagcttctacatgttatgtgccttcctcattatcaacctattcgtcgccgtaatcatggacaatttcgactacctgactagggactggagcatcttgggtccccatcacctcgacgagttcaagcgaatctggagtgagtatgacccagaagccaaagggcgtatcaagcaccttgacgtagtgacactcctgcgccgaattcagccccctctcggtttcgggaagctgtgtccccatagagtggcatgtaagagattggtcgctatgaacatgccgctgaattctgatggcaccgtgatgtttaacgccacccttttcgcactcgtgcgaactgctctcaagattaaaactgagggcaacctcgagcaggctaatgaggaactgagggcagtcatcaaaaagatatggaagaagacaagcatgaagctgctggatcaggtcgtgccacccgctggtgatgacgaagttaccgttggtaaattctacgccaccttcttgattcaggactattttaggaaattcaagaaaaggaaagagcagggacttgttggcaagtacccagcaaagaacacaacaattgctctgcaggcaggactgcgcacacttcacgacattggtccagagatccggagggctatatcttgcgacctccaggacgacgagcctgaggagaccaagagagaagaagaggacgatgtgtttaagcgcaatggcgcactactggggaatcacgtgaatcatgtaaattctgaccggcgcgacagcctgcagcagacaaatacaactcatcgacctctgcacgttcagcgcccgagtattccgccggctagcgatacagaaaagcccttgttcccccctgctgggaattcggtgtgccataaccatcacaaccataactccattggaaagcaggtacctacgtctacaaacgccaatctcaataacgctaacatgagcaaggccgcccatgggaagagaccctcgataggcaatctggagcacgtctcggaaaatggccaccactccagccataagcatgatagggagccccagagaaggagctctgtcaaaagaacacggtactatgagacctacatcagatctgacagcggagacgagcagttaccaaccatttgtagggaggatccggagatccacggttacttcagagacccccattgtcttggagagcaggagtacttctcgtcagaagaatgctatgaggacgattcctccccaacttggtcgcggcaaaactacggatactacagtcggtacccaggacggaacattgattccgagaggcccagaggttatcatcatccccagggctttctggaagatgacgactctcctgtgtgctacgatagtaggaggagcccccggcgcagactccttcctcccacccctgcctcacaccgacgcagcagtttcaattttgaatgcctcaggcggcagagctcacaagaagaggtcccaagcagtcctatttttcctcatcgaactgccttgcccctgcacctgatgcaacagcaaatcatggccgtggctggcctggactctagtaaggcccagaagtatagcccgagccactcgactagaagttgggcgaccccccctgccacccccccatacagagattggaccccttgttacacccccctgatccaggtggaacagtctgaagccctcgaccaggtgaacggatcccttccctcgttgcatcgctcatcttggtacaccgacgagcccgatatcagttataggacattcacgccagcaagcctgaccgtgccctcgtccttcaggaataagaactcagacaaacaacgaagcgccgattctcttgtcgaggccgtacttatcagtgagggattaggccggtacgctcgggacccaaagtttgtatccgcgactaaacatgagattgcggacgcttgcgatctgactatcgacgaaatggagtctgctgcgtccaccctccttaacggaaatgtcaggcctcgagccaacggagacgtcggacccctgtcccacagacaagattacgaactgcaagacttcgggcccggatacagcgacgaagaaccagatcctggacgggatgaggaggacctggccgacgagatgatctgtatcactactctgtag

SEQ ID NO: 181234 - DNA, 6414 bp, synthetic construct
  misc_feature 1..6414: note = Description of Artificial Sequence: Synthetic coding sequence
  source 1..6414: mol_type = other DNA
atgatgatgatgatgatgatgaagaagatgcagcaccagcggcagcagcaggctgatcacgccaacgaagctaactatgctcgcggaacaagactgccattgtctggcgaagggccgaccagtcaacctaatagtagtaaacagacggtgttgtcttggcaagctgctatagacgcggctcgccaggccaaggctgcccaaaccatgtccacgtccgcacctccgcctgtggggtccctgtctcagcgcaagcggcagcagtacgcgaagtccaagaagcaaggcaatagttccaacagcagaccagcacgcgccctcttttgcctgagcctaaataatccaattcgaagggcttgtatcagtattgtggagtggaagccttttgatatcttcatcttgctagctatctttgccaattgtgtggcattagcaatttatattccctttcctgaagatgatagcaactcgactaaccataatctggagaaggttgagtacgcctttcttataattttcacagtcgagacttttcttaagatcatcgcatatggactgttgcttcatcccaatgcatacgtgagaaatggctggaatctactggatttcgtgatcgtgatagtggggctcttttccgtaattctggaacagttaacaaaagaaactgagggaggaaatcatagtagcggtaagtccggcggatttgacgttaaagccctcagagccttccgtgtgcttaggccactgcggctcgtgtccggcgttcccagtcttcaggtggtgctcaacagcatcatcaaagccatggtgccgttgttacacatagcgctgctagtactgtttgtgattatcatctacgccattattgggctggaattatttattgggaagatgcataagacatgcttcttcgctgattcggacatcgtggcagaagaggacccagccccctgtgcattcagcgggaacggaagacaatgcactgccaacggcactgagtgccggagcggctgggtgggacctaacggcggcatcacaaacttcgataacttcgccttcgctatgttgactgttttccagtgcattactatggagggttggacagatgtcctgtactggatgaatgacgctatgggctttgagctgccgtgggtgtatttcgtctccctggtcatatttggcagtttttttgtgcttaacctggtcctcggggttctctccggtgaattctccaaggagagagagaaggccaaggctcggggtgactttcagaaacttcgggaaaagcagcagctcgaggaggacctcaagggctatctggactggatcacacaggctgaggacatcgaccctgagaatgaagaagaaggcggagaagaaggaaagcgcaacacctctatgcccaccagcgaaacagagtccgttaacacagagaacgtgagcggtgagggtgagaatcgaggctgctgcggaagcctgtgccaggccataagcaagtccaaactgagtcgaaggtggaggcgatggaatcgttttaaccggcggcgatgccgggccgctgtgaagtccgtcactttttactggcttgtgattgtgctcgtgttccttaatacactgaccatatctagtgagcactacaatcagccggactggttaacacaaattcaagacatagcgaacaaagtcctcttggccctgttcacatgcgaaatgctcgtgaagatgtatagcctgggccttcaggcttacttcgtttctctcttcaacaggtttgattgtttcgtggtctgcggcgggattactgagaccatactggttgagctagagattatgtctcccctaggaattagcgtgttcagatgcgttcgtctcctgagaattttcaaagtgactagacactggacgtccctctctaacttggtagctagtctcttgaatagcatgaaaagtattgcctctctgctgctcctcctttttttgttcattatcatcttctctcttctggggatgcagctgtttggaggaaagttcaactttgacgagacacagaccaaacgctcaacttttgataattttccacaggccctcctcactgtgttccagatcctgaccggcgaagactggaacgccgtaatgtacgatgggatcatggcctatggaggtccttcctcatcaggcatgattgtttgtatatactttattatattattcatctgtgggaactacattctattgaacgtgtttttggccattgctgtcgacaacttggctgacgctgagtcccttaacacagcccagaaagaagaagcagaggagaaagaaaggaaaaagatcgctcgcaaggagtctctggagaacaaaaaaaacaacaagcctgaggtaaaccagattgcaaacagcgataataaagtgaccatagatgactaccgcgaggaggacgaggacaaggacccataccctccatgcgatgtgcctgtgggcgaagaagaggaagaagaagaggaagacgagcccgaagtcccagccggccctaggccccgccgaatcagtgagctgaacatgaaggagaagattgcacctatcccagagggatcggcattcttcatcttgagcaaaacgaacccgatacgcgtaggctgtcacaagttgattaaccatcatatcttcacgaatttgatcctggtctttataatgctttccagcgcagccctggccgcggaggatcccatacggagtcactccttcagaaatacaatcctgggatatttcgactacgcatttacagccattttcacagttgaaatactcctgaagatgaccacttttggcgcctttcttcataaaggcgccttttgcagaaattatttcaatcttctggatatgctggtggtcggcgtgtctctggtgtcattcggcatccagagttctgccatttctgtggttaaaatcctaagagtactccgggtcctgcgcccactgcgcgcaattaatcgtgcaaagggcctgaaacatgtggtgcaatgtgttttcgtggccattcggacaattggcaacatcatgatagtgaccacgctgctgcagtttatgttcgcatgtatcggcgtgcagttgtttaaggggaaattttacaggtgtaccgacgaggccaaatccaacccagaagagtgccggggcctgtttattctttataaagatggcgatgtggactctccagtcgtccgggagagaatatggcagaatagcgattttaactttgacaacgttcttagtgctatgatggccctctttacagtttcaacatttgaaggctggcccgctctgctgtacaaagctattgattccaacggagaaaacatcgggcctatatataatcaccgggtggaaatatctatcttctttatcatatacattatcattgtcgccttcttcatgatgaacatttttgtggggttcgttatcgtgactttccaggagcagggtgaaaaagaatacaaaaactgcgagctagataaaaatcagcgtcagtgtgtcgagtatgccctaaaagctaggcccctccgcaggtatatccctaagaacccctatcagtacaaattttggtacgttgtgaacagtagccccttcgagtacatgatgtttgtactaatcatgctcaacacactgtgccttgcaatgcaacactacgaacagagcaagatgtttaatgacgccatggacatcctcaacatggtatttacaggcgtgttcaccgttgaaatggtgctgaaggtgattgcttttaaaccgaagggatacttttcagacgcatggaacacatttgactccctaatagttatcggctccatcatcgatgttgctctgtccgaagccgacaatagcgaggaatctaacagaatcagtattactttctttcgtctattcagggtgatgagactggtcaagttgttgagcaggggagagggaatccgtacactgctgtggaccttcatcaagtcctttcaggcgctgccatacgtggctcttttaatcgctatgctgttctttatttacgcggtgatcggcatgcaaatgttcggcaaggtggccatgagagataacaaccagatcaaccgcaataataattttcaaaccttcccgcaagccgtccttctgctattccggtgcgccactggagaggcatggcaggagatcatgctggcatgcctacctggaaagctgtgtgatcccgaaagtgactacaacccgggcgaggaatacacgtgtggaagtaacttcgctattgtctatttcattagtttttatatgctgtgcgcatttcttatcattaatttgtttgtcgccgtgatcatggataacttcgattatttaaccagggattggagcattctcgggccacaccaccttgacgagtttaagaggatttggtctgaatacgatcccgaggcaaaggggcgcattaaacacttggacgtggttactttactcaggagaatccagcccccgctgggatttgggaaactgtgcccccatcgcgtagcttgcaagagacttgttgccatgaatatgcccctcaattccgacggcacagtgatgtttaatgcaacattattcgcgttggtgagaaccgcgttaaaaatcaagactgaaggcaatttagaacaggccaatgaagagctgcgcgcagtcatcaagaagatctggaagaagacctcaatgaagttactggaccaggtggtaccccccgctggagatgatgaggtcacggtgggcaaattttatgccaccttcctgattcaggactacttcaggaagtttaagaagaggaaagaacagggacttgtgggaaagtaccctgccaagaataccacgattgctctgcaggcaggacttcgaaccctccacgacatcgggcctgaaatccggagagccatctcgtgtgatttgcaggacgatgagcctgaggaaactaaacgtgaggaagaagacgatgtgttcaaaaggaatggcgccctgctgggcaaccatgtgaaccacgtgaattcagatcggagagactcgctgcagcaaacaaatacgacgcaccgtcccctgcacgtgcagcgtccttccatcccccccgcatccgatactgaaaaaccccttttccctccagcaggcaacagcgtgtgccacaaccaccacaaccacaattcaatcggcaagcaggtgcccaccagcaccaatgccaatttgaacaacgcaaatatgtccaaggccgcccacggaaaacggccctccatcgggaatttggaacacgtttcagagaatggtcatcattctagccacaagcacgatagagaaccacagcgcaggagcagcgttaaaaggtccgactcaggagatgagcagctgccaacaatctgtcgggaagacccagagattcacggctattttcgtgacccacattgcctaggagagcaggaatatttctccagcgaggaatgttacgaagatgacagtagccctacttggtctcgccagaactatggctactactcgcgttacccagggagaaatatcgatagtgaacggccgagggggtaccaccatcctcagggctttctcgaagatgacgattcaccggtctgttatgacagcaggaggtcgccacgacgcaggctgctgcctccaaccccagcctcccatcgaaggtcctcgtttaacttcgaatgcctgcgtcgccaaagctcacaggaggaagtgccttcgtccccaattttccctcaccgaaccgccttgccactgcacctcatgcagcagcagattatggccgtcgcaggcctggactcttccaaggctcagaaatattccccttcacattctacacgatcctgggcgaccccgcccgctacccccccatatcgggactggacaccctgttatacccccctaatacaggtggagcagagtgaggctcttgatcaagtaaatggaagtctcccgtctctccacagatcctcatggtacaccgatgaacctgatatctcatataggaccttcacaccagccagtttgactgtcccgtcctcttttcgaaataagaatagcgataaacagcggtctgccgactctttagtcgaagctgtactgatcagcgagggcttaggccggtacgcgagagaccccaaatttgtttcagccacaaaacacgagattgcggacgcctgtgatcttactatcgacgagatggagagcgccgcctccactctcctgaacggcaatgttcgccctcgcgctaatggggatgtgggccctttgagccatagacaagactatgagctgcaggattttggacccggctattcagacgaagagcctgatccaggtagggatgaggaagacctggctgatgaaatgatttgcatcacaaccttgtag

SEQ ID NO: 181235 - DNA, 5565 bp, synthetic construct
  misc_feature 1..5565: note = Description of Artificial Sequence: Synthetic coding sequence
  source 1..5565: mol_type = other DNA
gccaacggcaccgagtgccggagcggctgggtgggccccaacggcggcattacaaatttcgacaattttgctttcgcgatgttgacagtcttccagtgtatcactatggagggctggacggacgtgctatactggatgaacgacgccatgggcttcgaattgccatgggtctacttcgtttcgctggtcatttttggctccttctttgtgctgaatctggttctcggtgttctttcgggcgagtttagtaaggagcgagagaaggcgaaagcccgtggcgatttccaaaagctgagagagaaacaacagctggaagaggatcttaaaggctaccttgactggattacccaggccgaggacattgaccctgaaaacgaggaagaaggaggggaggaaggtaagaggaacaccagcatgccgacgtctgaaaccgaatcggtaaatacagagaatgtttccggagagggcgagaataggggttgttgtggatccctgtggtgctggtggcgcagaaggggagctgcgaaggcgggaccctcaggttgccggcggtggggacaagcgatttctaaatccaagctctctaggagatggcgacggtggaatcgattcaaccgtaggcgatgtcgagccgcggtgaaaagcgtcacgttttattggttggttattgtcctcgtgttcctgaacacgctcaccatctcctcagagcattataatcaacctgactggctgacacagatccaggacatagccaataaagtcctcctggccctctttacctgtgaaatgctcgtgaaaatgtatagtcttgggcttcaggcctactttgtctcccttttcaatcgcttcgactgcttcgtcgtatgtggaggtatcacagaaactatcctagtggaactagaaattatgagccctctggggatttcagtgttccggtgtgtgcgactgctgcgtatcttcaaggtcacacgacactggacttccctgtctaatctggtagccagcttgcttaatagcatgaagagtattgcctccctcttgctactgctctttctattcattataattttcagcttactgggcatgcaattgttcgggggcaaatttaactttgatgagacacaaaccaaaagaagtacgtttgacaactttccccaagccctgctgactgtctttcagatactgaccggcgaagattggaacgctgttatgtatgatggcattatggcttacggggggccctcctcttcgggcatgatagtatgcatctatttcattatactctttatttgtggcaattacattttactcaacgtctttttagccattgcagttgataatcttgcggacgcagaatcgctcaataccgcccaaaaggaggaagccgaggaaaaagagcggaaaaaaatagccagaaaagagtccctcgagaacaagaaaaacaataaaccggaggtcaaccagatagcgaatagtgataacaaggttacaatcgacgattacagggaggaggatgaggacaaggatccataccctccctgcgacgtccctgtcggggaagaggaagaggaggaagaagaggatgaaccggaggtgcccgccggtccaagaccaagaaggatcagtgagctgaacatgaaagagaagattgctccaatccctgaaggttcagcctttttcatcttatccaaaaccaatcctatccgggtgggctgccacaaactcatcaatcaccacattttcaccaaccttatccttgtgttcattatgctttcatccgccgctctcgccgccgaggatcccattcgtagccacagttttagaaacacaatactcggctacttcgactacgcgtttacagctatttttaccgtcgagattctgctaaaaatgactaccttcggggcttttctccacaaaggcgccttttgccgcaattatttcaatctgctggacatgctcgtagtcggtgtctccctcgtctcattcggaatccagagctccgcaattagtgtggtaaagatattgcgggtccttcgagtcctccggcccctgagggcaattaacagagccaaaggactcaaacacgtggtgcagtgcgttttcgttgctatacgcaccattggcaacattatgatcgttacaacacttctgcagtttatgtttgcctgtatcggcgttcagctcttcaagggaaagttttacaggtgtactgacgaggctaagagcaatccagaggagtgccggggactctttattctctataaagatggcgacgtcgactcccccgtcgtccgcgaacggatctggcagaattccgactttaactttgataacgtactgtccgcgatgatggcactgtttaccgtgagcacctttgaaggttggcccgctctgctttataaggctatcgattctaacggggaaaatatagggccaatttataatcacagggtggagattagtattttctttataatctacataatcatcgtcgcattcttcatgatgaacatatttgtggggtttgtaattgtgacttttcaagaacagggagagaaggaatataagaattgcgagctggataagaatcagagacagtgcgtcgagtatgctcttaaagcccggcctcttagacggtacataccgaagaatccatatcagtacaagttctggtacgttgtaaattccagtccatttgaatacatgatgtttgtactcatcatgctgaataccctgtgcttggcaatgcaacactacgagcagagtaagatgttcaacgacgcgatggatatcctgaacatggtctttacaggagtgttcactgtggaaatggtgctgaaggtcattgccttcaagccaaaacattattttacagatgcttggaacacctttgacgcactgattgtggtgggatctgtggtggacattgccatcactgaggtgaatcctactgaatcggagaatgttccagtgccgaccgcaactccaggtaactcagaagaaagtaatagaatatcaatcacattctttagactctttcgggtaatgagattagtgaaactcctttccagaggtgaaggtatccgaactctattgtggacatttatcaagagcttccaggccttaccctacgtagctctgcttatcgcaatgttgttctttatctacgctgtcatcgggatgcagatgttcgggaaagttgctatgcgggacaacaatcaaatcaacaggaacaacaacttccagacgttcccacaggccgttcttctactgttccgttgcgccacaggagaggcttggcaggagatcatgctggcatgcctgccaggcaaactctgcgatcctgagtcagactacaaccctggcgaggaatatacctgtggaagcaatttcgcaattgtgtacttcattagcttctacatgctctgcgcattcttgattattaacttatttgtcgctgtcatcatggacaattttgattatctgacccgggactggagtatcctcgggccgcatcacctggatgaatttaagaggatttggtcggaatacgaccctgaggccaaagggcgcatcaagcatctggacgttgtgacactgttgcgacgaatccagcctccactaggctttggaaaactgtgtccacacagggtggcctgcaaacgtttggtggcaatgaatatgcccctgaatagcgacggtacagtgatgttcaatgcaaccctgtttgcactagttcgtactgctttgaagattaagaccgagggaaacttggaacaagcaaacgaagagctgcgggcggtgattaagaagatttggaaaaagacctccatgaagcttctggaccaggttgttccgccagccggcgatgatgaagtgacagtcgggaaattctacgccactttccttattcaggattactttagaaaattcaaaaaaagaaaggaacaggggttagtcggtaagtatcccgccaagaatacgaccattgcattgcaagccggactgcgcactcttcatgacatcggccctgagattagacgtgccattagctgtgacttacaggatgatgagcccgaggaaacgaaaagggaggaagaggacgacgtgttcaagaggaatggcgctctgctggggaaccacgtgaatcacgtgaattccgacaggagggattcattgcagcagaccaacaccacccacaggccccttcatgtgcagcgcccctcaattcccccagcatcagataccgaaaagcccctgttcccacccgctggaaacagtgtgtgccataatcatcataatcacaattcaatagggaagcaggttcccacttctaccaatgccaacttgaacaacgccaatatgtcaaaagctgcacacggaaagcgtccatctataggtaatctcgaacatgtgagcgagaacggccaccatagtagccataagcatgacagagagccccagcgcaggtcatccgttaaacggacccggtactatgaaacttacattcgcagcgatagtggcgacgagcagctcccaacaatatgtcgcgaggatcctgagattcatgggtactttagggacccccactgcctcggtgagcaggaatacttctccagtgaggagtgctacgaggacgattccagtccaacttggtctaggcagaattatggctactattccaggtaccctggtaggaatatcgactccgagcgcccccggggctatcatcacccccagggatttcttgaagatgacgactcgccagtctgctatgatagcaggcgctccccacgacggaggttgctgcccccaacgcctgcctctcacaggaggtcctccttcaacttcgaatgtctgcgccgacagtcaagccaggaggaggtgccgagctcgccgatattccctcacaggaccgctctgccattgcacttaatgcagcagcagattatggcggtagcggggcttgactcttccaaagcccagaaatatagcccgagccattcaacgcgttcatgggctacacccccagctaccccaccctacagagattggactccgtgttacactcccctaatccaagtggagcagtccgaggctcttgatcaggtaaatggaagtctgccctccctccacagatcatcatggtatacggatgaaccggacatcagctacaggacgtttactcctgcaagtctcacagtcccctccagcttccgcaataagaactccgataaacagcgatcggcagactctctcgttgaggccgtgctcatctccgaagggctagggcggtatgcacgggaccctaaattcgtgtccgccacaaaacacgagatcgctgatgcttgtgatttgacaatcgacgaaatggaatcagccgcgtccaccctgctgaatggaaacgttaggccccgagcaaacggcgacgtggggccactcagtcaccgccaggactacgagttacaagattttggccctgggtatagtgacgaagagcccgatcctgggagagacgaggaggacctcgccgatgagatgatttgcattaccacactgtag

SEQ ID NO: 181236 - DNA, 1620 bp, synthetic construct
  misc_feature 1..1620: note = Description of Artificial Sequence: Synthetic coding sequence
  source 1..1620: mol_type = other DNA
atgggcgagacctggctgtgccccgccgccctgggcctgctgtacaaggcaatcgattcgaatggagagaacattgggcccatttacaatcaccgcgtcgagatttcaatattcttcattatttatatcattattgttgcattcttcatgatgaatatatttgtgggctttgtcatagtgacttttcaggagcagggagagaaggagtataaaaactgcgagttggataagaaccagcgtcagtgtgttgagtatgcactcaaggccaggccactcagaaggtacattccaaagaacccttatcagtacaagttctggtacgtggtcaattcctcccccttcgagtatatgatgttcgtgctgataatgcttaatacactgtgccttgctatgcagcactacgagcagtcaaagatgttcaatgacgctatggacattctaaatatggttttcacgggagtgttcacagtggaaatggtgttgaaggtaattgccttcaagcccaaaggctacttttccgatgcctggaacacctttgacagcctgatcgtgatcgggagcattatcgatgtggcactgagcgaagcggacaattccgaagaatccaatagaatatcaattacattctttcgcctgttccgtgtgatgcggttggtgaaactgttgagtcgcggagagggaataaggaccttgctttggaccttcatcaagtccttccaagctttgccttacgtggccctgctgatagcgatgttgttctttatctacgccgtcattggcatgcagatgttcggaaaggtcgccatgcgagacaataaccaaatcaatcgcaacaacaacttccagactttccctcaagccgtcctcttgctattccgctgcgccactggagaggcgtggcaagagatcatgctagcctgcctccccgggaagctgtgcgaccctgagagcgattataacccgggtgaggaatatacttgcggatccaactttgccatcgtttactttatctcattctatatgctttgtgcattcctgataatcaatctcttcgtggcggtcattatggacaatttcgattacctaactcgggactggtccattctgggaccccaccatcttgatgaattcaaaagaatctggagtgagtatgacccagaagccaagggcaggatcaagcacttagacgtggtgacacttctgcggaggattcaaccgcccctgggcttcggaaaactttgtccgcatagggttgcctgcaaacgccttgtggccatgaatatgcctctaaattctgacgggaccgttatgttcaacgctaccctgttcgcccttgtgcgaactgctttaaaaatcaagaccgagggtaacctggaacaagccaatgaagaactgcgagcggtcatcaagaagatatggaagaagactagtatgaagctgctagaccaagtggtgcccccagccggtgacgacgaggtgacggttgggaaattctacgcaacatttctcatccaggactatttcagaaagttcaagaagagaaaggaacagggccttgtcggtaagtatccagccaagaacaccacaatagcattgcagatgctagaacgtatgttatag

SEQ ID NO: 181237 - DNA, 1056 bp, synthetic construct
  misc_feature 1..1056: note = Description of Artificial Sequence: Synthetic coding sequence
  source 1..1056: mol_type = other DNA
atgaacggcctggcccagagccggctggagacctgcatcagctacctccactgttatagcgctggacttaggaccctacacgacattggtccagagattcggcgggcgatatcctgtgatctgcaggatgacgagcctgaagaaactaagcgcgaagaggaagatgatgtgtttaagcgaaacggggccctcctggggaatcatgttaaccacgtgaactccgacagacgcgatagtctgcagcagactaatactacgcacagacccttgcatgtccagcgcccatccattccccccgcatcggatactgaaaagcctctgttccctccggcgggcaattccgtgtgccataatcaccacaatcacaactccatcggcaagcaggtgcctacgtccacaaacgctaacctcaacaacgccaatatgtccaaggccgctcacggaaagcgaccaagtatcggcaacctcgagcacgtttccgagaacggccaccattcatcccataaacatgatagagagcctcagcgaaggtccagtgtgaaaaggacacggtattatgaaacctatatccggtcggattccggcgacgagcagctgccaaccatttgcagagaggacccggagatccacgggtatttccgggatcctcactgtctgggcgagcaggagtacttcagcagcgaagagtgttatgaggatgattctagccccacctggtcacgccagaattacggttattactcacggtaccccggaagaaatatcgattccgaaaggcctcgcgggtaccatcaccctcagggctttctcgaggatgatgactccccggtctgctacgactcccggaggtcaccacgtcgacggttactcccacccacacccgcgtcccaccggaggagtagtttcaactttgagtgcctacgcagacaaagttcccaggaagaagtaccaagtagccccatatttccacacagaaccgctctgcccctgcacttaatgcaacagcagtcccccctgtcaagtgaccatggaagttgcagaccccgctttaaatag

SEQ ID NO: 181238 - DNA, 5901 bp, synthetic construct
  misc_feature 1..5901: note = Description of Artificial Sequence: Synthetic coding sequence
  source 1..5901: mol_type = other DNA
atgagcgagagcgagggcggcaaggacaccacccccgagcccagcccggctaatggtgctggacccggtcctgaatggggtctgtgcccggggccccccgcggtcgagggcgaaagctccggagcatctggcctggggactccaaaacgccggaaccagcattctaaacacaagacagttgcggtcgcttccgcccaacggagcccaagggcgcttttttgtttaacccttgcaaatcctcttcgacgatcctgcatcagcattgtcgaatggaaaccatttgacatcctcattctacttacgatctttgcaaattgtgtggctctcggcgtgtacatcccattcccggaagacgattcaaatacagcaaaccacaatctcgaacaggtggaatacgttttcttggtgatttttactgttgagacagtgctcaagattgtggcgtacgggttggtgctgcatccaagcgcctacatccggaacggatggaatctgctagatttcatcatagtggtagtaggactcttttccgtgctgctggaacaaggaccaggtcggcccggagacgccccacacacaggcggtaaaccaggtggctttgatgtaaaggcactgcgagccttccgggtgctcaggccccttcgattggtgtcaggggtgcctagcctgcacattgtcctgaatagtataatgaaagccttggtccctttattacacattgcccttctggtcctgtttgtaatcattatctacgctattatcggtttggaactgtttttgggacggatgcacaaaacctgctattttctggggagcgatatggaggcggaagaagacccctccccatgcgcgtcctctggctcaggaagagcttgcacactgaatcaaacagaatgccggggaagatggccagggccaaacggcggaataaccaatttcgacaatttcttctttgctatgcttacagtattccagtgcgtgaccatggaagggtggacagacgtcttatactggatgcaggacgccatgggatatgagttgccctgggtttactttgtgtctctcgtgatcttcggttctttcttcgtgttgaacctggttctgggggttctgtctggggagtttagtaaagaacgtgaaaaggcgaaggccaggggggatttccagaagcagcgggagaagcagcagatggaggaagacttaagagggtaccttgactggatcactcaggctgaagagttggatatggaggaccctagtgcagacgataacttgggcccacagttagccgaattgacgaacagaaggaggggcagacttcgatggttcagccacagtacccggtccacccattctacatcctcgcatgcaagcctgccagcaagcgacacagggtccatgaccgaaacacagggcgacgaagatgaggaggaaggcgccctggccagttgtactaggtgtctaaataagatcatgaagaccagggtgtgccggcgactcaggcgggccaatcgagtgctcagggccagatgccggagagcagtaaagagcaacgcctgctattgggctgtgttgctgctcgtgttcctgaacacacttacgatagcatccgagcaccacggccagcctgtgtggctcactcagatccaggagtacgcaaataaggtcctgctgtgtcttttcaccgtggagatgctgttaaaactgtatgggctcggcccgtccgcctatgtgagtagcttttttaatcgcttcgactgtttcgtggtatgtggcggaatcctagagacaacactggtcgaagtgggagccatgcagcccctggggatatcagtgctgaggtgcgttagactgctcagaatttttaaggttaccagacattgggcgagtctgtcgaacctggttgcaagtctcctgaacagcatgaagtccattgcatccctgctgttgctcctgttcttatttataattatcttctcgctgctcggaatgcagctgttcgggggcaagttcaacttcgaccagacacacaccaaacgctccacattcgatacattcccccaggcccttttgaccgttttccagatcttaaccggcgaagactggaacgtggttatgtatgacgggattatggcctacggggggccattttttccaggcatgctggtgtgtatatatttcatcattttgttcatctgcggaaactatatactgttgaacgtctttttagcgatcgcggtcgataacctcgcgtctggcgacgccgggaccgcaaaggacaaggggggagaaaaaagtaacgaaaaggatctgccccaggaaaacgaggggttagtccctggagtggagaaggaagaggaggagggagcccggcgtgaaggggctgacatggaagaggaggaggaagaggaagaggaagaagaagaagaggaggaggaagagggagccggaggcgtggagctcctccaggaggtggttcccaaggaaaaagtggtaccaatccctgagggttcagccttcttctgcttgtctcagactaaccctctgcgcaagggatgtcacacattgattcaccaccatgttttcaccaatctgatcctggtattcattattctctcgtcagtttccctggccgcagaggatccaatccgggctcattccttcagaaatcacatcctcgggtattttgactacgcttttacctccatatttacagtggagattctgctcaagatgacggtatttggtgcctttctgcaccgcggcagtttctgtcgctcatggttcaacatgctggacctccttgtggttagtgtctccttgatcagctttggcatacactctagtgcaatctctgtagtcaagatcctgagagtgttacgggtcctcaggccactgagagccatcaatagggccaaaggattaaaacacgtcgtgcagtgtgtttttgtggcaataagaacgatcggcaacatcatgatagtgactactcttctccagttcatgtttgcctgtatcggagtgcagcttttcaaaggcaagttctacacatgtaccgatgaagctaaacatacaccacaagaatgcaagggcagctttctcgtgtacccagacggcgacgtgagtaggcccctagtgcgcgaaaggttatgggtcaacagcgacttcaattttgataatgtcttaagcgctatgatggcactgtttacggtatcgactttcgaggggtggccagccctcttgtataaagcaattgacgcgtatgccgaagaccatggccctatctacaactaccgggtggaaattagcgttttctttatagtctatattatcattattgccttttttatgatgaacattttcgttgggttcgtaatcattaccttcagagctcagggtgagcaagagtatcagaactgcgaactggacaagaatcagcgacaatgtgtcgaatacgcattgaaagcccagcctctgaggcgttacattcctaagaatccccatcagtaccgggtctgggccacggtgaattcagcagccttcgagtatctgatgtttttgttgattttgttaaacacagtggcccttgctatgcagcactatgaacaaaccgcaccttttaactatgcaatggacatcctgaatatggtgttcactgggctctttactattgagatggtcctcaagatcattgcttttaagcctaaacactacttcaccgatgcgtggaatacttttgacgcactcattgtggtggggtctatcgtcgatatcgccgtgacagaggtaaataatggcggccatctgggtgagtcctcagaagattcatcaaggatttcaattactttctttcgtctgtttagagtgatgcgtctggtgaagctcttgagcaagggagaaggcattagaactctactctggactttcattaagagtttccaggcacttccttacgttgcgctgctcatcgcgatgattttcttcatttacgctgtgattggcatgcaaatgtttggcaaggtcgccctgcaggacggaactcagatcaatagaaacaataacttccaaacctttccacaagcagtcctgctcttatttcgctgcgccacaggagaggcctggcaagagataatgctagcatctctcccaggcaacagatgtgaccccgaatctgacttcggtccaggtgaggaattcacatgcggatcaaactttgccatcgcttattttatctcattcttcatgctgtgtgctttcctgatcatcaatcttttcgtcgcagtgataatggacaattttgattacctcactcgcgattggtctatactgggcccacatcatctggacgagttcaagcgcatctggtccgagtatgaccctggtgccaagggcagaatcaagcacctggatgtggtggcactgctaagaaggatccagccacccctcggcttcggaaagctgtgtccccatcgggtcgcatgtaagaggcttgtcgcaatgaatatgccgttaaacagcgatggaacagttactttcaacgctaccctgtttgctctagtgaggacttctttaaagatcaaaacagaaggcaatttagagcaggccaatcaggagctccggatcgtgatcaagaagatatggaagagaatgaaacagaaactgctggacgaggtaattccacccccagatgaggaggaggttacagttggcaaattctatgcaacatttctaattcaggattactttcgtaaatttcggaggagaaaggaaaagggccttctgggaaacgacgccgctcccagtacctcctcagctctgcaggccgggctccgatctcttcaagacctgggcccagaaatgaggcaggcactcacatgtgataccgaggaagaagaggaggagggccaggagggcgtggaagaagaggatgagaaggacctcgagacgaacaaggctacgatggtgtctcagccctcagctcgacgcggatccggcataagcgtctccctgccagtcggagaccgcctccctgactcgctatcgtttggtccctctgacgacgatagagggacccccacctcatctcagccgtctgtgcctcaggccggctcaaacacacacagacgaggcagtggggccctgatcttcaccattcccgaagagggcaactcccagccgaaggggactaagggccagaataaacaggatgaagacgaggaagtcccggatcgactctcttatctagacgaacaggccgggacccctccatgttccgtcctcctcccgcctcatagggcccagcgctatatggacggtcacctggttcctcggcgccgcttattgccacctacccccgcagggcgaaagccatcattcaccatccagtgcctccaacgccaaggctcctgtgaagacctgccaataccaggtacctaccatcgcggccggaactctggccccaaccgggctcagggtagctgggccaccccaccccaacgggggagactactttacgcgcccttactcctggttgaggaaggcgccgcaggcgagggatacctaggacgctcatcggggcccctgcgaacatttacctgtcttcacgtacccggtacccatagcgacccgagccacggaaagcggggaagcgccgacagtttagtggaggccgtcttaatatccgaagggctgggtttgtttgctcgggacccccgcttcgtggctttagccaagcaggagattgctgacgcatgccgcctgaccttggacgaaatggataacgcagcatccgacctgctcgcacagggcaccagttccctttactccgatgaagaatctatactctcccgctttgacgaagaagaccttggcgacgaaatggcctgcgtccacgccctgtag

SEQ ID NO: 181239 - DNA, 5739 bp, synthetic construct
  misc_feature 1..5739: note = Description of Artificial Sequence: Synthetic coding sequence
  source 1..5739: mol_type = other DNA
atgagcgagagcgagggcggcaagggcgagcggatcctgcccagcctgcagacgctcggagcctctatcgtagagtggaagcctttcgatatccttatattgctcaccattttcgccaactgcgtcgcgctaggggtctatatcccctttcctgaggatgacagtaatactgctaaccataatctggagcaggtagagtatgtttttctggttatatttactgtcgaaacagtcctgaagattgtcgcgtatggtctggtgctgcatccctcggcatacatcaggaacggctggaaccttcttgacttcatcatcgtggttgtgggcctgttttcagtgctgctggaacagggaccagggcggccaggggacgcgccacacactggagggaaacccgggggattcgacgtcaaggctctgcgggctttccgcgtgctgcgcccgttgcgccttgtgagcggagtaccctctctccatatcgtactgaactcaattatgaaagctcttgtcccactgttacatattgcactgctcgtcctgtttgtgataatcatatacgcaattatagggttggaactctttcttggtcggatgcacaagacgtgttatttcttaggctctgatatggaggcggaggaggacccatctccttgtgctagctctggcagcggtcgcgcttgcactcttaaccagaccgagtgccggggtaggtggcccggcccaaacgggggaatcactaacttcgataacttcttctttgcaatgctgacggtgttccagtgtgtaacaatggagggttggaccgatgtgctatactggatgcaagacgctatgggatatgagcttccttgggtgtacttcgtgtccctagtgatttttggctccttttttgtactgaatttagtgctgggtgtactgagcggcgagttctctaaagagcgagaaaaagccaaggcaagaggggattttcagaaacagcgcgagaagcagcagatggaggaagacctaagggggtatttggactggattacacaggcagaagagttggatatggaggacccaagcgcagacgataatttaggctccatggctgaggaggggcgggccgggcaccgtccccagctggccgaattaacgaaccgccggaggggtcggctcagatggttcagtcactccacgcgtagcacacactcgacttcatctcatgccagccttcccgccagtgacacaggaagcatgaccgagactcagggggatgaagatgaggaggagggcgctttggccagttgcactcgttgtctcaacaagattatgaagactcgggtgtgccgccgcctacgtagggccaaccgcgttctcagagctcgctgccgccgagcagttaagtcaaatgcctgctactgggctgtcctgctcttggtgttcctcaacactctgaccatcgcttctgaacaccacggacagcccgtttggcttactcagatccaggagtatgcaaacaaagtactcctgtgtctctttacagtcgaaatgctccttaagctgtatggcctgggaccatctgcttacgtctcaagcttctttaatcgttttgactgttttgtagtatgcggtggaattttagagaccaccctcgttgaggtcggggccatgcagccactgggtatttcagtgctgcgctgtgttaggttgctccggattttcaaggtgacccgccattgggccagcctttctaatttggtcgcatccctgcttaatagtatgaaaagcatagcgtccctgctgctgctgttgttcctcttcataatcatcttcagcctacttggcatgcagctgtttgggggcaaatttaacttcgaccaaacgcacactaagagatccacattcgacacattcccacaggcgctgctgacagtgtttcagattctgactggcgaggactggaacgttgtgatgtacgatgggataatggcttatggaggccccttctttcccgggatgctagtctgcatttactttatcattcttttcatatgtgggaactatatactcctgaacgtttttctcgcaatcgcggtcgacaatctcgcgagcggggacgccggaacagctaaagacaaaggaggggaaaagtccaatgagaaagacttaccacaggagaatgagggactcgtccctggtgttgaaaaggaggaagaggagggcgctcgacgcgaaggtgccgatatggaggaggaggaagaggaggaagaagaggaagaggaggaggaagaagaggaaggagccgggggtgtcgagctattgcaggaagtggtccccaaggaaaaggtggttcctattcccgagggttccgctttcttctgcttatctcagaccaatccgcttcggaaagggtgtcacacactgattcatcatcatgtgtttaccaacttgatcttggtatttatcatcctctccagtgtctccctcgccgccgaagatcctattagagcacacagcttcaggaatcacatactcggatacttcgactacgcatttacgagtatctttaccgtcgagatcttgttaaaaatgacagtgtttggtgccttcctgcacaggggcagtttctgtagatcttggttcaatatgctcgatctacttgtggtcagcgtcagcttgataagcttcggcatacatagttctgctatctcagttgttaaaatcctccgggtgcttagggtactccgccccctgagggccatcaaccgggccaaggggctcaagcatgttgtccagtgtgtgttcgtggcaatccggaccatcggcaatatcatgattgtgaccaccttgctacagttcatgttcgcatgtattggtgtgcagctgtttaaaggcaaattttatacctgcacagacgaggcaaaacatacaccccaggagtgtaaaggaagctttctcgtttatccagatggcgatgtgtcacggcctctggttagggaaaggctgtgggtaaatagcgacttcaatttcgataatgtactaagcgcaatgatggccctctttaccgtcagcacgtttgaaggctggccagctctgttatataaggcgatcgatgcctacgccgaggaccacggccctatctacaattacagagtcgagattagtgtattcttcatcgtgtatatcatcatcatcgctttcttcatgatgaatatcttcgtcggtttcgtgattatcacattccgggcccagggcgagcaggagtaccagaattgcgagctggacaagaaccagagacagtgcgtcgaatacgccttaaaagcccagcccctcaggcgctacattcctaaaaacccacaccaatatcgagtatgggccactgttaatagtgctgctttcgaatatttaatgtttctgttaatccttttaaacactgttgccttggccatgcagcactacgaacaaaccgcgccattcaactatgcaatggacattctgaatatggtcttcacaggactttttacaatagaaatggtgcttaaaattatagcgtttaagccgaagcattacttcaccgacgcctggaacactttcgatgcccttatcgttgtaggcagcatcgtagacattgcagtcacagaggtgaacaacggaggtcatctcggcgagtcctcagaggactccagcagaatctctatcacattcttcaggctattccgggtgatgcgcctggtgaaattgctctcaaaaggggaagggatacggaccctcttatggacgttcatcaaatcttttcaggcactcccatacgttgctctactcatcgccatgatctttttcatttacgccgttattgggatgcaaatgtttgggaaagtggctctgcaggatgggacgcagattaacaggaacaataactttcagacatttccccaggctgtgttacttctcttcagatgcgccaccggggaagcctggcaggagataatgttggcctcactgcctgggaataggtgcgatcctgaatccgactttgggcccggtgaagaattcacctgtgggtcaaacttcgccattgcctactttatttcattcttcatgctgtgcgcattcttaatcataaatctttttgtcgccgtgatcatggacaactttgattatctcacacgggattggagtattttaggtccccaccacttggatgaattcaagcgaatttggtctgaatacgatcccggggcaaagggacgcatcaagcacctagacgtcgtggctctgctacgaaggatccagcctcccctcggtttcggtaagctgtgtccccatcgggtggcatgtaaaaggctggtcgccatgaacatgccactaaactccgacggaactgtcacatttaatgcaactctgttcgccctggttagaacgtcgctaaagattaaaaccgaaggaaatctcgagcaggccaatcaggagcttagaattgttataaagaaaatttggaagagaatgaaacaaaagctgctcgacgaggtgatcccaccccctgatgaggaagaggtgactgtaggcaagttttatgctactttcctaatccaggactatttcaggaagtttcgacggaggaaagagaaggggcttctaggaaatgatgccgctcctagcacgtcaagcgctctgcaggctggtctgaggagcctgcaagacttgggtcctgaaatgcgtcaggctctcacctgtgataccgaagaagaagaagaggaaggtcaagaaggcgttgaagaagaggatgaaaaagatttggaaacaaataaggctaccatggttagccagccttccgctagaagaggctccgggatttctgtatccctacctgttggcgacaggctgcccgactccttgtcctttggtccgagcgatgacgatcggggcacgccgaccagcagtcagccctccgttccacaggccgggtccaacacgcaccgacgggggagtggtgctctgattttcaccatcccggaagagggaaactcccagccaaagggcaccaaagggcagaataagcaggacgaggatgaggaggtacctgaccgcctttcgtacctggatgagcaagcggggactcctccctgtagcgtattgctgcctcctcaccgggcacagagatatatggatggacacctggtgccccggcgaaggctactgcctcctacccccgctgggcggaagccctccttcacaattcaatgtcttcaaagacaaggcagctgcgaagacctgcctattcctggcacataccaccggggtcgaaattcaggtccgaatagagcccaagggagctgggctacccctccccaaaggggtcggttgctctacgcacctctgctgttagtcgaggagggcgctgccggggaagggtatctggggcggtcctcaggccctctgcggacatttacctgcctccatgtgcccggaacgcacagtgatcccagtcacggcaaaagaggatctgctgacagccttgtagaggcagtcctgatcagcgaaggtctgggtctctttgcccgcgatccacgcttcgtggccctcgcgaaacaggagattgccgacgcctgccggctgacattggatgaaatggacaatgcagcatcagacctcctggcccaaggaacatcctctttgtactctgacgaagagagtatcctgtcccggtttgacgaggaggatctgggcgatgaaatggcttgtgttcacgccctgtag

SEQ ID NO: 181240 - DNA, 5934 bp, synthetic construct
  misc_feature 1..5934: note = Description of Artificial Sequence: Synthetic coding sequence
  source 1..5934: mol_type = other DNA
atgagcgagagcgagggcggcaaggacaccacccccgagcccagccctgccaacggcgcaggccccggccccgagtggggactgtgccccgggccccccgcagtggaaggagagagctctggtgcgagtggcctaggcactcctaaacgccgtaaccagcactcaaagcacaaaacagtcgctgtggcctcagcgcagcggtcaccgcgagccctgttttgcctgacactcgccaatcccttgagaagatcctgcatctccattgtcgagtggaaaccttttgatattctgatactcctgaccatctttgctaactgcgtcgccctgggggtctacattccattcccagaggacgattctaataccgcaaaccataacctggagcaggtcgagtatgttttcctggtaatttttaccgttgagactgtgttaaaaatcgtggcctatgggctcgtgctacatcctagtgcttacattaggaatgggtggaatctcctggacttcatcatcgtggtcgtggggctgttctccgtactccttgagcaagggcccggaagacccggcgatgccccacacaccggcggcaagcctggagggtttgacgtaaaggccttgagggcattcagggtgctcaggcccctgaggctggtctccggtgtgcctagcctgcacattgtcctcaatagcatcatgaaggctttggtccccctgctgcacattgccctgttggttttgttcgttataattatctacgccattataggacttgagcttttcctgggtcgaatgcacaagacgtgctactttctgggaagtgacatggaggcagaggaggacccgagtccgtgtgcctcaagcggcagcgggagagcctgtactctgaatcagacagaatgtcgggggcggtggcccggccctaatggtggaattacgaattttgacaattttttctttgctatgctcactgtttttcagtgcgtgacaatggaaggatggaccgacgtactgtattggatgcaggacgctatgggctacgaactgccgtgggtctatttcgtatctttagtgatcttcggatccttctttgtgctcaacctggtcctgggcgtcctgtctggcgaattcagtaaagaaagagaaaaagccaaggcaaggggtgactttcagaagcagagggagaagcagcaaatggaagaagacctccggggctatctggactggattacccaggctgaggaactggacatggaggatccatctgcggatgacaacctcgggtctatggccgaggagggccgcgctggacaccgtcctcagctggccgaactcactaatcggagacgcggccgtcttagatggttctcccattctacccgctctacacatagcactagttcacacgcctccttgcccgcatccgacacaggatctatgaccgagacccagggtgacgaggacgaagaggaaggcgcacttgcctcgtgcactcgctgtctcaacaaaatcatgaaaacacgggtctgtcgccgactgagacgtgctaacagggtgctccgggcacgctgccgaagggctgtgaagtccaacgcgtgctattgggcggtgctgctactggtttttctaaacaccctaactattgcttctgagcatcatggccaacctgtatggctcacacagatccaagagtatgcaaataaagtgctgctctgtttgttcacagtcgaaatgctgcttaaactttatggtttgggtccttcggcttatgtgtcctccttcttcaacaggttcgactgtttcgtggtgtgtggggggatcctggaaaccacgctcgtagaagtgggtgcaatgcagccccttggcatttccgtactgagatgcgtcaggctcctgcgcatattcaaagtaacgcgtcactgggccagcctctccaatctcgttgcatctctcctgaactctatgaaaagcatcgcctcactgctgttacttctctttctgttcataatcatcttttccttgctgggcatgcagctgtttggcggcaaatttaatttcgatcaaacacataccaagcgatccaccttcgatactttccctcaggctctgctaacagtctttcagatcctgaccggggaggactggaacgtggtaatgtatgatggtatcatggcgtatggagggccattttttccaggaatgctggtatgcatttacttcatcatcctgttcatttgtggaaattatatcctgctgaatgtgttcctcgccatcgccgtggacaacttggccagcggagatgccggcactgccaaagataaggggggtgaaaagtccaacgagaaagacctgccacaagaaaacgagggattggtgccaggtgtcgagaaagaagaagaggagggagctagaagggagggcgctgacatggaagaagaagaggaagaggaggaggaggaggaggaggaggaagaagaggagggcgctggaggggtggaattgctgcaggaggtcgtgccaaaagagaaggtggtgcctatccctgaaggcagcgcctttttctgtctcagtcagacaaatccccttcgcaaagggtgtcatacactgatccaccaccatgtgttcaccaacttaatactcgtattcattattctgtctagtgtgtctctcgcggctgaagaccctatcagggcacactcttttcggaaccacattctcggatactttgactatgcctttactagcatatttacggtggagatactgttgaagatgaccgtcttcggggctttcctgcataggggtagtttttgtagaagctggttcaatatgctggaccttctggttgtctcagtgagtctgatttcttttgggatacatagtagcgcaatcagtgtggtgaagattctgagggtgctgcgcgtgctccggccgctccgggccatcaatagagccaaggggcttaaacatgtagtgcagtgcgtgttcgtggctattagaactattgggaacataatgatcgtgacgacactgctgcagtttatgttcgcctgcataggggtgcagctgttcaagggtaagttttacacatgcaccgacgaggccaaacatactccacaggaatgtaagggtagctttttggtgtaccccgacggggatgtgagcagaccactggttcgtgaacggttgtgggtcaactctgatttcaacttcgacaacgtccttagcgcgatgatggctctgtttactgtaagcaccttcgaggggtggcccgcgctgctgtacaaggccatagatgcttacgctgaagaccacggtccaatttacaattatcgggtggaaattagcgtgttctttatcgtttacattattattatcgcgtttttcatgatgaatatctttgtcggatttgtaattataacctttcgggcccaaggtgagcaggagtaccaaaactgtgagcttgataagaaccagagacagtgcgtggagtacgcactgaaagcccagccactccgtcggtatattcccaaaaaccctcaccagtaccgcgtgtgggccactgttaactcagcagcattcgaatacttaatgtttctcttgatactgctgaatacagtagctctggcaatgcagcactatgagcaaaccgccccctttaactatgctatggatatcctcaatatggttttcactggtctgtttacgatagaaatggtgctgaagatcattgcctttaagcctaagcactattttaccgacgcatggaacacttttgacgctttgattgttgtggggagtatcgttgatattgctgtcactgaggtgaacaacgggggacatttaggagaatctagcgaggattcctcccggatttctatcacatttttccgcttgtttcgagtcatgagattggttaagctgttatcaaagggggaagggatacggacactgctgtggacatttatcaagtcatttcaggcccttccttacgtggcgttgctaattgccatgatattctttatctatgccgtgatcggtatgcagatgttcggtaaagtcgccctccaggacggcacccagatcaaccggaacaacaactttcaaacatttcctcaggccgtcttgctgctctttcggtgcgccaccggggaggcctggcaggagatcatgctggcctctttgcccggcaaccgttgcgaccctgagtccgactttggtccaggagaggagtttacgtgcggatccaatttcgccatagcctacttcataagcttcttcatgctgtgcgcttttttgatcataaatctctttgtcgccgtgatcatggataattttgattatctgactagggattggtctatattaggaccgcatcacctcgacgagttcaagcgcatttggagtgagtacgatccaggggcaaaggggcgtatcaagcatttggacgtggtggcgttattgcggagaatccagccccccctgggcttcggcaaactgtgcccgcaccgggtagcgtgtaagcgcctagtggccatgaatatgcctttaaactcagacggaacggtgacatttaatgctaccctgttcgccttggtgaggacctctttaaagatcaagacagaaggtaaccttgaacaagcaaaccaagagctgagaatcgtgataaaaaagatttggaagcgcatgaagcagaaactgctcgatgaagtcatcccacctccggacgaggaagaggttactgtggggaagttttatgcgactttcttaatccaagactactttcgtaaattccgtcgtagaaaagaaaaaggactgttagggaatgacgccgcgccaagtaccagttcagcactgcaggcagggcttcgatctctccaggacctcggaccggagatgaggcaggcgctcacctgtgacacggaggaggaggaggaggaaggtcaggaaggtgttgaggaagaagacgaaaaggacctcgaaaccaataaggccaccatggtgtcccagccttcagctcggcgaggctccggaattagcgtgagcctcccagtgggggatcgcttgcccgactccctcagctttggtccctccgacgatgacagaggcacaccaacatcatctcagccttctgtgccacaggctggatcaaacacccatcggaggggaagtggggctttgatattcaccattcctgaagaagggaatagccagcctaagggaacaaaaggccagaacaagcaggatgaagatgaggaggttcccgaccggctgagttatttagatgagcaagcgggcactcctccgtgctctgtcctgctccccccacatcgggcccagaggtacatggatggacacttggtgccgcggaggaggctcctacctcccactcctgctggtagaaaacccagtttcacaattcagtgtctgcagcgccagggctcttgtgaagacctgcccatcccagggacctaccaccgcggcaggaactccggtcccaatcgtgcacaaggatcctgggcaacaccgcctcagagagggcggctgttgtacgccccactcctgctggtggaagagggagctgccggggagggttacctgggtagatcttccgggccactaaggacatttacctgtctccacgtgccgggtactcactccgatccatcccatggcaagagaggctccgctgacagtctagtcgaagcggtcttaataagtgagggacttggattgtttgctagagacccgcgattcgtcgccctggctaaacaggagatagccgatgcatgccggctgacactggacgaaatggataacgccgccagtgacctactggctcagggcacaagcagcctctattcagacgaggaatcaatattaagtcgattcgatgaggaggacctgggagatgaaatggcctgtgtccatgctttgtag

SEQ ID NO: 181241 - DNA, 5622 bp, synthetic construct
  misc_feature 1..5622: note = Description of Artificial Sequence: Synthetic coding sequence
  source 1..5622: mol_type = other DNA
atggagcccagcagcccccaggacgagggcctgcggaagaagcagccaaagaaacctgtaccagagatcctgccccgaccacccagggctctcttctgtctcaccttggaaaaccctcttcgcaaagcctgcatcagcatagtggagtggaagcccttcgaaacaatcatcctgttaaccattttcgccaactgtgtcgcactggccgtgtacctgccgatgccagaagacgataacaattcactgaacctaggactagagaaactggaatattttttccttatcgtgttctccatcgaggccgcgatgaagattattgcatatgggtttctcttccaccaagacgcctatcttcggtcagggtggaacgttctggatttcactatcgtgttcctgggagttttcactgttatcctcgagcaagtcaacgtgattcagtcacatactgctccgatgtccagtaagggggccgggcttgacgtaaaggctctgcgcgcctttcgagtgctgagacctctgcgattggtcagtggtgtgcctagtttgcaagtggttttaaacagtatcttcaaggctatgctgccattgtttcacattgctctgctggttctttttatggtgattatatacgccattattgggctggaactctttaaaggaaaaatgcacaaaacctgctacttcatcggcaccgatatcgtggctacagtcgagaatgaagagccctcaccatgcgcccgtacgggcagcggccggcggtgcactatcaacggctcagagtgccgcggcggatggcctgggcccaatcatgggattactcacttcgataatttcggttttagcatgttaacggtgtaccagtgtatcaccatggaaggctggaccgacgtcctgtactgggtgaacgatgcaatcgggaatgagtggccatggatttactttgtgacattaatactactgggctcgttcttcattctgaacctggttctgggcgtgctgtcaggggaatttaccaaagaaagagaaaaggctaagagtagaggtactttccaaaagctgagagagaaacagcagctggacgaagacttaagaggctatatgtcctggatcacacagggcgaggtgatggacgtggaggactttcgagagggcaaactgagtctcgacgaggggggcagtgataccgagtctctgtacgaaattgccgggctgaacaaaattattcagtttataagacactggcgccagtggaaccgaattttccgatggaagtgccatgacatagtgaagagcaaagtgttttattggctagtcattctgatcgtggcccttaacacactgtcaatcgcgagcgagcaccataaccaacccctttggctgaccagactgcaggatattgcgaaccgggtgctgctctctctcttcacaacagagatgctgatgaagatgtacgggctcggcctgaggcaatatttcatgtccatttttaacagatttgactgcttcgttgtgtgtagcggcatcctcgagatactcctggtcgaaagtggtgccatgacccccctgggcatctctgtcctgagatgtatcaggctcctgcggatttttaagatcacaaagtactggacatcgctgtccaacctagtggctagcctgttgaattctatccgcagcattgcatcccttttgctgctactgtttttgtttatagtcatttttgcactcctggggatgcaactattcggcggtcggtacgacttcgaggacacagaagtgaggagaagcaactttgacaactttcctcaagcactaatttctgtctttcaagtcctgaccggcgaggattggacaagtatgatgtacaatgggatcatggcttatggggggcccagctaccctggcatgctggtgtgcatctacttcatcattctcttcgtgtgtgggaattacatcctgctaaatgtgtttcttgcgatagcagtcgacaacctcgccgaagctgagagcctaacttctgcgcagaaagccaaggccgaggagaaaaagcgcaggaaaatgtctaagggactccctgacaaatctgaagaagagaagagcacgatggccaagaagctggagcaaaagcccaagggagaggggatccccacaaccgctaaattgaaaatcgacgaattcgaatcaaacgtaaacgaggtgaaagatccctacccttctgccgattttcctggggatgacgaagaggacgagccagaaatcccactgtcaccacgcccacggcccctggctgaactacagctgaaagaaaaggctgttccaatacctgaggcttcttccttctttatctttagcccgaccaacaagatacgggtgctgtgtcatcgaatcgtcaatgcaacgtggttcaccaattttatactcctgtttatcctgttatctagcgccgccctcgccgccgaagatcccatcagagcagactctatgaggaatcagatcttgaagcacttcgatattggattcacatcagtatttacggtagaaattgtgctaaagatgactacttacggcgccttcctccataaaggatcattctgtcgaaattactttaacatgctcgaccttctggtagtggctgttagtctgatttctatgggcctggaatcctctgccatctcggttgtgaagattctgcgtgttttgagagtgttgaggccactccgggctatcaatcgggccaagggactgaaacatgtggtacagtgcatgttcgtggcaatcagcaccatcgggaacatcgtcctcgttacgacattactgcagtttatgtttgcctgtataggcgttcagttatttaagggaaagtttttccgatgcaccgatctctccaagatgactgaggaggaatgcaggggttattactacgtctacaaggacggggatcccatgcagatcgaactgcgacaccgtgagtgggtccatagtgattttcacttcgataatgtgttaagcgcaatgatgagccttttcacggtgtcaacctttgagggctggccacaacttttgtataaagcaattgattccaacgccgaggatgtagggcctatttacaataaccgcgtggaaatggcaatatttttcatcatttacatcattttgattgccttttttatgatgaatatttttgtgggatttgtcattgtcacctttcaggagcagggggagacagagtataaaaactgtgagctggataaaaaccagcgccagtgcgtccagtatgcgcttaaagctcgaccactgagatgctatattcctaagaacccttatcagtatcaggtttggtacatcgtgacaagctcatactttgaatacctgatgttcgctctgatcatgctgaatacaatttgtctaggaatgcagcactacaatcaatcagaacaaatgaatcacatctccgacattctgaatgtggccttcacgattattttcacgctggagatgatactaaaactcatggctttcaaagctaggggctacttcggggacccttggaatgtgttcgactttcttattgtgattgggagcattattgatgtaatcttgagcgaaatcgatacattcctagcttctagcgggggcctgtactgtcttggaggtgggtgcgggaatgttgatcccgatgagtccgccagaatcagttctgccttctttaggctctttcgcgttatgagacttatcaaactcctgagccgcgcggaaggcgtaaggacactcctgtggaccttcataaagagctttcaagccctgccctatgttgcgctgttgatagtcatgctctttttcatttacgctgtaattggaatgcagatgtttggaaaaatagcattagtggacgggacacagatcaacagaaataataatttccagactttccctcaagcagttttattgttattcagatgcgccactggagaggcctggcaggaaattcttctcgcctgttcttacgggaaactctgtgatcccgagtccgactatgcacctggagaggagtatacttgtgggacaaattttgcttattactactttatcagcttctacatgttatgcgcctttctggtcattaatctctttgtcgccgtgatcatggacaatttcgattatcttacgagagactggtccatactcggacctcatcacttagatgagttcaaagcgatctgggctgaatacgatccagaagccaaggggaggattaaacacctcgacgtcgtgacattactaaggcgcatccagccccccctgggctttggcaagttttgtccccatcgtgtagcatgtaagaggttagtgggaatgaacatgcccctgaacagtgacggcacagtgacgttcaacgccacactgttcgcgctggtgcggaccgctctgaaaattaagactgagggcaacttcgagcaggctaatgaggaactgagagctattataaagaagatctggaaacggacatcaatgaagttgctcgaccaggtgattccccctattggtgatgacgaggtgacggtgggcaagttttatgctacttttttgattcaggaacacttccggaaattcatgaaacgccaggaagaatattacggatacaggcctaagaaggatatagtgcagattcaggccggtttacgaaccattgaggaagaagcagctcccgaaatttgtcgcaccgtgagcggggatctggctgctgaggaagagctcgaaagagccatggtggaggcagctatggaagagggcatcttccggcgcacgggcgggcttttcggacaggttgacaacttcttggaaaggacgaattcgctgcccccagttatggctaaccagaggccactccaattcgcagagatcgagatggaagagatggagtcaccagttttcttagaggacttcccacaagatcctcggaccaaccccctcgcccgggccaacaccaataatgccaatgccaatgtagcttacgggaatagtaatcacagtaatagtcatgtgttctcttccgttcactatgagagggagtttcctgaagagaccgaaacaccggccacacgaggccgtgccctggggcagccatgtcgcgttcttggaccacactctaagccctgcgtggagatgttgaaaggactcctgacacagagagccatgcctcgtgggcaggctccaccagccccctgccagtgcccccgagttgagagttctatgccagaggatcgaaagtcctccactcctggctctctccatgaagagaccccccactccaggtcaactcgcgagaacacttcccggtgctccgcccctgccacagcactcttgattcagaaagcgctcgtgaggggcgggctagggactctggcagcagacgccaattttatcatggctaccgggcaggctttggccgatgcctgccagatggagccggaggaggtcgaaattatggccaccgagctcttaaagggacgggaggcgcccgagggaatggccagttcccttggctgcctgaacctcggttcctctctggggtcgctggaccagcaccaaggtagccaagaaacactcattccacccaggctgtag

SEQ ID NO: 181242 - DNA, 5565 bp, synthetic construct
  misc_feature 1..5565: note = Description of Artificial Sequence: Synthetic coding sequence
  source 1..5565: mol_type = other DNA
atggagcccagcagcccccaggacgagggcctgcggaagaagcagcctaaaaagccagtgcctgaaatccttcctcggccaccaagagcccttttctgtctcactctcgagaaccctctgcggaaagcgtgcatatcaattgtagagtggaaaccattcgagactataatccttctgactatttttgccaactgtgtggccctggctgtctatctgccaatgccggaagatgacaacaactctctgaatttaggactcgagaagttggaatatttctttctgattgtatttagtattgaggctgccatgaaaattattgcttatggctttctgttccatcaagatgcttatctcagatctggatggaatgtattagacttcaccattgtgttcctgggagtgttcactgtgattctcgagcaggtcaacgttatccagtctcataccgcacctatgagcagtaaaggcgccgggctcgacgtaaaggctctcagggccttccgggtgctaaggcctctgaggctggtgtctggtgtcccgagtcttcaggtggtcctgaattcaatatttaaggcaatgctccctctgttccatatcgctcttctggtgctgttcatggtcataatctacgctattatcggattagagctgtttaaagggaagatgcacaagacttgctatttcatcggaaccgacatcgtggccactgtagagaatgaagagccaagcccgtgcgcacgcacaggaagtggtagacggtgcacaataaacggttctgaatgccggggtggctggccaggccccaatcatggcattactcactttgacaacttcggcttctcaatgctgacagtctaccagtgtattaccatggaagggtggaccgacgtgctctactgggtgaacgatgcaattggaaacgagtggccttggatttattttgtgacactcatcctgctggggagctttttcatactgaacctcgtccttggagtcctaagtggcgagtttacaaaggagagggaaaaggcgaaatcccggggtacattccagaaactgcgtgaaaagcagcaactcgacgaggacctgagagggtacatgtcatggattacccagggggaggtgatggatgtggaggacttccgcgaggggaaactgtccctcgatgagggaggctccgacacggaatcactgtacgagatcgcaggtctcaacaaaattatccagttcatccggcattggagacagtggaatcgcattttcaggtggaagtgtcacgacatcgtcaagagtaaggttttttactggctggtcattctcatcgtcgctctgaacaccctgtccatagcatctgagcaccacaatcagcctctgtggctgactcggcttcaggatatcgcgaaccgggttctgctctcccttttcaccactgagatgctgatgaaaatgtatgggctagggctacggcaatatttcatgagtatcttcaacaggtttgattgttttgttgtatgctccggcatcctcgaaattctgcttgtggagagtggagccatgactccgctcggcattagcgtgctaaggtgtattcggctgctgcgcatctttaaaatcacgaaatattggacgtccctcagcaatctggtggcctcacttctgaacagtattagaagtatcgccagcctgctgctcctgctgtttctatttatcgtgatcttcgcccttctagggatgcaactctttggcggaagatatgatttcgaggacacggaagtgcgcaggtccaattttgacaattttccccaggcccttatttccgtgtttcaggttctcacgggagaggactggaccagtatgatgtacaacggcatcatggcgtacgggggacccagctacccgggtatgctggtttgtatttacttcattattttgttcgtatgcggaaactacattttgctgaatgtgtttctggcaatcgcggtggataatctcgcggaggcagagtccctcacatctgcccagaaggccaaagccgaagagaagaaaagacggaaaatgtctaaaggtctccctgataagtcggaagaggagaaatctacaatggccaagaaattagagcagaaacctaaaggggaaggcatcccaaccacagccaaacttaagatcgatgaattcgaatcgaacgtgaatgaggtaaaggacccttatccatcagccgactttccaggcgacgacgaggaggatgagcccgagatcccgttgtcccccaggccccggcctttagccgaattgcagctcaaggaaaaagccgtgccaattcccgaggcctcatctttcttcattttttcaccaactaacaaaatcagagtactgtgccatagaatcgttaatgctacttggtttaccaatttcatacttctctttatcctgttaagctcagcagcactcgccgctgaggatcctattagagccgatagcatgcggaatcagattttgaaacacttcgatatcggattcacatccgtctttactgttgaaatcgtgctgaagatgacaacatatggcgcctttctgcacaagggttccttctgcagaaattacttcaatatgctggatctgctggtggtggctgtaagcttaatttctatgggattggaatcgtccgccatcagcgttgtgaagattctgcgcgttctgcgggttctcaggccactgcgagctatcaacagagccaaggggctgaagcacgtagtccagtgtatgttcgtcgccatttctaccattgggaatatcgtcctcgtcaccacactgttacaatttatgttcgcttgtatcggtgtccagctgttcaaaggtaaattttttagatgtaccgatctctcaaagatgacagaggaagaatgtaggggttattactatgtgtataaagatggcgaccctatgcagatcgagttaaggcatagggagtgggttcacagtgattttcattttgataatgtgctttctgctatgatgagcctgttcaccgtctccacatttgaggggtggcctcagcttctgtataaagccatcgacagtaatgccgaagatgtgggcccaatttataacaacagagttgaaatggccatattctttatcatatacatcatcctgattgccttttttatgatgaatatcttcgtgggcttcgttatcgtaacattccaggagcagggcgaaaccgaatataagaattgtgagcttgacaagaatcagagacagtgcgtccagtatgctctgaaagccaggccacttcgctgctatattcccaagaacccttaccagtaccaggtgtggtatattgtcacaagtagctatttcgagtacctcatgttcgccctaataatgctaaacacaatctgcctcggaatgcaacactacaaccagagcgaacagatgaaccacattagtgatatccttaatgtggctttcaccatcatctttaccctggagatgatcctgaaactcatggcattcaaggcccgtggctacttcggtgatccttggaatgttttcgacttcttgatcgtaataggctcgatcatcgatgtcatactctcagagattgatgaccctgacgaaagcgctcggatctcgtcagcgttctttaggctctttcgagtgatgcgcctgatcaaactcttaagtcgcgcagagggggtgaggactctcttgtggacattcattaagagtttccaagccctgccttatgtggcgctgcttatcgtgatgttgtttttcatttacgccgttattggtatgcaaatgtttgggaagatcgccctggtggacggaacgcagatcaatcggaataataacttccagaccttcccacaggcagtgttgcttctgtttcgctgtgccactggcgaggcctggcaggaaatcctcctggcttgctcttatgggaaactatgcgatcccgaatccgactacgcacccggcgaagaatatacctgcggcacaaactttgcctattactactttatttctttttacatgctgtgtgcttttctcgtgatcaacttgtttgtcgctgtaatcatggataactttgactacctgactagagattggtcaatcttaggcccccatcacctggatgaatttaaggcgatctgggctgagtacgatcctgaggcaaagggccggatcaagcacctggacgtggtgaccctcctccgcaggatccagccacctctcggttttggcaaattctgtccacatagggtggcatgcaaacgcctggtcggtatgaacatgccactcaactccgatggcaccgtaaccttcaacgcgaccctctttgctctggtacgaaccgcccttaagatcaagacagaggggaacttcgaacaggctaacgaggaactgcgagcaattataaaaaagatttggaagcggacatctatgaagcttctagaccaggtaattcctccaattggtgacgatgaagtgacagtaggtaagttctatgccacatttttgatacaggaacacttcagaaagttcatgaagagacaggaggagtactacgggtaccgaccaaaaaaggacattgtccaaatccaggctggacttagaacgatcgaagaggaagccgcaccagagatctgccgaactgtctctggcgacctggccgccgaggaggagttagaaagagctatggtcgaggccgctatggaagaggggatttttaggaggaccggtggactttttggtcaggtcgataactttctagagagaaccaattccctgcctccggtgatggctaatcagaggccactgcagttcgctgaaatagagatggaagagatggagtcgccagtctttctggaagatttcccacaagacccccgaaccaatcctctggcccgggccaacacgaataacgcgaacgccaacgtagcctatggcaatagcaaccactctaactctcatgttttcagtagcgtgcactacgagagggagtttcctgaagagaccgagacgccggccacacgtgggagggctctaggacagccctgccgcgtactgggtcctcacagtaagccttgtgttgagatgctcaaagggctccttacccagagagcaatgccaagaggacaggcaccccccgccccctgtcagtgtcctcgggtggaatcttctatgccagaagaccgcaaatcctccactccgggctccctgcatgaagagacccctcattccaggagcacacgggaaaacacttctcgatgttccgcccctgccactgccctactgatccagaaagctctcgtccgcggcgggctgggtacccttgccgccgacgcaaatttcattatggcgacagggcaggccctggccgacgcttgtcagatggagcctgaggaagtggagatcatggctacggaacttctgaaggggcgcgaagcacctgagggcatggctagctccctcggctgcttaaatctggggagtagcctgggaagtctagaccaacaccaggggagccaggagaccctgattccacctcgcctgtag

SEQ ID NO: 181243 - DNA, 4602 bp, synthetic construct
  misc_feature 1..4602: note = Description of Artificial Sequence: Synthetic coding sequence
  source 1..4602: mol_type = other DNA
atgaagacccacctggaccggcccctggtggtggagctgggccgggacggagctaggggaccagtgggaggtaaagcgcggcctgaagctgccgaagctcctgagggtgtcgatcctccccgacggcaccatcgacaccgtgataaagataaaactcccgccgccggcgaccaggaccgtgcagaagctcctaaagccgagagcggggagccaggcgccagggaagaacgccctaggccacacagaagtcacagcaaggaggcagctggccccccggaggcacgcagcgaacgcggcagaggccccgggccagagggtggccgccggcaccatagaaggggctctcccgaggaggccgccgagcgggaaccgaggagacaccgcgcccaccgtcatcaggatccttctaaggaatgcgcaggtgccaagggtgaaagacgagctcggcatcggggcggccctagggccggccctcgcgaggccgagagtggggaggagcctgcccggcgccacagggcgcgacacaaagcccaacccgcacatgaggccgttgagaaagaaaccaccgaaaaagaagctactgaaaaggaggccgagatagtagaggcagacaaagagaaggagttgcggaaccaccagccccgggaacctcactgtgacctcgaaacaagtggtacagttaccgttgggcctatgcacacactgccctccacgtgcctgcagaaggtggaagagcagccagaggatgcggacaaccagcgcaatgttactcggatgggcagccagccaccggatccgaataccatagtgcatattccggtgatgctgactgggcccctgggcgaagccacggtcgtcccttctggaaatgtggatcttgaaagccaggcagaagggaaaaaggaggtggaagctgacgacgtgatgaggtcaggacccagaccaattgttccttactcttccatgttttgcctttcacccactaacctgctgcggcgcttttgccactacattgttactatgcggtactttgaggtcgtcattctcgtagtaatcgcattgtcaagcatcgcgttggctgccgaagatcccgtgaggacggacagcccccggaataacgccctaaagtatttagactatatcttcacaggtgtcttcacgttcgagatggttatcaagatgatcgacttgggactcttgttacatcccggagcttatttccgggacctgtggaacattctggattttatcgtggtgagtggtgcgcttgtggcgtttgcatttagctcctttgtgggcggctctaaagggaaagacatcaataccattaaatcactgcgggttctgcgcgtccttcggcctctcaaaactatcaagcgactgccaaaactgaaggccgtattcgattgcgtggttaacagtcttaaaaacgtgctaaacatcctcattgtctatatgctctttatgtttatttttgcagtcatcgccgtgcagctgttcaaaggaaagtttttctattgcacagacgagtccaaagagctcgaaagggactgtagagggcaatacctagattacgaaaaagaagaagtggaagctcaacctcgacagtggaaaaagtatgacttccactatgataacgtgctatgggctttgctgaccctctttacagtgtcaaccggtgaggggtggcctatggtactcaaacactcagtcgatgctacatacgaggagcaaggacctagcccagggtacaggatggaactctcaatattttacgtcgtctactttgtggtgttccctttttttttcgtcaacattttcgtggccttgatcatcattacatttcaggagcaaggcgacaaagtaatgagcgagtgttctttggagaagaacgaacgagcatgtatcgatttcgccatttcagctaagcccctcacgcggtacatgcctcaaaatcgacagagtttccaatacaagacctggactttcgtggtgtccccccccttcgaatattttattatggccatgatcgctctcaacaccgtggtgttgatgatgaagttctatgatgccccatacgagtacgagctgatgctgaagtgcctcaacatcgtgtttactagcatgttctctatggagtgtgtcctcaaaatcattgcattcggcgttttgaattatttccgtgacgcttggaacgtattcgatttcgtcactgtgctgggcagtattaccgacatcttggtgaccgaaattgctaacaatttcatcaacttgtcattcctgaggctgtttcgcgccgcgagacttattaagctgcttcgacagggatatacaattcgcatcctgctctggaccttcgtgcaaagctttaaagctctcccttacgtttgtctcctgattgcgatgctgttcttcatctatgcaattatcggcatgcaagtttttgggaacatagctctggacgacgatacatccatcaatcggcacaacaactttaggacatttttgcaggcattgatgcttctgtttcgttcagcgacaggggaggcatggcacgaaatcatgctaagttgtctgtctaatcaggcctgtgacgagcaggctaacgcaacggaatgtgggtcagacttcgcgtatttttacttcgtgtcattcattttcctgtgcagcttcctcatgttgaatctgttcgtagccgtgattatggataattttgagtacctgacccgagacagttcaatcctcggaccccaccatctggacgaattcatcagagtctgggccgaatacgatcctgcagcatgcggacggatctcttacaatgatatgttcgagatgctcaaacacatgagccccccgctgggcctggggaagaaatgccccgcccgtgtggcctacaaacgattggtaagaatgaatatgccaatctcgaacgaggacatgacagttcactttaccagcacccttatggccctgatcaggacagcccttgagatcaaactggcacccgccgggacgaaacagcaccagtgtgatgccgagctccgaaaggagattagtgtggtctgggctaaccttccacagaaaaccctggatttgctggtgcctccacacaagcctgatgagatgaccgtagggaaagtctacgctgcgcttatgattttcgacttctacaaacaaaacaagaccacgagagaccagatgcagcaggccccaggcggtctgagccagatgggtcctgtgtccctctttcatccgctgaaagctacccttgaacaaacacagcctgctgtgttacggggtgccagggtgtttctgcgacagaaaagctctacttccctaagcaacggtggtgcaatccagaaccaggaatctggcattaaagagagcgtgagttgggggactcagcgcacccaggacgctcctcacgaggcccggcctccattggagcggggacatagtacagaaattcctgttggccggtccggagctctcgccgttgacgtgcagatgcagtcgatcacaagacgggggccagacggagaaccgcagcctgggctggagagtcaagggcgcgcggctagcatgcccaggttggctgcagagactcagccagtgacagatgcctcaccaatgaagcgaagcatttccacattggcccagcgacctcgagggactcacctgtgttccaccacccctgaccgcccacccccgtcacaggcgtcatcacaccaccaccaccatagatgccacaggcggcgcgacagaaagcagagatccctggagaagggcccgtctctgtccgctgatatggacggggctccttccagtgctgtgggaccagggctacctccgggtgaaggccccacaggatgtcgacgagagagggagcgccggcaagagaggggccgatcacaggagaggcgccaaccttccagttccagcagtgagaaacagcgattttatagttgtgatcggttcggtggaagggaacctcccaagccaaagcctagcctgtcgtcacaccctacatccccaactgctggacaggaaccagggccacatccgcagggctccggtagcgtcaatggctcaccgcttctctctactagcggagccagcactcccgggcggggcggccggcgccagttgccacagactccgctgactccccgaccatccatcacatataaaacagccaatagtagccctatccactttgcaggagctcaaacatccctgccagccttttctcccggccgactgtccaggggcctgtctgaacacaacgctcttctccaacgggatccactgtcacagcctctggcccccggtagtaggatcggatcagacccatatcttggccagcggttagatagtgaggcctccgtacatgctctcccagaagacaccttgactttcgaggaagccgttgcgactaactccggtcgctcctcaaggacatcatacgtcagtagcctgacaagtcagtcccacccccttcggagagtacctaatggataccattgcaccctgggcttgtcgagtggaggtcgggccaggcactcgtatcaccatcccgatcaggaccactggtgttag

SEQ ID NO: 181244 - DNA, 306 bp, synthetic construct
  misc_feature 1..306: note = Description of Artificial Sequence: Synthetic coding sequence
  source 1..306: mol_type = other DNA
gacaacctggccaacgcccaggagctgaccaaggacgaggaggagatggaagaggccgcgaatcagaaactggccctgcaaaaggcgaaggaggttgcggaagtaagcccaatgagtgccgctaatatcagcatcgctgccttcgtgaagcaggcacggggaacagtgagccggtcaagttctgtgtcctctgtcaacagtccgcgccaacaaaatagtgcaaaggcgagatccgtgtgggaacagcgcgctagtcaactcagactgcagaacctgagggcctcctgtgaggcactgtactcgtag

SEQ ID NO: 181245 - DNA, 6714 bp, synthetic construct
  misc_feature 1..6714: note = Description of Artificial Sequence: Synthetic coding sequence
  source 1..6714: mol_type = other DNA
atggtgcggttcggcgacgagctgggcggccggtacggcggccccggaggcggagagagagctaggggcggtggcgctgggggagcagggggccccggaccaggtgggctgcagcccggacaacgtgtgctctacaagcaatctatcgcccagagggcccgaaccatggctctgtacaatcccattccagtgaagcaaaactgtttcactgttaataggtcccttttcgtgtttagtgaggacaatgtggtacgcaaatatgctaaaaggatcactgagtggccaccgtttgaatatatgatcttggccactatcattgccaactgcatcgtgttagcactggagcagcacctccctgacggagacaaaacaccgatgtctgagcggttggatgacaccgagccgtatttcatcggaatcttctgctttgaggccgggatcaagattatcgcacttggcttcgtatttcataaagggtcatacctccgaaacggatggaatgtcatggactttgtcgtcgtgttgacaggcattctggcaaccgctggcacagatttcgatttgcgcacactgcgcgccgtccgcgtgctgcgcccacttaaattggtgagcggaatcccctcacttcaggtggtcttgaagtctatcatgaaagcgatggtgccgctgctgcagatcggcctgctcttgttttttgcaatcctgatgttcgcgattatcgggttggagttttatatggggaagttccacaaggcctgctttcctaacagtaccgacgccgagccggtgggtgattttccatgtggtaaggaggcacccgcgcgactgtgtgagggagataccgagtgccgagaatattggcctggtcctaactttgggataacaaacttcgataatattctgttcgcaattcttacagtcttccaatgtatcactatggaaggctggactgacatactatataataccaatgatgctgccgggaacacctggaattggttgtattttataccgctgatcataataggctctttctttatgctgaacttggtcctcggagtcctaagcggagaatttgccaaagaacgggaaagagtggaaaatcgccgggcatttttaaaactgagacgacaacagcagatcgagcgcgagctgaatggttacctggaatggattttcaaggctgaagaagtaatgttagctgaagaggatcgaaatgccgaggaaaagtcaccactggacgttctgaagagagccgcaacgaaaaaatcgcgaaatgatctgattcatgctgaggagggcgaggataggttcgccgacctctgcgccgtgggctcgccctttgcacgtgccagcctgaaaagtggcaagactgaaagttctagttattttcgcaggaaggaaaaaatgttccgctttttcatccgtcgaatggtcaaagctcaaagtttttattgggtggtgctctgcgttgtagctttaaataccttgtgtgtggctatggtacactataaccagcccagacgactcacaaccacgttatacttcgcagaatttgtgtttttaggcctcttcctcacggagatgagtcttaagatgtatgggctgggacccagatcctattttagaagttctttcaattgcttcgattttggcgtgatagtgggctccgtgtttgaggtagtgtgggccgccattaagccaggcagttcgtttggtatctctgttctccgcgccctccgtttactgcgaatattcaaagtgactaagtactggagcagtctacgaaatctggtagtgagcctcttaaattctatgaagtctattatttctttacttttcctgctgttcttgtttatcgtggtgttcgcgctgctcggcatgcagctgttcggcggacagtttaacttccaagacgaaacaccaacaactaatttcgacacattcccagctgctatcctgactgttttccaaattctgactggggaagattggaacgcagtcatgtaccatggtattgagtcccagggtggggtctctaaagggatgttttccagcttttatttcatcgtcttgacattgtttggtaattataccctgctgaacgtgttcctcgccatcgctgtggacaatctcgctaacgcccaagagctgacaaaggatgaggaggagatggaagaagcggccaatcaaaagctggcactccagaaagccaaggaagtcgcagaagtatcaccaatgagtgctgctaacatctcgatcgctgctcgacagcaaaactcggctaaggccaggagcgtgtgggagcagagagctagccaactgcggttacaaaacctaagagctagctgcgaggcgctctacagtgaaatggaccccgaggaacggcttcgcttcgccacaacaagacaccttcgccccgacatgaaaacacacttagatcggcccttggtggttgagcttggtagagacggagctcgtgggcccgtcggcggaaaagctcggcccgaggcagccgaagctcctgagggagtagaccctcccagaaggcatcaccgccatcgggacaaagacaaaactccagcagccggcgaccaagaccgcgcggaggcaccaaaggctgaaagtggcgagcctggggctagagaagaacgaccccggccccaccgctcacattccaaagaggctgccggccctcccgaggctagatccgagcgcggcaggggacccggccctgaggggggacgcaggcatcaccgaagagggtccccggaagaagctgcagagcgggagccacggcgccacagggcccaccggcatcaggatccttccaaagaatgtgccggtgctaagggtgaacgacgggcacggcacagggggggccctcgagcagggccaagagaggctgagagtggcgaggaacctgccaggcggcacagagcccgacataaagctcagcccgctcatgaagctgtggaaaaagagacaactgaaaaggaggcaaccgagaaggaggctgaaattgtcgaagccgataaagaaaaggagttgaggaatcaccagcctcgcgaacctcattgtgacctcgaaacttcaggaaccgttactgtggggcccatgcacaccctgcccagtacatgtctgcagaaggtggaggaacagcccgaagatgcagataatcaaaggaatgtgactaggatggggtcacaaccacctgacccgaacaccatagtgcatatcccagtcatgctgactgggccacttggggaggccacagtggttcctagtggtaatgttgatctagaatcacaggccgaaggaaaaaaagaagtagaagccgacgatgtgatgaggagtggaccgcgacccatcgttccttactccagtatgttttgcctatcccccaccaacttgctgcggcgattctgccactacattgtgactatgcggtattttgaggtggttatcttggttgtgatcgcactgtccagcatcgctcttgctgctgaggaccccgtgcgcacggattctccaagaaacaacgccttgaagtatctggactacatcttcactggggttttcacatttgagatggtgattaaaatgatcgacctgggcctccttctccacccaggcgcatacttccgtgatctctggaatatcctggactttatcgtcgtgtctggcgcactcgtggccttcgctttcagcgggagcaagggtaaggatatcaacaccataaaatctttgcgtgttctacgcgtgctccggcctcttaaaacgattaaacgtctaccgaaactgaaagcggtgttcgattgtgtggtcaattccctcaagaacgtgctgaatatcctaattgtctatatgctattcatgtttatattcgcagtgatcgccgttcaacttttcaaagggaaattcttttattgcacagacgagtccaaagagctggaaagggattgcagaggccagtacttggattatgagaaagaggaggtcgaagcccagccacggcagtggaaaaagtatgactttcactacgacaatgtcctgtgggcactgcttaccctgtttaccgtgtctaccggcgagggctggcccatggtgctgaagcacagtgtagatgcgacctatgaagaacagggccccagtccagggtatcgcatggaactttctattttctacgttgtctatttcgtcgtgttcccgtttttttttgtgaacattttcgttgccttaatcatcattacctttcaggaacaaggggacaaggtcatgtctgaatgcagtctagaaaagaacgaaagagcgtgtattgacttcgccatcagcgcaaaacccctgacaaggtatatgcctcaaaatcggcagagctttcaatataagacctggacctttgtcgtctctcccccttttgaatacttcattatggctatgattgcattgaacactgttgtcctgatgatgaagttctatgatgccccctatgagtatgaactaatgctcaagtgcctaaatattgtgttcacctcaatgtttagcatggagtgcgttctgaagattattgccttcggagttctgaactacttcagggacgcctggaatgttttcgacttcgttacagtactcgggtcgattacggacatcctggttacagaaatcgcagagaccaataatttcatcaacttgagcttcttgcgtctcttccgggcggcccggctgataaagttacttaggcagggctacactatacggatacttctgtggaccttcgtgcagtcattcaaagcattgccatacgtgtgtcttctgattgcaatgctgttctttatctatgccattatcggcatgcaggtcttcggtaatattgctctggacgacgacacctctatcaaccgccataataacttcagaaccttcctccaggccctgatgctgctgtttcgtagtgccacaggagaggcgtggcacgaaatcatgctgtcatgcctaagcaaccaggcctgtgacgagcaggccaacgctacagagtgcggttctgatttcgcctatttctacttcgtgagcttcattttcctttgttcttttctgatgttaaatttgttcgttgctgtgatcatggataattttgaatacttaacacgtgatagcagcatcctgggaccacaccacttggacgagtttattagagtctgggctgaatacgaccccgctgcctgcggcagaatctcctacaacgacatgtttgaaatgcttaagcacatgtcaccacctctcggcctgggtaagaaatgtcccgcacgggtagcttacaagagactggtgcgcatgaatatgccgatctctaacgaggacatgaccgtgcattttacatccaccctcatggccctcatcagaactgcactggagatcaagctggccccagctggaaccaaacagcatcagtgcgatgccgaacttcgtaaagaaatttcagtggtgtgggcgaatctcccccagaaaactttggatctcctggtgcctcctcacaaaccagatgagatgacggtgggaaaggtgtacgctgctctgatgatattcgatttctacaaacagaataaaacaactagggatcagatgcagcaggcacccggaggcctgtcccagatggggcctgtgtctctgttccatccactgaaggctacccttgagcagacacagcccgccgtcttgcgtggtgcaagagtatttctgaggcaaaaaagctctacatcgctgtctaatgggggggcaatccaaaatcaggagagtggcatcaaagaaagcgtaagctgggggactcagcggacccaggatgccccacatgaagcaagaccgccattggaacgaggacattcaactgagataccggtcggacggtcaggtgccctagccgttgatgtccagatgcagtcaataactaggcgcgggcctgatggcgagccacagccaggtttagaaagccagggaagggccgctagcatgccaaggctggccgccgaaacccagccagttacagacgcctcacctatgaaacgaagcatcagcaccctggcacagcgacctcgaggcacgcacctgtgttctactacacctgatcggccacctcccagccaggccagctctcaccatcatcaccaccggtgtcataggagaagagatcggaagcagcggtccctagagaaaggaccttccctaagcgccgacatggatggggcccccagttcggccgtcggacccggtctccctcctggcgagggccctacaggctgccgcagggagagggagcggagacaggaaaggggaaggagtcaggaaaggaggcagccttcttcatcttcctcggagaaacagcgtttttatagctgcgaccgatttggtgggcgggaaccaccgaaacccaagccatctctgagcagtcatcctacctcacctaccgctggtcaggaacccgggccccacccccaagccgggtctgcggtggggtttccaaacaccaccccgtgctgtagggaaacccccagcgcatctccatggcctctcgccctcgaactcgcactaacacttacatggggttccgtgtggactgtccggcctctgagtaccccctgtttgcggacactgtcactcagtaggagactgtggcctccaacgagagccgccccgcctggcctcccgacttgcccgccatag

SEQ ID NO: 181246 - DNA, 7023 bp, synthetic construct
  misc_feature 1..7023: note = Description of Artificial Sequence: Synthetic coding sequence
  source 1..7023: mol_type = other DNA
atggtgcggttcggcgacgagctgggcggccggtacggcggccccggtggcggcgagagggctcggggcggaggcgccggcggtgctggtggtcccggtcctggcggactacagccagggcagagagtcctgtacaaacagagtattgcgcaaagagctagaaccatggccttgtataacccaatccctgtgaagcagaactgcttcacagtcaaccgcagcctctttgtttttagtgaagacaatgtggtaaggaaatacgcaaagaggattaccgagtggccccccttcgagtacatgatcctagcaacaataatcgctaactgtattgttctggcccttgagcagcaccttcctgacggagataaaacccctatgtccgagcggttagacgatacggagccttactttatcggcattttctgtttcgaggccggcattaaaatcatcgcgctgggatttgtatttcacaagggtagctatctccgcaacggttggaatgtcatggactttgtcgtcgtgttgaccggaattttggctacagcgggaaccgacttcgatctgaggacactgcgtgcagtacgcgtgctgcggccactgaagttagttagcggtatcccaagtctccaagtggtgctcaaatctatcatgaaggcaatggtgcctctgttacagatcgggctgctcttgttctttgcaatcctgatgttcgctattataggcctcgaattctatatggggaaatttcataaggcctgtttcccaaactcgacagacgccgagcccgtcggcgatttcccctgcggaaaggaggctccagctcggctttgcgagggcgacacagaatgcagggagtattggccaggtccaaattttggcatcacaaatttcgataacatcctctttgcaatcctgacagtgttccagtgcattaccatggaaggctggacagacattctctacaataccaacgacgcagcaggcaacacctggaactggttatacttcattcccttaattataattggcagtttttttatgctgaacttggtgttgggggttttatcgggcgaatttgcgaaggagagagaaagggttgaaaaccggcgtgcctttctaaagttgaggcgccaacaacaaatcgagcgggagctgaacgggtacctcgagtggatcttcaaggcagaagaagtcatgctcgctgaggaggaccggaacgccgaagagaagtcccccctggacgcagttctcaagagggctgcgaccaagaagtccaggaacgacttgatacacgctgaggagggtgaagatcggtttgccgacctctgtgcagtgggctccccgtttgcaagagccagcttaaagtccgggaagaccgagtctagctcttacttcaggcggaaggagaaaatgtttagatttttcattcgccggatggttaaggcgcagagcttctattgggttgtattgtgcgtggttgctctaaatactctgtgtgtggcaatggtgcattataaccagccgcgaaggctgaccaccactttgtatttcgcagaattcgtcttcctgggactctttttaactgagatgtctctgaaaatgtacggtcttgggccccggagctacttccgcagcagcttcaattgtttcgacttcggcgtgatcgtggggtccgtcttcgaagtggtatgggctgctattaaacccggaagctcttttggaatttcagtcctgagggccttacggctgctgcgcatcttcaaggtgaccaaatactggtcctccctcaggaatctggtcgtctccctcctgaatagcatgaagagcatcatttctctgcttttcctgctgtttttgttcatcgttgtattcgctctgctggggatgcagctgtttggtggccagttcaacttccaagatgaaacgcccaccacaaactttgatactttccctgctgctatcctgacagttttccagattctgacgggagaagattggaacgctgtcatgtatcacggcatagaatcccaaggaggggtttcaaaggggatgttcagtagtttctattttattgtgttaaccctgtttggaaactacactcttctgaatgttttcctagccattgcagtagacaatctggccaacgcccaggaactgacaaaggacgaggaggaaatggaggaggctgcaaaccagaagctggccttacaaaaggcaaaagaggttgccgaggtgagtcctatgtccgccgccaacatctcgatcgcagccagacaacagaacagcgccaaggcccgctctgtatgggagcagcgcgcctctcagctccgcctgcagaaccttagagcgtcctgtgaggctctttactctgaaatggatcctgaagaacgcctgagatttgcaaccactcgacacctccggccagacatgaagacgcatctggatcggccactggttgttgaacttggacgcgacggagctcgagggcctgtgggagggaaagctcggccagaggcagccgaagccccagaaggagtggacccaccccggcggcatcatcgccacagagataaagacaaaaccccagccgcaggggatcaggaccgggccgaagcacctaaagccgagagcggcgaacccggcgctagagaagagcgtccacgtccacaccggtcccattcaaaagaagccgcaggacctcccgaagccaggtcagaacgaggccgcggacccggccccgaaggcggaaggcggcaccaccgaagaggatcccccgaggaagcagctgaacgcgaaccccggaggcatagagcacaccgccatcaagacccatccaaagaatgcgccggtgccaaaggagagaggagggcgagacatagaggcggacccagagcaggcccacgtgaggcggagtctggcgaagaacctgcacggcggcatcgggcacggcacaaagcacagccagcccatgaggctgtcgagaaggaaactacagagaaggaggcaaccgaaaaagaagcagagattgttgaggcggacaaagagaaggaacttcggaaccaccagccgagggagccacattgtgacttggaaacctctggcaccgtcactgtggggcccatgcacacactcccatctacatgcctccagaaggttgaggaacagcctgaggacgccgacaaccagcgaaacgtgacacggatgggaagtcagcccccagatcctaatacaatagtccacatcccagttatgttgacaggcccactgggtgaggctaccgtcgtcccctccgggaacgttgatctcgaatcccaggccgaaggcaagaaggaagttgaggcggatgacgttatgaggagcgggcctcggccaatcgtcccttactccagcatgttctgcctatctccgaccaatctcctcagaaggttttgccattacatcgtgacaatgcgatatttcgaggtcgtaatactggtagtgattgccctatcatctattgcactcgcggccgaggacccggtacgtaccgactctccccgcaacaacgcgctgaaatatctggactacatcttcacgggcgtgtttacgttcgagatggtaatcaagatgatcgatttagggctgctcctgcaccctggcgcctacttcagagatttgtggaacattctcgatttcatcgttgtaagtggagccttggttgctttcgctttcagtggctccaagggaaaagacatcaacacaattaagagtctcagagttttaagagtgttgcggcccctgaaaacaataaagagattgcccaagctgaaggctgtctttgattgcgtcgttaattccttaaagaacgtactgaacatcttaatcgtttacatgctatttatgtttatcttcgccgtcattgcggtgcaactgtttaagggcaagttcttttactgtacagacgaatcgaaagaactggagcgcgactgcagggggcagtatctggattacgaaaaagaggaagtggaagcccagcctagacaatggaagaagtacgatttccactacgataatgttctttgggcccttctgaccctctttactgtaagtaccggggagggatggcccatggtgctgaagcacagcgtggatgccacttacgaggagcagggcccctcccctggctaccgcatggaattgtccatcttctacgtagtgtacttcgtggtgtttcctttcttctttgttaacatttttgtagctctgattattatcactttccaggagcagggcgataaagtgatgtccgagtgttccttggaaaagaacgagcgcgcatgtattgacttcgccataagcgcaaaaccgctcacaagatatatgcctcagaatcgtcagagctttcagtataaaacatggacctttgtcgtttctcctccttttgagtactttattatggctatgatcgctctaaatactgtggtgctgatgatgaaattttacgacgccccatacgaatatgagctgatgctcaagtgccttaacatcgtgttcacttccatgttcagcatggagtgcgtcttgaaaattatagcgtttggagtgttgaattatttccgggatgcctggaacgtgttcgatttcgttaccgttctcgggtctattactgatatcctcgttacggagattgccgaaactaataacttcatcaacctttcttttctgcgtttgttccgggccgcacgtctcattaagttgctacggcagggatataccatccgcatactattgtggactttcgttcaatcgtttaaggccctgccttacgtgtgcctccttatagccatgctatttttcatttacgcgattatcgggatgcaggtgtttggcaatattgcccttgatgatgatacatccatcaatcggcataacaattttcgtacatttctccaagcgttgatgctactctttaggtccgccacaggcgaggcttggcatgagataatgctgtcctgcctgtctaaccaggcttgtgatgaacaagctaatgcgactgaatgtggaagcgacttcgcttacttttactttgtcagttttatcttcctctgttcatttcttatgttgaatttgttcgtggcagttattatggataatttcgagtatcttacccgggacagctccatccttggacctcatcacctagacgagttcattagagtgtgggcagaatacgatccagccgcatgtggtagaattagctacaatgacatgttcgaaatgctcaagcatatgtcgcctccattaggactgggcaaaaaatgccccgcaagggtggcctataaaagactggtccgaatgaatatgccaatttctaacgaagacatgactgtccattttacgtcaaccttgatggctctgatacgtaccgcacttgagatcaagctggcccccgccgggaccaagcagcaccagtgcgacgccgagcttagaaaagagatctccgtggtgtgggccaacctccctcaaaagaccctggacttactcgtccccccacacaagcccgatgagatgaccgtgggcaaggtctatgccgcgcttatgatttttgacttttataaacagaacaaaacaactagagatcagatgcaacaagctcctggtggcctttcccagatgggccctgtttctttgtttcatccactgaaggctacccttgaacagactcagccggccgtcctccggggcgcccgcgtgtttctgcgccagaagtctagtacctccctgtccaacggaggagccattcagaatcaggagagtgggattaaggaatccgtgagttgggggacccaaagaacccaggacgccccccacgaggctaggcctcctcttgagcgaggacactctacagaaatccccgtgggccggtcgggggccctcgcagtcgatgtccagatgcagtcgattacgagacgaggcccagacggggagccgcagccaggcttagagtcccagggccgcgccgcgagcatgcctcggttggccgccgagacacagccagtgacagacgcctcccccatgaagaggtccattagcacactcgctcagcgccccaggggcacccacctttgcagcaccactcccgatagacctccaccttctcaggcatcatcccaccaccatcaccacagatgccaccggagaagggatagaaaacagcgcagtctcgaaaaaggccctagtctctctgccgacatggacggggccccaagcagcgccgttggaccaggcttgccacccggggagggccctaccgggtgccggcgagagagggagcgtcgtcaggaacgtggtcggtctcaggagcgaaggcagccctctagtagcagcagcgagaaacagagattttattcctgcgataggttcggaggtcgcgaacctcctaaaccgaaaccttcgctctcctcccatccgaccagccccactgcagggcaggagcctggcccccacccccaggggtctggctcggtcaacggaagccctctgctctctaccagcggcgctagcaccccagggcggggaggcaggcgacaactgccacaaacccccctcacccccaggccttccattacttataagacagccaattcgtcaccaatccacttcgcaggagcccagaccagcctccctgcattctcacccggccgactgagcaggggcctctctgaacacaatgccctgcttcagagagacccgttgtcccagccacttgcccccggatccaggatcgggtcagacccctatttgggtcagcggctggactccgaggcgagcgttcacgccctccccgaagacaccctcacattcgaagaagcagtggctactaatagcggcaggtcctccagaacctcctacgtgtccagcttgactagtcagagccacccgttacgcagagtccccaatggttatcactgcacgttgggcctctcttcaggcgggcgggccaggcactcataccaccatccagaccaggaccattggtgttag

SEQ ID NO: 181247 - DNA, 7017 bp, synthetic construct
  misc_feature 1..7017: note = Description of Artificial Sequence: Synthetic coding sequence
  source 1..7017: mol_type = other DNA
atggtgcggttcggcgacgagctgggcggccggtacggcggccccggcggaggcgagcgcgctagagggggaggggcagggggtgctggtggtccaggtccaggcggtctccaacctggacagagagttctctataagcaatccatagctcagcgggccagaaccatggccctgtataatcctatcccagtgaagcagaactgtttcacagtgaaccgatccttgttcgtcttctccgaggataacgtagtcagaaagtacgctaagcggattactgagtggccccccttcgaatatatgattctcgccactattatcgcaaactgtattgtactggcactggagcagcacctccctgacggagacaaaacacctatgtctgaaagattggacgacaccgagccatacttcatcgggattttctgctttgaagccgggatcaagatcatagccctgggcttcgtgttccataaggggtcgtacctgcgtaatggttggaatgtgatggactttgttgttgtcctgactggaatactggcaacagctggcacagactttgatcttcggacactgagggctgtccgtgtcctgagaccactcaagctggtctcgggcattccatccctgcaggttgtcctgaaaagtatcatgaaggccatggtgcctctccttcaaataggtctcctactgttttttgccattcttatgtttgccatcattggcttggagttctatatgggtaagttccataaagcgtgctttcctaattccaccgatgctgaaccggtgggagattttccttgtggcaaagaggcaccagcccgactttgcgagggcgacacggagtgtagagagtattggccggggccaaatttcggaatcaccaatttcgacaatatcctgtttgctatactcaccgtttttcagtgtatcaccatggaaggttggaccgatattctctacaacacaaacgatgctgccggtaatacttggaactggctttacttcattccacttattattattggcagcttctttatgcttaatttggtcctaggggtgctttctggagaatttgctaaggaacgggagagggtagagaatagaagagcgtttcttaaactgcgccgacagcaacagatcgaaagggagctgaatggctacctcgagtggatcttcaaagccgaggaggtgatgttggccgaggaagataggaacgcggaggagaagagccccttagacgccgtgctaaagcgtgccgctacaaagaagagtcgcaatgatcttatccacgccgaagaaggggaagatcggttcgctgatttatgtgctgtcggatcgccatttgcccgtgcgtctttgaagagcgggaagactgagagcagctcatacttccgacgcaaggagaaaatgttccggttctttattaggcgcatggtgaaagcacagagcttttattgggtagtactttgcgtggtcgccctcaacactttgtgcgtggcaatggtgcactataaccagcccagacggctgaccacaaccctgtatttcgctgaattcgtgtttctggggctgttcctgacagagatgtcccttaaaatgtacggtctgggccctcggtcttatttcaggagctccttcaattgtttcgactttggcgtgatcgtggggagtgtctttgaggtggtgtgggcagctatcaaacccgggtcctcttttgggattagtgtcctgagagccctccgcctgttgcgcatttttaaggtgactaagtactggagcagcctcagaaacctggtggtgagccttctcaattcgatgaagagcattatttcccttctgttcttactttttctctttatagttgtgtttgcccttttaggaatgcagctctttggcggccagttcaattttcaagacgagacacctactaccaactttgatacttttcccgcagccatcctcaccgtgtttcagatcctcaccggggaggactggaatgcggtgatgtaccacgggattgagagccagggcggcgtaagcaaagggatgttcagcagtttctacttcatagtgctcacgctctttggtaattacactctccttaacgtgtttcttgcaatcgcagtggacaacctggcgaacgctcaagaactgactaaggacgaagaagaaatggaggaagccgcaaatcagaagctggccttgcagaaggcgaaagaggtggctgaggtatcacctatgtccgctgcaaacatttccattgctgcgcgccaacagaattcagctaaagcccgctctgtgtgggagcaacgcgcgagccagctccgactgcagaacctgagggcctcgtgcgaggcactgtactctgagatggatccagaggagaggctaaggtttgcaactaccaggcacctccgacctgacatgaaaacccacctggacagaccgctagttgtggaacttggaagagatggggctaggggcccggtggggggcaaggcccgcccagaggcagccgaagctccagagggagttgaccccccccggcggcatcatcgtcatagggacaaggacaagactcccgccgctggggaccaggaccgcgccgaggcccccaaggcggagagtggggagcctggagctcgggaagagcggccaaggccccatcgtagccactctaaggaggccgctggtcctcctgaggccaggtcggaacgcggccgcggacccggccctgaagggggtcgccgccatcaccgtcggggctccccggaagaggccgcagaacgagaaccaaggcgccaccgggcccatcgtcaccaggatccgagtaaagagtgtgccggcgcgaaaggggaacgccgtgctcgtcacagaggtgggccgcgcgccggaccccgtgaggccgaaagcggggaggagcctgccaggaggcacagggcacggcacaaagctcagcctgcacatgaagctgtggagaaggagactactgaaaaggaggccacggagaaagaggcagaaattgtggaagctgataaagaaaaagagctgcgcaaccaccagccccgcgagccgcactgtgatctggagacatccggcaccgtgacagtggggccaatgcacactctcccttccacatgtctgcagaaggtggaggagcagcccgaagatgctgataaccagcgcaacgtgactagaatgggcagtcagcctccagaccctaatacgattgttcatatccccgtgatgctgactggacccctgggtgaggcgaccgtggtgccctccggaaacgttgatctggagtcccaggctgagggaaaaaaagaggtggaagcagacgacgtgatgagaagtggcccaagacccatcgtcccttactctagcatgttttgtctgagtccaactaacctgctcagacgtttctgccattatattgtaactatgcggtatttcgaggtcgtcatattagtggttatagctctgtcctcaattgctctggccgcggaggatcctgtccggacagatagtccgaggaataacgccctcaagtacttagactatattttcaccggcgtcttcacttttgaaatggtgatcaagatgatagatttgggtctgcttctgcacccaggcgcttacttcagagatctctggaatattcttgatttcatagtggtttccggcgcactggtggccttcgccttctcaggcagcaagggcaaagacatcaacactatcaaatccctgcgagtgctgcgtgtccttcggcccttgaaaacaatcaagaggctacccaagttaaaggccgtatttgattgtgtggttaatagtctcaagaatgtcctaaatatcctgatagtttacatgctcttcatgtttatctttgcagtaatagccgtacagttgttcaaaggaaagttcttttactgcacagacgagagcaaagagctagagcgggattgtcgcggccaatacctggactacgagaaagaagaggttgaagctcagcctaggcagtggaagaagtacgatttccactacgataatgttctttgggctctattaaccctcttcacagttagtaccggcgagggctggcccatggtgcttaagcatagcgttgacgctacctatgaggagcagggtccctcaccggggtataggatggaattgagtattttctacgtcgtgtattttgtggtgtttccctttttttttgtcaacatattcgtcgcgctgataatcattacattccaggaacagggggacaaggtcatgtcggagtgtagccttgaaaagaatgaaagggcttgcatcgacttcgctatctcagcgaagcctctgacaaggtacatgccacaaaaccgtcagtctttccaatataaaacttggaccttcgtcgttagtccgccctttgaatacttcatcatggccatgatcgcactgaatactgtcgtactaatgatgaagttctacgatgctccttacgagtatgaactgatgctcaagtgcctgaacatcgtctttacctcaatgttttccatggagtgtgtgcttaagatcattgcgtttggggtcctcaactactttagagacgcctggaatgtgttcgacttcgtgacagtgcttgggtccattacggacatcctggttactgagatcgctaataacttcattaatttgagcttccttaggctttttagagccgctaggctgatcaaattgctgcggcaaggatatactattcggatcctactttggactttcgttcagtcatttaaggcattaccgtacgtgtgcctccttatagcaatgttgtttttcatttacgctatcattgggatgcaggtttttgggaatatcgcccttgacgatgacacatccataaacaggcataacaactttagaacgtttctccaggccctgatgctcctcttccggtccgctacaggggaggcgtggcatgaaattatgctgagctgcctgagtaatcaagcttgtgacgagcaagccaatgccaccgagtgtgggtccgactttgcttacttctactttgtatctttcatcttcctctgcagctttctcatgctcaacttgttcgtcgctgtgatcatggataacttcgagtacctcaccagggactcctcgatactagggccccaccatctagatgaattcatccgggtttgggctgaatatgatcctgctgcatgtggaagaatctcttacaatgatatgttcgaaatgctgaagcacatgtctccaccgcttggcctgggcaaaaaatgtcccgcaagagtcgcctataaacgactggtccgcatgaacatgcctatatccaatgaagatatgacagtacattttaccagtaccctcatggctctcattcgtactgctttggagatcaaattggcacccgctggtacgaagcagcaccaatgcgacgccgagctgcggaaggagatatccgttgtatgggcaaatctgccacagaaaaccttagacctcttggtgcccccgcataagccagacgaaatgacagtcggaaaggtgtatgctgccctcatgattttcgacttctacaagcagaacaaaacaacaagagatcagatgcagcaggctccgggaggtctttcgcagatgggtccagtgagcctgttccacccattgaaagcaacccttgagcagactcagccagccgttcttcgaggggcccgggtttttctgagacaaaagtcttctactagcttgtcaaatgggggcgctatccagaatcaggagtccggaatcaaagaaagcgtcagctggggcacacaaaggacccaagatgcccctcacgaggctagacctcccctggaacgaggtcactctacggaaatccccgttggcagatctggggcccttgcagtggacgtgcaaatgcaatcaattaccagaagaggtcccgacggcgagccccagcccgggctggaatcccaggggcgggcggcctctatgccaagactggcggctgaaacccagcccgtcacagacgcatcacctatgaaaaggagcatttccaccctcgcacagcggcctagggggacccacctgtgctctaccactcctgaccgtccacctccttctcaggctagtagtcaccatcaccatcaccgatgtcatcgacgacgcgataggaagcagaggtctttagagaagggaccctccctctccgcagacatggatggcgcccccagtagcgccgtcggaccgggcttgccgcccggggaaggaccaaccgggtgccggagagaacgggagaggaggcaagagagaggccggtcacaggagcgccgacagccctcttcttctagctccgagaagcagcgcttttacagttgcgatcgctttggcggcagggagccacctaaacctaaacccagtctctctagccacccaactagccccaccgccgggcaggaacctggcccacatccacagggcagcggctcggtgaatggctctcctcttctcagcacctccggtgctagcaccccggggagaggcggacgccgccagcttccacagacccctctgacgcctagacctagcataacgtacaaaaccgccaattcatcccccattcactttgctggggctcagaccagcctccccgcctttagtcccggacggttatcacggggtctgtcagagcacaatgctttgctgcagagagatcccctttctcagcctctggcccctggatctcggattggtagtgatccatatctgggccagcgcttagactccgaagcctctgtgcacgccttacccgaggatactctgacctttgaagaggccgtagccactaattccgggcgatccagccggacatcatacgtgtcctccctaacaagtcagagccacccccttcggagggttcctaacggataccactgtaccctcgggctgagtagtggcggcagagcgcgccactcctatcaccatcctgatcaggatcactggtgttag

SEQ ID NO: 181248 - DNA, 7014 bp, synthetic construct
  misc_feature 1..7014: note = Description of Artificial Sequence: Synthetic coding sequence
  source 1..7014: mol_type = other DNA
atggtgcggttcggcgacgagctgggcggccggtacggcggccccggcggaggagagagagccagaggcggtggtgccgggggagccggagggccgggcccaggggggttgcaacctgggcagagagttttgtataagcagtccattgcccagagagcacgaacaatggccctttacaaccccattcccgtgaaacagaactgctttaccgttaatcggtcactctttgtcttctcagaggataacgtggttcgcaagtatgcaaagcgaatcaccgaatggccacctttcgaatatatgatcctggctactatcatagcaaattgtatagtcctggcccttgagcagcatctccctgatggggataagacgcctatgtccgaaaggctggatgataccgaaccctattttatcgggatcttttgcttcgaggcagggatcaaaatcatagcattgggtttcgtcttccacaaaggctcctatctgcgcaatgggtggaacgtgatggatttcgtggtcgttctcacaggtattctcgccactgctggcacagatttcgacctgcggacacttcgtgccgtcagagtcttgcgtccgttaaaattagtgtctgggatcccttcgctgcaggtggtcttaaagagtatcatgaaagcaatggtgcctctcctgcagataggtctgctactgttctttgcaatcctgatgttcgctataatcggcctggaattttacatgggaaagttccacaaagcctgcttcccaaactcaaccgacgcagagcccgtcggagactttccctgtggaaaggaggcgcctgctcggctctgtgagggagacacggagtgccgggagtattggccagggcccaatttcgggatcactaacttcgataacattctgtttgcaatactgaccgtatttcagtgcattaccatggagggatggacagatatcctgtacaacacgaacgacgccgctggtaacacatggaactggttgtatttcataccacttattattataggatcttttttcatgttgaatcttgtgctgggagtactgtctggggaatttgccaaggagagagagagagtggagaatcgccgcgccttcctcaagctccgcagacagcaacagatcgagagagagctgaacggctatcttgaatggatcttcaaagctgaggaagtcatgctcgccgaggaagacagaaatgcagaagagaagagccccctcgacgtcttgaaacgtgcagccacgaaaaaaagcagaaatgatcttattcacgccgaagagggcgaagatcgtttcgccgatctgtgtgctgtcggctcccccttcgcacgcgctagccttaagagcggtaagaccgaatctagctcatacttccgacgcaaggaaaagatgtttcgcttcttcatccggcggatggtgaaagcacagagcttctattgggtggtcctgtgcgtggtagccttgaacacactgtgcgtcgccatggtgcattataaccagccccgccgtctgaccaccacactttactttgcggaattcgtgttcttggggctgtttttaaccgagatgagcctgaagatgtacggcctgggcccaaggagctacttcaggagttccttcaactgcttcgactttggtgttatagtcggctccgtgtttgaagtggtatgggcagcaataaagccaggaagctcgttcggcatttccgtcctgcgtgccttgcggctcctgcgcattttcaaggtgaccaagtactggtcctccctacgaaatttagtggtgtctctcctgaatagtatgaagtctatcatctccctcctgtttctgttgttcctcttcattgtagtttttgcactcctgggtatgcagctgtttggcggacagttcaacttccaagacgagacacctaccactaactttgacacttttcctgcggccatcctgactgtgttccagatcttaacaggcgaagactggaacgccgtgatgtatcatggcatcgaaagccagggaggcgtatcgaagggcatgttctcgtcattttactttatcgtgctgactcttttcggcaactatactttgcttaacgtgtttcttgccatagcagtggacaacttggctaatgctcaagagttgactaaggacgaggaagaaatggaggaagcggctaaccagaaactggctctgcagaaagccaaggaggtggccgaagtatctcccatgagcgccgctaatatatcgatcgccgcccggcagcagaacagtgcaaaggccagaagcgtttgggaacagagagcctctcagctgcggctgcagaatctgcgggccagttgtgaagccctgtactctgaaatggaccctgaggagcggttgcggttcgcaacaacacgtcacctcaggcctgatatgaagactcatttagatcgtccactcgtggtggagcttggaagagatggcgcgcgtggtcctgtggggggaaaggccaggcctgaagcagcagaagcacctgaaggggtcgatccgccccggaggcatcatagacacagggacaaggataagaccccggccgcaggtgaccaagatcgggcagaggcacccaaggcagaatctggtgaacccggcgcgagagaggaacgcccccggccgcatcgcagtcactcaaaagaggctgcagggcctccggaggccaggtccgagagaggtagaggaccagggcctgaaggaggtcgacggcatcaccggaggggctccccggaggaggctgccgagcgggagccacgcagacaccgagcccacagacaccaggacccctcgaaagagtgcgcaggagccaagggggaaaggcgagctagacaccgcggcggtcccagagccggacctcgcgaggccgaatctggagaggaacctgctcgtagacacagagccagacataaggcacaaccagcccatgaggctgtggaaaaggaaacgacagagaaagaagctacagagaaagaggccgagatcgtcgaggctgacaaggagaaagagctcagaaaccaccagccccgagagccacattgcgatctcgaaacctccggtactgtgactgtgggccccatgcacaccttaccatccacctgcttacaaaaggttgaggaacaacccgaggatgctgataaccagcgcaatgtgacaagaatgggctcccagccccccgatcctaacaccatcgtgcacataccagtcatgctcactggcccgctgggcgaagcaacagtagtgccctcggggaatgtcgatttggagtctcaggccgagggaaagaaagaagttgaagccgacgatgtgatgagatctggcccaaggccgattgtcccttactcaagcatgttttgcctgtcgcccactaacctactaaggagattctgtcactacatagtgactatgagatactttgaagtggtaatcttagtagtcatcgccctgtcttctatcgcccttgccgccgaggatccggtccgcaccgactccccgagaaataatgccctcaagtacttggactatatcttcaccggggtcttcacatttgagatggttattaaaatgatagacctaggactgcttctgcatcctggggcatatttccgggacctgtggaacatcctggattttatagtggtgtccggggcactagtagccttcgcatttagtggctctaagggcaaggatatcaacaccataaagtctctgagagttctacgagtcttgagaccactgaagaccattaagcgtctgcccaaactcaaagcagtgtttgattgtgtggtgaacagcctaaaaaatgttctcaacatacttattgtctatatgctgttcatgtttatatttgccgtgatagccgttcagctatttaagggaaagttcttctattgtaccgatgaaagtaaagaactggagagagactgtagaggtcagtacctagattatgaaaaagaagaggtggaagcccagccgcgacagtggaagaaatacgactttcactacgacaacgtgctgtgggcgctgctgactttgtttaccgtttctactggggaaggctggcctatggtgttgaaacatagcgtggatgcgacgtatgaggaacagggccccagccccggctatcgaatggaactctcaatcttctacgttgtatactttgtggtgttcccatttttcttcgtgaatatttttgtggccctgatcatcatcactttccaagaacagggcgacaaggtgatgtctgagtgcagtcttgagaaaaatgaacgggcttgcattgatttcgcaatctctgctaagccactcactcgctacatgccacagaaccgccagtctttccagtacaaaacctggacctttgtggtgagccctcccttcgaatacttcatcatggccatgatcgcgttaaatacagttgtgctgatgatgaagttctacgatgcgccatatgaatatgaactaatgctgaagtgcttgaacatagtcttcacatccatgttttccatggagtgtgttttaaagatcatcgcctttggagtcctgaactatttccgagacgcctggaatgtgttcgactttgtgactgtgctgggctccataacagacatcctcgttaccgagattgccaataattttatcaatttgagctttttacggctctttagggctgctaggttaattaagttgttacgccaaggatatacaatccggatcctgttgtggaccttcgtccagtctttcaaggccctgccctacgtgtgcctcctgatcgctatgctcttttttatatatgccattatcgggatgcaggtgttcggaaacatagctctggatgacgacacgtccatcaataggcacaacaactttaggacatttttgcaggcactgatgctcctcttcaggagcgcaacgggcgaagcctggcatgaaataatgttatcatgcctgtccaatcaggcatgcgacgaacaagcaaacgctacagaatgcggttccgactttgcttacttctattttgttagctttatttttctgtgctccttcttaatgttaaacttgtttgtggccgtgattatggacaactttgagtatttaaccagagacagctcgattctggggccacatcatttagatgaattcatccgcgtctgggcagagtatgatccagccgcttgtggacggatcagttacaacgacatgttcgaaatgcttaaacacatgagccctcccttgggccttggaaagaagtgccctgccagagtggcctataagcgcctggtgagaatgaacatgccgatctccaatgaggacatgacagtgcacttcacctccacactgatggcgttgattaggactgctctggagataaaactagctccggccggcactaaacagcatcagtgtgacgccgaactgcgtaaagagatctctgtggtgtgggctaacctgccacagaagacacttgatctgctcgtcccaccacacaagcccgacgagatgaccgtgggtaaggtgtacgctgctttaatgattttcgacttctataaacagaataaaacaaccagagaccaaatgcaacaggcacccgggggcttgagccagatgggtcccgtgagcctcttccaccccctcaaggcgacacttgagcagacccagcccgccgttttgaggggcgctcgggtgttcttaaggcagaaaagtagcacctctctttcgaatggcggagccatccagaatcaggagtctggcatcaaagaaagcgtgagctgggggacccagaggacacaggacgcaccacatgaggcacggccaccactcgagcgaggccactccaccgagattcccgttggccggagcggtgccctcgctgtggatgtccaaatgcagtcgattaccagacgcggaccggatggggaaccccagcccgggcttgagagtcaggggcgggcagccagcatgcctcgcctcgcggctgaaactcaacccgtgacagatgcttcacctatgaagagaagcatatctactctcgctcagcgtccacgaggaactcatttgtgctcaacaacgcctgaccggcctccgccttcccaggcctcttcccaccatcaccatcatcggtgccacaggagaagagacaggaagcaaaggagcctggagaagggccccagtctctccgccgatatggacggtgcaccatcgagcgccgtcggcccaggactgccacccggtgagggaccgacaggctgcaggagggagcgggagaggcgacaagaacgtggacgctcccaggagcgtcgccaacccagctcatcaagctccgagaaacagcggttttatagctgtgatcgtttcggtgggcgggagcctccgaagcccaagccatcactgtcttcccaccccactagtccaaccgcgggtcaggagccagggccacacccacagggttctggtagtgtgaatgggtcccctttgctctctacaagtggcgcatcaactcccggtaggggagggagacgacaactgccgcagactccccttacacctcggccaagcatcacttacaagactgctaatagctcacccatccactttgccggagctcagaccagtttgccagccttctcccctgggcgcctctccagaggcctctcggagcataacgcgttgttacagagggatcccctgagccagccgctcgcacctggtagcagaatcggaagcgacccctatttaggccaaagactagactccgaagctagcgtacatgccctgcctgaggacacattgaccttcgaagaggccgtggccaccaatagtgggcggtcatcgagaaccagctacgtgtccagcctgaccagtcagtcacacccactgaggagagtccctaatggatatcattgtaccctaggcctttcctctgggggacgtgccagacactcataccatcatccagaccaggatcattggtgctag

SEQ ID NO: 181249 - DNA, 495 bp, synthetic construct
  misc_feature 1..495: note = Description of Artificial Sequence: Synthetic coding sequence
  source 1..495: mol_type = other DNA
aacttccggaccttcctgcaggccctgatgctgctgttccggagcgccacaggcgaagcttggcacgaaatcatgctgtcctgcttaagtaatcaggcctgcgatgagcaggccaacgccacagagtgcggctcggactttgcttacttttatttcgtctcttttatctttctctgttctttcctgatgctgaacctgtttgtggccgtgataatggacaactttgaatatttgacccgcgactcaagcatcttggggccacatcatctggatgagtttatcagagtatgggccgaatatgacccagcggcatgttgccgcatccactacaaggatatgtacagtctattacgctgtatagcacctccagtcgggttgggcaaaaattgccccagacgattggcctacaagcggctggtccgtatgaacatgccaatctccaacgaagacatgacagtgcacttcacttctactctgatggctcttatcagatag

SEQ ID NO: 181250 - DNA, 327 bp, synthetic construct
  misc_feature 1..327: note = Description of Artificial Sequence: Synthetic coding sequence
  source 1..327: mol_type = other DNA
ctgcggaaccaccagccccgggagccccactgcgacctggagaccagcggcaccgtgactgtgggcccaatgcacactctgccttcaacctgtttgcagaaagtggaggagcaacctgaggatgctgataatcagcggaacgtgacaaggatggggtctcaacctcctgatcccaacactatcgtgcatatccctgtgatgctaacggggcctctcggtgaggcgacggtggtcccaaccctggaaaagaacgtatgtttgttcctgctgacatctatggtgagtgacgagaagagcactgttattcgaatcgtgttctttctgtag

SEQ ID NO: 181251 - DNA, 7020 bp, synthetic construct
  misc_feature 1..7020: note = Description of Artificial Sequence: Synthetic coding sequence
  source 1..7020: mol_type = other DNA
atggtgcggttcggcgacgagctgggcggccggtacggcggccccggaggcggcgagagagcccgtgggggcggggctggcggagctgggggccccggtccaggagggttgcagcctggtcagcgggtgttgtacaaacaaagcatcgctcagcgcgcacggacaatggccctctacaatccgattccagtgaaacagaattgtttcacagtgaatcgctccctgtttgtctttagcgaagataatgttgtccggaaatacgctaaaaggataacggagtggccaccctttgagtatatgatcctggctaccataattgctaactgcatagtgctggcgttggagcagcatctccctgacggcgacaagactccaatgagtgagcgccttgatgacacagagccatacttcatcggaatcttttgtttcgaggccggcattaaaattatcgcactggggttcgtgtttcacaagggttcatatctgaggaatgggtggaatgtgatggacttcgtcgttgtcttgaccgggatcttggccaccgccggcaccgactttgacctaaggacacttcgcgccgtccgggttcttcggcctctgaagcttgtctcgggcatcccgtcgctgcaggtggtcctgaaaagtatcatgaaagccatggtccccctgcttcagatcggtcttctgttattcttcgctatactcatgttcgccattattgggctggagttttatatgggcaagttccacaaggcatgcttccccaatagcacggatgcagagccagtgggtgactttccatgcggcaaggaggcaccagccaggctctgcgaaggcgatactgagtgccgtgaatattggcccggcccaaatttcggcataacaaattttgacaacattctctttgcaattctcactgtgttccagtgcataacaatggagggctggaccgatattctctacaacaccaatgacgctgccgggaacacatggaactggttatactttatccctctaataatcattggcagcttctttatgttgaatctggtactgggggtcctgtccggggaatttgccaaagagcgggagcgagtagagaatagaagggcttttttaaaactccggcgtcaacagcagatcgaaagagaactgaacgggtacctggagtggatcttcaaggccgaagaggtcatgctggccgaggaggatcgcaacgctgaagagaaaagccctctggatgtcctgaagcgcgcagctaccaaaaaaagcagaaatgatttgatccacgctgaggaaggtgaagataggttcgctgacctttgtgctgtcggcagtcccttcgctagggcctccctgaaaagtggcaagactgagtcctcttcctatttccggcgaaaggagaaaatgtttcgcttttttatcaggaggatggtaaaagcccagtccttctattgggtggtgctgtgtgtggtcgccctcaacacgctgtgcgttgcaatggtccattacaatcagccaaggcggttaaccaccactttgtatttcgccgaattcgtctttttgggcctgttcttgaccgaaatgtccttgaaaatgtatgggctgggcccacggtcgtatttcaggtcgagctttaactgctttgatttcggcgtcattgtcgggtcagtctttgaagtagtgtgggccgcaattaagccaggctcttcattcggtattagcgtactacgtgccttgcggttgcttcgaattttcaaagtaacaaaatattggtcgtcgctccggaaccttgtggtatccctgctgaattctatgaagtccatcatctccttgttattcctcttatttctgtttatcgtggtgttcgctctgcttggcatgcagttatttgggggacagttcaatttccaagacgaaactcctaccaccaatttcgatactttccctgccgctattctgaccgtttttcagatactgactggagaagactggaatgcggtcatgtaccatggcatagagtcccagggcggggtgagcaaagggatgtttagttcattctatttcatcgtactgaccctgtttggcaactacacccttctgaacgtctttctggccatcgccgtcgataacctcgccaatgcccaggagctgacgaaggatgaggaagagatggaagaagccgctaatcagaagctcgcattgcagaaagccaaagaagtggctgaagtatctccaatgtccgccgccaatatatctatcgccgctcgtcagcagaactcagccaaggcacgctcggtgtgggaacagagagcctctcagctccgcctgcagaacctgagggcctcttgtgaggccctgtacagcgagatggatccagaggagaggctgcgcttcgcgaccacccgccacctgcgacctgatatgaagacccacttagacagacccctggtggtcgagctcggtagagacggcgccagaggacctgtggggggaaaggccaggcccgaagccgcagaagccccagaaggggtggatccccctcggagacatcatagacatcgggataaggacaagacaccagcagccggagaccaggaccgggctgaggcacctaaagcagagtccggcgagcctggtgcccgcgaagagcgacctcgtccccacagaagtcattccaaggaggcagccggccccccagaagctagaagtgagcgcggacgcggaccgggtcctgagggcggccgccgacaccatagaaggggatccccggaggaagcagctgaaagagaaccgaggcgacaccgcgcgcacaggcaccaggacccttctaaagagtgtgccggcgcaaagggcgagcgaagggcaagacaccgtggaggccccagggctggccctcgagaagcagagtcgggcgaggaacctgcccgcagacatagagccaggcacaaagcacagccagcccacgaagccgtggagaaggagactactgaaaaggaagccacggaaaaggaggccgaaatagtggaagctgataaggagaaggaattgcgtaatcaccagccccgggagccccattgcgacctcgaaacatctggcacagtgaccgtgggccctatgcacaccttaccgtctacatgcctccagaaagtcgaggagcaacccgaagatgcggataaccaacgtaatgttactcgaatggggtcacagccacccgatcctaataccattgtgcacatcccagtgatgttaacaggccctttaggagaggccaccgttgtccccagcggcaacgtcgacctggagtcacaagcagagggcaagaaagaggtggaagccgacgacgtgatgcggtcaggccctcggcctattgtgccatattcgtcaatgttttgtctctcccccaccaatcttctgagacgattttgtcattatatcgtgaccatgcggtacttcgaagtggtgatcctggtggtgattgcgctgtcctctattgctcttgccgcggaggatccggtgcgcactgattcccctaggaacaacgcccttaagtacctggattatatcttcaccggtgtgtttaccttcgagatggtgataaagatgattgacctcggactgctgctacatccgggggcctacttccgagatttgtggaatattctggactttatcgtcgtttccggagcactggttgcctttgccttctcgggctccaaggggaaagacattaataccatcaagtcacttcgggttctcagagtgctgcgcccactcaaaactatcaagaggctgccaaagttaaaggccgtattcgattgtgtagtgaattcactgaaaaacgtgctgaatatcctgattgtctatatgctcttcatgtttatctttgcagtaattgctgtacagctcttcaagggcaaattcttttattgcaccgatgaaagcaaggaactggagagggactgcaggggccaatacctggattacgaaaaagaggaggtcgaagcccagccccgacaatggaaaaagtatgacttccactatgataacgtgctatgggccttactgacactgtttactgtaagtacaggagaaggttggccgatggtactgaagcattctgtggacgccacctatgaggagcagggcccatctcctgggtataggatggagctcagtattttctacgtggtatattttgttgtattccccttttttttcgttaacatcttcgtggctctcataatcattacctttcaggagcagggtgacaaggtgatgtccgagtgctctctggagaaaaatgagcgtgcttgtatagactttgcaatcagcgctaagcctctgacaagatacatgcctcaaaatcgccagtcctttcaatataagacctggaccttcgtggtgtcccctccattcgaatactttatcatggccatgatcgccctcaatactgttgtgctgatgatgaagttttacgatgcaccttacgagtacgagctcatgcttaaatgcctcaatatcgttttcacatccatgttcagcatggagtgtgtgctgaagatcattgcatttggcgtgctgaattatttccgggacgcctggaatgtgttcgatttcgtcacagtgctaggcagcattaccgatattttggttacagaaatcgcagagacaaataacttcatcaatcttagcttcctgaggctattcagggctgcccgcctgattaagctattgagacaaggctacacgattagaatcctgctttggacgtttgtccaatcgtttaaagccctgccatacgtgtgcttgctcattgcgatgttatttttcatttacgccattatcggaatgcaggtcttcggtaacatcgctcttgacgacgataccagtataaaccgccataataatttcaggacctttctacaggcactgatgttgctcttcagaagcgcaaccggtgaagcatggcatgaaatcatgctcagctgccttagtaatcaggcctgcgatgaacaagcgaacgcgaccgaatgtggaagtgatttcgcttacttctattttgtgagctttatttttctctgcagctttctgatgctcaatctctttgtcgccgtcatcatggataattttgaatacctgacaagagactcttctattctggggcctcaccacttggatgagttcattcgagtgtgggctgagtatgaccccgctgcctgcggccgcatttcatacaacgatatgttcgagatgctgaagcatatgtcaccacccctcggactcggaaaaaagtgcccagcccgtgtagcatataaacgcctagtgaggatgaacatgcccatctcaaatgaagacatgacggtccactttacctcaaccttgatggcgctgatccgtacagcactcgagattaaattagccccggccggtaccaagcagcaccaatgtgacgctgagctgcgcaaggagatatcggtggtgtgggctaacctgccccagaagacgcttgacctgttggttccaccacacaaacccgatgaaatgaccgtcgggaaggtgtacgccgcccttatgatcttcgacttctataaacagaacaaaaccacacgcgaccagatgcagcaggccccaggcggcctgtcccagatgggacctgtgagcctgttccatccgttgaaggcaacgttggagcagacacagcccgccgttttgagaggagctagggtcttcctgcgccagaagagcagcaccagcttatctaacggcggtgcaatccaaaaccaggagtcagggattaaagagagtgtcagctgggggacccagcgtactcaggacgcgcctcatgaggcgcgcccacctctggagagaggacactccactgaaattccagttggacgttcaggtgccctcgctgttgatgtgcagatgcagtcaatcacacgcagaggtcccgatggtgagccacaacctggccttgagtctcagggcagagcggcttcaatgccacgcctggctgccgaaactcagcctgtgacagatgcttccccaatgaagcgcagcattagcacgttggctcagaggccaaggggtacacacctgtgctccacgactcccgacagaccgcccccgagccaagcctcttcacaccaccatcaccacagatgtcataggcgccgcgaccgcaagcagaggtcccttgaaaagggccccagcctgtctgcagatatggatggtgccccctcctctgcagttgggcctgggcttcctcccggcgaggggccaaccggctgcagaagagagagggagagaagacaggaacgcggaaggtcccaggaacgacggcaaccctctagctcctctagcgagaagcagcggttttactcttgcgatcgcttcggaggtagagaacctcctaagccaaagcccagcctcagtagccatcccacttctccaacagctgggcaggaacctgggccccaccctcagggtagcggatcagttaacggtagcccattgttgagcacatccggcgcctccacacccggccgaggcggacgccgccagctgccacagacaccgctgacgccccgcccgtccattacgtataaaaccgcaaattcgagtcctatacacttcgctggggctcagacctcattgcccgctttcagcccaggcaggctgtcgagagggctgtctgaacataacgcactactccagagggatcccctctcccagccactcgcccctgggtccaggatcggaagtgatccctacctgggccagagactggactctgaagcctccgtgcatgccttgccagaggacacccttaccttcgaggaagcggttgccactaatagcggcagatcaagccgcacgagctatgtctcctccctaacttcgcaatcccaccccttaagaagagtacctaatggataccattgcaccctcggactgagtagcggcgggagagccagacactcttaccaccaccctgaccaggaccactggtgttag

SEQ ID NO: 181252 - DNA, 498 bp, synthetic construct
  misc_feature 1..498: note = Description of Artificial Sequence: Synthetic coding sequence
  source 1..498: mol_type = other DNA
tgaaacttccggaccttcctgcaggccctgatgctgctgttccggagcgccactggagaggcttggcatgaaatcatgttgtcatgtctcagtaatcaagcatgtgacgagcaggcaaatgctaccgagtgcggcagcgacttcgcctatttctactttgtgtctttcatcttcctttgttccttcctgatgttgaatcttttcgtggccgtgattatggataacttcgagtatctgactcgcgatagtagcatccttgggccgcaccatctggacgagttcatacgggtatgggccgaatacgacccagctgcttgttgccgtatccattataaagatatgtactctctgctgaggtgtatcgccccacccgttggcctaggaaaaaactgcccccggagactggcctacaagcgccttgtgagaatgaatatgccaatctctaatgaagacatgacagtgcattttacaagcacattgatggcccttatcagatag

SEQ ID NO: 181253 - DNA, 564 bp, synthetic construct
  misc_feature 1..564: note = Description of Artificial Sequence: Synthetic coding sequence
  source 1..564: mol_type = other DNA
ctgcggaaccaccagccccgggagccccactgcgacctggagacctcagggaccgtgacggttggccctatgcatactctgcccagtacctgtttgcagaaagttgaggaacaaccagaggacgccgataaccagcgaaacgtgactcgaatgggatcccagcccccagatcctaatacgatcgtgcacataccagtgatgctgactgggcccttgggcgaggccaccgtcgtgccaagccctacaatcgggcggctgcaggcagaggaacaaggggagcccgctagggtgagtaaactgaacttggagtctgacgtccgaggtcaagaggcctcatccactggggaacggtataggttgggaggtggcaacgttgatctcgaaagtcaggccgagggcaagaaggaggttgaggcagatgacgtgatgcggagcgggccaaggccgatcgtgccttatagttccatgttctgcctgtcacccactaacctgttacggaggttttgccattacattgtgacgatgcgttactttgaggtcgtaatcctggtggtgattgcatag

SEQ ID NO: 181254 - DNA, 6786 bp, synthetic construct
  misc_feature 1..6786: note = Description of Artificial Sequence: Synthetic coding sequence
  source 1..6786: mol_type = other DNA
atggcccggttcggcgacgagatgcccgcccggtacggcggcggcggctctggtgctgctgccggcgtggtcgtgggctctggaggcggaaggggcgccggcgggtctagacagggtggtcagccaggagcccagcgaatgtataagcagagcatggcccagcgggctcgcacaatggcgctttacaatccaatcccagtgaggcaaaattgcctcaccgtcaacagaagcctgttcttgttttccgaggataacgtggtcaggaaatacgccaaaaagattaccgaatggccaccttttgagtatatgatactagctactataattgcgaattgtattgtgttagcgctcgagcagcacctcccagacgatgataaaactcctatgtctgagcgcttggacgataccgagccctattttatagggatcttctgtttcgaagctggcattaagattattgctctcggattcgcatttcataaggggtcttatctgcgcaatggatggaatgtcatggatttcgtggtggtgttgacagggatattggccaccgtgggaactgagtttgacctgcgcactctgcgagccgtgagagtccttcgccctctaaaactggtctctggtataccgagtctacaggtggtcctcaagtcaatcatgaaggcgatgattccccttttacagatcggtctcctgctgttcttcgctatactgatattcgcaataatcggcctggaattttatatgggcaagttccacaccacctgttttgaggaagggacagatgatatccagggggaaagtcccgctccatgcggcacagaggaaccggcgcgaacctgccccaacgggacaaaatgccaaccttattgggagggacccaataatggcattacccagtttgataatattcttttcgctgttctgacagtgtttcaatgtattactatggagggctggacagatttgttgtacaattccaatgacgcctccggaaatacgtggaattggttatactttattcccctgattatcatcggaagcttttttatgttgaacttagtcctgggagtgttgtctggtgagtttgccaaagagcgtgagcgggtcgagaatcgtcgggcgtttctcaagttgagacggcagcaacaaattgaacgggaattgaatggctacatggagtggatctctaaagccgaagaagtgattctcgccgaggatgaaactgatggagaacagagacatcccttcgacggtgcccttcgtcgtaccacaataaaaaaatcgaaaaccgatctgttgaatcctgaggaggcagaggaccagcttgctgatatcgcgagcgttggatcgccctttgcgcgggcctcaatcaaatctgccaagttggagaacagcacattcttccataaaaaggagaggcgcatgcggttctacattaggcggatggtgaaaactcaggccttctattggacggtgctctcgcttgttgcactaaatacactgtgcgtggctattgtgcattacaaccagcccgagtggctgagcgattttttatattatgccgagtttatttttctgggcctattcatgtccgagatgttcattaagatgtatggtctggggacaagaccatacttccatagctcatttaattgctttgactgtggagtaatcatcggctccatttttgaggtgatctgggcggtaatcaaaccaggtacctcctttggcatcagcgttctgcgcgctcttcggctgctgcgcatattcaaggtcaccaaatactgggcgagtctgaggaatctggtggtgagcctgttgaattccatgaagagcattattagccttcttttcttgctgttcttatttatcgtggtctttgcactgctaggaatgcagctctttggaggacagttcaatttcgacgagggaactcctccgaccaatttcgacactttccctgcagccataatgaccgtatttcagatactcacgggagaggattggaatgaggtgatgtacgatggaatcaagagtcagggaggcgtgcaaggtggcatggttttctcgatctattttatagtgctgaccctgttcggcaattacaccctcttgaatgttttcttggctatcgctgttgacaacctggccaacgcgcaggagttaactaaagacgagcaggaggaggaggaggcagccaatcagaagctggcactccagaaagctaaggaggtagctgaagtgagcccactttccgctgctaatatgagcatcgcagtcaaggagcagcaaaaaaatcagaagcccgccaaatcagtgtgggaacaacgtacgtcagagatgcgtaagcagaacctactggcctcaagagaagcactgtacaatgaaatggatccagacgagcggtggaaagccgcctatactcgtcacctgcgccccgacatgaagacacacctggacagaccgctggtggtcgatcctcaggaaaaccgaaataataacacgaataagtctagggccgcagagccaaccgttgaccagcgattgggccagcagagggccgaggacttcctccggaagcaagctaggtatcatgatagagctcgtgatccttccgggagcgcagggctggatgcccggcggccttgggccgggagtcaggaggcggagctgtccagagaagggccctatggaagagagagcgaccaccatgcacgcgagggaagcctcgagcagcctggcttttgggagggagaagccgagaggggcaaggctggcgacccccatagacgtcatgtacaccggcaggggggatccagggaaagcaggtctggatctccccgcaccggtgctgacggtgagcaccggcggcatcgtgctcataggcgccccggtgaggagggccccgaagataaagcggaacgcagagctcggcatagagaaggctctagaccagccaggggaggcgaaggcgaaggggaggggccagacggcggcgaaaggcgacgaagacatcgacacggagcgccagccacgtacgagggcgacgcccgaagggaggataaggaacgtaggcaccgtagaaggaaggaaaaccaggggtccggtgtccccgtctctggcccgaacttatctaccaccagaccaatccagcaagacttgggccgccaagacccccctctagcagaggatatcgacaacatgaaaaataacaaattggcaaccgccgagtctgcggccccacacggcagcctcggccacgcaggcctccctcagtctccagcaaaaatgggaaattccaccgatcctgggcccatgctggctattccggctatggccaccaacccgcagaacgcagcttcacggcgcaccccgaacaatcccggcaatccttccaaccccggcccccccaagactccagaaaacagtctgattgtaacgaacccttcaggcacacagactaacagcgctaagactgccagaaaaccagatcatactactgtcgatatccctccagcttgccctccgccattgaaccacaccgtagtacaggtaaacaagaacgccaaccccgaccccttgcccaaaaaagaagaggagaagaaagaggaggaggaggacgataggggagaggatggtcctaaacctatgccgccttactcatccatgttcatactgagcaccacgaacccgttaaggcgtctgtgccactatatcctgaatctgcggtatttcgagatgtgtatactgatggtaattgccatgagttcaattgcgttggcagcggaggaccctgtacagcccaacgccccacggaacaatgtcttgcgctacttcgattacgtgtttacaggtgttttcacttttgagatggtcataaagatgattgatctgggcctggtactgcatcagggagcatactttcgagacctgtggaacattctggactttatcgtggtttcaggagctcttgtggcattcgccttcactggaaacagcaaagggaaggatattaacacgatcaagtcactgagggtcctgagagtgctgcgacctttgaagaccattaagcggttacctaaactcaaagctgttttcgactgcgtcgtgaattcactcaaaaatgtgtttaacatattgattgtatacatgctattcatgtttattttcgcagtggtggcagtgcagcttttcaagggaaagttttttcactgtacagatgaatcgaaagagttcgaaaaagattgtcgcgggaaatatctgctgtatgagaagaatgaagtgaaggcaagagacagggagtggaaaaaatacgagtttcattacgacaatgtgctttgggccctgctcaccctctttacggtgagcaccggtgagggttggccccaggtactcaaacactctgtcgatgccacttttgaaaatcagggtccgagccctggatatagaatggagatgagcatcttttacgttgtctatttcgtcgttttccctttcttcttcgtgaacattttcgttgcgctgataattatcacattccaagagcagggggataagatgatggaagagtactcgttggagaagaacgagcgcgcctgtatcgattttgcgattagtgccaagccgctcacccggcacatgccacaaaacaaacagtcttttcagtatcggatgtggcagtttgtagtgagtcctcctttcgagtatacaatcatggccatgatcgctctgaatacaattgtgttaatgatgaagttttatggggccagcgtggcctacgaaaacgctcttcgagtctttaatattgtgttcacatccttatttagcctggagtgtgtgctcaaagtgatggcgtttggtatcctcaactattttcgcgatgcttggaacatatttgacttcgtgactgtcctgggctcgattaccgatatcttagttactgagttcggaaacaacttcatcaacctgtccttcctccggctgtttcgagcagctcgcctgattaaactgctaagacagggctacactatccgtatcttgttatggacctttgtgcagtcctttaaggccttgccctacgtatgcctcctgattgctatgctcttcttcatctacgcgattatcggaatgcaggttttcggcaacattgggattgatgtggaggatgaggatagtgacgaagacgaatttcagatcacggagcacaataactttcggacttttttccaggcccttatgctgctgtttaggagcgctaccggtgaggcatggcacaatataatgctttcctgcctatcggggaagccatgcgacaaaaactccggtatcctgaccagagagtgcggtaatgagtttgcctatttttactttgtttcttttatttttctgtgcagcttcctaatgctgaacctcttcgtggccgttatcatggataacttcgaatacctgacccgggattcatccatcctgggaccccatcacttggacgagtacgtgcgggtatgggctgaatatgatcccgctgcctgtggtcggattcattataaagatatgtattctctgcttagagtgattagtcctcctctcggccttggcaagaagtgcccacaccgggtggcctgtaaaaggttgctgcggatggacctacccgttgcagatgacaacacagttcattttaactctacactgatggcccttatccgcaccgccctggacataaagattgcaaaggggggagccgataagcagcagatggacgcggagctaaggaaagagatgatggcgatatggcctaatctttcacagaaaacattggatctgttagttactccccacaaaagcactgatctaactgtcggtaaaatctacgctgccatgatgatcatggagtactaccgccagtcaaaggcgaagaaattacaggctatgcgggaggaacaggacagaaccccattgatgtttcagcgcatggagcctcctagcccaacccaggagggcggccccggccagaatgcactgccttcgactcagttggatccggggggggccctgatggctcatgagagtggtttgaaggaatctccatcttgggtaactcaaagggcgcaggagatgtttcagaaaaccggtacatggagtcccgaacaaggcccacccactgatatgcctaactctcagcccaattcccagagtgtcgaaatgagggaaatgggtagggacgggtatagcgacagcgagcattacctgcctatggagggacagggtagggccgcctctatgccgcgattaccagcagagaaccaacgcagacgtggacggcctaggggaaacaatctgagtaccattagcgacacctcaccaatgaaaagatcagccagtgtcctgggccccaaggcccggagactggatgattacagtttggagcgggttccacctgaggaaaatcagcggcaccaccagcgccgaagggatagatcgcacagggcctccgagcggtcactgggcaggtatacagacgttgataccggtctggggaccgacctttctatgaccacccagagcggcgatttgccatcgaaggagagagaccaagagcgtgggcggccaaaagataggaagcataggcaacaccaccatcaccaccaccatcaccaccacccccccccaccagacaaggaccggtatgcccaggaaagacccgaccatggccgggcccgcgctcgcgaccagcggtggtctagatctccttcagagggacgcgagcacatggcccaccggcaatag

SEQ ID NO: 181255 - DNA, 7488 bp, synthetic construct
  misc_feature 1..7488: note = Description of Artificial Sequence: Synthetic coding sequence
  source 1..7488: mol_type = other DNA
atggcccggttcggcgacgagatgcccgcccggtacggcggcggcggctcaggagccgcagcgggagtggtggtcgggtctggcggcggccggggcgctggaggaagccggcagggcggacaaccgggagcgcaacgaatgtataaacagagtatggcccagcgcgcccgaaccatggctttgtataatccaatacctgtgcgccagaattgcctgactgtcaaccgctcactattcctgttttccgaggataacgtcgttcggaagtatgctaaaaaaatcacagaatggccccccttcgaatacatgatcctagctaccattattgccaactgtattgtactggcactcgagcagcacctgccagacgatgataagaccccaatgtctgaaaggctggatgataccgaaccttatttcatcggcatattttgctttgaagccggaatcaagataatcgctcttggattcgccttccacaaagggagttacttaagaaacggatggaatgtgatggacttcgtggtggtgctcacgggcatcctcgccacagtgggaaccgaattcgaccttcgcactctgcgagccgtccgagtgctaagacctttgaagctcgtgtcaggaattccaagtctgcaggttgtgctaaagtcgattatgaaggctatgatccctttgctccagatcggcttgcttctgtttttcgcgatcctgattttcgccattattggcctagaattctacatgggaaaattccacacaacctgttttgaggaggggactgacgacatccagggagaatcccctgcaccatgtggcaccgaagagccagcccgaacatgtcccaacggaacgaaatgccagccatattgggaaggcccgaacaatggcatcacccagttcgacaatatcttgttcgctgtgctgacagtgttccaatgcatcaccatggagggctggacagatctgctctataactctaacgacgcttctgggaatacctggaactggctgtacttcatcccacttataataatcgggtccttttttatgcttaacttagttcttggtgtgctgtccggagagtttgccaaagaacgggagcgggtggaaaaccgtcgcgcctttcttaaactccggaggcaacagcagatcgagagggaattgaacggatatatggagtggatcagtaaagccgaagaagtcattctagcagaagatgaaaccgatggcgaacagcgacatcctttcgatggtgcacttaggagaactaccatcaagaagagtaaaactgatcttcttaaccccgaggaggctgaggatcagcttgccgacatcgcatcagtcggaagtccattcgcccgggcctcaattaaaagcgccaaactggaaaacagcaccttctttcataagaaagagagacggatgcgcttctatatccgaagaatggtaaagacacaggccttctactggaccgtgcttagccttgtcgcattgaatactttgtgcgtggccatcgtccactataatcagcctgaatggttgtccgacttcctgtattacgccgaattcatctttcttggcttatttatgtccgagatgtttatcaaaatgtatggtctggggaccaggccttatttccactccagctttaactgctttgattgcggggtgattattggatctattttcgaggtgatctgggcagtgataaaaccaggaacgagcttcggaatttccgtgctgcgggcactgcgcctcctgcgcattttcaaggtaacaaaatactgggcttctctgagaaacctggttgtaagtctcttaaacagcatgaaatcgatcatttccctgctgtttttactgtttcttttcattgtggtatttgcactgctgggaatgcagctgtttggaggtcagttcaactttgacgaaggtactccccctacaaatttcgatacattcccggctgctattatgaccgttttccaaatcctgaccggcgaggactggaacgaagtgatgtatgacggcataaaatcccagggtggcgtacagggcggtatggtatttagtatatatttcattgttttgacactattcggtaactacacactgctgaacgttttcctagcaatcgcagtggataatctcgccaatgcgcaggaattaactaaggacgaacaggaggaggaggaagctgccaatcagaaactggcactgcagaaggcaaaggaggttgcagaggtcagccctctgtccgccgccaatatgtctattgctgttaaggagcagcagaaaaatcagaagcccgcaaaaagtgtgtgggagcagagaacttctgaaatgcgcaagcaaaatctcctggcctctcgggaggccctgtacaacgagatggacccagatgagcggtggaaggctgcctacacaaggcacctgcgccctgatatgaaaacacacctcgacagacctcttgtggtcgatcctcaggaaaaccgtaataacaacaccaataagtcacgggcagccgagcctactgtcgatcaacgcttgggacagcaaagggccgaagatttcttgcggaaacaggccagataccacgatagggccagagacccaagtggaagtgccgggttggacgctcgccggccttgggcagggagccaagaggcagagctgtctagggagggcccttacgggcgtgaatccgaccatcacgcccgggaaggatccctggaacagcccgggttttgggaaggcgaggccgagcgggggaaagccggtgacccccaccggcgtcatgtgcacagacagggcggctccagggagagtagaagtggctcgcccaggacaggggcggacggggagcacaggcggcatagggcgcaccgtagaccaggggaggaaggccccgaagataaggcagagcgcagggcccggcaccgagaggggtccagacctgctcgcgggggtgagggagaaggcgagggtccagacgggggcgaacggcggcgccgccaccgtcatggagctcctgcaacatacgagggtgacgcccggagagaagacaaagaacggaggcatcgccgcagaaaggaaaaccagggatccggcgtcccagtatctggccctaatctcagcacgaccaggcctatccagcaagatctgggaagacaagatccaccactggcagaggatatcgataatatgaaaaacaacaaactggctacagctgaaagtgccgcaccccacggatcattgggacatgctggcctgcctcagagtccagccaaaatgggcaacagcacagatccagggcctatgctggctatcccagccatggctactaacccgcaaaatgctgcgtctcggagaacacccaataacccagggaatccctccaaccctggccctccaaagacccctgagaacagcctgatcgtgaccaatccctccggcacccagaccaattccgctaaaaccgcccggaagcccgaccatacaacagtggacattcctccagcgtgcccgcctccgctcaaccatacagtggttcaggtaaataaaaacgctaatcctgaccccctgccaaaaaaagaggaggagaagaaggaggaggaagaagacgatcgcggagaagacgggccaaagcctatgccaccctactcatcgatgtttatcctgtctaccactaacccgctgagaaggctctgccactatatcctcaatctacggtacttcgaaatgtgcattctgatggttattgcaatgagttctatcgccctcgccgccgaggatccagtgcagcctaatgctcccagaaacaacgtcctccgttatttcgattatgtgttcacaggcgtgttcacatttgagatggtcatcaagatgatcgatctgggcttagtgctgcatcagggagcatattttcgggacctgtggaatattcttgattttatcgtggtgagcggcgctttggttgctttcgcttttaccgggaatagcaaaggcaaagatattaatactattaaatccctgcgtgtcctgcgagtgctgagacccttaaagacaattaagagacttccgaaactgaaggccgtgttcgattgtgtggtgaactcactgaagaacgtgtttaacattctaatcgtatacatgctctttatgtttatctttgctgtcgtggccgtacaactcttcaagggtaagttttttcactgcactgacgaatccaaggagttcgagaaggactgtagggggaaatacctgctgtatgaaaagaacgaggtaaaggccagagatagagagtggaaaaagtacgagttccactacgataatgtactgtgggctctgctcacactcttcacagtgtcaactggcgaaggatggccccaggtgttgaaacactcagttgatgcgactttcgaaaatcagggccctagcccaggctaccgtatggagatgagcatattctacgtggtgtacttcgttgtatttccttttttctttgttaacatcttcgtggctctgatcattattaccttccaagaacagggtgataagatgatggaagagtatagtctggaaaagaatgaaagggcatgcatcgatttcgccatcagcgccaagccacttacaagacacatgcctcaaaataaacagagctttcagtacagaatgtggcagtttgtggtcagtccgcccttcgagtacactattatggctatgatcgccctcaatacaatcgtgttaatgatgaagttctacggggccagcgtggcctacgagaatgcattgcgggtttttaatattgtctttacaagcctgttctctctggagtgtgtgctgaaagtgatggcattcggaatcttgaattactttagagacgcatggaacatctttgattttgttaccgtactcggctccatcaccgatatcctggtcacagagtttggaaacaactttatcaatctctctttcctccggctttttcgggcagccagactgattaagcttttgagacagggttacaccataaggatcttgctgtggacctttgtccagtctttcaaagctttgccatacgtgtgcctgttgatcgcaatgcttttttttatatacgctatcatcggtatgcaggttttcggaaatatcggcatcgatgtggaagatgaagactccgacgaggatgaattccagatcactgaacacaataactttcggaccttttttcaggctctcatgctactttttagatcagcaacaggtgaagcatggcataatataatgctgtcatgcctgtctggtaaaccatgtgataaaaacagtggcattctcacacgtgagtgtggcaacgagttcgcttacttttattttgtgtccttcatatttctgtgctcattcctcatgctgaacctgtttgtggccgtgattatggacaacttcgagtacctcactcgtgactcaagcatcctggggccacaccacttggatgagtatgtacgtgtgtgggccgaatacgaccccgcggcgtggggaagaatgccgtacctagacatgtaccagatgctacgccacatgtcacctcccctcggactaggtaagaagtgccccgcaagggtggcatataagagactgctgaggatggatctacccgtagcagatgataacacagtgcatttcaacagcactttaatggctcttattcggacagcactggatattaagattgccaaagggggcgccgacaagcaacagatggatgcagagctgagaaaagagatgatggctatctggccaaacctgtctcagaaaacactagaccttctggtgacccctcacaagagtaccgatttgactgtgggtaagatctacgccgcaatgatgattatggagtactataggcaatcgaaggctaagaaactgcaggcgatgagagaggagcaggataggacccccctcatgttccagaggatggagcctcccagtcccactcaggagggtgggcccggccagaatgccctgccgtctacgcagctggaccctggaggcgccctgatggcacatgaaagcggcctgaaagaatccccaagttgggtaacccaaagggcccaggagatgtttcaaaagaccggaacctggagtccagaacagggtcctcctacggatatgcccaattcgcagccaaattcacagagcgtggaaatgcgggagatgggacgcgatggctactcagactcagaacactacttgcctatggaaggtcagggcagagcagctagcatgccccggcttcccgcagagaaccagacaattagcgacaccagtcccatgaagaggagcgcctccgtgttgggccccaaggcgagaagattggacgactattccctggagagggtgccccccgaagaaaaccagaggcaccatcagcggcgcagagaccgtagccatcgtgcttcagagaggagtttgggccgatatacagacgtggataccggtctcggcacggacctcagtatgacgacgcagtccggtgacctccctagtaaggagcgggaccaggagcgcggtaggcccaaggacagaaaacatagacaacaccatcatcaccatcaccatcaccatcacccaccgcctcctgataaggaccgatacgctcaagaacgcccagatcacgggagggcgcgggcaagagaccagaggtggtcccggagcccatccgagggcagagaacacatggctcaccgtcagggatcgtcgagtgtgtcaggcagcccagctcccagtacatcaggaacgagcacccctcgaagagggagacgccagctgccacagacacccagtacaccaagacctcacgtgtcgtatagtcccgtgatcaggaaggccggtggcagtggtccgccacaacagcagcaacagcagcagcaacagcagcaacaacaggccgtggcaagacctgggagggctgccacaagcggtcctcggcggtacccggggcctacagccgaaccactagctggtgatcgccccccaactgggggccactctagtggccggagtcctcgtatggagcggagagttcctggacctgcacggagcgagagtccccgcgcctgtcgtcatggcggtgcaaggtggcctgcctcaggtcctcacgtctccgaaggcccacccgggccaaggcaccatgggtattaccgaggaagcgattacgatgaggcagacggtcccggttcaggtggtggggaagaggccatggctggtgcttacgacgcccccccacccgtacgccacgcctctagtggtgctacagggcgatccccacgaaccccccgtgcatctggccctgcatgtgcttccccttctcgccatggacgcagattgcccaatggctattaccccgctcatggcctcgccaggccccggggtcctggaagtcggaaaggcttgcacgaaccatacagcgagtctgacgatgactggtgttag

SEQ ID NO: 181256 - DNA, 7521 bp, synthetic construct
  misc_feature 1..7521: note = Description of Artificial Sequence: Synthetic coding sequence
  source 1..7521: mol_type = other DNA
atggcccggttcggcgacgagatgcccgcccggtacggcggcggcggaagcggcgctgccgctggcgtcgttgttgggtccgggggaggacgaggcgcagggggctcacgccaggggggtcagccaggcgcccaaagaatgtacaagcagagtatggcccagagggcgcgcaccatggccctgtataaccctattcctgtgcggcagaactgcctgactgtcaatcggagccttttcctgttcagtgaagacaatgttgtgcgaaaatacgcgaagaagattactgagtggccccccttcgagtacatgatccttgctacaattatcgccaattgcatcgtgttagcacttgaacagcatcttcctgacgacgacaagacacctatgagcgaacggctggatgatacagagccctatttcataggcattttttgtttcgaagcgggaattaaaattatcgctcttggtttcgctttccacaagggaagttacctgcggaatggttggaacgttatggacttcgtcgtggtgctgaccgggatcctggccacagtaggtaccgagtttgatctgcggacacttcgagcagttagggtcctgaggcctttgaaattggtctctggtattccttccctccaggtggttctcaaatctatcatgaaggccatgatccctctgctccagattggtttgctcctcttctttgcgatattaattttcgctattatcggactcgaattttacatggggaaatttcataccacatgcttcgaagaaggcacagatgacattcagggggagtctccggcgccttgtggcacagaggagcctgcccgtacatgcccaaatggcacaaagtgccagccgtactgggaggggcctaacaacggcatcacccaattcgataatattctgtttgcagttctgaccgtgtttcaatgtataaccatggaagggtggaccgatctgttgtataatagcaatgatgccagcggcaatacctggaattggctctactttattccgctgattattatcgggagcttttttatgctgaacctggtgctgggggtgctatccggcgagtttgcaaaggaaagagaaagggtcgaaaatcgtagagcattcctgaagcttcggagacagcagcagatcgagcgcgaattgaatgggtatatggagtggatcagcaaggcggaggaggtcattcttgccgaagacgagactgatggagaacaaaggcaccccttcgacgcacttaggagaaccaccattaagaagtcaaagactgatctgctgaatccagaggaagcagaagatcagctggctgatattgctagcgtgggttcgccattcgccagagcctcaattaaatcagccaagctggaaaacagcacgttctttcataagaaagagcgccggatgcgtttttacatccggcggatggtcaagactcaggctttttactggactgtgttgtccctcgtcgcattaaacaccctgtgcgttgctatcgtccattacaatcaaccagaatggctgtctgactttctctattacgctgaattcattttcctagggctcttcatgagcgagatgtttattaaaatgtacggcttgggaacaaggccatattttcactccagctttaactgctttgactgcggcgtgatcattggaagtattttcgaagtcatttgggctgtcataaagccaggcacgtctttcgggattagcgtgctgagggctttgcggctgctgagaatctttaaggtcacgaagtactgggctagtctgcgaaaccttgtcgtgtctctccttaactctatgaaatcaattatatcgctgctattcctgttgttcctttttattgtcgtgttcgcccttttgggaatgcagctcttcggcggccaatttaacttcgatgaaggcaccccaccaacaaatttcgatacattccccgctgccattatgacggtttttcaaatcctcaccggtgaagattggaacgaggtgatgtacgacggcataaaatcccagggcggggtgcagggcggtatggtcttctccatctatttcattgttctcaccctgtttggcaattataccctacttaacgtattcctcgccattgccgttgataacttggcgaatgctcaggaattgacaaaagacgagcaggaggaagaagaggccgccaatcagaaactcgctctgcaaaaggctaaggaggtggcagaggtatctcccttgagtgccgctaatatgagtattgcagttaaagagcagcagaagaatcagaaacccgctaaaagtgtttgggagcagcgtacttctgagatgcggaaacagaatctactggcatctcgcgaggcgctgtataacgaaatggaccccgacgaaagatggaaggctgcctacacccggcacctacgaccggacatgaagacccacttggaccggcctcttgtggtggacccacaggagaatcgtaataataacacgaacaagtctagagccgcagaacccacggtcgatcagaggctcgggcagcagcgagctgaggacttcctcaggaaacaggccaggtaccacgacagagctagggatcctagcggatccgctggcctggatgcgagacgtccgtgggccggctctcaggaggccgaactgagtagggaaggcccttatggacgggaaagcgatcaccatgctagagaaggttcactggaacaacctggattttgggagggagaggccgagcgtggaaaggctggtgacccgcacaggcgacatgtccacagacagggtgggtcaagggagtcaaggagcggcagtcccagaactggtgccgacggagaacaccggcggcaccgcgcacatcgaaggcctggcgaggagggaccggaggacaaggctgagcggcgcgctaggcatcgtgaaggtagtcgtccagcccggggcggagagggcgagggggagggacccgacgggggtgaacggaggagacgccaccggcatggagcccctgccacttatgaaggcgatgcccgcagagaagataaagagcggagacatagaagaagaaaagaaaatcagggatcgggtgtccctgtcagtgggccaaatctgtctacaactagacccatccagcaggacctaggaagacaggacccacccctcgctgaggatatcgataacatgaaaaataataagttggctaccgctgagtcagccgccccccatggaagtctgggacacgcaggtttgccccaatcacctgcaaagatgggcaattcaaccgatcctgggccaatgctcgcaatccctgcaatggcgaccaacccccaaaacgccgcttcccgtaggacacctaacaacccagggaacccaagcaaccctggcccccccaagacccctgaaaacagcctcatcgttactaatccttccgggacgcagaccaattccgccaagaccgccagaaaacctgatcacactacagtggacattcccccggcttgtccacccccgttgaaccacaccgtagtccaggtaaacaaaaacgccaaccccgatccattacccaaaaaggaggaggagaaaaaagaggaggaggaggacgacaggggagaggacggacctaaacctatgcccccctattccagcatgtttattctctcaaccactaatccacttcgcagactgtgccactacatcctaaatctaaggtattttgagatgtgcattcttatggtgatcgcaatgagcagtatagctttggcggctgaggatccagtacaacctaatgcccccagaaataacgtgttgaggtactttgactacgtgttcactggggtcttcacatttgaaatggtgattaagatgatcgacttgggtctcgtgctacaccagggagcttatttcagggacctgtggaatattctggactttattgtggtgtccggggcgctggtggcattcgcatttaccggaaattctaagggcaaagatataaacaccattaagagcctgcgggtcctccgagtcctgcggcccctgaaaacaatcaagagacttcctaaactgaaagctgttttcgattgtgtcgttaactctctcaaaaacgtgttcaatatcctcattgtgtatatgctatttatgttcatctttgctgtggttgccgtacagctttttaaaggaaagttcttccactgcacagacgagagtaaggagttcgagaaggactgccgcggaaagtacctcctctacgagaagaatgaagttaaagccagggatcgcgagtggaagaaatatgaatttcattatgataatgtcctgtgggctttgctgacattgttcactgtatccacaggagaggggtggcctcaggttctcaagcactccgtggacgctaccttcgagaatcagggcccttcgcctggctatagaatggagatgagtatcttttacgtcgtgtatttcgtggtgttcccattcttttttgtgaacattttcgtcgcgctgattattatcactttccaagagcagggggacaaaatgatggaggaatacagcctggaaaagaacgagcgcgcatgtatcgattttgccatctcagcaaagccactgacacggcatatgccccaaaacaagcaaagctttcagtacaggatgtggcagtttgttgtatctcctccattcgagtacacgatcatggccatgatcgcccttaacactattgttctgatgatgaagttctatggggccagtgtcgcttacgaaaatgcactgcgcgtgtttaatattgtctttacgtctctgttttctctggagtgcgtcctcaaggttatggcctttggaatcctaaactatttccgagatgcctggaacatcttcgatttcgtgactgtgctgggctccattacagacattctcgtgaccgagttcgggaataatttcatcaacctttcttttctgagactgtttagggcagcaaggctgattaagcttttgcggcagggatacacaatcagaatcctcctctggactttcgttcagagctttaaggcacttccatatgtttgtctactaatcgccatgttatttttcatttacgcaattatcgggatgcaggtgtttggtaatattggtatcgacgtggaggacgaagattctgatgaagatgagttccaaatcacggagcacaacaacttccgcacattctttcaggcgctgatgttgctgtttcgctccgccaccggagaggcctggcacaatatcatgctctcctgcttgagcgggaagccatgtgacaaaaactctggaatcctcacaagagagtgcggcaatgaatttgcgtatttttacttcgtaagtttcatctttctgtgttcatttttgatgctaaacctgtttgtggcagtcatcatggataacttcgagtatcttacgagggactcaagcattctgggcccacatcatctggacgaatatgtgagagtatgggctgaatacgaccccgcagcctgggggagaatgccatatctagacatgtaccagatgctacgccacatgagccccccactgggtcttggaaagaagtgcccggcccgcgttgcatacaaaaggctcctgcgcatggacctgcctgtggctgacgacaacactgtgcacttcaattcgactctaatggcactcatccgaactgctctagatatcaagattgctaagggcggggcagacaaacaacagatggacgccgagctgaggaaggagatgatggctatctggcccaatttatcccagaagacactggacctgctagtgacacctcacaaatcaacagatctaactgttgggaagatctacgcagccatgatgataatggagtattatcgtcagtccaaggccaaaaagttgcaagctatgagagaagagcaggataggacccctctgatgttccagcgcatggagccccctagtccaactcaggaaggcgggcctgggcaaaacgccctgcccagcactcaactggaccccggaggggctctcatggcccacgaatccggccttaaggagtccccatcctgggttactcagcgcgctcaggagatgttccaaaagactggcacctggtctccagaacaaggccctccaactgacatgcctaactcacaacctaattcgcagagcgttgaaatgagagagatggggcgcgatggttactccgattcagaacactacttacctatggaggggcaaggccgggctgcgtccatgcctaggctccctgctgagaatcagcgcaggagggggcggccaaggggtaataatttgagcaccattagcgacacttcccccatgaagaggagtgctagcgttctcgggcccaaggcgagaaggctggatgattacagcctcgagcgggtgccgcccgaagagaatcagcgtcatcaccagaggcgccgcgacagatctcacagagcttccgagagaagtctgggcagatacaccgacgtagataccgggctagggacagaccttagcatgaccacccagagcggggatctgcctagcaaggagcgcgatcaggagcgggggcgtcccaaggaccgtaaacaccggcagcatcatcaccaccaccatcatcatcatcatccacctcctcctgataaagaccgctacgctcaggagcggccggatcacggacgtgcccgggccagagaccagcgctggagccgcagtcctagcgagggaagagagcatatggcacaccgccaaggatcctcatccgtgagcggctcccctgcaccatcaacgtccggcacctccacacctcgaagaggacgccggcagctccctcagacccctagcacgcctaggccccatgtctcttatagcccggtcataaggaaggccgggggaagcgggccaccacagcagcagcaacagcagcagcaacagcagcagcagcaggccgttgcacgtcccggcagagctgcgacctccggcccgaggagatatccgggccccaccgccgagcccttggccggcgatcgccccccaaccggcggacatagtagtgggcggagtccacggatggagcgacgcgtccccgggccggcacggagcgaatcacctcgcgcctgtcgccacggcggggcgcgctggccggctagcggcccacatgtgtcagaaggaccgccgggaccaagacaccacgggtactaccgcggctctgattacgatgaagccgatgggcccgggtccggaggaggcgaagaggctatggctggtgcctatgatgccccgcctcccgtgagacacgcgagttccggagcgactggacgctctcccagaactcccagagcctccggccccgcatgcgcctccccgtcaaggcacggccgcaggctgccaaatggctactatcccgcccacgggttagccagaccaagaggtcccggaagtagaaaaggcctacatgagccatattccgaaagcgacgatgattggtgttag

SEQ ID NO: 181257 - DNA, 7539 bp, synthetic construct
  misc_feature 1..7539: note = Description of Artificial Sequence: Synthetic coding sequence
  source 1..7539: mol_type = other DNA
atggcccggttcggcgacgagatgcccgcccggtacggcggcggcggtagcggtgccgccgccggagtggtagtggggtctggcgggggacggggagccgggggatcgcgccagggcggccaaccaggagcccagcggatgtataagcagtctatggcgcagcgcgctcgtaccatggccctgtacaatcccatccccgtgcggcagaactgtcttaccgtgaatcggtccctcttcttattcagtgaggataacgtggttcgcaagtacgccaagaaaattactgaatggccacccttcgagtacatgatcctggccaccataatcgctaactgcattgtgttggcactggagcagcatctccccgatgacgataaaactcccatgtctgagcgccttgacgatactgagccttactttatcggcattttctgcttcgaggcagggattaaaataatcgccctaggcttcgcgtttcataaggggtcttacctgcggaacgggtggaacgtgatggatttcgtagtggtcttaacaggtattctggccactgtgggcaccgagttcgatctgcgaacactgcgggcagtgagagtgctgcgcccacttaagttagtgtccggcatcccctcactgcaggtagttctaaagtcaatcatgaaagccatgattcccctccttcaaatcgggttgctgctgttctttgccatcctcatctttgctattataggactagagttctacatgggcaagttccacactacttgcttcgaggaaggcactgatgatatacagggcgaatcacccgctccttgtggtacagaggagcccgcccgaacatgtcccaacggcaccaagtgccagccgtactgggagggtcccaacaacgggattacccaatttgacaacatactttttgcagtcttgaccgtttttcagtgcattacgatggagggctggacggacttattgtataattcaaacgatgcatctggcaatacttggaactggctctactttattcctctcatcatcattggtagcttctttatgctgaatcttgttcttggagttctgagtggggaattcgctaaggagcgagagcgtgttgaaaacagaagggctttcctgaagctgcggcggcagcagcagattgagcgtgagctcaatggctacatggagtggatctccaaggcagaagaagttattctggccgaggatgagacagacggcgaacagagacaccccttcgacggagcattgagacgcacaacaatcaagaagagtaagacggacctgttgaaccccgaggaagctgaggaccagttagcggacatcgcttcagtcggcagtcccttcgccagagctagcatcaagagcgctaaacttgagaattcgacattctttcataagaaggaacgacgcatgcggttttacattagacgtatggtcaagacgcaggccttctactggacagttctgagcctggtggccctcaatacgttgtgcgttgctatcgtgcactacaaccagcccgagtggctgtccgatttcctgtactacgctgagttcatcttcctgggcctgttcatgtccgaaatgttcatcaagatgtatggcctgggtacccgcccttacttccactccagctttaattgcttcgattgcggtgtaattattggaagtatttttgaagtcatctgggccgtcatcaagcctggtacatctttcgggatcagcgttttgcgtgctcttagactcctgaggatctttaaagtgacaaaatactgggccagtctacgaaacctagtcgtctcacttctgaacagcatgaagtcaatcatctcattgttatttctcttgttcctgtttatagtagtgttcgctctgctaggtatgcagctctttggagggcagtttaatttcgatgagggtacaccccccactaactttgacactttccctgcagcaatcatgaccgtcttccagatcttgactggcgaggactggaacgaggttatgtatgacgggatcaaatcccagggaggcgtgcagggcggaatggtattcagtatttacttcattgtgctgactctgtttggcaattacacattattaaatgtcttccttgccatcgccgtggacaatctggccaacgcccaggaacttaccaaagttgaggctgacgagcaggaggaggaggaggctgccaatcagaaacttgcactgcaaaaagcaaaagaagtagctgaggtatctcctttatctgcagctaacatgtctattgccgtgaaggaacaacagaagaaccagaagccagccaaatccgtctgggaacagcgcacctccgaaatgagaaagcagaatctgctggcttctcgtgaagctttgtataacgagatggaccctgacgaacgctggaaagcagcgtatacacggcacctcagacccgatatgaagactcatttggacagaccactggtggtagaccctcaggagaaccggaacaacaacacaaacaaaagccgcgctgctgagcccaccgtagaccagaggctcgggcagcagcgagctgaggacttcctgaggaaacaagcaaggtaccacgatcgagccagggatcccagtgggtctgctggacttgatgcccgcaggccttgggccgggtcccaggaggcagagctgtccagagaggggccttacggccgagagtcagatcatcacgctagggaaggaagtctcgagcaaccgggtttctgggaaggggaagccgaaagaggaaaggctggtgatccacatcgcaggcacgtccatcggcagggtggctccagagagtcacggagcgggagccccagaaccggagcggatggggaacaccgccggcaccgtgcccaccgacggcccggagaagagggacccgaggacaaggccgagcggcgggctagacatcgggaaggttccaggccggcgcgggggggggagggggagggcgagggaccagacggcggcgaacgacgccgacggcatagacacggtgcccctgcgacatacgaaggagatgcgcggcgggaggataaagagaggcggcataggaggcgcaaggaaaaccagggttccggggtgcccgtgagtgggccgaatctgtctaccaccaggcccattcagcaagatctgggtcggcaggacccgcccttggccgaagatatcgataacatgaaaaacaacaagcttgcgactgctgagagtgcggcccctcacggctccctcggccacgcaggtctcccacagtccccagctaaaatgggcaattccacagacccaggccctatgttagccatacctgcaatggccaccaatccccaaaacgccgcatcacgaagaacacccaataatcctgggaatccaagcaacccgggccctccaaagacacctgaaaattctctgattgttaccaacccgagcggcacacaaacaaatagtgcaaaaacagccagaaagccagaccacacaacagtggatattccccctgcttgcccaccacccctaaaccatactgtggtgcaggtaaacaagaacgccaacccagatcctcttccgaaaaaggaagaagagaagaaggaggaggaagaagatgaccgcggtgaggatgggccaaaacccatgcctccctacagctccatgttcattctcagcacgacaaacccactccgacgactgtgccattacattttaaacctgcgatattttgaaatgtgtatacttatggtaatcgcaatgagcagtatcgcgctggccgccgaggaccctgttcaacccaacgcaccccggaataacgtgctgcggtatttcgattacgtgttcaccggtgtgtttacgtttgagatggttatcaagatgattgacttaggattggtcttacatcagggagcctatttcagggacctgtggaatatcctggatttcattgtggtgtctggcgccctggttgccttcgcattcaccggaaattccaagggaaaagatataaatactattaagtcactccgcgtcctgcgagtgctaagacctcttaaaactatcaagagattaccaaagctcaaggctgtttttgactgtgtggtgaactccctgaaaaatgtgttcaacatcctgattgtctatatgctgttcatgtttatttttgccgttgtcgccgtgcaactgtttaaggggaagttctttcactgtacggatgaatccaaagagttcgagaaggactgccgtggaaagtacctactgtacgaaaaaaacgaggtgaaagcacgggaccgcgaatggaagaagtacgaatttcattatgataacgtgctctgggccctcctaacactgtttactgtgtccacgggcgagggttggccccaggttctgaagcattctgtggatgctacgttcgagaatcagggaccttcgcccggctatcgaatggaaatgtccatcttctacgtggtgtacttcgtggtgttcccctttttttttgttaacatcttcgtggctcttattatcattacctttcaggaacagggggacaagatgatggaggagtacagcctggagaagaacgagagagcttgtattgacttcgcaatttccgctaaaccgctgacacgccatatgccacagaacaagcagtcgtttcaatacaggatgtggcagtttgttgtgtctcccccttttgagtacacaatcatggccatgattgcattaaataccattgtgttgatgatgaagttctacggggctagtgtcgcgtacgagaacgcattaagagtcttcaacatcgtcttcacatccttgtttagcctggagtgtgttcttaaagtgatggcctttggaattttaaactacttccgagatgcctggaatatcttcgatttcgtcacagttctcggtagtatcaccgacatcttggtcaccgagttcgggaaccctaacaactttatcaacctcagcttcctgagactgtttagagcggcgcggctgatcaaactgctgaggcaaggatatacgatccgaatactgctttggacctttgtccaaagctttaaggctctcccctacgtctgcctcttaatcgcgatgctgttttttatctacgcgattatcggcatgcaggtgtttgggaacatagggatcgacgtggaggacgaagatagcgacgaggacgagttccagatcaccgagcacaacaactttagaacattctttcaggccctgatgctgttattccgctccgccacaggcgaggcctggcataacatcatgctgtcatgtctatctggaaagccctgtgataaaaatagcgggattttaacgagagagtgtggaaacgaattcgcctacttttattttgtctcctttatctttttatgctctttcctcatgctcaacctcttcgtggctgttataatggacaactttgaatacctgactagggactcatcaatcctcgggccacaccatctcgatgagtacgtgcgggtatgggccgagtatgaccctgctgcctggggaagaatgccttatcttgacatgtatcagatgctgcgccatatgtctccccctctgggcctgggcaaaaagtgccccgccagagtagcctacaaacgactccttagaatggacttgcccgttgccgatgacaacaccgtccactttaactccaccctgatggccctgattaggaccgctctggatatcaagatcgcaaaagggggggcagataaacagcagatggacgcggaactccggaaagagatgatggcaatttggccgaatttgtcccagaaaacattggatctgttagtgacaccccacaaatctacagacctcacagttggcaagatctacgcagccatgatgattatggagtattacaggcagtccaaagcgaagaagctacaggcaatgagagaagaacaagatcggacgcccctcatgttccagcgcatggagccaccttctccaacgcaggagggcgggcctgggcagaacgccttgccatccacccagctcgaccctggaggcgcactgatggcacacgaatcaggattaaaggaatccccttcttgggtgacccagagggcccaagaaatgtttcagaagactgggacatggtcccctgagcaggggcccccaactgacatgcccaattcacagcccaattctcagtcagtcgagatgcgcgagatgggcagggatgggtacagcgattccgagcactatcttccaatggaaggacaaggcagagccgcttccatgccaagattgcctgctgagaatcagaggcgcagggggcgtccccgaggaaataatctctccacaatttctgatacaagcccgatgaaacgttccgccagcgttctcgggcctaaagccagaagacttgacgattattccttagagcgggtgcccccagaagaaaaccaacgtcatcaccagaggcgaagagataggtcccatagagcttctgaacggagtctcggaagatacaccgacgtggacactggccttgggaccgacctgagtatgaccactcagagcggtgatctcccatccaaggagcgcgatcaagaacggggcagaccaaaggaccgaaaacataggcagcaccatcaccaccatcaccaccaccaccacccacctcccccagataaagacagatacgcccaggagaggcctgaccacggccgggcgcgagccagggaccaacggtggtctcggagcccctctgagggacgggagcatatggcccacagacagggatcatcaagtgtgtcaggaagcccagctccttcaactagtggcaccagtacaccccggcgcggtcgcaggcagctgcctcagaccccttctacacccaggccccatgtcagctactctccagttatccggaaagcggggggttcaggccccccacagcagcagcagcaacagcagcaacagcagcagcaacaggcagtcgcgcgacccggtagagccgctacttcaggacctagaagataccccggcccaacagcagaacccttagccggagatcggccaccaactggggggcacagcagcggacggtctccgcgtatggagcgacgggtgcctggccctgcaagaagcgaaagccccagagcctgtcggcatggaggggctcgttggcccgctagcggcccacatgtctccgagggaccccctggccctaggcatcacggttactatcggggatcagattatgacgaagcagatggcccgggctctggagggggcgaggaggctatggcaggtgcttatgacgctcccccaccggtacgacatgcctcttctggagctacaggaagaagtcctcggacccccagagcatcaggtcccgcgtgtgcctccccaagtcgacatgggcgtaggctgccaaacggctattatcccgctcacggcctggcacgaccccggggaccagggtcgaggaagggattacacgaaccttatagtgaatcagatgatgattggtgttag

SEQ ID NO: 181258 - DNA, 804 bp, synthetic construct
  misc_feature 1..804: note = Description of Artificial Sequence: Synthetic coding sequence
  source 1..804: mol_type = other DNA
atgctgttcatgttcatcttcgccgtggtggccgtgcagctgttcaaaggtaaattcttccattgtacggacgaatcaaaagaattcgagaaggactgtagaggcaaatacctcttgtacgagaagaacgaggtcaaggcaagagatcgggagtggaagaagtatgagttccattacgataatgtcctgtgggcactgctcacactctttaccgtgagcacaggtgaaggatggccacaggtgctcaagcactccgtggacgcaacctttgaaaaccagggaccctccccaggctacagaatggaaatgtcaatattttatgtggtgtactttgttgtgtttcctttcttcttcgtgaacatcttcgtcgccttgatcatcatcacttttcaggagcagggggacaaaatgatggaagaatacagtctggaaaaaaatgagagagcatgtattgactttgccattagcgcaaagcctctgacccggcatatgccgcaaaacaaacagagctttcaatacaggatgtggcagttcgtggtgtccccccccttcgagtataccattatggccatgatagctctcaacacaatagtgttaatgatgaagttttacggagcatcagtggcttacgaaaatgcgttacgggtattcaacatcgtgttcacatcactctttagcctggaatgtgtcttgaaggtcatggcatttggaatcctgaactacttccgagacgcctggaatatctttgatttcgtgacagtgctgggctcaattactgacatcctcgtgacggagtttggctag

SEQ ID NO: 181259 - DNA, 6795 bp, synthetic construct
  misc_feature 1..6795: note = Description of Artificial Sequence: Synthetic coding sequence
  source 1..6795: mol_type = other DNA
atggccctgtacaaccccatccccgtgcggcagaactgcttcaccgtcaaccggtcactgttcatctttggagaagataatatagtccgtaagtacgcaaagaaactaatcgactggccacccttcgaatacatgattctggcaacgatcattgcaaattgtatcgtcctggccctggaacagcatcttcctgaggatgacaaaacacccatgtcgaggaggcttgagaagaccgagccctacttcattggtatcttttgcttcgaggcaggcatcaagattgtcgccctcgggtttatctttcacaaggggtcatatctgcgcaatgggtggaacgtgatggatttcattgtcgtgttatctggaatcctggccacggccggaactcatttcaacacccacgtggatctccgcacacttcgggccgtgagggtcctgcgacccctgaagttggtgagtggtataccaagcctccaaatcgtattgaagtctattatgaaagccatggtgccgctgttgcagattggcttgctgctcttctttgctattcttatgttcgccattatagggctagaattttactcaggcaagctgcatagggcctgttttatgaacaacagcgggattctcgaggggttcgatccccctcatccctgcggggtccagggttgtcctgcaggttacgagtgcaaggattggatcggccccaatgatgggatcacacagtttgataacatcctgtttgccgtcttaacagtgtttcagtgtatcaccatggaaggctggacaaccgtgctctacaacacaaatgatgctctgggggcaacgtggaactggctgtactttatacccttaataatcatcgggagtttctttgttctgaatctggttttgggcgtactctccggagagttcgccaaggaacgggagcgcgtggaaaataggcgcgcttttatgaaattgagaagacagcagcagatcgagcgggagctcaatggataccgagcgtggatagataaggcggaagaagtcatgttagcggaagaaaataaaaacgccggcacttcagccctagaggttttgaggcgggcgaccatcaagcgatctaggacggaggctatgacacgtgatagcagcgacgaacactgcgtagacatttccagcgttggaacgccactggcccgggctagtatcaagtctgcaaaggtggacggggttagctacttcagacacaaggaacgcctgctgcgcatttcaatccgccatatggtgaagagccaggtattttactggatagtgctgagcctagttgcccttaatactgcttgcgtagcaattgttcaccataatcagccacagtggctcactcacctgctctattatgctgagttcttgttcctgggattgttcctgcttgagatgtccctgaaaatgtatggtatggggcctaggctctactttcacagctcatttaactgctttgacttcggagtgacagtgggctccatctttgaagtagtgtgggctatttttcgacctggcacatccttcgggatcagtgttctgagagccctgagactcctccgcattttcaaaatcactaaatattgggcctctctaaggaatctggttgtgtctctaatgtctagcatgaagtctattataagtctcctgttcctgctgttcttgttcatcgtggtatttgcattgctggggatgcagttgtttggcggccgattcaatttcaatgatggaacacccagcgcaaatttcgacacattccccgccgccataatgacggtctttcagattttaacaggggaagactggaatgaagtgatgtataacggaatcaggagccagggtggagtgtcctcgggcatgtggagtgctatttactttattgtgctcaccctgttcggcaattatacccttttgaatgtgtttttggcaatcgctgtggacaacctagccaacgcgcaagaactgactaaggacgagcaggaggaggaggaggcattcaaccaaaagcacgccttacagaaagctaaggaagttagccctatgagcgctcctaatatgccgtccatagaaagagaccggaggcgtcgacatcatatgtccatgtgggagccacgatctagtcacctaagagaacgcaggcgccggcaccacatgtccgtctgggaacagagaacctcccaactcaggaagcacatgcagatgagtagccaggaagccctgaaccgggaagaggctccaaccatgaaccctctcaacccgctgaaccccctgtcatcgctgaacccactgaacgcccaccccagtctgtataggcgccccagggccatcgaagggttggctctcgggctcgcactagagaagttcgaggaggagcgcatctcccgagggggatcactaaaaggggacggcggagaccggtcatccgcactagacaatcagagaacaccactctctttaggccagcgggagcccccttggctggctcgcccatgccatgggaactgcgaccccacacagcaggaagccggcggaggcgaagctgtcgtcacctttgaggatagagctagacacagacagtcccaacgacggtcccgccatcggcgagtgagaacagaagggaaggagagcagtagcgcttcccggtcaaggtcagcaagccaggaaagaagccttgatgaggcaatgcccactgaaggggagaaggatcacgaattacgggggaaccatggggcaaaagagcctaccattcaggaagagagagctcaagacctccgaaggactaactccctcatggtttcacgcggcagtggcctggctggcgggttggatgaagccgatactcccctagtgctgcctcatccagagctagaggttggaaagcatgttgttctgacagagcaggagcctgaggggtcgtcggaacaagctctgctaggaaacgtacaactggatatgggtcgggtgatctcacagtcggagccagacctgtcgtgcattacggcaaataccgacaaggcgacaactgagtccacaagtgtgacagtcgcaatccctgatgtggacccactggtggacagcactgtggttcacatttctaacaagaccgacggagaggcttctcccctgaaggaggctgagattagggaagatgaggaagaggtagagaaaaagaaacagaaaaaggaaaaaagggagaccggcaaagcaatggtcccacatagcagtatgtttatcttctcgaccaccaaccctatacgccgcgcctgtcactacatagtaaacctgcgctactttgagatgtgtatcctccttgttattgcagcttcatcaatcgcccttgccgctgaagacccggtgctgacgaactcagaaaggaacaaggtccttagatactttgactatgtgttcacaggagtgttcaccttcgaaatggtaattaaaatgatcgaccagggcctgatacttcaagacggttcttacttccgggacctctggaatattttagactttgtggtggtagtcggagctctggtcgccttcgccctggccaattctatgaaaacaaataaagggcgcgatataaagaccattaagagcctgagagtactgcgagtgctcagacctctcaaaacaatcaaacggctcccaaaactcaaggctgtgttcgactgtgtagtgacctccctgaagaatgtgttcaacattctgattgtctacaagcttttcatgttcattttcgccgttatcgcggtacagctttttaaaggcaagtttttttattgcacggatagcagtaaggacacggaaaaggagtgtattggaaattatgtcgaccacgagaagaacaaaatggaggtcaaagggcgggagtggaagagacatgagtttcattatgacaacattatatgggccctgctcaccctcttcactgtctccaccggggaagggtggcctcaggtgttacagcattcagtcgatgtgaccgaggaagacaggggaccaagtagatctaacagaatggaaatgtcaattttctacgtagtatactttgttgttttccctttctttttcgtcaacatttttgttgctctgattattataactttccaggaacagggagacaaaatgatggaggaatgcagtcttgaaaaaaacgagcgagcttgcatagacttcgctatatctgcaaagccactcacacggtatatgcctcagaatcgacacacctttcagtatcgtgtctggcactttgttgtgtcaccatcattcgagtatacgatcatggcaatgatagccttgaatacggtcgtgctgatgatgaaatattacagcgcaccatgcacctacgagcttgctcttaagtatttaaacattgcctttacgatggtttttagtctggagtgtgtactcaaggtgatcgcttttggttttctaaactacttccgggacacctggaacatcttcgattttattacagtgattggaagtatcaccgaaatcatcttgactgacagcaaactggttaacactagcggctttaatatgagtttccttaaactatttcgggccgcacgcctcattaagcttctccgccaggggtataccattagaatcctgctgtggacattcgtacagtcatttaaagctctaccctacgtgtgcttgttaattgctatgctgtttttcatttatgctatcattggcatgcaggtttttggaaatatcaagttagacgaagagagccacataaatagacataataactttcgttcctttttcgggtctttgatgctactcttccgaagcgcaaccggcgaggcctggcaggagatcatgttgtcctgcctaggggagaaggggtgcgaaccggacacaacggccccttcaggccagaatgagaacgagaggtgtgggacagacctcgcctatgtctatttcgtcagctttatctttttttgcagctttctaatgctcaacctgtttgtggccgtaattatggataacttcgagtatctgaccagagattcctctattttaggaccccatcatctagatgagtttgtgcgggtgtgggcggagtacgacagagcagcatgcggcaggatacactacactgagatgtacgaaatgctgacactgatgtccccccctttgggtctcggaaaacgttgtccctctaaagtggcttataagcggcttgtgctcatgaacatgcccgtcgctgaggatatgaccgtccacttcacctccacacttatggctttgattaggacagccctggacatcaagattgccaaggggggagctgaccgacaacagctggacagtgaattacagaaagaaacgctggcaatctggccgcatctctcccaaaaaatgctagatctgctggtgcctatgcccaaggcgtcagatctgaccgtaggtaagatatatgcagcaatgatgataatggattactacaagcagtcaaaagtgaagaagcaacgccaacagctggaggaacagaagaacgcccctatgtttcagagaatggagcctagtagtcttcctcaggagatcattgctaacgctaaggcactaccttaccttcaacaagaccctgtgagtggcctcagcggaagaagcggttatccctctatgtcacccctctcccctcaggacatattccaactggcctgcatggacccggccgatgatggtcagttccaggaacggcagagtctagaacccgaggtgagtgaactaaagagcgtccaacccagcaaccacggcatctacctcccttccgacactcaggaacacgcaggcagcggtcgcgcttccagcatgccgcggttgacagtcgatccgcaggtggtgaccgatccttcgtccatgcgtagaagcttctccacaattcgcgataagcggtccaattcatcctggctggaggagttcagcatggaaaggtcgagcgaaaacacctacaagtctcgaagacgcagctatcactcctctctgagactctctgcgcataggctgaacagcgattccgggcataagagcgatacacacaggagtggtggccgtgagagaggccgatctaaggagcggaagcatctgctgagcccagacgtttcacgctgcaattctgaggagaggggaacgcaggctgactgggagtcccccgagcgtcggcagagccgatccccatccgagggtcgatcccaaacccctaatagacagggtactggcagtttgtcagagagcagtatcccttcggtatcggatacctctacacctagaaggagtaggaggcagctccctcccgtgccacccaagccaaggccattgctctcttattctagcttaattcgacatgctggctccatttctcctccagccgacggctcagaggagggctcgcccctgactagccaggccttggaaagcaacaacgcatgtctcaccgaatcaagcaattccccacacccacagcaatcacagcacgcgagtcctcagaggtacatcagcgaaccctacctggccctgcacgaggattcccacgcctcagattgcggcgaggaggaaaccctcaccttcgaggcagcagtggctacatcccttgggcgcagcaatacaatcgggtctgctccacctctccgccattcttggcagatgcctaatgggcattaccgacggagaagacgaggtggccccggtcctggcatgatgtgtggtgctgtgaacaacctcctcagcgacacggaagaagacgacaaatgctag

SEQ ID NO: 181260 - DNA, 6609 bp, synthetic construct
  misc_feature 1..6609: note = Description of Artificial Sequence: Synthetic coding sequence
  source 1..6609: mol_type = other DNA
atggccctgtacaaccccatccccgtgcggcagaactgcttcaccgtcaacagaagcctattcatcttcggggaagacaacatcgtcaggaagtacgctaaaaagctgattgattggcctcccttcgagtatatgatcctggccaccatcatcgcaaactgcattgttctggctctggaacagcacctgccagaggatgataagacccccatgagtcggcgtcttgagaaaacagagccgtattttattggcatattttgcttcgaagccggtattaagattgtggccctcggcttcatcttccataaaggatcctatcttaggaacgggtggaatgtgatggacttcatcgtcgttttatcggggatcttggcaaccgcaggaacacactttaacactcacgttgacctgcggaccctccgggcagtaagggtcctgagaccccttaagctggtgtctggtatcccaagtctacagattgtgctcaaatccatcatgaaggctatggtgccgctcctccagattggtctgctcttgttctttgccatcttgatgttcgcaattatcggcctggagttctactcaggcaagctacatagggcgtgttttatgaacaacagcggaatactcgagggtttcgatcccccccatccatgtggggtacaagggtgccccgcagggtatgagtgcaaagattggattggccctaacgacggcatcacacaatttgacaacattctgtttgcagtgctcacagtttttcagtgcatcaccatggaagggtggactacagtattgtacaatactaacgacgccctgggcgccacatggaattggttgtactttatcccactgataataatcggttcattctttgtactcaacttggtgctgggagttctgagcggagaattcgcaaaggaacgggaacgggttgaaaaccggcgagcattcatgaaactgcggagacagcagcagattgaacgggagctcaacggttatcgggcgtggattgacaaagccgaagaagtaatgctagcagaggagaacaagaacgccggtacaagcgctttagaggtccttcggagagccactatcaagcggtctcgcacagaggccatgactcgggacagttctgacgaacactgtgtggatatttctagtgtgggcactcctttggcacgcgcttctattaagtccgctaaggtggatggagtcagctatttcaggcataaagagcgactcttgaggatttccatacggcacatggtgaagagccaagtgttctactggattgtactgagcctcgtcgcattgaataccgcatgcgtcgccatcgtccaccacaatcagccccagtggttaacccatctcttgtactatgctgagttcctgttcctcggactatttttgctggaaatgagcctcaagatgtatggaatggggccgcgcctttacttccactcctcttttaattgctttgattttggagtgaccgtaggatcgatctttgaggtcgtatgggctatttttcgcccaggtacatcctttgggattagcgtgttgcgggcgctgcgcttactcagaatatttaagattaccaagtactgggcctccctgagaaatcttgtggtctccttaatgtcttccatgaaatcaatcatctctttgctgttcttgctgttcttatttatagtcgtctttgccctcttggggatgcagctgtttggcggacgcttcaactttaacgatggaaccccatcagcgaacttcgatacctttcccgctgcaatcatgacggtgtttcagattctaactggcgaagattggaacgaggtgatgtacaatggaatccgatcccaggggggcgtgagttctggcatgtggtcagccatctattttatcgtgcttacactgttcggcaactatacactgcttaatgtattcctggccatagccgttgacaacttggctaacgcgcaggagttgacaaaagacgagcaggaggaagaagaagctttcaatcagaaacacgctctccagaaagcaaaggaagtgtccccaatgtccgctcccaacatgccttccattgaacgggaacgcaggaggcgtcatcatatgtcagtttgggagcagaggacatcccagctgcgcaaacatatgcagatgagctctcaggaggctctgaatcgtgaggaagccccaaccatgaatcctcttaacccactcaaccctctgtcgtcgctgaacccactaaatgcccacccttccctgtaccgaagacctcgggccatagagggccttgccctgggattagccctggagaagtttgaggaggagcggatctctagaggaggtagcctgaagggcgacggcggggatagatccagcgccctggataatcagaggacccctctgagcctagggcagagggaacctccgtggctagctcggccttgtcacggcaattgcgatcccacacagcaggaagccggcggaggtgaggccgttgtgacctttgaagatcgcgcccggcacaggcagtctcaacgacgtagccggcaccgtcgagtgagaacagagggcaaggaatcatctagcgcctctcgatcaaggagcgcatcccaggaaaggtcactggatgaggcgatgccaacagaaggagaaaaggatcatgagttaagagggaaccacggtgccaaggagccaaccatccaggaagaaagagcacaagacttgcgcaggactaattccctgatggtctccagaggatctggcctagccggaggactcgacgaggcagatacccccttggtgctgcctcacccggaactcgaggttgggaagcatgtggtcctcacagagcaggagcccgagggctcttccgagcaggcactgctaggaaatgtgcagctggatatggggagagtgatttcccagtctgagccagacctgtcttgtattaccgccaatacggataaggctaccacagaaagcacgagtgtgacagtggccattccagacgtcgatccactggttgacagcacggtggttcacatctccaataagaccgatggggaagcatcaccactgaaagaggccgagatccgggaggacgaggaagaagtcgagaaaaaaaagcaaaaaaaggagaaaagggagaccgggaaagctatggtgccccactcctctatgttcatcttttccactacaaatcctataaggcgggcctgtcattatattgttaacctgcgatacttcgagatgtgtatactactggtgattgccgcctccagcattgccctggccgcagaggaccccgtccttaccaatagcgagagaaacaaagtgttaagatacttcgattatgtgttcactggtgtgttcaccttcgagatggtgatcaagatgatcgatcagggcttgatcctgcaggacgggtcatattttagagacttatggaatatcctcgacttcgttgtggtggtgggtgctctggtggcattcgcattagcaaacagtatgaagactaacaaaggtcgtgatattaaaactatcaaaagcctgagagttctccgcgttctgaggcccctgaaaacaattaagagactacctaagttgaaggccgtttttgattgcgtcgtcacctccctcaaaaatgtgttcaacatactgatagtttacaaattgtttatgtttatatttgcagtcattgccgtccagctctttaaaggaaagtttttttattgcactgacagctccaaagacacggagaaggagtgtattgggaactatgtagaccacgaaaagaataagatggaagttaagggaagggagtggaagcggcacgaattccattacgataatattatctgggcgctgttaactctgttcaccgtctccaccggggagggttggcctcaagtgctgcagcacagcgttgatgttacagaggaggacagagggccgtcccgcagcaatcggatggaaatgtccattttttacgtcgtgtacttcgtggtgttcccattcttcttcgtgaacattttcgtggccctcattatcattacttttcaggaacagggagataagatgatggaggagtgcagcctggagaaaaatgaaagggcatgcattgatttcgccatcagcgccaaacccctgacacgatatatgccccagaaccggcacacttttcaataccgtgtgtggcactttgtggtttccccatcctttgaatacacaatcatggccatgatagctcttaatacagtggtcctcatgatgaaatactactcagcaccctgcacttacgaattggcccttaaatatctgaatatcgcgtttaccatggtgtttagtttggaatgcgttctcaaagtcattgcctttggatttttgaactatttccgagacacctggaacatctttgactttatcactgtgattggatctataacggagatcatcctgaccgacagtaaactggtcaacactagcggattcaatatgtcgttccttaaactgtttcgcgccgcgagattgatcaagttgctgcggcaaggttatacaattcgcattttactgtggacctttgtccagagcttcaaagctctgccctacgtatgcctgcttattgccatgctcttctttatatatgcaattattggaatgcaggtctttgggaacatcaagctggacgaggagagtcatatcaatagacacaataacttccgctctttttttggcagcctcatgctgctgttcagatccgcgaccggcgaagcttggcaggaaattatgctttcatgtctcggtgagaagggatgcgaacccgacaccacggcccccagcgggcagaacgaaaatgagagatgcgggacagatctggcatatgtgtatttcgtctcatttattttcttctgctcattcctgatgcttaatttatttgtcgccgttatcatggataatttcgagtatctgactcgggactcatccattctggggccccaccatttagatgagtttgtacgggtgtgggctgagtatgatcgcgcagcttgtgggcggattccctataaggacatgtacaagctagtcagggtgatatcccctccactgggcctgggtgaaaattgtccttaccgggtcgcatgcaagcgccttgtgctgatgaatatgccagtggccgaggacatgacagttcattttacctcaaccctgatggccctcatcagaacggctttagacatcaagatagcgaagggaggcgctgatcgtcagcagcttgacagcgaattacagaaggagaccctcgctatttggcctcacctgagccagaagatgctggatctattggtgcctatgccaaaggcctccgatctgacagtggggaaaatctatgcagcgatgatgatcatggattattataagcaatccaaagtgaaaaaacagcggcagcaattagaggagcagaagaatgctccaatgttccagcgcatggagccatcttccctgccccaggagattattgctaacgccaaagctttaccctatctgcagcaagacccagtgtcagggctatcagggcggtcggggtacccatccatgagtcccctctcgccgcaagatatctttcaactggcttgcatggatcccgccgacgacggccagttccaggagcgacagtccctagtggtgactgatccgtcgtccatgcgtcgctcattcagcacaattcgtgataaacgttctaacagtagctggttagaggaattctctatggagcgctcgtcagaaaacacatacaaatctcgaaggaggagttatcattcctcactgcgcctctcagcccaccgtcttaactccgactccggtcacaagagtgatacccatcggtccggaggccgcgagcggggtcgaagtaaggagagaaaacatctgttgagccctgacgtctccaggtgcaacagcgaagaaagaggcactcaggccgattgggaaagccccgagaggcgccagagcagaagtcccagtgaggggaggagccagactccaaacagacaagggaccggaagcttgagtgaatcctctatcccgtctgtcagcgatacctctacgccgcgccggagccgaaggcagcttccgcctgtcccccccaagccaaggccccttttgagctactcttctttgattagacatgctggtagcatctccccgcccgctgatggctccgaagaaggcagccccctgacctctcaggcacttgaatcgaacaatgcgtgtcttacggagagcagcaactctccccatccgcagcagagtcagcatgcgtctccgcaaaggtacatctccgaaccatacctggctttacatgaagactcccatgcttcagattgcggagaggaggagactctgacttttgaggcagccgtggccacctctctgggcaggtccaacacaatcggatctgcacctcctttaagacattcgtggcaaatgcctaacggtcactaccgccgcaggaggcggggtggtccagggcctggaatgatgtgcggagccgtgaacaacctcttaagcgacaccgaggaggatgacaaatgctag

SEQ ID NO: 181261 - DNA, 6885 bp, synthetic construct
  misc_feature 1..6885: note = Description of Artificial Sequence: Synthetic coding sequence
  source 1..6885: mol_type = other DNA
atggcccggttcggcgaggccgtggtggcccggcccggcagcggcgatggcgactccgaccagagccgcaatcgacaggggactccagtgcccgcctcaggccaggctgctgcctataagcagacgaaggctcagcgggcccgcacaatggctctctataatccaattcctgtgagacagaattgtttcactgtcaacaggagcctgttcatcttcggagaagacaacatagtcaggaaatatgccaaaaagctgatcgactggcccccatttgaatatatgatcctggccacgatcatcgccaattgtatcgttttggctttggagcagcatcttccagaggatgataaaactccaatgtcacgccgactcgaaaaaaccgagccgtactttatcggaatcttctgcttcgaggcaggaattaagattgtggctctgggttttatatttcataagggctcctacctgcgcaatggttggaatgtaatggactttatcgtcgtcctgtccggcatcttggccacagccggaactcatttcaatacccacgtggacttacgtactcttcgagccgtgcgggttctcagaccactaaaactggtttcgggaatcccttccctgcagattgtccttaaaagtatcatgaaggcgatggtgccgctgctgcagatcggactcctcctctttttcgccattctgatgttcgccattattggcctggaattctactccggtaaactacatagggcttgttttatgaacaactctggcatcctggagggattcgacccgccccacccatgcggtgtccaggggtgtccagcagggtatgagtgtaaagattggattggcccgaatgacggaattacacagtttgataatatcctctttgctgtgctgaccgtcttccagtgtataaccatggaaggatggaccaccgtgctgtataataccaatgatgctctgggtgcaacgtggaattggctttacttcatacctttaattatcattggtagttttttcgtgcttaacctagtgctgggggttctctccggcgaattcgctaaggagagggaacgcgtagagaaccgtcgggcatttatgaaactgcggcggcagcagcagatagaaagggagttgaatggttacagagcctggatagacaaagccgaggaagtgatgctggctgaggaaaataaaaatgcaggcacctcagctctggaagttctgcgtagagccactatcaagcgcagccgcactgaagcaatgactcgggacagttccgacgaacactgtgtcgatatatcctctgtcggaacacctctcgctcgggccagtattaaatccgcaaaggtcgacggcgtttcttacttccgccacaaagagcggctgctgcggatctctatcaggcatatggtcaaaagtcaagtcttttactggatagtcctttctttggtggccttgaataccgcgtgtgtcgccatcgtccaccataaccaacctcagtggttgactcacctgctgtactacgcagaatttctttttctaggactgttcctgcttgaaatgagcttgaaaatgtacggtatgggtcccagactgtatttccactcgagttttaattgcttcgactttggagtcaccgtaggttccatctttgaagtcgtatgggccatctttagacctgggacgtcattcggcatctcggttctaagagctctgcgcttgctgagaattttcaagattaccaaatattgggcctcccttaggaacctggtagtgagcctgatgagcagcatgaagagtattatttccctgctcttcctgctgttcctcttcatcgtcgtgttcgcgctcctcggaatgcaactgttcggggggaggttcaacttcaatgatggtaccccaagtgctaactttgacacattccccgcagctataatgaccgtattccagatcttaaccggcgaggactggaatgaagtcatgtataacgggattaggagccagggtggagtatcatcgggcatgtggtcagcaatctactttatcgtattaactctgttcggcaattacacactgctgaatgtgtttctggccattgccgtggacaaccttgctaacgcccaggagctcacgaaggatgagcaggaagaggaggaggcattcaaccagaaacacgctctccagaaggctaaggaggtttccccaatgtccgcgcccaacatgcctagcatagaacgagagcgccgccgtcgccaccatatgtccgtgtgggaacagcgcacatctcaactgcggaaacacatgcaaatgtcgtcacaggaagccttaaatagagaggaagcccccacaatgaatccccttaatcctctgaaccccctttcgagcctaaacccattgaatgcacacccttcattataccgccgcccaagagccattgagggcttggctctcgggcttgcgctggaaaaatttgaagaagagcgaatcagccgcggcggctccctgaagggcgatggtggagacaggagcagcgcactggataaccagcgcacacccctgtcacttggccagagggagccaccatggctggcgagaccttgtcacgggaattgcgacccaacacaacaagaagcagggggcggcgaagctgtggtcacattcgaggatcgtgcccggcaccgccaaagccaacggcgctccaggcacagacgagtccggactgaagggaaggagagtagctctgccagcaggtctaggtcagcaagtcaggagcgatccctggatgaggcaatgccaaccgaaggtgaaaaggaccatgagctgagaggaaatcatggtgccaaggaaccaaccatccaagaagagagggctcaggatttgcgacgaactaatagtctgatggtgtctcgaggctcaggactcgcggggggactggacgaggccgatactccactcgtgttgccgcaccctgagttggaggtcggaaaacacgtggttctgacagagcaggagccagaaggcagcagtgagcaggcccttctgggcaatgtccagttagatatgggtcgcgtcattagtcagtccgagccagatttatcctgtattacagctaataccgacaaggccacgaccgagtctacttctgttactgtggccatccctgacgtagatccattggtggattcgacagtggtccacattagcaacaagacggacggcgaagcctcacccctgaaggaggcggagatacgggaggacgaggaggaggtggagaagaagaagcagaaaaaagaaaagagagaaaccggtaaggccatggtgccacactcttctatgttcatttttagcacaacaaatcccatccgcagggcatgccactacatcgtgaacctccggtacttcgagatgtgcatcttacttgtgatcgccgccagttccattgcattggcggcagaggaccctgtgttgactaactccgagcgcaacaaagtgttacgatatttcgattacgtattcacaggggtgttcaccttcgaaatggttatcaagatgattgaccagggtctgattctccaggatggttcttattttagggatctgtggaatatacttgactttgtagtagtggtgggtgccctggtggcattcgccctcgctaacgccttgggtactaacaaggggagggacattaaaactattaagagtctccgggtgctgagagtacttaggccattaaaaacaataaagagactgcccaaattgaaggccgtgtttgactgtgtagtcactagcttgaagaacgtgttcaatatactaattgtatataagctgtttatgtttatttttgcagttatcgctgttcagctgttcaagggcaagttcttttactgcacagattcgtctaaagacaccgaaaaagagtgtataggtaattatgtggatcacgagaagaacaagatggaggtgaaaggtagagagtggaaaaggcacgaatttcattacgacaatatcatttgggctttgttgaccctgttcactgtgtctacgggggaaggctggcctcaggtcctgcagcatagtgttgatgtaacagaggaagacaggggaccctctaggagcaacaggatggaaatgtcaatcttttatgtggtctatttcgttgtcttcccgtttttcttcgtgaacatctttgtggccctcattatcataacgttccaggagcagggggataagatgatggaagaatgctctttagagaagaacgagcgcgcatgtatcgactttgcaatttccgccaagcccctgacccgatacatgccacagaaccggcatacattccaatacagggtgtggcactttgtggtgtccccatcatttgagtatactatcatggctatgatcgccctcaataccgtcgtgctcatgatgaagtactactcggccccctgtacctatgagctggctctgaagtatttgaacattgcattcaccatggtgttcagcctggaatgcgtcctcaaagtaattgcctttggctttttgaactactttagggacacctggaatatctttgacttcatcaccgtgatcgggtccatcacagaaataatcctgaccgattccaaactcgtcaacacatcgggcttcaatatgtcatttctcaagctgttcagagctgctcgtctgattaaattgctgaggcagggctacacaattaggatccttttatggaccttcgtgcaaagctttaaggcgctgccctacgtctgtttgcttattgcaatgctgttctttatatacgccatcatcggtatgcaggtgttcggaaatattaaacttgatgaagagagccatatcaacagacataacaacttccggagcttcttcgggagcctgatgctactatttcgcagtgcaaccggggaggcgtggcaggaaatcatgctgtcttgcttaggcgagaaaggctgcgagcccgacaccaccgcaccgtccggtcaaaatgagaatgaaagatgtggaacagacctggcatatgtttattttgtcagtttcatatttttttgcagtttcttgatgctcaatctgttcgtggccgtgataatggacaacttcgagtacttgacaagagatagttctatcctgggaccccatcacctggacgagttcgtcagggtgtgggccgagtatgaccgggccgcctgcggaagaatccactacacagagatgtacgaaatgctgactctgatgtcacctcccctcggactgggcaagaggtgcccatccaaagtggcatacaagagactggtgctgatgaacatgccggtcgcagaagacatgacggtacatttcacctccactttgatggcacttattagaaccgccctggatattaagatcgccaagggtggcgcagaccgacagcagctcgacagcgaactccaaaaagaaactctggcaatctggccacacctgtctcagaagatgctcgatttgttggtccccatgcctaaggctagcgatctcaccgttggcaagatctacgcggctatgatgattatggactactataagcagagcaaggttaaaaagcagcggcaacagttggaggaacagaagaacgcacctatgttccagcgcatggagccatcatctctcccccaggagatcatcgccaatgccaaggctctcccatatcttcagcaagaccccgttagcggactctctggccgatcaggttatccgtcgatgagtccactgtctccacaggacatttttcagctcgcctgcatggatcctgcggacgatggtcagtttcaggaaagacagtcacttgagcccgaggtcagtgagctgaaatcagttcaaccgagcaaccatggaatatatttgccaagcgatacacaagaacatgctggttcagggagagcaagctcaatgccaaggcttactgtcgatccacaggtagttaccgatccctcttccatgcggcggagtttcagcactatccgggataagagaagcaactcttcatggcttgaagagttctccatggagaggagctctgagaacacctacaaatctagaagaagatcctaccactcctctctgcgcctctcagcacaccggcttaattcggactcaggacacaaatccgatacccaccgttcaggaggtagggagagaggaaggagcaaagagagaaaacatctgctgagccccgacgtaagcagatgcaattcggaagaacgcgggacccaggccgactgggagtctcctgagcgccgacagtctaggtctccctctgaaggcaggtcccagaccccaaaccgccaggggacaggatctctatctgagtctagtatcccatcagtgtctgacacctccacacctcgtagaagccgcaggcaacttcccccagtacctcctaagccacgtcctctgcttagctacagctctctgatccgccatgctgggagcatttcaccccctgccgatggatcagaggagggctcaccattaacaagccaggcgctggaatccaataacgcttgcctcacggaatcgagtaactctccgcacccccaacagtctcagcacgcctctccgcaaagatacatatccgagccttacctagccttacacgaggattcacacgcaagcgattgcggtgaagaagaaaccctgacttttgaagccgctgtagcgacctccctgggccgcagcaacacgattggatcagcacctcccctgaggcactcatggcagatgccaaatgggcattaccgtagaaggaggcggggaggccctgggcctggaatgatgtgcggggcagtgaacaacctcctgagcgacacagaggaagatgataaatgttag

SEQ ID NO: 181262 - DNA, 5634 bp, synthetic construct
  misc_feature 1..5634: note = Description of Artificial Sequence: Synthetic coding sequence
  source 1..5634: mol_type = other DNA
atgctggccgaggagaacaagaacgccggcaccagcgccctggaggtgctgcgaagagctacgataaagaggtcccgcacagaagcaatgacgcgtgactcatcggacgaacattgcgtcgacataagttctgtcggaactccgctggccagggcctctatcaaatctgcaaaagttgatggggtaagctattttcgacataaggagcggctgttacgaatctctatccgtcatatggtgaaaagccaggtgttctattggatagtcctctctttggttgccttgaataccgcttgcgttgctattgtgcatcataaccagccccaatggctcactcacctgctgtactatgccgaattcctatttctcggcctgttcctgctcgaaatgtcactcaagatgtacgggatgggtcctaggttatattttcattcttccttcaattgtttcgacttcggtgttactgttggttccatattcgaggtggtctgggccatctttcggccaggtacctcctttggcatctctgtgcttagagctctgcgtctgctgcggatttttaagatcactaagtactgggcttccctcaggaacttggtggtgtcattgatgtcctccatgaagtcaatcataagtctactgttcctcctctttttgtttatcgtggtgttcgccttactaggcatgcaactctttggggggcgttttaattttaatgacgggaccccttccgcgaacttcgacacattcccagccgcaatcatgacggtatttcaaatccttactggggaagattggaacgaagtgatgtacaatggcatcaggtcccagggaggagtttccagcggcatgtggagcgctatctacttcattgtgcttacactcttcggtaactacacactgctcaacgtttttctggcaattgccgtggataacctggctaatgcccaggagctgacaaaggacgaacaggaagaggaagaggccttcaaccagaaacatgctcttcagaaagctaaagaggtcagccccatgtcagccccaaatatgccctctattgagagagatagacgccggcgccaccatatgtccatgtgggaaccacgctcatcacatcttagagaaaggcgccgcagacatcacatgagtgtgtgggagcagagaacttcacagctccgcaaacacatgcaaatgtcaagccaagaagctcttaaccgcgaggaagctccgaccatgaatccgctgaatccccttaaccccctttcctctcttaatccgctgaacgctcacccttcactgtatcgcaggccaagggccatcgagggcctggccctgggtttggccctcgagaagtttgaggaggaacgaattagtagaggaggaagcctcaagggtgatggaggagacagatcgtctgctttagacaatcaaaggacgccactgtccctggggcaacgagaacccccctggctagcacgcccctgtcacggaaactgcgatcctacacagcaggaggcggggggaggcgaagcagtggtgacgttcgaggatcgtgcaagacaccggcaaagtcagcggcgatctagacaccggagggtgaggaccgaggggaaggaatccagcagtgcttcacggtcccggtctgccagccaggagcgaagtctggatgaggctatgccaacggaaggcgaaaaagaccacgagctaaggggaaatcacggtgctaaggagcctacaatccaagaggaacgggctcaggacctcagaagaaccaatagtcttatggtttcgagagggagcggcctcgccggcggactcgatgaggcagatacgcctcttgtactgccacatcccgagctcgaggtgggtaaacatgttgtgctcaccgagcaggagcctgaggggagctctgaacaagccctactcggaaatgtgcagctagacatgggccgcgtgatcagccagtcagagcccgatctgagctgtatcactgccaataccgataaagcaaccacagaatctacctctgtaactgtcgcgatccctgacgtcgacccactggtggattccactgtggttcatattagtaataagaccgatggagaggcctcccccctgaaggaagctgaaatacgtgaggatgaagaagaagtggagaagaaaaagcagaaaaaagagaagcgcgagaccggcaaagctatggtgcctcatagctcaatgtttattttctccacaaccaatcctatcaggagggcatgtcattatattgttaatctcaggtatttcgagatgtgtatcctgctggtgatagcagccagctctatagccctggccgcagaggacccagtgctgacgaactccgaaagaaacaaagtactccgttactttgactacgtgtttacgggtgttttcactttcgagatggtcatcaaaatgattgaccagggccttattctccaggacggttcttactttcgggatctttggaatatcctggacttcgttgtcgtcgtgggcgctctggtggcattcgctctagccatgagcctggagacaaataagggcagggatataaagacaattaagtctctgcgggtgctccgtgttctgcgccctctcaaaacaattaaacggctgccaaaactcaaagcggtcttcgactgcgtggtgacgagccttaagaacgttttcaatatactgattgtctataagctgttcatgttcatctttgctgtcatcgcggtccagctcttcaagggcaagtttttctattgtaccgactcctctaaagataccgagaaggagtgcataggtaattacgtggatcacgagaagaacaagatggaggttaaagggcgagagtggaaacggcatgaattccactacgataacattatttgggccctgctcactttatttacagtgtctaccggagaagggtggcctcaggtattgcagcacagcgtcgatgtgactgaagaggataggggaccgtcccggtccaaccgcatggaaatgagcatcttttatgtcgtctactttgtcgtattcccatttttctttgtcaacatctttgtggccttgattattatcacttttcaggagcagggcgacaagatgatggaggaatgctcgttggagaaaaacgagcgtgcatgcattgacttcgccatctcagccaagcccctgacacgttacatgccccagaatcggcataccttccaatatagagtatggcatttcgtggtcagcccgtcatttgaatacaccatcatggccatgatcgctctgaacaccgtcgtgctaatgatgaagtactattctgccccatgtacttacgagctggctctgaagtatctaaacatcgccttcactatggtgttctccctggaatgcgtactgaaagttatcgcttttgggtttcttaattactttcgtgatacttggaacatcttcgacttcatcacggtgattgggagtattacagagattattcttacagattccaagctggtgaatacatctggattcaatatgtcttttcttaagctttttcgcgctgcaagactcatcaagctcctgagacagggttacaccatccgcatcctgctttggacctttgtgcagtcttttaaagccttgccctacgtgtgcctgcttattgccatgttattttttatttacgcgatcatcggcatgcaggtcttcggcaatatcaagctggacgaggaatcacatattaaccggcacaataatttcaggagcttcttcgggtcactgatgctgctcttcaggtccgcaaccggcgaggcatggcaggagatcatgctgtcgtgtctcggcgagaaaggctgcgaaccggataccacagctccttccggccagaatgaaaacgagcgatgcggtaccgatctggcatacgtgtactttgtctccttcatttttttctgttccttcctcatgctaaacctgttcgtggcggtcattatggataatttcgagtacttaaccagggattccagcatcctgggcccgcaccatctggatgagtttgtgcgagtctgggccgaatatgacagagcagcttgtggtaggatacattatactgaaatgtatgagatgctgactttaatgtcacctccactgggcctaggcaaaaggtgccctagtaaggtggcatacaaacggctcgtgctaatgaacatgcctgtggccgaggacatgaccgtgcactttactagcaccctgatggcactgatacgtaccgccctcgacatcaagatcgctaagggaggcgccgataggcagcaattggattccgagctgcagaaggagactcttgccatctggccccatctaagtcaaaagatgttggatctgctggtccctatgccaaaggcatcagacttaaccgtgggaaagatttacgccgcaatgatgattatggattattacaaacaatcaaaagtgaagaagcagagacagcaactcgaggaacagaaaaacgcccctatgttccaaagaatggaacccagcagcctgccccaggaaatcatagcgaatgccaaagccttgccctatctacagcaggatcctgtgagcggcctgtcgggaaggtccggatatccatctatgagccccctctccccccaggacatctttcaactggcgtgtatggatccagccgacgatggtcagttccaggagagacagtccctggtcgttactgacccttcctctatgaggaggagtttcagcaccatcagagataagcgcagcaacagttcctggcttgaagaattctccatggagcgatcgtcagaaaacacttataaatcgagaagacgtagctaccattcgagcttgcgactgtcggcgcacagactgaattccgattctggacacaagtccgacactcatagaagtggcggccgtgagagaggccggtcaaaagagaggaagcacctactctctccagacgtcagtaggtgtaattccgaggagcggggcacacaggccgactgggagtccccggaacgacggcagagtcgatccccaagtgagggccgctctcagacacctaacagacaaggcaccggctctctctccgagagtagcatacccagcgtgtcggatacctcaaccccccgtagaagtcggcgccagctaccccctgtgccaccaaagccccgccctctcctcagctattccagcttgattaggcatgcaggttctattagtccccccgccgatgggtcagaagaagggagccctctgactagccaagcactggaaagtaacaacgcgtgcttaactgagtcttccaactccccgcaccctcagcagtctcagcacgcctcaccacagcgatacatttctgaaccgtatttggctttgcacgaagacagccacgcatctgattgcggggaagaagagacactgacctttgaggccgccgttgcgacatcactcggtcggtcgaacactatcggtagtgcccctcccttacggcattcttggcagatgcctaatggtcattataggagaaggaggcgtgggggccctggtccaggcatgatgtgcggagcagtaaataatctgttatcggacactgaagaagacgacaaatgctag

SEQ ID NO: 181263 - DNA, 6813 bp, synthetic construct
  misc_feature 1..6813: note = Description of Artificial Sequence: Synthetic coding sequence
  source 1..6813: mol_type = other DNA
atggcccggttcggcgaggccgtggtggcccggcccggcagcggcgacggggattcggatcagagccgcaacaggcaaggaacgcccgtcccagcaagcggacaggccgctgcatataagcaaaccaaggcacagcgcgcccgaactatggcactctataacccaatccccgtgaggcagaactgtttcaccgtgaacaggtccctgtttattttcggtgaggacaacatcgtcagaaaatatgccaagaaactgattgactggcctccatttgagtacatgatcttggccactataattgccaattgcatcgtccttgccctcgagcagcatctccctgaagatgataagaccccaatgtccaggcgcctggaaaagacagaaccgtacttcattgggattttctgttttgaggcagggatcaagatcgtggcactcgggtttatctttcacaaaggttcataccttcgtaacgggtggaacgtaatggactttattgtggtcctctcaggcattttagctaccgccgggacacactttaacactcatgttgatctcaggacactcagggccgtaagagtgctgaggccgctcaagctcgtttccggtatcccgagtcttcagatcgtgcttaagtccatcatgaaagccatggtgcccctcctgcagatcgggttactgctcttcttcgccattttgatgtttgcaataattggtctggagttctatagcggcaaacttcaccgggcttgtttcatgaataattccggcatcctcgagggttttgatcctccccacccctgcggtgtgcagggctgccccgccggctatgagtgcaaagactggatcggcccaaacgatggaatcacccagtttgacaatatcttgttcgccgtcctaaccgtgtttcaatgtattactatggagggctggaccactgtgctgtataacactaatgacgccctgggtgctacatggaattggctgtacttcatccccctgataatcatcggtagcttctttgtgttaaatctcgtcttgggcgtcctgtccggagaattcgccaaggagcgcgagcgtgtggagaatcgacgcgcttttatgaagcttcgccggcagcagcagattgagagggaactgaacgggtatcgagcttggatcgataaggccgaggaagtcatgttagccgaagagaataagaatgccgggacctctgcactggaggttctccgcagggctacgattaaacgaagtcggactgaggcgatgacgagggactcatctgatgagcattgcgtggatataagctctgtcgggaccccactggctcgggcgtccattaagtcggcaaaggtcgacggcgtgagctatttcaggcataaggagcggctgctccgaatttcaatcaggcatatggtcaagagccaagtattctattggatagtcctgagtttagtcgccttaaatacagcttgtgtggccatcgtccaccataaccagccgcagtggcttacccacctgctatattacgcagagttcctgtttctgggtttgtttctgctggaaatgtctctaaagatgtacgggatgggccctcggctgtatttccacagctcgtttaactgctttgacttcggagtgaccgtaggcagcatctttgaagtggtctgggccatttttcgccctgggacgtctttcggcattagcgtcctgcgggctctgcgtttgttgaggatcttcaaaatcaccaagtattgggcctcattgcggaacctggtagtctctctgatgtctagcatgaagagcataatctccctactgttcctcctgttcctgttcatcgttgtgttcgcgttgctcgggatgcagctatttggcggcagatttaactttaacgatgggacgcctagtgccaatttcgacacatttcccgcagccatcatgaccgtgttccaaatcctgacaggcgaggattggaacgaagtgatgtataacggcataagaagccagggtggtgtatcttccggcatgtggagtgccatatatttcatcgtgctcaccctgttcggcaactatacactgttgaacgtgttcttggccatcgcagttgataaccttgctaatgctcaggagctgacaaaagacgagcaggaggaggaggaggcctttaatcagaaacatgcactgcagaaagccaaggaggtgtcacccatgagtgcacctaatatgccgtccatcgagcgcgaccggaggcgacgccaccatatgagcatgtgggaacctcgcagcagccatctccgagaaagaagaaggcgacaccatatgtcagtgtgggaacaacgcacttcacagctccgaaaacatatgcagatgagtagccaagaagcgcttaatagggaagaggccccgacaatgaacccgctgaatcccctgaatccactcagctcccttaatcccctgaacgcacatccatcattatatagacgacccagagccatcgagggtctggccctcggcctggcgctggaaaaattcgaagaagagaggatttccagggggggatccttgaagggagatggcggagacaggagttccgcactggacaatcaacgtacccctctgtctttaggtcagcgcgaaccaccatggttagctcgtccgtgccatggaaattgcgatcccacccagcaagaagcaggcgggggtgaggccgttgtcacattcgaggacagggcccgtcataggcagagccaacggcgatccagacaccggagggtgaggaccgagggcaaggagagctcctccgccagtcgatctcggtccgcaagccaggagagaagcctcgacgaggccatgcctactgaaggcgaaaaagatcatgagttgaggggcaatcatggcgcaaaagagcctactattcaggaagagagagcccaagatctgcgcaggacaaattccctgatggtgagtcggggatcaggactggcaggtggtctggatgaagccgacacacctttagtgcttccgcaccctgagctcgaggtgggaaaacacgtagtgctgaccgagcaagaacccgagggaagctccgagcaggccctgcttgggaatgttcagcttgatatgggccgagtaatctcccagagcgagcctgacctgagctgtattacagccaatacagacaaggccacaactgaaagcacatccgtcacggtcgctatacctgacgttgatccactcgtggattctaccgtcgtgcatatttctaacaagacagacggggaggccagccctctaaaggaggccgaaattcgcgaagacgaggaggaagtggagaagaagaagcaaaaaaaagaaaagcgcgaaaccggtaaagctatggtcccacacagttctatgttcatcttttccacaacaaatccgattcggcgcgcttgccattatatcgttaacctgagatatttcgagatgtgcattttgctggtgatcgctgcctcttccatcgctctggcggcggaggacccggtgctcactaattccgagcggaacaaggtcttacgctattttgattacgttttcacaggcgtgttcacatttgaaatggtaattaaaatgatcgatcaggggctcatactgcaggacggcagctatttcagagacttgtggaatatcctcgatttcgtggtggtggtgggcgccttggtggcgttcgcactggccaatgctctgggcacaaataagggcagagatatcaagacgataaaaagcctccgagtgctcagagtattgagacctcttaagactatcaagcgtttgccgaagctgaaagccgtgtttgattgcgtggtgacatccctgaaaaacgtgtttaacatcctcatcgtgtacaagctcttcatgtttatatttgccgtgatcgccgttcagctgttcaaggggaaattcttctattgcactgattcttcaaaggataccgagaaagaatgcataggcaactacgtggatcatgagaaaaataagatggaagttaagggcagggaatggaagcgccacgaattccactacgataacatcatatgggctttactcacccttttcactgtctctacaggcgagggctggccacaggtgttgcaacatagcgtagacgtgactgaagaggaccggggcccatctaggagcaaccggatggagatgtccatattctatgtggtgtatttcgtggtgttcccattctttttcgtgaatatattcgtggcactgataataatcactttccaggagcaaggggacaagatgatggaagagtgttctttagagaagaatgaaagagcctgcatcgactttgctattagtgctaaaccccttacccggtatatgcctcagaaccgacatacctttcagtaccgggtctggcattttgtcgtgtctcctagttttgagtatacaataatggcgatgattgcgctcaacaccgtcgtcttaatgatgaagtactactcagccccctgcacatacgaacttgctctgaaatacctgaatatcgccttcacaatggtcttctccctggagtgtgtgctcaaagttattgccttcggatttctgaattacttccgggacacctggaatattttcgacttcatcaccgtgattggttccataaccgaaatcattctaaccgatagtaagcttgttaatacctcaggtttcaatatgagctttcttaagctcttcagagctgcaagactgatcaaactcctaagacaggggtataccattcgaatccttctgtggacattcgttcagtcattcaaggctttgccgtacgtgtgtcttttgatcgcgatgctcttttttatctacgctatcattggcatgcaagtatttggcaacatcaaactagatgaggaaagccatatcaacagacacaataactttcgcagctttttcggaagtttaatgttacttttccggtctgctactggagaggcatggcaggagatcatgctgagttgtctcggtgaaaaaggatgtgagcccgacaccactgctccctccggccaaaacgaaaacgaacggtgcggcactgatttggcatacgtatactttgtctcatttatcttcttctgttcctttctcatgctcaacttgttcgtggccgtaatcatggataacttcgagtacctcactcgtgattcttcaattctcggacctcaccacctggatgagtttgtgagggtgtgggctgagtatgacagggctgcctgcggccgaatccactatactgagatgtacgagatgttaaccctgatgtctcccccacttggacttgggaagagatgtcccagcaaggttgcatataagaggctggtcctgatgaacatgcctgtggctgaggatatgaccgtccactttaccagcacactgatggccttgattcggacagcacttgatataaagattgccaaaggcggcgccgaccgccaacagctagattccgagttgcaaaaggaaacattggcgatttggcctcatttgtctcagaagatgctggatttgctagtgccgatgccaaaggcctctgacctgaccgtcggcaaaatctatgccgcgatgatgatcatggactattacaaacagtccaaagtgaaaaaacaacggcagcagctggaagaacagaagaatgcgccgatgttccagcgaatggagccctccagtctgccccaggagattattgccaatgctaaggcacttccctatctgcaacaagatccagtgtcaggattgagcggccgctctggatatccctccatgtcacctctgagtcctcaggatatttttcagctggcctgcatggatccagctgatgatgggcagttccaggaacgacagtctctggtggtgacagatccatcctcaatgaggaggagcttctcaacaatccgggataaacgtagcaactcctcttggttagaggagtttagtatggagcggtctagcgagaacacctacaaatctcgtcgacgcagctatcattcttctctccgcctctcagcccatagactaaactccgacagtgggcataagtccgatacacaccggtcaggcgggcgggagcgcggtcgcagcaaagaacgcaaacatctgctaagccccgacgtcagcaggtgcaattctgaggaacgtggcactcaggccgattgggagagtccggagcgaagacaatctaggtccccaagtgagggccgatcccaaacccccaataggcagggcactggcagcctgtccgagagctcaatcccttctgtgtccgatacatcaacgccacgcagaagtcgaaggcagctgcctcccgtgcctcctaaacctcgacctctgctctcttattcttcacttatccgccacgcaggctctatttcccctcctgccgatgggtccgaggaaggatcacctcttacctcacaggctctcgaaagtaacaatgcatgcctcaccgagagttccaattcaccacaccctcaacagtctcagcatgcctcaccacagaggtacattagcgaaccttacctcgccttacacgaagatagtcacgccagtgattgtggcgaggaagagacactgacgttcgaggccgccgtcgctacatctctgggccgcagcaacacaatcggatctgctcctccactgcgtcatagttggcagatgccaaatggacattaccggagaaggagaagggggggacccggccccggaatgatgtgcggcgccgtgaataatttgcttagcgacactgaggaggatgacaaatgctag

SEQ ID NO: 181264 - DNA, 6942 bp, synthetic construct
  misc_feature 1..6942: note = Description of Artificial Sequence: Synthetic coding sequence
  source 1..6942: mol_type = other DNA
atggcccggttcggcgaggccgtggtggcccggcccggcagcggcgacggcgattccgaccagagcagaaaccgacaggggactcccgtgccggcaagtggccaggcagctgcctataagcagacgaaagctcagagagcacgcacaatggcgctgtacaaccctatacccgtaaggcagaattgttttacagtaaaccgcagcctgtttattttcggggaggacaacattgtgcgcaagtatgccaagaagctcatcgattggcctcccttcgagtacatgattctggctactataatcgcaaactgcatcgtgttggcccttgagcagcacctgcctgaagacgacaagacgcccatgtccaggcgcctcgagaagacagaaccgtatttcattggcattttttgctttgaggctggcatcaagattgttgccctgggcttcatattccataaaggttcttacctccgaaacggctggaacgttatggactttatagtcgtgctttccggaatcttggccaccgccggaacccacttcaacacccacgtggatctccgtactctgagggccgtccgcgtgttacggccactgaagctggtctctggcattccttccttgcagattgtgcttaagtctatcatgaaagcgatggttcctctgttgcagatcggcttgctgctgtttttcgccatcctgatgttcgccataatcgggctagaattctactccgggaagcttcatagagcctgtttcatgaacaactccggcatattggagggcttcgatcctccccacccgtgtggcgtccagggctgtcctgctggctacgaatgtaaggactggataggtcccaacgatggcatcacccagttcgataacattctttttgccgttctgaccgtcttccagtgtatcaccatggagggctggaccaccgtgctgtacaatactaacgacgccctgggcgccacctggaattggctttattttattcccttgatcatcatcggttctttcttcgtcctgaacttggtgctgggcgtgctgagcggagaatttgccaaggagagagagcgtgtggaaaatagacgggcgttcatgaagctgcgcaggcagcagcagatcgaaagagagcttaacggttaccgggcctggattgacaaggcagaagaggtgatgctggcagaagaaaacaagaacgctgggacatccgccctggaggtgctcagaagagcgaccatcaaaagaagccgaaccgaggcaatgacccgtgatagctccgacgagcactgtgtggacatcagtagtgttggcaccccactcgcccgcgcttcaatcaagagtgctaaagtggatggcgtgagctattttcggcacaaagaacgtttactgcgtatcagcattaggcatatggtgaaaagtcaggtattctattggattgtgctatccctggttgcactgaacactgcctgcgtggcgatagtccaccacaatcaacctcagtggcttacacaccttttgtactatgccgagtttctgtttctggggctttttttattagagatgtccttgaagatgtatggaatgggacccagactgtacttccacagctcttttaattgctttgattttggagtcactgtcggctcgatcttcgaggtggtttgggcaatctttagaccgggaacctcttttggaatctcagtgctccgcgcccttcgattactgcgcatttttaagatcactaaatattgggcttcacttcgcaatttagttgtatccctgatgagcagcatgaaatccatcatctccttgcttttcctactttttctgttcatagtggtgtttgccctgttgggcatgcagctttttggcggcagattcaattttaacgacggcacaccatccgcaaatttcgacacattccctgcggcgattatgactgtgtttcaaatcctgaccggtgaagactggaacgaggtgatgtacaacggcattagatcccagggaggcgtctccagtggaatgtggtccgctatctacttcattgtattgactctatttgggaactatacgctcctaaacgtttttttggcaatcgccgtggacaacctcgcgaacgctcaggagcttactaaggatgagcaagaggaagaggaagcattcaaccaaaagcacgctctgcagaaggctaaggaggtgagcccaatgagtgccccgaatatgccatccattgaacgcgaccggcgacgaaggcatcatatgagtatgtgggaacctaggtcatcacacctgcgggaacgacgaagaaggcatcacatgtccgtgtgggaacagaggacatctcagctaagaaaacacatgcagatgtcaagccaggaggcactcaacagggaggaggcgcctaccatgaatccactcaatccactaaaccccttatccagtttaaatcctctaaatgcacatcctagcctttacaggaggcctcgagcgatcgagggactggccctcggcctggccctggagaagtttgaggaggagcggataagccggggcggaagcctaaagggggacggcggggaccggagttcagctctcgataaccagagaaccccattaagtctgggtcagagggagcccccttggctggctagaccatgccacggaaactgtgatcccacccagcaggaggccggaggcggcgaagctgtggtaacctttgaagatcgcgcaaggcatcgacagtctcaacgccgatctaggcacagaagagttagaaccgagggtaaggaaagctcctccgcctcaagaagccggagtgcctcacaggagcgctcactcgacgaagcaatgcctacagagggcgagaaggaccatgagctgagaggtaaccatggggccaaagagccaacgatccaagaggaacgagcccaggatctgcgccggactaatagcctgatggttagtcgggggtctggtctggctggagggctggatgaagcggacacacccctggttctgcctcatcccgaactggaggtcgggaagcatgttgtgctcaccgagcaggaacccgaaggtagcagcgaacaggctctattgggtaacgtccagcttgatatgggtagggtgatcagtcagtcagagccagatctcagctgtattacagctaatacagataaggcaacgacagaatctacttcagtcacagtggccatccccgacgttgacccccttgtggatagcacagttgttcatatttcaaacaagaccgatggggaggcctccccattgaaggaggctgaaatacgggaggatgaggaggaggtggaaaagaagaagcagaaaaaagagaaaagagagaccggcaaggccatggtcccgcactcttcaatgttcatattctctacaaccaatcctataaggcgggcttgccactacattgtgaatctaaggtattttgagatgtgcatcctgctcgtgatcgccgctagcagcatagccctcgcggcagaggatcctgttctcactaattcggagcggaacaaagtgctccgctatttcgattatgtcttcacaggcgtgtttacctttgagatggttattaagatgatcgaccaggggcttatactgcaggacgggtcttatttccgcgatctgtggaacatcctggactttgtggtcgtggtaggcgccctggtcgcgtttgcattagcaaatgccctggggactaacaagggaagggacattaagacaatcaaatcgctgagggtgctcagggtcttaaggcccttgaagaccatcaaacggctgccaaagctgaaagcagtcttcgactgtgtcgtgacgagtcttaaaaatgttttcaacattctgatcgtgtacaaactcttcatgttcatctttgcagtgatcgccgtccaactatttaagggcaagttcttttattgcacagacagctctaaggatacagaaaaggagtgcattggcaattacgtcgaccacgagaaaaataagatggaagttaagggccgagagtggaaacggcatgagtttcattatgacaacataatctgggccctccttaccctcttcaccgtttccaccggggaagggtggccacaggttctgcaacattcagtggacgtaacagaggaagacagaggcccaagccgctcgaatcgcatggagatgtcgattttttatgtcgtgtacttcgtagtcttccctttcttctttgttaacatcttcgtggcgctgattataatcacctttcaagagcagggagacaaaatgatggaagagtgttctcttgaaaagaatgaacgcgcttgcattgacttcgctatttcagcaaagccactgaccagatatatgcctcagaatcggcacaccttccagtaccgtgtctggcactttgtggtaagtccatccttcgaatataccataatggcgatgatcgctttaaatacggtcgtgcttatgatgaagtactactcagccccctgcacctatgaattagctctgaaatacctcaacattgcatttaccatggtcttctcactcgagtgtgttctgaaggtaattgctttcggtttcctaaactactttcgagatacctggaatatctttgactttatcacagtcatcggctctatcacagaaataatcctgacagattccaagctggtcaataccagcggcttcaatatgtctttcctgaaactgtttagggcggctcgtcttattaagctattgcggcagggttacacaataaggattctcctgtggacgttcgtgcagagtttcaaagctctcccatatgtgtgtttactgatagcaatgttattttttatttacgctattatagggatgcaggtctttggcaacataaaactggacgaggaaagccacatcaatcgacacaacaactttagaagtttcttcggcagcctgatgttactgttccggtccgctactggcgaggcctggcaggaaatcatgctgtcctgtcttggcgagaaaggctgcgagcccgacacaacggctccctcaggacagaacgaaaacgaacgatgcggtactgacctcgcttatgtgtacttcgtatcctttatcttcttttgctctttccttatgctgaatttatttgtcgctgtcattatggataattttgagtatctgactagggattcatcgatcctgggcccacatcacctcgatgaattcgtccgtgtatgggccgagtacgaccgcgcggcatgtggccgtatccactataccgagatgtatgagatgctgacactgatgtccccacctctcggcctggggaagagatgcccaagtaaggtcgcgtacaagaggttggtactgatgaacatgcctgtggccgaagatatgaccgtacactttaccagcactctgatggcattaatcaggacggctcttgatatcaagatcgccaagggtggtgcggaccggcagcagcttgattccgaactccagaaggagaccttggccatatggcctcatctgtcacagaagatgcttgatctgcttgtgcctatgcccaaagcgtccgatcttacggttggaaagatatacgccgcaatgatgattatggactattacaagcagtccaaagtgaagaagcaaaggcaacaactggaggaacagaagaatgccccaatgtttcaacgcatggagccaagctcactcccccaggagattattgcgaatgccaaggccctgccatacctccaacaagatcctgtatcgggattatcagggcggagcggctatccctccatgtcacccctcagcccccaggatatcttccagctcgcctgcatggatccagcggacgacggccagttccaggagcgtcaaagcctcgaacctgaagtgagcgagcttaaaagtgtacagccctctaatcacggcatatacctgccgtcggatacacaagaacatgccggcagtggtcgcgctagctcaatgcccaggctgacagtcgatccccaagtggtcaccgatccttcttcaatgcgaaggagcttctcaaccatcagagacaagaggtctaatagcagctggttagaggagttctcaatggagcgttcttccgagaatacttataaatctagacgccgctcctatcatagttcactccgcctgtctgctcaccggctgaacagcgactcaggtcacaagtccgatacacatcgttccggcggacgggagaggggcaggtccaaggagcggaagcatctgctctccccggacgtgtctcgctgtaatagtgaggagagaggcacgcaagctgactgggaatcacccgaacgccgccagtctcggtctccttccgaaggacggagtcagaccccgaataggcagggtacggggagcttatcagagtcttccatccccagtgtttcagatacctctacccccagacgcagtcgacggcagctgccccccgtcccccctaagcctcgccccctcctctcatattcctctctaattcgacatgctggcagcatttcaccgccggccgacgggagcgaggaaggcagccccctgacgtcacaggcccttgaatctaacaatgcctgtctgaccgagagctcaaattctcctcacccccaacagtcccagcacgcctcaccacagcgctatatctctgagccctacctggccctccatgaggatagccacgcgagcgattgcggtgaggaagaaacgctgaccttcgaggccgccgtggctacatcccttggaagatctaacacaatcggctcggctcctcctctgagacacagttggcagatgcctaacggccactatcggcgccgacggcgaggtggaccgggaccagggatgatgtgtggagccgttaataacctcctgtctgacacagaggaagatgacaagtgttag

SEQ ID NO: 181265 - DNA, 1317 bp, synthetic construct
  misc_feature 1..1317: note = Description of Artificial Sequence: Synthetic coding sequence
  source 1..1317: mol_type = other DNA
atggcccggttcggcgaggccgtggtggcccggcccggcagcggcgatggcgactctgaccaatcccgaaatagacagggaactccagtgcccgcttctggacaagctgcagcctacaagcaaactaaagcacaaagagctcgtacgatggccctgtataatccaattcccgttcgtcaaaattgctttaccgttaaccgctcattattcatttttggggaagacaatatagtgcgcaagtacgctaagaaacttattgattggccgccctttgaatacatgatcctggccacaataatcgccaattgtattgtgctcgctttggaacagcacttacctgaggatgataaaactcctatgagtcgacggcttgagaaaactgagccttactttattggaattttctgtttcgaagccggaatcaagatagtcgcactgggatttatattccacaaaggcagttacctccggaatggctggaatgtaatggatttcattgtggtcctgagcggtatactggcaaccgccggcactcactttaatacacacgtggatctaagaaccctaagagcagttagagtgttacgccctctgaagttagtttcagggataccttccctgcagattgttctgaaatcaatcatgaaggccatggtccctttactgcaaatcggactgcttctctttttcgccatcctcatgttcgccatcattggactcgaattctacagcggtaagctgcacagagcttgcttcatgaataactccggcatcctggaaggctttgatccaccacacccttgtggcgtgcaaggatgtcctgcagggtacgagtgcaaggactggatcgggcccaacgacggcatcacgcagttcgataacatcctgtttgcggtactgaccgtctttcaatgtatcaccatggaggggtggaccaccgtgctgtataacacgaacgatgccctgggcgccacttggaactggctttatttcattcctctgatcatcattggttcttttttcgtgctcaatctggtcttaggggtcctgagcggcgagttcgctaaagagcgggaaagggtcgagaatagacgtgcctttatgaaacttagacgccagcagcaaattgagcgcgaactgaatggataccgggcctggatagacaaagcagaagaagtcatgttggccgaggaaaacaaaaacgctggaactagcgcattggaagttctgagacgggcaaccatcaaaagatcccggaccgaggccatgactcgcgactccagtgatgaacattgtgtcgacatctctagcgtatag

SEQ ID NO: 181266 - DNA, 6756 bp, synthetic construct
  misc_feature 1..6756: note = Description of Artificial Sequence: Synthetic coding sequence
  source 1..6756: mol_type = other DNA
atggcccggttcggcgaggccgtggtggcccggcccggcagcggcgatggcgatagtgaccagtctagaaatcgacaggggacacctgttccggcctcaggtcaagccgccgcctataaacagaccaaagcccagcgggcccggaccatggccctctacaatcccataccggttagacaaaactgcttcaccgtgaatcgatccctgtttattttcggcgaagataacattgtgaggaagtatgccaaaaaattgattgactggcccccctttgagtacatgatccttgccacaataatcgcaaactgtattgtcctagcccttgagcagcacctaccagaagacgacaagacacccatgagccggaggctggagaaaaccgagccctacttcattggaatcttctgctttgaggcaggcatcaaaatcgtggcactgggcttcatattccacaaagggagctacctacggaatggatggaacgttatggacttcatcgtcgtcttgtccgggatccttgccacggctggcacccattttaacactcacgtggatctgaggactctgcgagccgtcagagtgcttagacctcttaaactggttagcggcataccatctttacagatcgtgcttaaatccatcatgaaggccatggttcctctgctgcagattggcctgctcctgttttttgcgattctaatgtttgccattatcggacttgagttctactcaggaaagctgcatcgcgcgtgttttatgaacaactccggaattctggagggcttcgacccaccacacccctgtggagtacaagggtgccctgccggatatgagtgcaaagattggatcggtccaaatgacggaatcacgcagtttgataatatcctctttgcagtacttactgtcttccaatgtattaccatggagggctggaccactgttttgtataacaccaatgacgccctgggcgcaacctggaactggctgtactttatccccctcatcatcatcggttctttctttgtactgaacctggtcttaggggtactctctggcgagttcgccaaggagcgggagagagtggagaaccggcgtgctttcatgaagctccgaaggcaacagcagatcgagcgggagctgaatggatatcgcgcctggatcgacaaggccgaagaggttatgctggcagaagagaacaagaatgcaggcacttcagcgctggaagtactgcgccgggcaactattaaaaggtcgagaactgaagccatgactcgtgatagttccgacgaacactgtgtggacatctccagcgtcggcactcccctggcaagagctagcatcaagtcagccaaggtggacggcgttagttacttccgccataaggaacgcctcttgaggatttccatccgccacatggtgaagtcccaagtgttctactggatcgtattatcactggtggcacttaatacagcttgcgtggccatcgtgcaccacaaccagccccagtggctgacccatttgttgtactatgccgagttcctttttctgggcctgtttctgctagaaatgagcctgaagatgtatggaatgggaccacggctgtattttcacagctcctttaactgcttcgatttcggagtgactgtgggttcaattttcgaggtggtgtgggcgatctttaggcctgggacctctttcggaatatccgtactccgggcattgcgattactcagaatctttaagatcaccaaatattgggccagcctgcggaatctcgtggtgtcgctaatgtcttcaatgaaatcaatcataagccttctttttcttttgtttctctttatagtggtcttcgctctgctgggaatgcagctttttgggggtcggttcaattttaacgatgggacaccttcagcaaacttcgacacatttcctgcagcgattatgaccgtgttccaaatactgaccggcgaggattggaacgaggtcatgtacaacggaatcaggagtcaaggaggagtttccagcggcatgtggtcagcaatttacttcatcgtgctcacattattcgggaattacacattattaaatgtgtttctggcaatcgcagtcgataatttggctaacgcgcaggagctcactaaggatgagcaagaagaagaggaggcctttaatcagaaacatgcactgcagaaagccaaggaagtgagccctatgtcagctcccaatatgccttctatcgaaagagaacgcagacgaagacaccatatgtcagtgtgggagcagcgcaccagtcagttaagaaaacacatgcaaatgagttcacaggaagcactgaacagggaggaggcacctactatgaatcccttgaacccacttaatccgctgagctccctgaatcccttaaatgcccacccaagcctgtacagacggccgagagcgattgaaggactggctcttggcttggcacttgagaagttcgaagaagaacgcatctctagaggggggtctcttaaaggagacggaggcgaccggagtagcgcactcgacaaccagcggacgccactatccctggggcagcgagagccaccctggctagctcggccatgccacggtaactgtgaccctacccagcaggaggctgggggcggggaggctgttgttacatttgaagatcgcgcgagacatcgtcagtcacagcgccgaagtaggcataggcgggtgcgcaccgagggcaaagaatcttccagcgcatcaagatcaagaagcgcttcacaggagagatcacttgacgaagcgatgcctactgaaggcgagaaggatcacgagctacggggaaatcacggtgcaaaggagcctacaatacaggaagagagagcccaggacttgaggcggaccaacagtcttatggtatctaggggctctgggttggcaggggggctagatgaagcagacacacccttagttttgcctcaccctgaactggaggtgggaaaacacgttgtattgaccgaacaagaaccagaagggtccagtgaacaggctctcctagggaatgtgcaactcgatatgggccgcgttatctctcagtcggaacctgacttgtcttgcattacagctaacacggataaggctaccacagagtccactagtgtgacagtggctattcctgatgtcgatccgctagtggacagcacagttgttcacatttcaaataaaacggacggcgaggcctccccactgaaggaggccgagatccgggaagacgaggaagaggtggagaaaaaaaaacagaagaaggaaaagagggagacaggcaaagcgatggtgccccactcttccatgtttattttttcaacaacgaatccgataagaagggcttgtcattacattgtgaacctgaggtacttcgagatgtgcattcttctcgttattgcagccagtagcatcgcccttgcagctgaggatcccgtgcttacaaatagtgaacgaaataaagtgctcagatacttcgactatgtgttcacaggggtgttcacatttgagatggtgattaaaatgatcgaccagggactcatattgcaagacggaagctatttcagggatctatggaacattttggactttgtggttgtagttggggcactcgttgctttcgccctggcaaatgctctgggaaccaataagggaagagatatcaagactatcaaatctcttcgcgtcctaagagttctaaggccattgaaaactattaagagattgccaaaactcaaggccgtgttcgattgtgtagtaacctctttgaaaaacgtgttcaatattcttatagtgtataagctctttatgtttattttcgcagtaatcgccgtccaactcttcaaaggaaagttcttttattgcacggacagcagcaaggacacagaaaaagaatgcatcggcaattatgtggatcatgagaaaaacaaaatggaggttaaaggtagggagtggaagcggcatgagttccattatgataacattatctgggcgctgctcaccctgttcaccgtcagtaccggtgaaggctggccccaggtactgcagcatagcgttgatgtcaccgaggaagatcgcggacctagccgcagcaaccgaatggagatgtccatattttatgtggtgtatttcgttgtgttccctttcttcttcgtgaatatattcgtcgctctaattataatcacgttccaggagcaaggcgacaaaatgatggaagagtgttcattggagaaaaatgagcgagcttgcattgatttcgcaatttccgccaagcccctcacacgttatatgccccaaaaccggcacacctttcagtacagggtgtggcacttcgtagtgtcaccttccttcgagtataccattatggcgatgatcgcattaaacacagttgtgctgatgatgaagtattattcagctccttgtacgtacgagctggcactcaagtaccttaatatagctttcacgatggttttttcccttgagtgcgtgctgaaagtgattgcgttcgggttcctgaactatttccgggatacatggaacatttttgacttcattaccgtgatagggtccattacagaaattattctgacagactctaaactggtcaatacgtcaggattcaatatgagcttcctcaagctttttagggctgcccgcctgattaaactgcttaggcagggctacaccatccgcatcctgttgtggaccttcgtacagagttttaaggccctgccttatgtatgcttgctgattgcaatgctcttctttatctacgccatcattggcatgcaggttttcggcaacattaaattggatgaagaatcacatatcaaccggcacaacaatttccggtcattttttggctctctgatgctcctctttagatccgcaaccggcgaagcctggcaggagatcatgctgtcatgtctcggcgagaaagggtgcgagcccgacacgacggcaccaagcggacaaaatgagaacgagaggtgtggtaccgatctcgcatatgtgtactttgtctcctttatattcttctgcagctttctcatgctgaatctgttcgtggcagtaataatggacaattttgaatacttgacccgggattccagcattctcgggccacatcacctggacgagttcgtaagagtttgggctgagtatgacagagctgcctgtggtcggatccattacaccgaaatgtacgaaatgcttactctcatgtctccgcctctaggcctcggaaagagatgtcctagcaaggtggcgtacaagaggctcgtgctgatgaacatgccagtggccgaagatatgacagtgcattttacctccactctcatggccctgattcgaaccgccctggacattaagatcgccaaggggggcgctgaccgtcaacaattggacagcgaattacaaaaggagactttggcaatctggccccatctatcccagaaaatgcttgatttgcttgtcccgatgcctaaggcatccgatctgaccgtcggtaagatctatgccgctatgatgatcatggactattacaagcagtccaaagtgaagaagcagcgacaacagctggaagaacagaagaatgcaccaatgttccagcgaatggagcccagctctctgccacaggagattatagcgaacgccaaagctctgccttacctccagcaggatccagtctccggcctctccggtaggtccggctacccctctatgagtcctctgagtccccaggacatcttccagctggcatgcatggaccctgcggacgacggtcagtttcaggaacgacagtccctcgtggtgaccgaccctagctcgatgaggagatccttttctaccatccgggacaagcggtcgaactcctcctggctcgaagagtttagcatggaacgtagctcagaaaatacctacaagtctagacgacgatcgtaccacagcagcctcaggctgtctgcccataggctcaattctgattctgggcataagtcagatacacaccgatccggggggagggaacgaggaagatctaaggaacggaagcacctgctctcaccagacgtatcccgctgcaactcagaagagcgcgggacccaggctgattgggagtctccagaaagacgccagtccagatccccctctgaaggacgctcacaaaccccaaataggcaaggtacgggatcccttagtgagagcagtatccctagcgtgagcgacacttcaacacctagacgatcacgccggcagctccctcccgtgccccccaagccgagacccctcctttcttactcatctctcatacggcacgcaggttcaatttctcctcccgctgacgggagtgaggagggttctccgctgacctcccaagctctggagagtaataacgcctgcctgaccgagtcctctaattctccccacccccagcagtcccaacacgcaagccctcagcggtatatcagcgagccataccttgcgctgcatgaggatagccacgctagtgactgcggtgaagaagaaaccttaaccttcgaggcagccgtggccacatccctgggaagaagcaatacaatcggatcagcccccccattgagacactcttggcagatgcctaacgggcattatcgtcgaaggagacgtggcgggccgggcccagggatgatgtgtggggccgtgaataacttactttccgataccgaggaggacgacaagtgctag

SEQ ID NO: 181267 - DNA, 7062 bp, synthetic construct
  misc_feature 1..7062: note = Description of Artificial Sequence: Synthetic coding sequence
  source 1..7062: mol_type = other DNA
atgaccgagggcgcccgggccgccgacgaggtgcgggtgcccctgggagccccccccccaggtccagccgccctggtgggggcttctccagaatccccgggcgcacccgggcgtgaggcggagcgtggcagtgagctgggggtgtctcctagcgagagtcccgcagccgaacgcggtgcagaactgggcgcagacgaggaacagagagttccgtatcccgctttagctgcaacggtctttttttgcctgggccagaccacaagaccaaggagctggtgcttacggcttgtgtgtaacccctggttcgagcacgtaagtatgctcgtcatcatgttgaactgtgtaactctgggaatgtttaggccttgtgaggacgtggagtgcggctcggaacgatgcaacatcttggaggcattcgatgcctttatcttcgccttttttgcagttgagatggtcataaaaatggttgctctgggcctgtttggacaaaaatgctacctgggcgacacctggaacagactagactttttcattgttgtggctggcatgatggagtactctctcgatgggcacaacgtcagtctcagcgcgattaggactgtgcgagtcctgcggcccctgcgggccattaatcgagtcccttctatgcggatcctggtgaccttgttactggacaccctgcctatgcttggtaacgttcttctgctatgtttttttgtgtttttcatctttggcattgtaggggtgcagctctgggcaggcctgctgcggaatcggtgcttcttggattctgccttcgtccgcaataataaccttacatttcttcggccctactatcagactgaagagggagaagaaaacccctttatctgctcttctcggagggacaacggaatgcaaaagtgtagccacattcctggaagaagggagctacggatgccgtgcacattaggatgggaagcctacacccagccacaggcagaaggggtgggggccgcacgcaacgcgtgcattaactggaaccagtattacaacgtgtgtagaagtggcgactccaacccccacaacggagctataaacttcgacaatataggatacgcgtggatcgcgatctttcaggtgatcacactcgagggttgggtcgatatcatgtactatgtcatggatgcccattctttttacaattttatctacttcatcctgctaattatagttggatctttcttcatgatcaacctctgtctcgtagtcattgcgacacaattcagcgaaacaaaacagcgggagtcgcaactgatgcgggagcaacgggcgcgccacctgtcaaatgactctacgctggcaagcttcagtgaacccggctcctgctacgaagaacttctgaagtacgtgggtcatatatttaggaaggtgaaaagacggtcattaagattgtacgcccggtggcagtccagatggcggaagaaggtggatccttccgccgtccaggggcaaggacctggacacagacaacgccgggctggtagacacacggccagcgttcaccaccttgtataccaccatcaccatcatcaccatcatcattaccacttttcacacggctcacctaggagacctgggcccgagccaggtgcctgtgatacccgactcgtgagagccggagccccaccaagcccccccagtcctggacgcgggccaccagatgccgagagcgtgcactctatttaccatgctgattgtcatattgaggggccacaagagcgcgcccgagtggctcatgcagctgccacggctgctgcgtccctcagattggccactggcttagggacaatgaactaccctacgatcttgccaagtggggtggggtcgggaaaaggtagcacatccccaggtccaaaggggaagtgggctgggggtcctcctggcacaggcggccacggaccgttgagcctgaattcgccagacccatatgaaaagatcccgcatgtagttggcgaacacgggcttgggcaggcgcctgggcacctatcaggactttcagtcccatgcccactgcccagtccacctgccgggactctcacatgcgaattgaagagttgtccatattgcacacgagccctcgaggaccccgagggcgagctgagcggaagtgagagcggggactcagacggccggggcgtttacgagtttacgcaggatgttagacatggagaccggtgggatcccacacgccctccccgcgccactgataccccaggacctggtcctggttcccctcaacgtcgtgcccaacagcgcgccgcaccaggagaacccggctggatggggagattatgggtgacgttttccggcaagttgagacggattgtggattccaaatattttagccgagggatcatgatggccatacttgttaataccctatccatgggcgtcgaataccacgaacagcctgaggaactgactaatgctcttgaaatctccaacattgtctttacttcgatgtttgctctggaaatgttgctcaagctcctggcctgcggcccattaggctatataaggaatccgtacaatatttttgatgggattattgtcgttattagtgtgtgggagattgtgggccaggctgacgggggcctctccgtccttcgcaccttcaggctccttagagtgctcaaactggtgaggttcctgcccgcccttaggaggcaactcgtggttctggtcaagaccatggataacgtcgcgaccttttgcaccctactcatgttattcatcttcatcttttcaatccttggcatgcatctgtttggctgtaaattttctctgaagaccgacacaggagataccgtgccagatagaaaaaattttgattccctgctttgggccatcgtcaccgtttttcagatcctgactcaggaggactggaacgtcgttctgtacaatggaatggcctctacatccagttgggctgctctgtatttcgttgccctgatgaccttcggcaattatgtgctctttaacctgttggtcgccatcctggtggagggttttcaagcagaaggagatgcaaatcggtcagataccgacgaggacaagacttctgtccacttcgaagaggattttcataagctgagggaactgcagaccacagaactcaaaatgtgttctctcgctgttactcctaacggtcacctggaaggaaggggaagccttagccccccgttgatcatgtgtaccgcagctactcccatgcccacgcccaagagctcgccattcctggacgctgcaccgagccttcccgactccagaagaggtagctcctcctcgggtgacccacccctgggtgaccagaagcccccagcaagcctccgatcctccccgtgtgcaccgtggggtcccagcggggcatggagcagcagacggtcctcctggtcctccctgggaagagcgccatctctgaagagaagaggccagtgtggggagagggaatcactcctgtcaggggagggcaagggctcaactgacgacgaagccgaggatggtcgcgcagcccctggaccccgggccactcctctgagacgagccgagtctctagatccgcgaccccttagaccagccgccctgccacctacgaagtgcagagatcgggacggccaggtggtcgcgctgccctccgatttttttctcaggattgattctcaccgtgaggacgctgctgaactggacgacgatagcgaagactcctgctgtctccggctacacaaggtactggaaccatataaaccgcagtggtgccgttctcgcgaggcgtgggccctgtatctcttctccccccaaaatagatttagagtttcttgccagaaggtgattacccataagatgtttgatcacgtggtcctggtgtttatcttccttaactgcgtcaccattgcacttgagcgacccgatatcgacccgggaagtactgaaagagtttttctctctgtcagcaattatatattcactgccattttcgttgcagaaatgatggtgaaagtggtagccctgggacttttatcaggagagcatgcctatctccagtcctcatggaacctgctggacggcctgctggtcctggtgtctttggtggatattgtcgtcgcaatggcttccgcaggaggagccaaaatacttggcgtgctgagagttttgcgattattgcgtactctcaggcctctgcgagtaatctctagggcgcctggcctgaagctggtggtggagacacttattagctctttgaggcccatcggcaacattgtgctcatatgctgtgccttctttatcatttttgggattctgggtgtgcagttgttcaaaggtaagttttactactgcgaggggccagatacacggaacatctcaacgaaggcccagtgcagagcggcccattaccggtgggtccggaggaagtataacttcgataatttaggacaagcccttatgtccttgtttgtgttgtcctcgaaagacggttgggtgaatatcatgtatgatggcctggacgcagtgggcgtggaccagcagcccgttcagaaccacaacccgtggatgcttctctactttatcagcttcctgctgattgtgtccttcttcgtccttaatatgttcgtgggggtggttgtggaaaatttccacaaatgtaggcagcatcaggaggccgaggaagcacgccgacgagaggagaaacgactgcggcgactcgagagacgaagaagatctacattcccctcgccagaggcacagcgccgcccctattacgcagattattctccaacaaggaggtcaatccattccctgtgcacctcgcactacctggacctgtttataacttttatcatctgcgtgaacgttattactatgtctatggagcactacaaccagcctaagagcttagatgaagccctaaaatattgcaactacgtctttacgatagtttttgtgttcgaggccgcacttaaactggtggccttcgggttcagacggttttttaaggaccgctggaatcagctagacctggcgatagtgttgttgagccttatgggcatcacattagaggagatcgagatgtccgccgccttaccgattaatcccactattatccgaattatgcgagtgctgcggatcgctcgtgtcctgaagctactcaagatggccacaggcatgcgcgcattgctggacaccgttgtgcaggcacttccgcaggtgggcaacctcggcctgttgtttatgctcctgttttttatatatgccgccctgggggtggagttgttcggaaggctagaatgctcggaagacaacccctgtgagggtcttagccgccacgccacgtttagtaacttcggaatggcctttttaactctgttccgcgtgtctacgggggataactggaacggaatcatgaaagacactttacgagaatgtagcagggaagacaagcactgtctctcctacctgccagcactttcccccgtctatttcgtgaccttcgtgctggtggctcagtttgttctggttaacgtggtggtagcggttctcatgaaacatctagaagagtcaaacaaagaagcccgggaagatgctgaactagacgccgagattgaactggaaatggcacaggggcccggctccgcacggcgtgtggacgcagataggccaccactgcctcaggagtctccaggtgccagggatgcccccaacttagtggccagaaaggtgagtgtgtcacgaatgctgtctcttcctaacgacagctatatgtttcggcccgttgtgcccgcatctgcaccgcatccacgccctctccaggaagtggagatggaaacatacggtgcaggcacacctctcggctccgttgcctcagtgcattcccctcccgctgagtcttgtgcctccctgcaaattcccttggccgtttcatcacccgcaagatctggggaacctctccacgctctctccccgagagggactgctcgaagcccctccctctctcgcctgctgtgcagacaggaagccgtccacaccgactctctcgaaggaaagatcgattcacctcgcgataccctggatcctgccgagccaggggagaaaacccctgtgcgccccgtgacacaaggtggatctctccagagccccccaagaagcccacgtcctgcctctgtccggacaaggaagcacacatttggacagaggtgcgtgagttcccggccagcagccccggggggcgaggaagccgaggcgtccgacccggccgacgaggaggtaagtcacatcaccagctctgcctgtccctggcagcccacagccgaaccacatgggcctgaggcttcacctgttgctgggggagaaagagacttacggaggctttacagcgtggacgcacaaggtttccttgacaagcctgggagggcagacgaacagtggagaccatccgcagagctgggatcgggcgagcccggcgaagcgaaggcttgggggcctgaagccgaacccgcccttggagcacgacggaagaaaaagatgtcccctccctgcatttccgtagagccccccgccgaggatgagggctccgctaggccttccgccgctgagggaggatcaaccactctaagacgccggaccccatcatgcgaggctactccacatcgcgatagtctagagcccacagagggttctggggcaggcggcgatcctgctgcaaaaggagagcggtggggccaagcttcttgtcgagccgaacacttgacggtcccctcttttgcgtttgaacctttggacctgggcgtcccatctggggaccctttcctagatggcagtcacagtgtcaccccagaatccagggccagctcttctggcgccatcgtcccattagagccccccgaaagcgagcctccaatgcccgttggagatccccccgagaaaagacggggcttgtacctgactgtaccacaatgtccactggagaaacccggctctccttcagctaccccagctcccggaggaggggccgacgaccctgtctag

SEQ ID NO: 181268 - DNA, 7044 bp, synthetic construct
  misc_feature 1..7044: note = Description of Artificial Sequence: Synthetic coding sequence
  source 1..7044: mol_type = other DNA
atgaccgagggcgcccgggccgccgacgaggtgcgggtgcccctgggtgcaccaccgcccggccctgctgcactcgtgggcgcctctcccgaatcgcctggggcacctggacgcgaggccgaacggggcagcgaactaggagtgtctccttctgagagccccgcagcagaaagaggcgcggagctcggagccgacgaagagcagagggtcccatatccggcactggcggccacagtctttttctgcctcggacagacgacacgtccacgctcatggtgcctgaggttggtatgcaatccttggtttgagcatgtgtctatgctcgtgataatgcttaactgtgtcacccttggcatgtttcggccatgcgaggacgtcgagtgtgggtccgaaagatgcaatatcctggaggcctttgacgcttttatatttgcgttttttgccgtggaaatggtcattaaaatggtggcattaggcctgttcggtcaaaagtgttacctcggagatacttggaataggctggacttctttatcgttgtggccggtatgatggaatactccctggacggtcacaatgtaagtctgagcgctatcagaacagtgcgggtcctgcgccccctgcgagctatcaatcgggtgccaagtatgcgaattttggtgacacttctgctggacactctgcccatgctcggaaatgtcctgttactttgtttttttgtgttcttcatctttggtatagtaggggtgcagctgtgggctgggttactgcggaatagatgcttcttggacagcgcctttgtgcgcaataacaatctgacttttttgcgcccatactatcaaactgaggagggagaggaaaatccttttatctgcagtagccggagggacaatgggatgcagaagtgctcccatatcccaggcagaagagaattacgtatgccctgcaccctgggctgggaagcctacactcagccacaggcagagggcgtgggagccgccagaaatgcttgtatcaattggaaccagtactataacgtctgtaggagtggggattcgaatccccataacggcgcaatcaattttgataacatcggctacgcctggatagccattttccaggttataactctggagggatgggtggacattatgtactacgtgatggacgcacacagtttctacaactttatttactttatcttgctgatcattgtaggaagtttttttatgattaatttgtgcctggtggtgatcgcaactcagtttagtgagacaaagcagcgggagtctcagctcatgcgtgagcaaagagcacgacatctttcaaatgactccacacttgcctctttctcagagcccggctcttgttacgaagagcttcttaaatacgtcggccatatcttcagaaaggtcaaacgacgtagcctccgattatacgctcgctggcagagtagatggcggaagaaggtggacccatccgcagtccagggccagggacccgggcataggcaaaggagagccggccgccataccgccagtgtacaccatctggtttaccatcatcatcaccatcaccaccaccattatcatttttctcatggcagcccccgacggccaggacctgagccaggcgcttgcgataccaggctggtgagagcgggagccccccccagcccaccaagcccgggccgggggcctccagacgctgagtctgtccactcaatctatcatgcggattgccatatagaaggccctcaggaaagagctcgcgtggcgcatgccgcggctaccgctgccgcctcacttaggctggcgactggactgggaacaatgaactatccaacaattctacctagcggggtggggtctgggaaggggtctacatctcctgggccgaaaggtaaatgggctggcggcccacccgggaccggtggacatggtcctctgagccttaactccccagatccctacgagaagatcccccacgtagtcggagaacacgggttggggcaggcacccgggcacctgtcaggcctgagtgtgccatgcccccttccgagtccaccagccgggacacttacgtgcgaattaaaaagttgcccgtactgcacacgggccctggaagatccggagggcgagctgagcgggtccgagtcgggagactctgatggccgcggcgtgtatgagtttacacaggatgtgagacatggggaccggtgggatcccacacgccccccacgggcaaccgatacgccaggaccaggccccggcagcccacagagaagggcacaacaacgtgctgcccctggcgagcccgggtggatgggcagactttgggtgaccttttccggaaagttgcgtcggatcgtagactccaaatatttttcacgcggaattatgatggccatcctagtcaatactctctcaatgggagtagagtatcatgaacagccggaagaattaacaaacgcgctcgaaatctccaacatcgtgtttacttcaatgttcgctctcgagatgctgctgaaactcctggcctgcgggccgctgggctacatcagaaacccatacaacatttttgatggcataatcgttgtgatatccgtgtgggaaatcgtcgggcaagccgacggtggtttgtcagtgctacggactttccgccttctccgggtgctgaaactggtccgattccttcccgcccttcggaggcagctggtggtgctggtaaaaactatggataacgtagctactttctgcacactcctgatgttgttcatcttcatcttcagcatcctgggcatgcatctttttggctgcaaattttcattaaagacagacacaggggataccgtacctgaccgaaaaaatttcgactcattgctctgggcaatcgtgaccgtctttcaaattctgactcaggaagattggaatgtggtgttgtacaacggaatggcaagcactagtagttgggccgctctgtattttgtcgcccttatgaccttcggcaattacgtgctgttcaacctactggtggcaatcctagtagagggtttccaggcagagggcgacgccaatcgttccgataccgacgaggacaaaacatccgttcacttcgaagaagatttccataagctgcgtgaactccagaccacagaactcaaaatgtgcagcctggcagtgacgcccaatggccatctggagggacgggggtctctgtcaccccctttaataatgtgtacagctgccacgcctatgccgaccccaaagtcctcgccattcctggatgccgcaccctcgctcccagattctcgacgtgggtcatcctcctctggggacccccctctgggagatcagaagcctcccgcgtctctacggtcctcaccatgcgcaccctgggggcccagcggggcgtggtcttcgcgccgcagttcttggtccagcctgggaagggcacctagccttaaacgcagaggccagtgtggcgagcgcgaaagcctcctgagtggagaaggtaagggatcaacagatgacgaggctgaagacggcagagctgcccccggtcctagagcgactccactgaggagagctgaatctctcgatccccggcccctgaggcctgccgctctgccacccacaaaatgtcgtgatcgtgacggacaggtcgtggctctgccatctgactttttcctaaggattgacagtcaccgggaggatgctgcggagctcgacgacgactccgaagactcctgttgcctcaggctgcataaggtactcgagccatacaagcctcagtggtgcagatcccgcgaggcctgggccctgtatctcttttcacctcagaatagatttagagtatcatgtcaaaaggtgatcactcacaaaatgtttgaccacgtagtattagtctttatttttctgaattgcgtcacaatcgctttggagaggccggacattgatcccggtagcaccgagcgtgtttttctaagtgtctccaactatatctttactgccatattcgtggcagaaatgatggtgaaagtcgtggctttggggttgctttctggtgagcatgcttacctccaaagctcctggaacctgttggatggtcttctggttttggtgagcctggtcgacatcgtagtcgcaatggctagcgctggtggtgctaaaattctgggtgttctcagagtgctgagattgttgcggactctgcggcctctacgtgtgatatctcgcgcgcctggcttaaagctggtggtggagactctcatcagttccctgcggcccatcggcaatatagtcctgatatgctgcgccttcttcatcatcttcggcatcctgggtgtacagctgttcaaggggaagttctattactgtgagggtccggatacccggaacataagtaccaaggctcagtgccgcgccgcccactatcgttgggtgcggagaaaatacaatttcgataatctggggcaggccctgatgtccctgtttgtgctttcatccaaagacggctgggtgaacattatgtacgatggactggatgccgttggcgtagaccaacaacccgttcagaatcacaatccctggatgctgttatactttatttcgtttctcctaattgtgtccttttttgtgctgaacatgttcgtgggagtagtggttgagaactttcataaatgtcgacaacaccaggaggccgaagaggctaggcggcgggaggagaagagacttaggcgtcttgaaagaagacgacgcaaggcccaaaggagaccatactatgctgactattctcctacaaggagaagcatccactcactatgtactagtcactacttggacctgttcatcacctttattatttgtgtaaacgtcattactatgagtatggaacactacaatcagccaaagtctctcgacgaagctctcaagtactgcaactacgtgtttactatcgtcttcgtctttgaggcggccctcaaactggttgccttcggttttcgaagatttttcaaggataggtggaaccaacttgacttggcgatcgtgctactaagtctaatgggaattaccctggaggaaatcgagatgtccgcagcacttcctattaaccctaccattattcggatcatgcgggtcttgcgcatcgcaagggtgttgaagctgctgaagatggccactgggatgcgcgcactgctggataccgtggtgcaggccctgccacaggtaggtaatcttggactgttattcatgctgttatttttcatctatgccgccctcggcgtggagctcttcggcagactggaatgcagcgaagacaatccttgcgagggccttagtaggcatgccactttttctaatttcggcatggcatttctgactctcttccgggtgagcactggcgacaactggaacggcattatgaaggataccttgcgggagtgctctcgcgaggataagcactgcctcagttacctcccagcccttagcccagtgtacttcgtgacctttgtgctggtggctcaatttgtcctggtgaacgtggtcgtcgctgtgctgatgaagcacttagaggagtcgaacaaggaagcacgtgaagacgcggaactggacgctgaaatcgaattggaaatggcccagggtccaggaagtgccagaagggtagacgctgatcggcccccactcccccaagaaagccctggcgcccgggacgcccccaacctggtggccagaaaggtcagtgtgagccgaatgctgtccctcccaaatgacagttatatgtttcgccccgtggtacccgcctccgccccgcaccctagaccccttcaggaagtggagatggagacgtatggcgcaggcacccctctgggctctgtagccagcgtgcattcacccccggcagagtcgtgcgcctcactgcagatcccactcgccgttagcagcccagctcggagcggggagccgctccacgcgctgtccccacgtggaactgccaggtctcccagtctcagtagactgctttgtcggcaggaggccgtgcacacagattctctcgaggggaaaattgactcaccaagagacactttggaccccgccgagccaggggaaaagacgccagttcgacctgtgacccaggggggcagtctgcagagcccaccacgatctcctaggcctgcttccgtccgcacccgcaagcatacattcggacagcgctgcgtgtcatcacgcccagccgctcctggaggtgaggaggctgaagcaagtgatccggcggacgaggaggttagccacattacaagcagtgcatgcccctggcagcccacggccgagccgcatggcccggaggctagtcctgtggcaggaggcgagcgcgacctgcggagactgtattctgttgacgcccagggattccttgacaagcctggcagagctgacgagcagtggaggccaagtgcagaactagggtccggagagccaggtgaagctaaagcatggggcccagaagccgagcccgccctcggggcacgcaggaagaagaagatgagtcctccgtgcatttcagttgagcccccagccgaggacgagggcagtgcacgtccttccgccgcagaaggcggaagcactaccctgagacgaagaactccctcctgtgaggctaccccacatcgagactccctagaacccaccgagggcagcggggcaggaggagacccggccgctaagggggaacggtggggacaggcctcttgtcgtgccgagcatctgactgttccaagctttgcatttgagccactcgatttgggcgtgcccagtggagatcctttcctggatgggtcacattctgttacacccgagagtcgcgcttcttcatcaggcgcaattgttccgctagagcctcccgaatcagaaccacctatgccggttggggatccaccggagaaacggcgaggactttacctcaccgtcccacagtgtcccctggagaagccaggaagtccttctgccacaccagctcctggaggaggtgcagacgacccagtgtag

SEQ ID NO: 181269 - DNA, 6690 bp, synthetic construct
  misc_feature 1..6690: note = Description of Artificial Sequence: Synthetic coding sequence
  source 1..6690: mol_type = other DNA
atggccgagagcgccagcccccccagcagcagcgccgccgcccccgccgccgaacccggcgtgacaaccgaacagcctggtccccgttctcctccttcatcgccacctggcttggaggagccactcgatggtgcagatccacatgtgcctcatccggatcttgcacccatcgcatttttttgtctaaggcagacaacctcccccaggaattggtgtatcaaaatggcaacaggcccctggtggtggtgcctttgcatgcttgtgattctgctgaattgtgtcactttaggcatgtaccaaccttgtgatgatatggattgcctgagcgatcgctgcaaaatcctccaggtgtttgacgattttatttttattttctttgctatggagatggtgttaaaaatggtggccttgggcatctttggcaaaaaatgctacctgggcgacacctggaacaggctcgactttttcattgtgatggctggcatggtagaatactcgctggacctgcaaaatatcaacctgagcgccatacggactgtcagggtgctgcgccctttaaaggctataaatcgcgtcccctccatgcgcatccttgttaatcttttgctcgataccctcccgatgttgggtaatgtgctcctactgtgtttcttcgtgttttttatcttcggtattatcggcgtccagctctgggccggactgctgaggaaccggtgttttctcgaggagaattttacaatccagggcgatgtagccctccccccctactaccagccagaagaggatgatgaaatgccattcatctgcagtctgagtggagacaatggtatcatggggtgccacgagataccccccctcaaggagcaaggccgagaatgctgtctctccaaagacgatgtctacgacttcggcgctgggaggcaggacctgaacgcttcagggctgtgcgtcaactggaatcgatactacaacgtgtgccgtaccggtagtgcaaatccccacaagggcgctatcaacttcgataacatcggctacgcttggatcgtgatttttcaggtcattacactcgagggatgggtcgagatcatgtactacgtgatggatgcgcattccttttataactttatatactttattttgttgatcatcgtgggctctttcttcatgatcaatctctgtcttgtggttatagccactcagttcagtgaaaccaaacaacgggagcacaggctgatgctggagcagagacagcgttatctctccagctctacagtggcctcatatgctgaacccggggactgctatgaagagatctttcaatacgtgtgccacatattacgcaaagctaaacgccgggcactgggactgtaccaagcactgcagtccaggaggcaggccctggggccagaagcgccagccccagccaagcctggcccacatgccaaagagccacggcactaccatggcaaaaccaaagggcagggagatgagggacgccatctcgggagtcgacactgtcagacactgcacggtccagcatcgcccgggaatgatcacagtggccgcggaaagcccggtcctagagaactgtgcccccagcactccccattggacgctacaccacacactcttgtgcagcccatacccgctaccctggcaagtgacccagcgagctgcccttgctgtcagcacgaggatggccgtcggccaagcgggctgggttctaccgactccggacaagaaggtagcgggtcgggcagttctgccggcggagaggatgaggcagatggcgacggtgctagatcatctgaggacggggctagctccgagctgggtaaagaggaagaggaggaggaacaggcagacggagccgtgtggctgtgtggcgacgtgtggcgcgagacaagagctaaattgcgcggtatcgtggactctaagtacttcaaccgtggcataatgatggcaattcttgttaacacagtgagtatgggaattgagcaccacgagcaggctaacgaactgactaacatcctggaaatttgcaatgtcgtattcacttccatgtttgccctcgaaatgattctgaaactggccgcgttcggcctgttcgactacctacggaatccctacaatatctttgatagtattattgtgatcattagtatttgggagatcgtcgggcaagcagacggtgggctgagcgtcctcagaacctttcggctgctgagagtgctcaaactggtcaggtttatgccggcgctgagaagacagctggttgtcttaatgaagactatggacaatgtggccaccttctgcatgctactcatgctttttatctttatattcagcatccttggcatgcacatatttgggtgtaaattcagtctacggaccgatacaggtgacaccgtcccagatcgaaagaactttgattcactgttgtgggctattgtaaccgtgttccaaattcttacccaggaggactggaacgttgtcctctataacgggatggctagtacaagcccttgggcctccttgtatttcgtggcactgatgaccttcggtaattatgtgttattcaatctgcttgtggccatcctggtcgagggttttcaggctgaaggagatgcaaataggtcttactcagacgaagaccagagctcctcgaacatagaagagttcgataagcttcaggagggactcgatagcagcggcgatccgaagctgtgccccatccctatgacccctaacgggcaccttgacccttctctacctctgggtggacacctggggccagctggcgctgcggggccagccccgaggctctcattgcagcccgacccaatgttggtggctctcggttcgcgaaagtcctccgtgatgtctttgggcagaatgtcgtacgatcaaagatcgttgagtagttcacggagttcttactatgggccttgggggagatccgccgcatgggctagtcgtcggtcatcttggaattccctcaagcacaaacctccctcagccgagcatgagtcactcctgtctgcggagagggggggaggagcgagagtgtgtgaggtcgctgccgatgagggtccccctagggctgctccactgcatacgccccacgctcatcacatccatcatggcccgcatcttgctcacagacatagacatcatagacgtactctctccctggataacagggactctgtggatctggccgagttggtccccgcagttggtgcccatccaagggcagcatggcgggccgccggccccgctcccggccatgaagactgcaacggcaggatgcccagcattgcaaaagacgtttttaccaagatgggggaccgaggcgaccgcggagaggatgaagaagagatcgactataccctttgctttagagtgagaaagatgattgatgtatacaaaccagactggtgcgaggttcgggaagattggagcgtgtacttattcagccctgagaacagatttagggtgctgtgccagaccattatagctcacaagctgttcgattacgtggtcctcgcttttatttttctgaattgcattacaatcgcactcgagcgtccacagatcgaggctgggagcactgaaagaatctttctgactgtgtccaactatatctttacagctatctttgtgggtgagatgacactgaaagtcgtctccttgggtctctatttcggagagcaggcatatcttcggagctcatggaatgtgctcgacggctttctcgtgttcgtctcaatcatcgatattgtggtgtcccttgcatcggcaggcggcgccaagatcctgggagtgctccgagtactccggcttttacggactcttcgcccgcttagggtaatttccagggcacccgggttgaagcttgtagtagagacgttaatctctagtctgaagcctataggaaacatcgtgttaatatgctgtgctttcttcattattttcgggatactcggagtgcagttgtttaagggcaagttttatcactgcctcggcgttgataccaggaatatcaccaacaggtcagattgcatggctgccaactatcgctgggtgcatcataaatataacttcgacaacctgggccaggccctgatgtcactgtttgtactcgcttctaaagatggatgggttaacatcatgtacaacggtctagatgccgtggccgtggatcagcagcctgtgacaaaccacaacccttggatgctcctttatttcatctcattcctgctgatcgtgagctttttcgtcctgaatatgttcgtgggcgttgtggttgaaaatttccataaatgtcggcagcaccaagaggccgaggaagcacgtcgccgcgaagagaagcgcctgagacgtctcgagaagaagagacgcaaggctcagcgcctcccctactatgccacttattgtcacactagacttcttattcactccatgtgcacctcccactacctggacatcttcataacgttcataatttgcttaaacgtggttaccatgtccctggagcactacaatcagcctacaagcttggaaaccgctctgaaatattgtaattatatgttcaccacagttttcgttctcgaagcggtgttgaaactcgtggccttcggactgagacggtttttcaaggaccggtggaaccagttggacttggcaatcgtgttgctgagtgttatgggcataaccctcgaggagatcgagataaatgctgcactcccaatcaacccgaccatcatccggatcatgcgcgtcttacggatcgccagagtcctcaagttactcaaaatggccacgggtatgcgtgcattactggacacggttgtgcaagctctgcctcaagtgggaaatctggggctcttatttatgctgctttttttcatctacgctgccctcggcgtggagttattcggcaagctggtctgcaatgatgagaacccctgtgaaggcatgtcccgtcacgctacattcgaaaactttggcatggcgttcctgactctgtttcaggtgagcaccggggacaattggaatgggatcatgaaggataccttgcgcgactgtactcatgatgagcgctcctgcctctctagcctgcagttcgtcagtccactctattttgtatccttcgtgttaacggctcagtttgttctaatcaatgtagtcgtggcggttttaatgaagcatctcgatgattccaataaagaagcacaggaagacgccgaaatggatgccgagcttgaactggagatggctcacggtctggggccagggccccgcctgcctaccggcagccctggcgctccaggtagggggcccggcggtgccgggggggggggagatactgagggagggctgtgcaggagatgttattcccccgcacaggaaaacctctggcttgactccgtgagtctgataattaaggatagcctggaaggggaactgaccatcattgacaatctgtccggctcaattttccatcactactcatctcctgctggatgcaaaaaatgccatcacgacaagcaagaagtgcagctggcagagactgaggcattttcactcaacagcgaccgatctagctccatactgctgggcgatgacctctccctcgaagacccgacagcctgtcctcccgggaggaaagatagcaagggagagctggaccccccagagcctatgcgagtgggcgacctcggggaatgttttttcccccttagcagtactgccgtaagccctgaccctgagaactttctttgtgagatggaggagattcccttcaaccctgtgagaagttggctcaaacatgacagttcccaggcgcccccttcaccattttcaccagacgcctccagccctcttctcccgatgcctgctgagttttttcacccagcagtttccgcctcgcagaaggggcctgaaaaaggcaccggcactggaacgcttcctaaaattgctttgcaggggagctgggcttccctccggagccctcgggtcaattgcactttgctgcggcaggctaccggctcagacacatccctggatgcttcacctagttcttctgctggctcattgcagactaccttagaagactctctcaccctgtccgattcccccaggagagccctcggcccacccgcaccagctcctgggccaagagccgggctgtccccagctgcaagacgccgactctcacttagaggccgtggccttttttccctcagggggttgagagcccatcagagatcccacagtagcggaggaagtacctcgcccgggtgcacccatcacgattctatggacccttctgatgaagaaggcagagggggggcggggggtggcggggcgggctccgagcacagtgaaacactttctagtctgtctcttacctcgttattttgcccacccccgccgccacccgctcccgggttaactcccgctcggaaattttcaagcacttcaagcctcgctgctccaggccggccccatgccgctgccctggcccacggcctcgcgcgctctccttcctgggcagcagataggtcaaaggacccgcctggcagggctccacttcccatgggcctcggccctctggcaccccctccccagccactgccaggtgaattggaaccaggagatgcggcatcaaaacgcaagagatag

SEQ ID NO: 181270 - DNA, 6567 bp, synthetic construct
  misc_feature 1..6567: note = Description of Artificial Sequence: Synthetic coding sequence
  source 1..6567: mol_type = other DNA
atggccgagagcgccagcccccccagcagcagcgccgccgcccccgccgcggagcccggggtcaccacagagcagccaggtcccaggtccccaccctcctccccaccaggtctggaagagccacttgacggtgcagacccccatgtgccccaccctgatctggctcccatcgctttcttctgcttaaggcagaccacttctccccgaaactggtgcatcaaaatggcaacaggcccttggtggtggtgcttatgtatgcttgttattcttttaaattgcgttactctcggaatgtatcagccctgcgacgacatggattgcctcagtgatcgatgtaagattctccaagtcttcgacgactttattttcatcttttttgctatggaaatggtgctgaagatggtggccctgggcatatttgggaaaaaatgttacctgggcgacacctggaaccgcctggattttttcatcgtcatggccgggatggtagagtactcccttgacctccaaaatattaatctttctgccatacgcaccgtgcgcgtcctcagaccactcaaagctatcaaccgagtcccttcaatgaggatcttagttaacctcctgctggatacacttcccatgttggggaacgttctgctgttatgtttttttgtgttctttatcttcggcattatcggtgtgcagttgtgggctggcctattacgtaacaggtgtttcctggaggagaactttacaatccagggagatgtcgccctgccgccctattaccagcccgaagaggacgatgagatgccctttatctgctccctgtctggagacaatggcataatggggtgtcacgagattccacccttgaaagagcagggtcgggaatgctgcctaagcaaagacgatgtgtatgacttcggggcaggccggcaggatctgaacgcctcagggttatgtgttaattggaatcgatactataatgtctgcaggaccggctcggccaacccgcacaagggcgctatcaacttcgataatataggttacgcttggattgttatttttcaagtcattacccttgaaggatgggtggagatcatgtattatgtgatggatgcccacagcttctataactttatatacttcatcttgctgatcatcgtgggttctttcttcatgatcaatctgtgcttggtggtcatcgcaactcagttctctgagactaaacagagggaacatagattaatgttggagcagcgtcaacgatacctgtcttcttcgactgtggcctcctacgcggaacctggtgattgctatgaggagatctttcaatatgtgtgtcatatactccgtaaagctaagcggcgcgctctcggcctttaccaggctctacagtcccgacgtcaggctcttggaccggaagcaccggcccccgcaaagcccggaccccatgcaaaggagccaaggcactatcaattatgcccacagcattcaccgctggacgctacgccacacacattagttcagcccattccagcgactcttgcttccgatccggcctcttgcccctgctgccaacatgaggacggcagaagaccatccggactcggttcaactgactcagggcaggaggggtcaggctctgggagttcagcaggcggggaagacgaagccgatggtgatggcgcccggtccagtgaggacggtgcttccagtgaactcggtaaggaggaagaggaggaggaacaagcagatggagcagtgtggctgtgtggtgacgtgtggagagagacaagggcgaagttgcgaggcattgtcgatagtaagtactttaacaggggtattatgatggcaattcttgtgaatactgttagtatggggatcgaacaccatgagcaagccacggagctgacaaatattttagagatatgcaatgtcgtatttactagtatgttcgccttagagatgattctgaagctggccgcttttgggctctttgactacctccgcaatccttacaacattttcgacagcatcattgtaataatttccatctgggaaattgttggacaggctgacgggggtctgagcgtgctgaggacgttcagactcctcagagtcctaaaactggtgcgcttcatgcctgcattaagaagacagttggtggtcctcatgaaaactatggataatgttgccaccttttgtatgctcttgatgctcttcatttttatcttctctatccttggaatgcacatcttcggatgcaaatttagtttgaggaccgatactggggatacagtgcctgacagaaaaaattttgacagtcttctgtgggctatcgtaaccgtgtttcaaattctgacacaggaagactggaacgtcgtcttgtataacggtatggcttccacttcaccatgggcttcactctactttgtcgccttaatgacctttggcaattacgtactatttaatctcctcgtcgctatcctggtagaggggttccaggccgagggcgatgctaaccgaagctacagcgatgaagaccagtccagttcgaacattgaagaattcgacaagctgcaagaggggctagactcctctggtgatccaaagctgtgcccaatccccatgacaccaaatggccacctcgacccctcactaccccttggcggtcacctgggcccagccggagccgccggcccggccccacgactttccctgcagcctgaccctatgctcgtcgcactggggagccgcaaaagctctgtgatgagcttggggcggatgagctatgatcagaggtcactctcttcgagcaggagcagctattatggcccgtggggtcgtagtgcagcttgggcttcaaggaggtctagttggaattccctgaagcacaagccaccttccgcggagcacgagagcctcttatcagccgaacgaggtggcggagcacgcgtctgcgaagtcgccgcggacgagggaccccctcgggcagcccctttacacacgccccatgctcatcacattcatcacggaccccacttagctcaccgtcataggcaccatcggcgcaccctgagcctcgacaatagggatagtgtggacttggccgagctcgttccagcagttggcgcccaccccagagccgcctggagagctgcaggtcctgcaccgggtcacgaggactgtaacggccgcatgccctcaattgccaaggacgttttcaccaagatgggtgacaggggtgaccggggagaggatgaagaagagatcgattacactctctgcttcagagtccgtaagatgatcgacgtgtataaacccgattggtgcgaggtgcgtgaagactggtccgtgtacctcttttccccagaaaaccgctttagggtgctgtgtcagaccatcattgcgcataagctgtttgattacgtggtgctggccttcattttcctcaactgcatcacaatcgcccttgaaaggccccaaatagaggccgggagcacagagcgcatattcctgaccgtgtcaaattatatctttacagctatatttgtgggggaaatgacgctaaaagttgtctcattgggactctattttggagagcaggcctacttacggtcctcatggaatgtgttggacggatttcttgtgttcgtgtccatcatcgatatcgtcgttagccttgcgagcgccgggggcgcgaaaatactgggggtgctgcgggtactaaggttactgcgcacgttaagacccctgagggtgatctcgcgagccccaggcttaaagctggtggttgaaacactgataagttctctgaagcctatcggcaatattgtgcttatctgctgcgcgttctttattattttcgggatactgggtgtgcaactgttcaaaggaaagttttaccactgtctgggcgttgacacacgaaatataaccaaccggagcgactgcatggctgccaattacaggtgggttcaccacaaatacaacttcgacaatctggggcaggcactaatgagtctgttcgtcttagcttctaaagatgggtgggttaacattatgtacaatggcttggacgcagtcgctgtggaccagcaacccgtcacaaaccataacccttggatgttgctgtacttcatatccttcttacttatagttagtttcttcgttctgaatatgttcgttggcgtggtggtggagaactttcataaatgcaggcaacatcaggaagcagaagaagctaggcgtagggaagaaaaacgcttaaggcgacttgagaagaagagaagaaaggcacagagactgccatattacgccacgtactgccacactcggctactgattcattctatgtgcacgagccattacctggatatctttattacctttatcatctgtctgaatgtggtgaccatgtcactggagcattacaatcaaccgactagcttagaaaccgcccttaaatactgcaactacatgttcacaacagtttttgtgttggaagcagtcttgaagcttgtagcattcggtctgagaaggtttttcaaggatagatggaatcaactggatctcgccatcgttctgctttcggttatgggcatcacccttgaggagatcgagatcaacgccgccttgcctatcaatcccacaataatcaggattatgcgggttctgagaatcgctcgcgtacttaagctactgaagatggctacaggcatgagagctctgttggacacagtagtgcaggcacttccccaggtaggcaatctggggctgctttttatgttactgttctttatatatgctgccctgggagttgaactattcggcaaactggtctgcaatgatgagaatccttgcgaggggatgtctaggcatgctacttttgaaaattttggaatggccttcctgaccctctttcaagtgtctacaggggacaattggaacggcattatgaaagatactctccgagattgcacccacgatgagcgctcatgcctgtcttccctacagttcgttagccccctttacttcgtgtcgtttgtgctgaccgctcagtttgtgctaatcaatgtggtggtcgctgtcctcatgaaacatctggacgattcaaacaaggaggcccaagaggacgccgagatggacgcggaactggaactagagatggctcatggacttgggccaggcccccggctgcctaccggatctcccggtgctcccggccggggcccaggaggtgctggcggcgggggggacaccgaaggcggcttgtgtcggagatgttattctccagctcaggaaaacctgtggctggacagtgtttccctgataatcaaagacagcctcgagggggaactgactattatcgacaacctttctggtagcattttccatcactattcaagcccggccggctgcaaaaaatgccaccacgacaagcaggaggtacaactggccgaaactgaagccttctccctcaacagcgatcgctcctctagcatcctgcttggcgacgatctgtcgctggaggaccctactgcctgccctccaggcaggaaggattctaaaggggagctggatcccccggagcctatgcgggtgggagacctgggcgaatgcttctttcctctgagctccacagccgtttctccagatcccgagaattttctctgtgaaatggaggaaattccgtttaacccagtccgtagctggttgaagcacgacagtagtcaggcgcctcctagtcccttctctcctgacgcatcaagtcctttgctcccgatgcctgcagagtttttccaccccgcagtctcggcaagtcagaaaggcccggagaaaggcacagggacggggaccctgcccaaaatagcgctgcagggaagttgggcatccctcagatcccccagggtgaattgcacactccttaggcaggctacaggaagcgacacgtctctggatgcttctcccagttcttccgccggctcactgcaaactaccctggaggattccttaactttatccgacagtcccaggcgggccctcggcccccctgccccagctccaggacctcgagccggtctgtccccggctgcacgacgccggttaagtctcagggggagaggcctcttttccttgcgtggactgcgcgctcaccagcgctcccactcatcgggaggctccacgtccccgggctgtacgcaccacgactccatggatccatccgatgaagagggtaggggaggagctggaggaggtggcgctggatcggaacactccgaaactctctcttctctatcactgacgtccctgttttgccctccccccccaccccccgctcccggcctgactcctgcccgaaaattttcctctaccagcagtctcgctgccccaggccggcctcacgcagctgctcttgctcacgggttggcccgaagcccatcttgggctgctgaccggagcaaagatccaccagggcgtgcacctttaccgatgggcctcggtcccctcgcccctccaccccaacccttacctggcgagctggaaccaggagatgctgcttctaagcggaaacgatag

SEQ ID NO: 181271 - DNA, 6051 bp, synthetic construct
  misc_feature 1..6051: note = Description of Artificial Sequence: Synthetic coding sequence
  source 1..6051: mol_type = other DNA
atggccgagagcgccagcccccccagcagcagcgccgccgcccccgccgccgagcctggggttacaacagaacagcccggcccgcgctccccaccaagctcccccccaggccttgaagagccactggatggggctgatcctcacgttccacaccccgacctcgcccctatcgctttcttctgcctgaggcagacaacttctccaagaaattggtgcatcaagatggtgtgtaacccttggtttgagtgcgtctcaatgctcgtgatcctgctcaactgcgttactctcgggatgtaccaaccttgtgacgacatggattgtctatccgacaggtgtaaaattcttcaagtgtttgacgactttatcttcatcttctttgccatggagatggttctcaaaatggttgcactgggaatctttgggaagaagtgttatctcggtgatacctggaacaggctggacttcttcattgtgatggccggcatggtggagtatagcctggacctgcagaatatcaatctgagtgctatacgaacggtaagggttctgcggcctcttaaggcaattaaccgtgttcctagtatgagaattctggtgaatctcttactggacactctgccaatgcttggaaacgtgctgctgttgtgctttttcgtgtttttcattttcggcatcataggggtccagttatgggccgggctcctccgtaacaggtgcttcttggaagagaacttcacaatccagggggacgtcgcactgccaccctactatcaacctgaggaggatgatgagatgcccttcatctgcagtctgtctggagataacgggattatgggctgccatgaaatcccacccttgaaggagcaaggacgggagtgctgtctgagcaaggatgatgtttacgactttggcgctggacggcaggacctgaatgcaagtggcctctgtgtgaactggaaccggtactataacgtatgtcgtaccggcagtgctaacccacataaaggagcaatcaactttgataacatcggttacgcctggatagtgatctttcaggtgatcaccctcgagggttgggtcgagataatgtactacgtcatggatgcgcacagtttctacaattttatctacttcatcctgctgatcatagtgggatccttctttatgatcaacttatgcctggttgtgatcgcgactcaattctccgaaactaagcagagggaacacagactcatgctcgaacaacgtcagaggtacctgtcatcaagtactgtggcttcctacgccgagccgggagactgctacgaggaaattttccagtatgtgtgccacatcctgagaaaggccaagagaagagcccttggattgtatcaggcattgcagagcagacggcaggccctcgggccggaggccccagccccagccaaacccgggccacacgccaaggagccgagacactatcacggcaagacaaagggccaaggcgatgagggaaggcacctcggaagcagacactgccaaaccttgcatggacccgcatctcccggtaatgatcattctgggcgtgaattatgcccacagcactctccattggacgctactcctcacactctcgttcagcctattcctgcgacactggcttccgatcccgcatcttgcccatgctgccagcatgaggatggtcggcggccctcagggctcggttcgactgactctggtcaggagggtagcggctccggatcgagtgccggtggtgaggatgaggccgatggggatggggcaaggtccagcgaagatggagcgagcagcgagctgggcaaggaggaagaggaggaagaacaggccgatggggcggtttggttatgtggggatgtgtggcgcgagaccagagccaaattgcggggcatagtggattctaaatactttaatcgagggatcatgatggcaatcctcgtgaacacagtgtcgatgggaatcgaacatcacgagcagccagaggaactaactaatatcttggagatttgtaatgtggtgttcactagcatgttcgcgctggaaatgatcttgaagctggctgccttcgggctgtttgactacttgaggaatccttataatattttcgactcaattattgtgattatctctatatgggagatcgtgggccaagcagatggtgggctgtccgtattgaggacttttcgcttactgagggtgctcaaacttgtgcggttcatgcctgcactgagacgccagttggtggtgctcatgaagacaatggataacgtggcgaccttttgtatgctgcttatgctttttatctttatattttcaatcctggggatgcacatcttcggatgcaagttctccctgaggacggacactggggatacagttcccgaccgcaaaaatttcgatagcctcctgtgggcaatagtgaccgttttccagattctcacccaagaggattggaacgtggtactttataatggtatggcctcaacttccccttgggcctcactctacttcgttgccctaatgacatttgggaactatgtgctgtttaacttgcttgtggccatactcgttgaaggttttcaggcggaaggcgacgcaaacagaagctatagtgacgaagatcaatcgagtagcaatatcgaggagttcgacaagctgcaggagggcctcgacagcagtggagacccgaagctgtgtccaatccctatgactccaaacggccacctcgacccgtccctgccattaggaggacatctggggccagcaggagcagcgggtccggcaccaaggctgtcactgcaacctgaccccatgcttgtggcacttggatcgaggaaaagctccgtcatgtctctgggcagaatgtcctacgaccagcgaagcctaagctcgtccaggagcagttattacggcccttggggacgttcagcagcctgggcttcccgtcggtccagttggaacagcctaaagcacaagcccccctctgctgaacacgagagcctcctgagtgccgaaaggggtgggggtgcacgggtttgcgaagtcgctgcggacgaggggcctccacgagctgccccactacacactccccacgcccaccacatacaccatggtccacacttggcccacagacatcggcaccatagacgcactctgagtcttgataatagggactccgtggacttggccgagttggtgccggccgttggcgcccacccaagggccgcttggcgcgccgccgggcccgcacccggacatgaggattgcaatgggaggatgccaagcatcgctaaagacgtgtttactaaaatgggagacagaggggacaggggcgaagacgaggaggagatcgattacaccctgtgtttcagggtccgaaaaatgatcgatgtgtacaaacccgactggtgcgaagttcgcgaggactggtccgtctacctcttttccccagagaatagattcagagtcttgtgccaaaccataatagctcataaactgttcgattacgtggtgctggcctttattttccttaattgcattaccatcgctctggaacgcccccagatagaagcgggctccacagaacgcatctttctgacggtgtcaaactacatttttacagccatcttcgtaggagaaatgaccttgaaggtagtgtcattggggctttatttcggagagcaggcatatctgcgctcgagttggaatgtcttggacggcttcctggtcttcgtgtccatcatcgatatcgttgtcagcttggcatctgcaggtggcgccaagatcctcggcgttttaagagtgctcaggctgctgcgcactctgagacctcttagagtgataagcagggccccaggcttaaaattggtggttgaaacgttgatttcaagcctgaagcctatcgggaatattgttctaatctgctgcgcattttttattatttttggcattctgggtgttcagctcttcaagggcaagttctaccattgcctcggcgtggatacgcgaaacataaccaaccgcagtgattgcatggccgccaactaccgctgggtccaccacaagtacaattttgacaacctggggcaggcgcttatgtctcttttcgtccttgcatctaaggatggctgggtcaatatcatgtacaatggcctggacgctgtagccgttgatcaacagcctgtaactaaccataacccatggatgctactgtacttcataagtttcctgctgatcgtgtcttttttcgtgctaaacatgttcgtgggggtggtcgtagagaactttcacaaatgcagacaacaccaagaggctgaagaggctagaaggagggaagaaaagaggctccgcaggcttgaaaagaagcggcggaaagcgcagcgacttccatactatgcgacttactgccatacgaggctgcttatccactccatgtgtacaagccattacttggatatcttcattacttttatcatctgcctgaatgtggtcacaatgagtttggagcattataaccagcctactagcctcgagaccgcattgaagtactgcaattatatgttcactacagttttcgtcctggaagcagtgctgaagcttgtggcttttggtctgcgccggttttttaaggacagatggaaccagctggacctcgcaattgtgttactctccgtgatgggaatcactcttgaggagattgagataaacgccgctctccccatcaacccaacaataatccgaatcatgcgcgtgcttagaatagctagagtcttgaaactcttaaagatggctaccggaatgcgcgctctgttagatacagtagtacaggcacttccacaggtggggaacttaggcctcttgtttatgctgttgttcttcatttatgccgcactcggggtggaactttttgggaagctggtctgcaatgatgaaaacccatgcgaaggtatgtctcgtcatgcaacatttgagaacttcggaatggcctttctgacgctgtttcaggtaagtaccggggacaattggaatggcatcatgaaggacactctccgagactgcacacacgacgaaaggtcctgcttgtcatcactgcaattcgtatccccactctactttgtgtcttttgttttgacagcgcagtttgtacttattaatgtggtggtggctgtgctgatgaagcatctggatgattcaaacaaggaggcccaagaggatgctgagatggatgccgaactggagctcgaaatggcccacgggctggggcccggaccaagactcccaacaggctctccaggtgccccaggccggggcccgggcggtgccggcggcggcggagataccgagggaggtttgtgccggaggtgttacagccctgcgcaggaaaatctgtggttagattctgtctccctgatcattaaagattccttagagggagagctgacaatcatcgataacctatctggctccatattccatcactacagctcacccgcgggctgtaagaagtgccatcatgacaagcaagaagtccaactggccgagactgaagccttcagcctcaattctgatcgcagctccagtattttgctgggagacgacttgtcgcttgaggatcctaccgcgtgtcccccaggcagaaaagactctaagggggaactggaccccccagagccgatgcgagtgggcgacctgggtgaatgcttcttcccactgagttcgacggccgtgtcccctgaccccgagaatttcctctgcgagatggaggagatcccattcaaccccgtgcgatcatggttgaaacacgactcttcccaggccccaccttcccccttttcacccgacgcttcttctcctttgctgcctatgccggctgaattcttccacccagccgtctctgcctctcagaagggccctgagaaggggacagggacaggaaccctccccaagatcgcgcttcaggggtcttgggcttccctgcgctctcctagagtcaattgtacgttgctgaggcaggtacccacccccccacgaccatag

SEQ ID NO: 181272 - DNA, 6672 bp, synthetic construct
  misc_feature 1..6672: note = Description of Artificial Sequence: Synthetic coding sequence
  source 1..6672: mol_type = other DNA
atggccgagagcgccagcccccccagcagcagcgccgccgcccccgctgctgagcctggagttaccaccgagcaacccggcccccggtcgccacccagctctcctccaggcctcgaggagccactggacggcgcagaccctcatgttcctcaccccgatctggcccctattgcctttttttgtctgagacagaccaccagtcctcggaactggtgcataaagatggtatgcaatccatggttcgaatgcgtcagtatgctcgttattttgctgaactgcgtgactctgggaatgtaccagccttgtgatgatatggattgtctttctgaccgttgcaagatcttgcaggtcttcgatgactttatattcattttcttcgccatggaaatggtcctcaagatggtggcgctcggaatctttggaaaaaagtgttatctgggcgacacctggaaccgactggacttctttatcgtgatggcagggatggtggaatattcgctggacctgcaaaacattaacctcagcgccattaggacggtgagagtgcttaggcccttaaaagcaatcaaccgtgtaccctcaatgcggattttggtaaatcttctcctggacacgctgcctatgttaggtaacgtcctgctcctgtgcttcttcgtcttctttatcttcggcattatcggagtgcaactttgggccggattacttagaaatcggtgttttttagaggagaactttacaatccagggcgacgttgctttgcccccatattaccagcctgaagaagacgacgagatgccctttatttgttccctttctggcgataacggaatcatgggatgtcatgagattccccccttgaaagaacagggacgggagtgctgtctgagtaaagacgacgtttatgattttggtgccggtcgtcaggacttgaacgcttctggcttgtgtgtaaattggaatcgttattacaacgtgtgtcgcaccggcagcgccaatccacacaaaggggctatcaatttcgacaatatcggatacgcgtggatagtgatattccaggtcatcacactagagggatgggtggagattatgtattacgtgatggacgcgcactctttttacaactttatctactttattctgctgatcattgtgggcagcttcttcatgataaacctttgcctggtcgtgatcgcaacccaattctctgagactaagcagcgggagcatagactcatgcttgagcaaagacagagatatctctcctctagtactgtagcctcttatgcggagcctggagattgttatgaggagattttccagtacgtttgccacattcttcgcaaggctaagagacgggcccttgggctatatcaggccttacaatccagacgccaagctcttggacccgaggccccagccccagcaaagccagggccgcacgctaaagaaccgcggcactaccacggaaaaacgaaaggccagggtgacgaaggcaggcacctggggtctaggcactgccaaaccttgcacggtccagctagtccaggcaacgaccactccggaagggaactgtgccctcagcacagcccgttggatgccaccccccacacccttgtgcagccaattcccgctacactagcctcagaccctgcctcctgtccttgctgccagcatgaagatggcagacgaccttccggccttgggtccaccgacagtggacaggagggcagtggttctgggagtagtgccggcggtgaggacgaggcagatggggatggtgctcggagtagtgaggatggtgctagttccgaactgggtaaagaagaggaggaagaggagcaggctgatggagcagtgtggctttgtggggacgtgtggcgcgaaacacgagccaagctgaggggaatcgttgactccaagtacttcaatcgggggatcatgatggctatcctggtgaacaccgttagtatgggcattgaacatcacgagcagcccgaggagctgacgaacatcctcgagatctgtaatgttgttttcacttccatgtttgcattagaaatgatcctgaagctggcggcatttggactcttcgactacctgcgaaatccatataacattttcgattccatcatcgttatcatctcaatttgggagattgtcgggcaggcagatgggggattgtcggttctgaggacgttccgtcttcttcgggtgctgaaattagtcaggttcatgcccgccctccggcgccagctcgtcgtcctgatgaaaaccatggacaatgttgcaaccttttgcatgctactcatgctgttcatttttattttttctattctgggtatgcacatttttggctgtaagttctcccttagaactgacactggcgatacggtccctgatagaaagaatttcgacagccttctgtgggccattgtcactgttttccagatactcacacaagaagactggaacgtggttctgtataacggcatggcatccaccagcccttgggcttctctctacttcgtcgccctgatgacatttggaaattacgtgctgttcaacctgctagtcgcaattttagtagagggttttcaggcggagggagacgcaaatcggtcttattccgatgaggatcagagttcgagtaatatcgaggagttcgacaagctccaggagggactggactcaagcggggatcccaagctgtgccccatcccaatgacacccaatgggcacttagaccccagccttcctctgggagggcatctggggcccgctggagcggcagggcccgcccctaggctatcacttcagcctgatcctatgttagtggctctggggagccgaaaatccagcgttatgtctcttggcaggatgtcttatgatcagcgcagtctcagctcaagcagatctagttattatggcccctggggtaggagtgctgcctgggcgagtcgcaggtcgagttggaattcgctgaagcacaaacccccatccgcagaacatgagtccctgctgagtgcagagcgaggaggaggtgcacgtgtgtgtgaagtcgccgccgacgaggggcccccaagggccgcgcccctacacacaccccacgcccaccacatccaccacggcccgcatctggcccataggcacaggcaccatcggagaacgctgtctttggataacagagacagtgttgacctggccgaactggttcctgcagtgggcgcacatcctcgggccgcctggcgggctgctggccccgcccctgggcacgaggactgcaatggccgcatgccatcgattgcgaaggacgttttcactaagatgggcgatagaggagacaggggcgaggatgaggaggaaattgactacacgctatgcttcagggttagaaagatgattgatgtgtacaagccagactggtgtgaagtccgcgaggactggagcgtgtacttgttttcaccagagaaccgctttcgggtgctgtgtcagaccatcattgcgcataagctgtttgactacgtggttctcgcatttattttcctgaattgcatcactatcgccctggagagaccccagatcgaagctggtagcaccgagcgtatttttcttaccgtaagtaactatatcttcacagcaatctttgtcggtgagatgacactgaaggttgtgtccctggggctgtactttggcgagcaagcataccttcgatcaagttggaacgtcttggacggcttcctggtgtttgtctctatcattgacatagtggttagcctggcatccgctggcggcgccaagattcttggcgtgttgcgggtcctgcgattgctgagaactctaagacccttgcgcgttatctccagggctcccggcttgaaattagtagtagaaacacttatcagctcgttgaagccaattggcaatatagtgcttatctgttgtgctttcttcattatctttgggattctcggcgttcagctgtttaaaggaaagttctaccactgcctgggagtggatacccggaatattacaaataggtccgattgcatggctgccaactatcgctgggtccatcacaagtacaatttcgacaatctggggcaagcccttatgagcctcttcgtgttggcttcaaaggacggatgggttaacattatgtataatggtctggatgccgtggcagtggatcagcaaccagtgacaaatcacaacccatggatgcttctgtactttataagttttttgctaatagtttcctttttcgtactgaatatgtttgttggagttgttgtggaaaatttccacaagtgtaggcagcaccaggaagctgaagaagcaagaagaagagaagaaaaacgactgcgccggcttgaaaagaaacggagaaaggcccaacgtctgccctactacgcgacctactgtcacacacgactgcttattcactcaatgtgcacatcacattatttggatatctttatcactttcattatctgtctgaatgtggttacaatgagcctggagcactataatcagcccacatccctagagacggctctgaaatactgtaattatatgtttaccacggtgttcgtgctcgaggccgtactcaagctggtcgcttttggtctgagaaggtttttcaaagatagatggaatcagctcgatttagctatcgtccttctgtcggttatgggtattacactagaagagatcgagataaacgcagccctgccaattaaccccaccattattaggattatgcgggtcctgcggattgcccgggtgctgaagttactcaagatggcaacaggtatgcgtgccctgctcgacactgtagtgcaagcgctcccccaggttggaaacttagggctgttgttcatgctgctctttttcatatacgccgcgcttggggttgaactcttcgggaaactagtgtgcaacgacgaaaacccatgtgaggggatgagtcggcatgcaacctttgagaatttcggcatggcatttcttactctctttcaagtgtcaacaggagataactggaacggaataatgaaggacaccctgagagattgcacacatgatgagcgctcttgtttatccagcctacagttcgtctctcccctgtatttcgtgagcttcgtgttgaccgcacagttcgtcctcatcaacgtggttgtagcagtcctcatgaaacacctggatgacagcaacaaggaagcccaagaggacgccgagatggacgctgaactggagttagaaatggcccatggactcgggccggggcctcgactccccacaggcagtcccggtgctcccggacggggccctgggggggctgggggcggtggtgacaccgagggcggactctgccgccggtgctacagtcctgcgcaggagaacctgtggttggactctgtgtccctgattataaaggactcactggagggcgagcttactattatcgacaacctgtccggtagcatatttcatcattacagctcaccagctggttgtaagaagtgtcatcatgataagcaggaagtccagctcgcagagaccgaggccttttctctcaactcagacaggtccagttcaatcttactgggtgacgacctaagcctagaagatcccactgcctgcccacccggacgtaaagattccaaaggcgaactcgaccctccagagcctatgcgggtgggcgacctcggtgagtgctttttcccactcagtagtaccgccgttagcccggatccagagaattttctgtgcgagatggaagagatcccatttaacccagtgaggagctggctgaagcatgactcaagccaggccccaccttcgccattcagtccagatgctagttcccccctcttgcccatgcctgccgagttcttccatcccgccgttagtgccagccagaaaggtcccgagaagggaacagggacaggcactctgcccaaaatagccctgcaagggtcatgggcatccctgcgttcacctcgtgtcaattgcactctgttaagacaggccaccggctcagatacaagtctggatgcctctcccagtagttcagccgggtctctgcaaaccacccttgaggactccctgactctcagcgattcccctcgtcgcgccttgggtccccccgcacccgctccgggcccgagggctggcctgtcacccgctgctagacggcgcctgagtcttagaggtaggggacttttcagccttcgcggactaagggcgcatcagaggagccatagttccgggggctctacatccccaggttgtacccaccatgactccatggacccatctgacgaagagggccggggaggcgctggaggtggaggcgcaggtagcgaacattctgagaccctctcttccctgtccctgacttcactgttctgtcccccgcctcctcccccggcccctggactgacacccgcgaggaaattctcaagcacgtcctctcttgcagccccaggaagaccacatgcggccgccctggctcatggactcgcaagaagcccatcgtgggctgccgaccggtcaaaggacccccccggccgcgcccccctgcctatggggctgggacctttagcccctccaccacaacctctgccgggagagctggaaccgggagatgccgcttcaaaaaggaaaaggtag

SEQ ID NO: 181273 - DNA, 6567 bp, synthetic construct
  misc_feature 1..6567: note = Description of Artificial Sequence: Synthetic coding sequence
  source 1..6567: mol_type = other DNA
atggccgagagcgccagcccccccagcagcagcgccgccgcccccgcggctgagcctggcgtgactaccgagcagccaggccctcgatcacccccttcctctccccccggtcttgaagaacccctggacggggccgaccctcacgtgccacaccccgatctggctccaatcgcctttttctgcctgcggcaaacaactagccctaggaattggtgtattaagatggtctgcaatccttggtttgagtgcgtctcgatgttagtaatcctgctgaactgcgtgactctggggatgtaccagccatgtgacgacatggattgtcttagtgacagatgtaagatcctgcaggtgttcgacgattttattttcatctttttcgccatggaaatggtgctgaaaatggtggccctagggatatttgggaagaagtgctatctcggcgatacttggaatcgcctggacttcttcatcgtgatggccgggatggttgagtatagcctggatctccagaatattaacttgagcgccatccggacagtccgagtcctcaggccacttaaagccatcaaccgagtgccgtcaatgcggatcctggtgaacctgctcctcgacaccttgcctatgctagggaacgtgctgctgctgtgctttttcgtattctttatattcgggatcattggggtacagctctgggctggattgttgaggaataggtgttttttagaagaaaattttacaatccaaggtgacgtggccctgcccccctactatcagccagaggaggatgatgaaatgccatttatttgctccctctccggagacaacggaattatgggatgtcacgagatcccacccctcaaggagcagggccgggagtgttgcctcagcaaagacgatgtatacgacttcggtgctggtaggcaggatctgaatgcatcagggctctgtgtgaattggaatcgctactataacgtgtgccgaacaggctccgctaatcctcacaaaggagcaatcaatttcgacaatatcggctatgcctggatagtgatattccaggtgatcacactagaaggctgggtcgagatcatgtactatgttatggatgctcacagtttctacaattttatttattttatcctactcatcattgtcggctctttctttatgattaacctgtgcctcgtggttatcgctacgcagttttcagagacaaagcaaagggaacatagactaatgctggagcagcgacagcggtacctgtcctctagcaccgtggccagctatgccgagcctggtgactgctacgaggagattttccagtacgtgtgccatattttgagaaaggccaagaggagggcacttggcctctaccaggctctgcagagcaggagacaggccctaggacctgaggcacctgcaccagccaagcctggtccccacgcgaaagagccacgacattaccagctgtgcccgcagcactctccattggatgcaaccccacacactctggttcagcccattcctgcaactctggcaagcgaccccgctagctgcccttgttgtcaacatgaagatggtaggcgaccgtcagggctcggatccacagactctggccaggagggttcgggcagtggctcctccgctggtggagaggatgaagctgacggcgacggtgcacggtctagcgaggacggcgccagctctgagctcggaaaagaagaggaagaagaagaacaggctgacggcgccgtctggctctgcggagatgtgtggagagagacacgggctaaattaagagggattgtagacagcaagtacttcaatcgagggataatgatggccattctggtgaatacagtctcgatgggcatagagcatcatgagcagcctgaagagctcacaaatatattagagatctgtaacgtagtattcacctcaatgttcgctctagaaatgattctcaaactggctgctttcgggctttttgattatcttagaaacccctataatattttcgattccattattgtgatcataagcatctgggagatcgtgggtcaagcagatggaggcctatctgtgctgcgaacgttcagactgcttagagtgctgaagctggtgcgtttcatgccagccctccgaagacagctcgttgtcctaatgaagaccatggataacgttgccaccttctgtatgctcctgatgctgttcatattcattttctccatcctagggatgcatatctttgggtgcaaattcagtctgcgaacagacaccggcgacaccgtgccagaccggaagaattttgacagcctcctttgggccattgtgaccgttttccagatcctgacccaagaggactggaacgtggtcttatataacggcatggcatctaccagtccctgggcatctctctattttgtcgccctgatgacgtttgggaactacgtcctgtttaatctgcttgtcgctatccttgttgaggggtttcaggccgaaggtgatgcaaatcggtcatattccgatgaggatcagagttctagcaatatcgaggaatttgataaacttcaagagggcctggattcctctggggatcctaaattgtgcccaatccctatgacaccgaacggccacttggacccatccctgcctctgggcggacacttaggcccagccggtgcagcaggcccagcgccgcgactgtccctgcagccggaccctatgctggtggccctaggctcgcgtaagagcagtgtaatgtccctcgggcggatgagctatgatcagagatctctcagcagcagtcggagtagctactacggtccctgggggaggagcgctgcctgggcaagtcgtcgctcttcttggaactctctgaaacataaaccaccatccgcagagcatgaaagcttgctttcagccgagaggggcggtggtgcccgcgtgtgtgaagtcgccgcagacgaaggaccccctagggcagctccccttcatacccctcacgcacatcatatccatcacggtcctcacctggcacacagacatcgtcaccacaggaggactcttagcttagacaatcgcgacagcgtggacttagcagaacttgtccccgccgtgggcgcccacccaagggctgcttggcgggctgccgggcctgccccagggcatgaggactgcaatggacggatgccttccatcgcaaaagatgtgtttactaagatgggagataggggcgataggggcgaagatgaagaagagatcgattatacgctctgtttccgggtccgaaagatgattgacgtgtataagccagactggtgcgaagtgcgggaagactggtccgtgtatctcttttcccccgaaaaccgttttcgggtgctctgtcagacaataattgcgcacaaactctttgattatgtggtgttggccttcatcttccttaattgcataactattgccctggagaggccacagattgaggctgggtcgacagaacggatttttctaacggtaagcaattacattttcactgccatatttgtgggcgagatgactctcaaggtcgtgtccctggggctctacttcggggagcaagcatacctccggtcctcttggaacgtgctagacgggttcctcgtcttcgtaagtatcattgatattgtagtcagcttggcctccgcaggaggggctaagatactgggcgtacttcgagtgttgcggttgctccgcacgctgagaccactccgggtgatttcccgggctccaggactgaaattggtggtcgagacactgatctccagcctgaagccaatcggaaatattgtacttatttgctgtgcattctttattatattcggcatcctcggcgtgcagttattcaaaggcaagttttaccattgtttgggagtggatacccgcaacataaccaaccgatcggactgcatggccgctaactatagatgggtccatcataagtacaatttcgataatctcggccaggcactgatgtccctgttcgtgctcgcatctaaggatggatgggtcaacatcatgtacaatggcctggatgccgttgccgtggaccaacagccagtgaccaaccacaatccatggatgctcttgtacttcatcagttttttattgattgtttccttcttcgtattgaatatgttcgtcggtgtggtcgtggaaaattttcacaagtgccggcaacatcaggaagccgaagaggcacgtaggcgggaggagaagcggctgagacgcctggagaagaagcgccggaaggcacagcgactgccgtactatgctacctactgtcacaccaggttgttaattcattccatgtgtacaagccattaccttgacatctttatcacgtttattatttgcctgaatgtagtgactatgtcgctcgaacattacaaccagcctactagcctggagacggcgcttaaatattgcaactacatgttcaccacagtattcgtgctggaggcagtactaaagctggtggcatttggcctgaggaggttttttaaggatcggtggaaccagttagatctcgcaattgtgctcctatccgtaatggggatcaccttagaggagatcgaaatcaacgctgcactgccgatcaatccaactatcattagaattatgagggtcctaagaattgcccgtgtgctgaagttgctgaagatggcaaccgggatgcgcgccctgctggacaccgtcgttcaggccctcccacaggtcggcaaccttgggctcttgtttatgctgctgttcttcatttacgccgcccttggcgtggagctgtttgggaaactggtgtgcaacgacgaaaacccatgtgagggcatgtcccggcatgctactttcgaaaatttcggcatggcatttctaactttatttcaagtgtccaccggtgataactggaacggtataatgaaggatacactgagagattgcacccacgacgagcgctcttgcctgtcatcccttcagttcgtttcccccctttacttcgtgagcttcgtgctaaccgcccagtttgtactaatcaacgttgtagtggccgtactgatgaagcacctagacgactcaaataaggaggcgcaggaggacgcagaaatggacgccgagctcgagttggagatggcacacggcctcgggcctggccctcgcctccccacaggaagtcccggcgccccagggagaggcccaggtggtgccgggggcggcggggacacggaaggaggcctatgccgcaggtgctatagccccgctcaggaaaacttatggctagattcagtgtctctgatcattaaggactcactggaaggggagctgaccattatcgacaatctttcaggcagtattttccatcactatagctcccccgcgggttgtaaaaagtgccaccatgataagcaggaagtccagctggcggagaccgaggctttctctttgaattctgatcgctcctcatcaattttactcggagacgacctgtcgctcgaggatccaaccgcttgccctcccggaagaaaagattccaagggcgaacttgacccacccgaacctatgcgcgtaggggatttaggcgaatgttttttccctctttctagtactgctgtgtcacccgaccctgagaactttctatgtgagatggaggagattccatttaatcctgttcgctcatggctgaagcacgatagctctcaggccccaccctcacctttttcgccggatgcgagttcccctttactcccaatgcctgcggagttcttccaccctgctgtcagcgcttcccagaaaggccccgaaaaaggcaccggcaccggcactttgccgaaaatcgcactccagggctcctgggcgtccttaaggtcaccgagagtcaactgtaccctcctaagacaggcaacgggaagcgacaccagcctcgatgcctctccttcttcttcagcgggatctctgcagaccaccttggaggattctctaactctttctgactctccacggcgcgctctcggcccacccgctcctgctcctggcccgcgggcaggactgtctcccgcagcgaggagacgtctatccttgcgtggacggggactgttctctctccggggcttgcgggcgcatcagcgttctcactcttccgggggatccacctcccctggctgcacccatcatgactcaatggacccttccgacgaagaggggagaggcggggcggggggtggaggtgctgggagcgaacattctgagaccttgagctcacttagcctgacctccttgttttgtccaccaccgcctccccccgctcctggactgacccccgcaagaaagtttagctcaacgtccagcctggcagcccctgggcgaccacacgcagcagcgctggctcatggcctggctaggtcacccagctgggcagcagatcgctcgaaagacccaccaggccgggcaccgttaccgatgggcctaggacccctggcccccccaccacagcctctcccaggggagttggaacccggcgatgcggccagtaaaaggaagcgctag

SEQ ID NO: 181274 - DNA, 5946 bp, synthetic construct
  misc_feature 1..5946: note = Description of Artificial Sequence: Synthetic coding sequence
  source 1..5946: mol_type = other DNA
atggccgagagcgccagcccccccagcagcagcgccgccgcccccgcagccgaacccggcgtgactactgaacagccgggaccgcgtagcccccctagtagtccccctggtttagaagagcctctggacggtgccgacccccatgtaccccacccggatctcgctcccatagccttcttttgcctgaggcagaccactagtccccgtaactggtgtataaaaatggtctgtaacccatggttcgagtgtgtctcgatgctcgtaatccttttgaattgcgtcaccctgggaatgtatcagccctgtgatgacatggattgtttatctgatagatgcaaaattctgcaggtgtttgatgatttcatcttcattttttttgccatggaaatggtactaaagatggtggctctaggaatcttcggaaaaaaatgctacctcggagatacctggaatcgcctcgacttctttatagttatggcgggtatggtggagtactccttggaccttcagaacatcaacttgtcagccataagaaccgtcagagtgctgcgcccattaaaggcgattaaccgggtcccttccatgcgcattctcgtgaacctgttgttggatactctccctatgctgggaaatgtattactgctttgcttcttcgtgtttttcatattcggtatcatcggagtgcagctgtgggccggcctcctcagaaatagatgctttctggaggaaaatttcacgattcagggtgatgtggccttgcccccatattaccagcccgaggaggatgatgagatgcccttcatctgctcgctttccggcgataatggaatcatgggatgccacgagatcccaccactgaaggagcaagggagagaatgctgcctgtcgaaagatgatgtgtacgactttggtgccgggcgtcaggatttgaatgcctctggtctctgcgtcaattggaatcgttattacaatgtgtgtagaactggaagcgccaaccctcacaagggagccatcaattttgataacatcggttacgcctggattgtaatttttcaggtgatcaccttggaaggctgggttgagatcatgtactatgtgatggacgcacatagcttctacaattttatttactttattctgctcatcatcgtcggaagcttctttatgatcaacctctgtctggtcgttatagcgacgcaattctccgaaaccaagcagcgggagcacagattgatgctggaacaacgccagcgctatttatcatcttctaccgtggcatcctacgccgagcccggcgactgctatgaggaaatctttcagtatgtatgccatattctgcgcaaagccaaaagacgcgcactcggcctttatcaggccctgcagagtagaagacaggctctgggtcccgaagccccggcgccggccaagcccggtccccatgcaaaagagccaaggcactatcagctctgccctcagcactcgcccctggacgccactccccacaccttggtccagcctatccccgccacgttggcctcagatccagcctcctgtccttgctgccagcatgaggacggcagaagaccctccgggttgggcagtaccgattctggacaagaaggaagcggatctggaagttcagccggaggcgaagacgaggccgacggagacggggctaggagctcggaggacggagcctcttccgagttagggaaggaggaggaagaggaggagcaggcagatggcgcagtatggctgtgtggcgatgtgtggagggagacgcgcgccaaactgaggggaatcgtggactcaaagtacttcaatcgagggataatgatggcaattctggtgaataccgtctccatgggcattgagcaccacgagcagccagaagaactgactaatattctagaaatttgtaacgtggtgttcacatccatgttcgcgcttgagatgatacttaagctggccgcctttgggctgtttgactacctcaggaacccctacaacatttttgactccatcatagtaatcataagtatatgggagattgtcggtcaagcggacggcgggctgagtgtgctccgtacattcagacttcttcgggtactgaaacttgtacgctttatgcctgcactccgacgccagctggtggtgctgatgaagaccatggacaatgtggctaccttttgtatgcttttaatgctctttatctttatcttctctatcctcggaatgcacattttcggctgcaaattcagccttaggacggacactggagacaccgtaccagataggaagaacttcgattccctcctgtgggcgatcgtgaccgtcttccagatcctgacacaggaggactggaacgtggtgctgtacaacggcatggcttcaacttctccttgggctagcctttactttgtcgccttaatgacctttgggaactacgtgctgttcaatctcctagtggcgattctggtggagggttttcaggcagaaggcgacgcaaatcggtcatacagcgatgaggaccaaagctcttccaacatcgaggagtttgacaaattacaggaaggccttgactcctcgggcgatcctaaactatgcccgatccctatgaccccgaatggacacttagaccccagtctacctttaggcggacatctcgggccagctggcgccgccggaccagcaccccgattgagcttgcagcccgatcctatgctggtagccctgggaagcagaaaatcctccgtgatgtcactggggcgtatgagttatgaccagcggagtttaagcagcagccgaagtagctactacggcccttggggccgatcagccgcatgggcatcgaggcgctccagctggaactcgctgaagcataagcccccttccgctgaacatgagtccttactatctgcagaacgaggcggcggtgctcgcgtgtgcgaggttgccgccgacgaagggccacctcgcgccgctccgctccacactccacatgcccatcacatccatcatggacctcatctcgctcatcgccacaggcaccatcggagaacgctctctttggacaacagggacagtgtcgatctggcggagttggtccctgctgtgggggcccatccgagagcagcttggagggctgccggccccgcgcccggccatgaggactgtaacggacggatgccaagtatcgctaaagacgtgttcacgaaaatgggcgaccgcggggataggggggaagatgaagaggagatagattacaccttgtgcttccgggtacggaagatgattgatgtctataagccagactggtgcgaggtccgcgaggattggtccgtgtacttgttcagccctgagaatcgatttcgcgtcctctgtcagacaatcatcgctcataaactgttcgattacgtcgttctagccttcatttttttgaactgtatcactatcgcccttgaacgccctcagatcgaggccggaagcacagaacgtattttccttaccgtatccaattacatttttacagctatattcgtgggggagatgactctgaaggtggtgagccttggactatattttggcgagcaggcgtatttgcgatcctcctggaatgtactcgacggtttcctcgtgttcgtctccatcattgatatcgtagtgtctctggctagcgccgggggagcaaagattctcggggttctgagggtccttagacttcttcgcaccctgagaccactgcgcgtcattagccgagccccaggccttaagctggtcgtggagaccctgatctcttctcttaaaccaattggtaatatcgttctgatctgctgcgctttttttattatcttcggaatactgggagtgcagctgtttaaagggaaattttaccattgcctgggtgtagatacacgcaatatcactaatcggtccgattgcatggctgcgaactatcgctgggtgcatcacaaatataatttcgataacctgggccaagctctgatgtctctgtttgtactggcttccaaggatggatgggtgaatatcatgtataacggactggacgccgtcgctgttgatcagcagccggtgaccaaccacaatccatggatgctgttgtatttcataagcttcctcctcattgtgtctttttttgttttaaacatgttcgtgggcgtggtggtcgagaacttccacaagtgccgacagcaccaagaggccgaggaagctcgcaggagagaggagaagaggcttcggcgtttggaaaagaagagacgaaaagctcaacggttaccttactacgcaacatactgtcacacacgcctgctgattcattccatgtgcacttcccactatctggacatattcatcacattcatcatttgcctgaacgttgtaaccatgagcctggagcattacaaccagcccacatctctggagaccgctctcaagtactgcaactacatgtttacaaccgtgttcgtactcgaggcagtcctaaagttggtggcattcggcctgagaagattcttcaaagatcgctggaatcagttagatctagcaatcgttttgctgtctgtgatgggaattactctcgaagaaatagagataaacgcggccttgccaattaaccccaccataatcaggatcatgagggtcctcaggattgcccgagtgctcaagctactgaagatggctacagggatgcgggctctcctggatactgttgtccaagctcttccgcaggtggggaatttggggcttctgttcatgctgcttttttttatctacgctgccctgggtgtggaattgttcggcaagctggtctgtaacgacgagaacccatgtgaggggatgagcagacatgcaaccttcgagaacttcggaatggccttcctaacgctgtttcaggtgtctaccggagacaattggaacggcatcatgaaagataccttaagggattgcacacacgatgagcggagctgcctgtcatcacttcagttcgtttcacccttatactttgtttcctttgttctcactgcccagtttgtcttaatcaatgtagttgtggcggtcctaatgaaacacttagacgatagtaataaagaagctcaggaggacgccgaaatggatgcagagttggagttggaaatggcccatgggctaggacctggaccgaggttaccaactggcagtccaggagctccaggtcgcggtcctggtggcgccggcggcgggggagatacagaaggaggcctctgtcggcggtgctattctcctgcccaagagaacctttggctggacagtgtctccctgatcattaaggacagcctggagggggaactaacaattattgacaacttaagtgggagtattttccaccattatagctctcccgctggatgtaaaaagtgtcaccacgataagcaagaggtgcagctggcagaaacggaagccttctcgctgaattccgacaggtcttcctccatcttattaggcgacgatctctcactggaagatccgacagcatgcccacccggccgaaaagacagcaagggggagttggacccaccggagccgatgagagtgggggatctgggcgaatgttttttccccctttcgtcaactgcagtgtctccagaccccgagaatttcctgtgtgagatggaagagattccgttcaacccggttagatcatggctcaagcacgattcatcacaagccccgccatctcccttctcaccagacgcctcatcaccattgctgccaatgcccgccgaattctttcacccagccgtgtcagccagccagaagggacccgaaaaggggaccggtaccggcacattacccaagatagcccttcagggaagttgggcatccctcagatccccgcgtgtgaactgtaccctattgagacaggtgcccacaccaccacgtccatag

SEQ ID NO: 181275 - DNA, 1041 bp, synthetic construct
  misc_feature 1..1041: note = Description of Artificial Sequence: Synthetic coding sequence
  source 1..1041: mol_type = other DNA
atgatggacaagttccggatgatcttccagttcctgcagagcaaccaagaatccttcatgaacggtatatgtggcatcatggccctcgccagcgcccagatgtattcggcttttgattttaactgcccatgcctgcccggatataatgccgcttattccgccggcatcttgcttgctcccccattggtcctcttcctgttagggctggtgatgaataataatgtgtctatgctggccgaggagtggaaaaggcctctggggcgacgcgccaaggatcctgcagtgctgaggtatatgttttgcagtatggctcagcgggcattaatcgctcctgtagtctgggttgctgtgacactgctggatggcaagtgttttctgtgcgccttctgcacagccgtgcccgtgtccgccctgggcaacggttctcttgctccaggactccccgcccctgaattggcccgccttctcgcccgcgtcccgtgcccagagatatacgatggtgactggctactggcccgggaggtggctgtaaggtacctgagatgcattagccaagcattgggatggagttttgtattgctaacaaccctcctcgcattcgtggtccggtcagtacggccttgcttcacacaggccgccttcctgaaatcgaagtattggtcccactatatcgatatcgagcgcaaattattcgacgaaacatgtacagaacatgcaaaggctttcgccaaagtgtgcatccagcagttttttgaggccatgaaccacgacctggagctggggcatacccacggaacgctggccactgcacctgcctctgctgccgcgccaactacacccgatggggctgaagaggagcgggagaagcttcgggggattactgatcagggaactatgaacagactgctgactagctggcacaaatgcaagccgcccctgagactggggcaggaggagcctcctctaatggggaacgggtgggccggcggcggcccgagacctccccgaaaggaggtggcaacatatttcagtaaagtttag

SEQ ID NO: 181276 - DNA, 972 bp, synthetic construct
  misc_feature 1..972: note = Description of Artificial Sequence: Synthetic coding sequence
  source 1..972: mol_type = other DNA
atggccgccctgatcgccgagaacttccggttcctgagcctgttcttcaagtccaaggacgtcatgatcttcaatggactggtcgctttaggaacagtaggatctcaagagcttttctcagtggtggcctttcactgtccatgttcccctgcaaggaactacctctacggcctggcagccatcggagtgccggcccttgtactatttataattggcatcatcctgaataaccacacctggaacctcgtagccgaatgccagcatcgacgtacgaaaaactgtagcgccgctcccaccttcctgctgctcagttccattctgggacgagccgcggtggctcctgttacttggagcgtcatctctctgctgagaggtgaggcgtacgtgtgcgccctgtccgaattcgtggacccctcgtcattgactgcacgcgaggagcacttcccaagcgcgcacgccaccgaaattctcgcacgctttccttgcaaagaaaatcctgacaatctctcggatttccgtgaagaagtatctcggcggcttcgttatgagtctcagctcttcggttggctattgatcggcgtcgttgccatccttgtttttctgacaaagtgtctgaagcactactgtagcccactcagctatcgtcaagaagcctattgggcccaatatcgcgctaatgaggaccaactgttccaacggacagcggaggtccactctagggtattggctgctaacaacgtgcggagatttttcggcttcgtggccctgaacaaggacgacgaggaactgatcgcaaattttccagtcgaaggcacccagccacgaccccagtggaacgccatcacgggggtgtacttgtatcgggaaaatcagggactgccactgtacagccgactgcataagtgggcacagggcttggccgggaacggcgctgctccagataatgtggaaatggctctcctcccatcttag

SEQ ID NO: 181277 - DNA, 972 bp, synthetic construct
  misc_feature 1..972: note = Description of Artificial Sequence: Synthetic coding sequence
  source 1..972: mol_type = other DNA
atggccgccctgatcgccgagaacttccggttcctgagcctgttctttaagagcaaggatgttatgatctttaatggccttgtcgcgctgggcacagtgggatcgcaggagctgttctctgtggtcgcctttcactgtccctgttccccagcaagaaactatctttacgggttggctgccattggagtacccgcactagttctgttcattatcgggatcattctcaacaatcatacctggaacctggtagctgagtgtcagcatcggcggacaaagaactgctctgcagctccaacctttctcctgctctcttccatccttggaagggccgcagtagctcccgtgacatggtcagtgatttccctcctgagaggggaggcttacgtttgcgccttgtctgagttcgttgaccccagctctctcaccgccagggaagagcactttccatccgcacacgctaccgagatccttgcaaggttcccatgcaaagagaaccctgacaacttgagcgatttccgggaggaggtgtctagacgactccggtacgaatcgcagctgttcggatggctcctcatcggagttgtggccatcctcgtattcctcacgaagtgtttgaagcactattgctctcctctgagctatcggcaggaggcctactgggctcaatatcgggccaatgaagaccagctatttcagagaacggctgaggtgcactccagagtgctggccgcaaacaatgtgaggaggttctttggctttgtagcgttgaataaggatgacgaggagctgattgctaatttccccgtcgaaggcacccagccccgtccgcaatggaatgcgattactggtgtatacttatatcgggaaaatcaaggcctgccactgtacagccgtctccataaatgggcacaggggctcgccggcaacggcgccgccccagacaacgtagagatggcattactgccctcctag

SEQ ID NO: 181278 - DNA, 657 bp, synthetic construct
  misc_feature 1..657: note = Description of Artificial Sequence: Synthetic coding sequence
  source 1..657: mol_type = other DNA
atggccgccctgatcgccgagaacttccggttcctgagcctgttcttcaagagcaaggacgtgatgatcttcaacgggttagtggccttaggcaccgtgggctcccaggagctgttttctgtagtagcctttcactgcccctgcagtcctgcacgaaactacttatacggcctggccgcgattggcgtccccgccctagtgctctttatcattggcatcatccttaataaccacacctggaacttggttgcagagtgtcagcaccgtagaaccaaaaactgttctgctgctcccactttcctacttctttcatccatcctcggcagagcagcagtggcacctgtgacttggagtgtaatcagtctcctccgaggggaggcttatgtgtgtgctctatccgagtttgttgacccgagttcactcactgccagagaggaacatttcccatcagctcatgccacagagatcttagcccgtttcccctgtaaggagaatcctgataatctgagcgacttcagggaggaggtctctcggcggttaagatatgagagccaagtgcggagctgtgctaaaggatcctcctctagtttggtggtggccggagagcgaagcggagacggcctggtgttaaaactgggactggttctgaggggttag

SEQ ID NO: 181279 - DNA, 891 bp, synthetic construct
  misc_feature 1..891: note = Description of Artificial Sequence: Synthetic coding sequence
  source 1..891: mol_type = other DNA
atggagagcatggccgtggccaccgacggcggcgagcggcccggcgtgcctgccgggagcggactgagtgcctctcagcggcgcgcggagttaagaagaaggaagcttctgatgaattcggaacagcgaataaacaggatcatgggattccacagacccggttctggggccgaagaagagagtcagacaaaatcaaaacagcaagacagcgacaaattgaattcattatctgtgccatcagtgagcaagcgagtggtgctgggggattcagtttcaacgggcactacagatcagcaggggggtgtcgctgaggtgaagggcacacagctgggagataagctggattcattcattaagcctcccgaatgtagtagtgatgtgaatctggagctacgccagcgtaataggggcgatctgacagcggatagtgtacaaaggggttccaggcatgggctggaacagtatctcagtcgcttcgaggaagcgatgaagctgcgaaaacagctgatttccgagaagccaagccaggaggacggcaacacgaccgaggagtttgattccttcaggatctttcgtctggtagggtgtgccctgctggcccttggagttagagcctttgtgtgcaagtacctctccattttcgcccctttccttacgttgcagctggcgtacatggggctgtacaagtatttcccaaaatccgagaagaagattaagacgacagtccttaccgcagccctcttgctgagtggcatccctgccgaggtgatcaatcgaagcatggacacttattccaaaatgggcgaggtgttcaccgatctgtgcgtgtacttttttacatttattttctgccatgagcttcttgactactgggggagcgaggtcccttag

SEQ ID NO: 181280 - DNA, 1113 bp, synthetic construct
  misc_feature 1..1113: note = Description of Artificial Sequence: Synthetic coding sequence
  source 1..1113: mol_type = other DNA
atgctgggcgccgtggagggcccccggtggaagcaggccgaggacattcgggacatttacgactttagagacgtgctcgggacgggcgcattctcggaggtgattctagctgaagataagcgaacacagaaactggtggccatcaagtgcattgctaaggaggcattagaaggaaaggagggttcaatggaaaacgaaattgccgttctgcacaagattaagcatccaaacatcgttgccttggatgacatctatgaaagcggaggtcacctgtacctcattatgcagctggtgtccggtggtgagcttttcgaccggattgtggagaaggggttttacacagagcgtgatgcatcacggctaatttttcaggttcttgacgcagttaaatatctgcacgacctggggattgtgcacagagacttaaagcccgaaaatttgttgtactattccctcgatgaagattctaagatcatgatctccgatttcggactcagtaagatggaagatcctgggtccgtcctcagcacggcctgtggaacccccggctacgtagcccccgaggtgctggctcagaagccatactctaaggctgtggactgctggtccatcggtgttattgcatacatccttctatgcgggtatccccccttctacgacgagaacgatgcgaagctttttgaacagatattgaaggcagaatatgagttcgatagtccttattgggatgacataagcgactcagcgaaagattttatcagacacctgatggagaaggatcccgagaagcgctttacttgcgaacaagcgttgcagcatccatggattgcaggagatactgcactagataaaaacatccaccagtctgtgagcgagcaaattaaaaagaactttgccaagtctaagtggaagcaagcttttaacgcaactgccgtagttcggcatatgcggaagcttcaattagggaccagtcaagaaggacagggccagacagcaagccatggtgagctactcactccggtagcgggggggccagcggccgggtgttgctgtagagactgctgtgtggaacctggaaccgagctgagtcctacgctaccacaccagctgtag

SEQ ID NO: 181281 - DNA, 1437 bp, synthetic construct
  misc_feature 1..1437: note = Description of Artificial Sequence: Synthetic coding sequence
  source 1..1437: mol_type = other DNA
atggccaccatcacctgcacccggttcaccgaggagtaccagctgtttgaggaattagggaagggcgcattcagcgttgtacgaaggtgtgtgaaagtgctagcaggacaggagtatgccgccaagatcattaataccaagaaactttccgccagagatcaccaaaaattggaaagggaggcccgcatttgccgcctgctaaagcatcctaacatcgtgcgactccatgacagcatatctgaagaaggccatcactatctgatttttgatttggtgaccggcggcgagcttttcgaagacattgtcgctcgcgagtattattcagaggccgatgcaagtcattgcatccagcaaattctggaagccgtgctgcactgtcaccagatgggcgtggtccaccgggatctcaagcctgaaaatttgctcttggcttcgaagctaaagggagcggccgtgaagttggctgattttgggcttgccatcgaggtggaaggggagcagcaggcctggttcggtttcgctggaaccccaggctatctgtcacccgaagttctgcgtaaagatccatatgggaagccagtcgacctctgggcttgcggagttattctctacatcctcctggtgggctacccaccattctgggacgaggaccaacatcgtctgtatcaacagattaaagcaggtgcgtacgactttccgtcacctgaatgggacacagtcactcctgaagcaaaagacctgatcaataagatgctcaccattaacccttcaaaacggattactgctgcagaagccctcaagcacccctggattagtcatagatcgaccgtggcctcctgcatgcatagacaggagacagtggattgcctcaaaaagttcaacgctagacggaagctgaagggcgcaatcctcacaaccatgctggccactcgtaacttttccggcggcaaaagcggcggaaacaagaagtcagacggtgtgaaagagtcatctgagagtaccaacactacaatcgaagatgaagacactaaagtccggaaacaagaaatcattaaagttacagaacagctcattgaggccatttccaatggggatttcgaaagctataccaaaatgtgtgaccccgggatgacagccttcgagcctgaagcactggggaacttggtcgagggcctggacttccacagattctacttcgagaacttgtggtctaggaactctaagcccgtgcataccactatcctaaatcctcatattcatctgatgggggacgaatcagcctgtatcgcttatattagaattacccagtacctagatgccggtgggatcccaaggacagcccaaagcgaagagacacgggtgtggcacagaagggatggaaaatggcagattgtacacttccatcggagtggagcccccagtgtactgccccactag

SEQ ID NO: 181282 - DNA, 1470 bp, synthetic construct
  misc_feature 1..1470: note = Description of Artificial Sequence: Synthetic coding sequence
  source 1..1470: mol_type = other DNA
atggccaccatcacctgcacccggttcaccgaggagtaccagctgttcgaggagctcgggaaaggggctttttccgttgtcaggaggtgtgtgaaggtgctcgccgggcaggagtacgcagcgaagatcatcaacacgaaaaaactttcggcccgggatcaccagaaattggaaagggaggccagaatttgtagactgttaaaacatccaaatatcgtccgattgcacgatagcatctcggaggaaggacaccattacctgatcttcgatctggtgaccgggggggagctttttgaggatatcgtggccagggagtactactcagaggcggacgcttcccactgtatccagcagattctggaagcggtgttgcattgccaccagatgggtgtggtccacagagacctgaagcctgagaaccttctcctcgccagcaaactcaagggagctgctgttaagctggctgacttcgggcttgcaattgaagttgagggggagcagcaggcatggttcggttttgccggaactcctgggtacctgagcccggaggttctgcgtaaggacccttatggcaagccggtggatctctgggcctgtggagtgattttatacatcttgctggtgggataccccccattctgggatgaagatcagcataggctgtaccagcagattaaggcaggagcttacgacttcccatctccagaatgggatactgttactccagaggcaaaagaccttatcaataagatgttgacgattaatcctagcaaacgcatcacagcagcagaggccctcaaacatccttggatttcacaccgctccacagtagccagctgtatgcatcgccaggagaccgtggattgcttaaagaagtttaatgcccgccggaaactgaagggggcgattctgaccactatgctcgcaaccaggaatttctccggcggaaaatccgggggcaacaagaaatcggacggggttaaaaaaaggaagagctcctcatctgttcagctgatggagtccagcgagtcaaccaataccaccatagaggatgaggatactaaggtgcgtaagcaggaaataatcaaggtcaccgaacagcttattgaggctataagcaatggtgattttgaatcctacacaaagatgtgtgatcccggtatgactgcatttgaacctgaagcgctgggcaaccttgtcgagggtttggatttccatcggttctactttgagaatctgtggagcaggaattctaagcccgtccataccaccatcctgaaccctcacattcacctcatgggtgacgagtctgcctgtatcgcttacatccggatcacacaataccttgacgcgggggggatccctcggactgcccagtccgaagaaactagggtttggcatcgcagagacggaaagtggcagatcgtgcattttcacaggagcggcgccccatccgtcctccctcactag

SEQ ID NO: 181283 - DNA, 276 bp, synthetic construct
  misc_feature 1..276: note = Description of Artificial Sequence: Synthetic coding sequence
  source 1..276: mol_type = other DNA
atggccaccatcacctgcacccggttcaccgaggagtaccagctgtttgaggaactggggaaaggggcattctctgtagtcaggcgatgcgtaaaggtgctcgcgggccaggaatacgccgccaaaatcatcaacaccaaaaagcttagcgccagggaccatcagaagcttgagcgtgaagccaggatttgcaggttactaaaacaccctaatatcgtgcggttacatgattccattagcgaagaggggcatcattatttaatcttcgacctttag

SEQ ID NO: 181284 - DNA, 1554 bp, synthetic construct
  misc_feature 1..1554: note = Description of Artificial Sequence: Synthetic coding sequence
  source 1..1554: mol_type = other DNA
atggccaccaccgtgacctgcacccggttcaccgacgagtaccagctctacgaagatatcggtaaaggggccttcagtgtcgtcaggcggtgtgtcaaactgtgtactggccacgaatacgcggcaaagatcataaataccaagaaactttccgccagagatcaccagaagttggagcgagaagcgcgtatttgtcggctcctcaaacatagtaacatcgttaggttgcacgactcaatttccgaggaagggtttcactacctcgtgttcgatctggtgacaggtggcgaacttttcgaggacattgtggctcgtgaatattacagtgaagcggatgctagccactgcatccagcagattctggaagctgtgctgcattgtcatcagatgggcgtagttcatcgggatttgaaaccggagaacttactgttggcttctaagtgtaagggagctgctgtaaaactggccgatttcggcctggccatcgaggtccagggagatcaacaggcatggtttggcttcgccgggacacccgggtacctgagccccgaggtgctgagaaaggaggcctacggcaaacctgtggacatttgggcctgtggggttattctgtatatcctgctggtggggtacccacccttctgggatgaggatcaacataagctctaccagcagatcaaagccggggcatatgattttcccagccctgagtgggacacagtgactcctgaagcgaaaaacctcatcaatcagatgctgacaatcaaccccgccaagcgcattaccgcccatgaggccctcaagcacccttgggtgtgtcagaggagcaccgtggcttctatgatgcaccgccaagaaactgtggaatgcctaaaaaaattcaatgcccggcgcaagttaaagggagcaattctcacaaccatgcttgccacgagaaatttctctgccaagagtcttctgaataaaaaggcagatggcgttaagcctcagacaaattctacaaagaacagcgccgctgccacaagtcctaagggtacacttccccctgccgctctggaacctcagacgaccgtaatccataatcctgtcgatggaattaaggagtcttccgacagtgcgaatacaacaatagaggacgaggacgccaaagcacggaagcaagagattattaaaactacagaacagctaatcgaggccgtgaataatggcgatttcgaagcatatgcaaagatttgcgatcccggcttaacttccttcgagccagaggcactaggcaacctggtggaagggatggactttcatcgattttatttcgaaaacctgctggcgaagaactccaaacctatccacactactatattgaacccccacgtgcacgtaatcggtgaagacgccgcatgcattgcctatatccggctgactcagtatatagacggtcagggcagacctcgtaccagtcagtcagaggaaacaagagtgtggcacagaagagatggcaaatggcaaaatgtgcactttcactgttcaggggccccagtggcgcctttacagtag

SEQ ID NO: 181285 - DNA, 1350 bp, synthetic construct
  misc_feature 1..1350: note = Description of Artificial Sequence: Synthetic coding sequence
  source 1..1350: mol_type = other DNA
atggccaccaccgtgacctgcacccggttcaccgacgagtaccagctctatgaggatataggaaaaggagcctttagcgtcgtgagacgctgcgtcaaactttgcaccggtcacgagtacgccgcaaaaataatcaatactaaaaagttgtctgcaagggatcatcagaaattggagcgggaagctcggatttgcaggctgctgaagcacagtaacattgtaaggctccatgacagcatctcggaagaagggttccattatctcgtgtttgacctggttactggcggcgagctctttgaagacattgtcgcccgcgaatattactccgaagccgacgcttcccattgtattcaacagattctcgaggctgtgctgcactgccaccagatgggagtcgtccaccgggatttaaagccggagaatctcctactggcttcaaaatgtaagggcgctgcagtgaagctagcggattttggactcgccattgaggtgcaaggtgaccagcaggcctggttcgggtttgctgggactccgggttatcttagcccagaagttttaaggaaggaggcctacggcaagcccgttgacatctgggcctgtggcgtgatactatacatcctgctggtcggttatccacctttttgggacgaagatcaacacaagttgtatcagcagattaaagctggagcctacgactttccgagccccgagtgggacactgtgactcctgaggcaaagaatctcattaaccagatgctaaccatcaatccagccaagcgaatcaccgcacacgaggccctgaaacacccttgggtgtgccagaggtctacagtggcaagtatgatgcatcgccaggagaccgtcgagtgccttaagaagtttaatgctagaaggaagctcaaaggcgcgattttgaccacgatgctggctacaagaaacttcagtgctagaaagcaggagataattaaaacgaccgagcaattgatagaagccgtcaacaatggagattttgaggcatacgcaaagatttgtgatccaggattgacatcgtttgagcctgaagcgctgggaaatttggtagaaggcatggattttcatcgcttttatttcgaaaacttactggctaagaattccaagcctatccatacgactatcctgaaccctcatgtccatgtcatcggcgaggatgctgcgtgtatcgcctacattcgcctgacccagtacatcgatggccaggggcgtcctcgcacaagccagtccgaagagacacgggtgtggcatagaagagatggaaaatggcagaatgttcacttccattgctctggggcccccgtggcaccactgcagtag

SEQ ID NO: 181286 - DNA, 1479 bp, synthetic construct
  misc_feature 1..1479: note = Description of Artificial Sequence: Synthetic coding sequence
  source 1..1479: mol_type = other DNA
atggccaccaccgtgacctgcacccggttcaccgacgagtaccagttgtatgaggatattgggaagggggctttctctgtggtccgcagatgtgttaagctatgtactggccacgagtatgccgcaaagataattaacactaaaaagctgtccgctcgggaccatcagaagttggaaagagaggctaggatttgccggctgcttaagcatagcaatatcgtgcgcctgcatgatagcatttccgaggaaggctttcattacctggtgttcgacttagtgactggcggtgagctgttcgaagacattgtcgctcgcgaatactatagcgaggctgacgcctcccattgcatacagcagattctggaggcagttctgcactgccatcagatgggggtggtgcacagggacctaaagcctgaaaatctgctactggcaagcaagtgtaagggcgcggcggtgaagctagcagatttcgggttagccatcgaggttcagggcgaccagcaagcgtggtttgggtttgcggggactcctggctatctcagccccgaagttctgcgcaaggaggcctacggcaagcccgtcgatatttgggcctgtggggtgattttgtacatcctgctcgtgggataccccccattttgggacgaagatcaacacaaactctaccagcagatcaaggcaggcgcttacgattttccctctcctgaatgggatacagtaaccccagaagctaagaatctgattaaccagatgttgaccatcaatcccgcgaagcgcattaccgcacatgaggctctgaaacacccgtgggtctgtcagcgctcaaccgtagcctccatgatgcacaggcaggagacagtggagtgcctgaagaaattcaacgcccggagaaaattgaaaggcgctatcctcacgacaatgttggccacccgtaatttctcagtcggccggcaaaccactgcgccagcgactatgagcaccgcagcttcaggaacaacgatgggactagtggagcaggcaaagtccttattgaacaagaaggctgatggcgtgaaagaaccacagaccactgtgattcacaacccggttgacgggataaaggagtccagtgatagtgccaacaccacaatcgaagatgaggatgcaaaagccaggaagcaggaaattataaagacgactgagcaacttattgaggcagtgaacaacggggacttcgaagcctacgcattttatttcgagaacctccttgcgaaaaatagtaagcccatccatacgacaatcctgaaccctcacgtccatgtaataggggaagacgctgcatgtatcgcctatatacggcttacccagtatatcgatgggcagggacgaccccggacatctcagtctgaggaaacgagagtgtggcatagacgtgacgggaaatggcagaacgtacactttcactgctcaggcgcccccgtcgcccctcttcaatag

SEQ ID NO: 181287 - DNA, 1629 bp, synthetic construct
  misc_feature 1..1629: note = Description of Artificial Sequence: Synthetic coding sequence
  source 1..1629: mol_type = other DNA
atggccaccaccgtgacctgcacccggttcaccgacgagtaccagctatacgaggatatcggcaaaggagcctttagcgtggtccggcgttgcgttaagctctgcacaggccacgaatatgccgccaagatcatcaacactaaaaagctgagtgcaagggaccatcagaagctggagagggaagcgagaatatgtcgacttttgaaacacagtaatatcgttcgcttacacgatagcatcagcgaagaaggcttccattatcttgtgtttgacctcgtgacgggcggtgaactgttcgaggacatcgtcgcccgagagtactactccgaggcggacgcatcacactgcattcagcagatcttagaggccgtccttcactgtcaccagatgggtgtcgtccacagagacttgaaacccgaaaacctgcttttagctagtaaatgtaaaggggccgcagtgaagttggccgacttcggcctggccattgaggtccagggcgatcaacaagcatggttcggcttcgccggcacccctggctacctcagtcccgaggttctccggaaagaagcctacggcaaaccagtggatatttgggcctgcggcgtgattctttacattctactcgtcggctatccccccttttgggacgaggatcaacataagctctatcaacaaataaaggccggtgcttacgattttccctcccccgaatgggacaccgtgaccccagaggccaagaatttgataaaccagatgctaaccatcaatcctgcaaagagaataactgctcacgaagcactgaagcatccatgggtgtgccagcgatctactgtggcttccatgatgcacaggcaggagacagtagagtgcctgaagaaatttaatgctcgccgaaagctaaagggtgcgatcctcacaaccatgttagctacccgaaatttctctgtgggcagacagacaacagctcctgccaccatgagcacagcagcgtcagggaccaccatgggcctcgtagaacaagctaagagcctattgaataagaaagccgacggggtcaaaccacagacgaactccacgaagaactccgccgccgcgacgtcccctaaaggaaccctcccccctgccgccctggagccacaaacaactgtgatccataatccagtggatgggatcaaggagtcctctgacagcgcaaacactacgatagaagacgaggacgctaaagctaggaagcaggagattatcaaaaccaccgagcaattaatagaggccgttaacaatggtgattttgaggcctatgctaaaatctgcgatcctggactgacttcgtttgagcctgaagcacttggaaaccttgtggaagggatggacttccaccgattctacttcgagaaccttcttgccaagaatagtaagcctatccataccacaattctcaatccacacgtacacgtgatcggggaggacgccgcatgcatcgcttacattcggctgactcagtacatcgacggccaaggaagaccgcgcacctctcagtctgaggagacacgggtgtggcaccgcagggacggcaagtggcagaacgtacacttccattgttccggggctccagtggcgcctctgcagtag

SEQ ID NO: 181288 - DNA, 1440 bp, synthetic construct
  misc_feature 1..1440: note = Description of Artificial Sequence: Synthetic coding sequence
  source 1..1440: mol_type = other DNA
atggccaccaccgtgacctgcacccggttcaccgacgagtaccagctctatgaggatatcggaaaaggagccttctcagttgtgcggagatgtgttaaattgtgcacaggacacgagtacgccgcaaaaattatcaatacgaagaaattgtccgcccgcgatcaccaaaagctggagagggaggccagaatctgccgtctgctgaaacattcaaatattgtgaggctgcatgactccatctccgaagagggattccattacctggtgttcgacctcgtcaccggaggcgaactatttgaggacatagtggctcgagaatattatagcgaagccgacgctagtcattgcatccaacagattctggaagctgtcctgcattgtcaccagatgggcgtggtccatagggacctgaaaccagagaacctcctgttggcaagcaaatgcaagggtgctgccgtgaagttagctgattttgggcttgctatcgaggtccaaggcgaccagcaggcctggttcgggttcgcaggtacccccggatacttgtcgccagaagtgttgcggaaggaggcttatgggaagcctgtggacatctgggcctgtggggtgatattgtacatcctgctcgtggggtatccacccttttgggacgaagaccagcacaaactgtaccagcagattaaagcgggtgcttacgactttccatcaccagagtgggacacggttacgccagaagcaaagaacctcattaatcaaatgttaaccatcaatcctgctaagcggattaccgctcatgaagctctgaagcacccgtgggtctgtcaacggagcacagttgcttccatgatgcaccgtcaggagaccgtggaatgcctgaaaaagtttaatgccaggcggaagttaaagggcgctattcttacgacaatgctggctactcgcaacttcagcgccgccaagtcccttctcaataagaaggcggacggagtcaaggagagttctgatagtgctaacactacaatagaggatgaagatgccaaggctcgaaaacaggaaattatcaaaacaacagagcaactgatcgaagctgtgaacaacggtgactttgaggcttatgcaaagatctgtgacccaggcctgactagttttgagcccgaagcccttgggaacctcgtggagggtatggattttcaccgtttctacttcgaaaacctgctggccaagaactctaaacccatacataccaccattcttaatccgcatgtgcatgtgataggcgaggatgctgcttgtattgcgtatattagacttacacagtatatcgatggacaggggcgcccccgcacatctcaatctgaggaaactagagtgtggcatcgcagggatgggaagtggcaaaatgttcattttcactgttccggcgcacctgttgcaccccttcagtag

SEQ ID NO: 181289 - DNA, 1512 bp, synthetic construct
  misc_feature 1..1512: note = Description of Artificial Sequence: Synthetic coding sequence
  source 1..1512: mol_type = other DNA
atggccaccaccgtgacctgcacccggttcaccgacgagtaccagctctacgaggatatcggcaagggtgcgttcagtgttgtcaggcgttgcgtgaagctttgtaccggccatgaatacgctgctaagatcattaacacgaagaagctgtctgctagggatcatcaaaagctcgaacgggaagccaggatttgccgtttactcaagcactcgaatattgtgcgattgcacgacagcatttctgaagaagggttccattacctggtgtttgatttggtgaccggtggggaactattcgaggatatcgtcgcgcgcgaatactattccgaagccgacgcctcccactgcatccaacagatactggaagcagttctacattgtcaccagatgggggtggtgcacagggatctcaagcccgaaaatctattactggcctctaagtgtaagggagcagctgtgaagctggcagacttcggtctggccatcgaggtccagggggatcagcaagcctggttcggattcgccggaaccccagggtacctctcgcctgaagtcctgagaaaagaggcttatggtaaacccgtggacatctgggcatgcggcgtaatcctatatatactactggtaggctatcctccattctgggacgaagatcaacacaaactgtaccagcagattaaagccggagcctatgatttcccgagccctgagtgggatacagttacaccagaggccaagaatctgattaatcagatgttaaccataaatccagcgaaaaggataaccgcccacgaggccctgaagcatccatgggtgtgccagcgatctaccgtggcttctatgatgcaccggcaggaaacggtggaatgtctgaagaaattcaacgctcggcgaaagctcaaaggcgctatcctgaccactatgttggccacgcgcaacttctctgccgccaagtccctcctgaataaaaaagctgacggagtgaagccacagacaaatagtactaagaattctgcggccgccaccagccctaagggcaccctgccacccgcagcattagagagttcagattctgccaacaccactatcgaggacgaggacgccaaggcccgcaagcaagaaattataaagaccacagagcagttgattgaagccgtaaacaatggcgattttgaggcatacgccaaaatctgcgaccctggactgacaagctttgagccagaggccctgggcaacttagtggagggcatggatttccatcggttttatttcgaaaatctattggcgaaaaactccaagcccatccatacaaccattctgaatccacacgtccacgtgattggtgaggacgctgcctgcatcgcttacatccgcctaacccagtacatagatggccaaggtcggccaagaacctctcaatctgaagagacaagggtgtggcatcgtcgagacggtaagtggcaaaatgtccattttcactgttccggcgcacccgtggcccccctgcaatag

SEQ ID NO: 181290 - DNA, 1557 bp, synthetic construct
  misc_feature 1..1557: note = Description of Artificial Sequence: Synthetic coding sequence
  source 1..1557: mol_type = other DNA
atggccaccaccgtgacctgcacccggttcaccgacgagtaccagctctatgaagacatcggaaagggggccttttctgtagtgcgtcggtgtgtgaagctgtgcacagggcatgagtacgcagccaagatcattaacaccaagaagctcagcgcccgcgaccaccagaaactggagagagaggcccgcatatgtcgcttgttaaagcactccaatatcgtgcgactccacgatagtatctcagaggagggattccactacctcgttttcgacttggtaactggtggagagctgttcgaggacatcgttgctcgggaatactatagcgaggcagatgcttcacactgtatccagcagatcttagaggccgtcttacactgccatcagatgggcgtcgtacatcgagatttgaagcctgaaaacttgctgctggccagtaagtgcaagggcgccgccgttaagttggcagactttggattagcgatagaagtgcaaggggatcaacaagcatggttcggattcgctggcacacctggatacctgtcccctgaagtgcttcgaaaagaagcatatggcaaaccggtggatatttgggcttgcggcgtgatcctatatatccttctggtgggatacccacctttctgggatgaggatcagcataagctgtaccagcaaattaaggcgggggcatacgacttcccatctccagaatgggacaccgtgactcccgaggccaagaatctgattaaccagatgctgactatcaacccagctaagaggatcactgcgcacgaagccctcaagcacccctgggtgtgccaacgtagcaccgtagccagcatgatgcatcgccaagagactgtggaatgcttaaagaagttcaacgctaggagaaagctgaagggcgccatcctgacgacaatgctcgccacaaggaatttttccgctgcaaaatcactcctcaataagaaagccgacggtgttaagccacagacaaacagcaccaagaatagcgcggcagccaccagtcccaagggtacactcccacctgcagccctcgaaccccaaaccacagtgattcataatcctgttgatggtattaaggagtcttcagacagcgccaatactacaatcgaggacgaagatgctaaggctaggaaacaagaaatcattaaaacgaccgagcaacttattgaagccgtcaataacggcgactttgaagcctatgccaagatttgtgatccagggctcacaagtttcgagccagaggccttagggaacctggtggaggggatggattttcataggttctacttcgaaaatctgcttgcaaagaacagtaaacccattcatactacaattcttaatcctcacgtccacgtgatcggggaagatgctgcttgtatagcctacattcgcctgacccaatacatcgacggccagggcagaccgcggactagtcagtcggaggagacaagggtatggcacagacgggacgggaagtggcaaaacgtgcatttccactgttctggcgctcccgtcgctcccctacagtag

SEQ ID NO: 181291 - DNA, 2001 bp, synthetic construct
  misc_feature 1..2001: note = Description of Artificial Sequence: Synthetic coding sequence
  source 1..2001: mol_type = other DNA
atggccaccaccgtgacctgcacccggttcaccgacgagtaccagctatacgaagatatcggtaagggggccttcagcgtggttcgccggtgcgttaagctctgcactggacacgaatatgccgctaagataattaatactaaaaagctatcagcacgtgatcaccagaagctcgagcgagaagcacgaatctgtcgtctgcttaagcactcaaacatcgtccgtctgcatgatagtatatctgaggagggttttcattacctcgtgtttgatctggtcacaggaggtgagctgtttgaggacatagtcgcccgagaatattactcagaggcagacgcttctcactgcatccagcaaatactggaggccgtgctacactgtcatcagatgggagtggtgcatcgtgatctgaagcccgagaacttgttgttggcctcgaaatgtaaaggcgcagcagtcaagctggcagactttggtctcgcaatcgaggtgcagggcgatcagcaggcatggtttgggtttgccgggactccaggatatctgtcccctgaagttctgagaaaggaggcctacgggaaaccggttgacatttgggcatgcggtgtgatactgtacatcctgctcgttggctatccgccgttttgggatgaggaccagcataagctctatcagcagataaaagctggagcctacgactttccctctcccgagtgggacacagtgactccagaggcgaaaaatctcataaatcaaatgttaactatcaatcccgcgaaacgtatcactgcccatgaggctctgaagcatccctgggtttgtcagcggtccacagtggcatcaatgatgcaccgccaggaaactgtagaatgcctgaagaagtttaacgctcgaagaaagctgaagggcgccatcctgacgaccatgcttgcaacccgcaatttcagcgtcggccgacaaaccactgcccccgccacaatgtccaccgccgcatccggcaccaccatgggcttggtggaacaggcaaaaagcctcctcaataagaaagctgacggcgtgaagccacaaactaactctaccaaaaacagcgctgcagcaacctcacctaaaggtactctgccacctgccgctctggaaccacaaacaactgttatacacaaccccgtggatgggataaaagagagcagtgactcagcgaacacgacaattgaggacgaagatgccaaggcgcctagagtgcccgacatcctgtcatccgtccgccgggggagtggtgctccagaggctgagggcccactcccatgtccctcccctgcgcccttctccccactgcccgccccttcaccgcgaattagtgacatactgaactccgtgagacgtggatctggcacacctgaagccgagggacctcttagcgctggtcctccaccctgcttgagccctgcactcctggggcctctgagcagccctagtccacggatctccgacattctgaattcagttcggagaggaagtgggactcccgaggctgaaggcccatcccccgttggaccaccaccctgtccttccccaaccattcccggccctctgcccacaccttccaggaaacaggaaatcatcaagacgactgagcaactgatcgaagcagtgaataatggtgacttcgaagcctacgccaaaatttgcgatccaggactgactagttttgaacctgaagcccttgggaacctggtcgaggggatggacttccataggttttactttgagaacctgctggccaaaaatagcaagccaatccatactaccattcttaatccgcatgtgcacgtgattggcgaagatgcagcatgcattgcctacattaggttgacacaatacatcgacggtcagggtcgacccagaacttcgcagtccgaggaaacgcgagtgtggcaccgtcgggacggcaagtggcagaatgtccatttccactgttctggcgcccccgttgcccccctgcagtag

SEQ ID NO: 181292 - DNA, 1629 bp, synthetic construct
  misc_feature 1..1629: note = Description of Artificial Sequence: Synthetic coding sequence
  source 1..1629: mol_type = other DNA
atggccaccaccgtgacctgcacccggttcaccgacgagtaccagctgtacgaggacatcggcaagggagccttctccgtcgtccgccggtgtgtgaagttatgtacagggcacgaatatgctgccaagattatcaatacaaagaaactgagcgcaagagatcaccagaaacttgaaagagaagctcggatttgtcggctccttaagcactccaatatagtgcggctacacgatagcatctccgaggagggttttcattacttggtttttgacctcgtcactgggggcgaattgttcgaggatatagtggctcgcgaatactactcggaggcagacgcgtctcactgcatccaacagattttggaagctgtgttgcactgtcaccagatgggggtggtccatagagatctcaaaccagaaaacctcctgttagccagcaaatgcaagggagccgctgtcaagttagctgactttggactggctattgaggtgcagggagaccagcaagcctggtttggtttcgcgggtacaccaggatacctgtcccccgaggttctccgaaaagaggcctacggtaaacctgtggacatttgggcatgcggcgtaatcttgtacattctcttggttgggtatcctccgttttgggacgaggatcagcataaactctatcaacaaatcaaggcaggtgcttacgattttcccagccctgagtgggacaccgtgactcccgaggccaagaacctcatcaaccagatgctcactattaacccagccaagagaataactgcgcacgaggcactgaagcacccctgggtgtgtcagagatccacagttgccagtatgatgcaccgccaagagaccgtggagtgcttgaaaaaatttaacgcccgccggaaactgaagggggccattctcacgaccatgctagctactaggaatttttccgtcgggaggcagactaccgcaccagctaccatgtccacagcagcttccgggaccaccatgggtctggtcgagcaggcaaagagtctattaaacaagaaagccgacggcgtcaaaccccaaactaatagtacaaaaaattctgcggccgctaccagtcccaagggaactctccctccagccgcacttgagccccagacgacggttatacataaccctgtggacggaatcaaggagtcaagtgatagcgccaacacaactattgaggatgaggatgccaaggctaggaagcaggagatcattaagacaactgagcagctgatcgaagccgtgaacaatggagacttcgaagcatacgccaaaatctgtgatcccgggttgacctctttcgagcccgaggccctcggaaatttggtggaagggatggatttccacaggttttacttcgaaaacctgctggctaagaactcaaaaccaatccacaccacaatacttaaccctcacgtccatgtgattggcgaagacgcggcatgcatagcatacatccggctcacccaatacattgatggtcagggtaggccccgcactagtcagtccgaggaaactcgagtgtggcaccggagggacggcaagtggcagaatgttcattttcattgcagcggtgctcctgttgcccccctgcagtag

SEQ ID NO: 181293 - DNA, 1557 bp, synthetic construct
  misc_feature 1..1557: note = Description of Artificial Sequence: Synthetic coding sequence
  source 1..1557: mol_type = other DNA
atggccaccaccgtgacctgcacccggttcaccgacgagtaccagctttacgaggacattgggaaaggggcattctcagtggtccgcagatgcgtgaagctctgcaccggacacgaatacgccgctaagatcataaacacaaagaaactatccgcacgggaccatcagaagctcgaaagagaggctagaatctgccgtctcctgaagcactctaacattgttagactccatgacagtatcagtgaggagggattccattatctggtgtttgacctagtcacaggcggggaactattcgaggacattgttgccagagagtactatagcgaggcggatgctagtcactgtattcagcaaatacttgaagccgtgctccattgccatcagatgggagtcgtccacagggacctgaaaccggaaaacctccttctggccagcaagtgtaaaggggctgcagtcaaattagccgacttcggcctcgctatagaggtccagggggaccagcaggcctggttcggctttgcaggaactccgggttatttaagcccagaagttctgagaaaggaggcttacggcaagcctgtggatatatgggcatgcggggtgatcctctacatcctcttggttggatatccccctttctgggacgaggaccagcataaactttaccagcagattaaagcaggcgcatacgactttccctctcctgaatgggacaccgtgactcccgaggcaaaaaatctgattaaccagatgctcacgattaatcctgccaagcgtattactgcacatgaggctctgaagcatccgtgggtgtgccagagatcgactgtggcctcaatgatgcaccgtcaggagactgttgagtgtctgaagaaatttaacgcacgtcggaagttgaagggcgcaatactaaccactatgttggcaacccgtaacttcagcgcagcaaagtccctgctcaacaagaaggcggacggtgtaaaaccccagacgaattcaaccaagaattcagccgcagctacaagcccaaaaggaaccttaccaccggctgccctggaaccccagacgacggtaattcataaccccgtggacggcatcaaggaatctagtgactccgccaataccaccatcgaggatgaagacgcaaaagccaggaaacaggaaattattaagactacagagcagttgattgaggccgtgaataatggcgatttcgaggcatatgcgaaaatttgcgaccctggactgacgtcatttgagcctgaagctctcgggaatctcgtggagggaatggattttcaccgtttctacttcgagaacttgctcgcaaagaactcaaagcctatccacaccacaattttgaacccacacgtgcacgtgataggagaggatgcagcctgtattgcttacattcggctgacacaatacattgatggccagggccgtccacgaacctcccaaagtgaagaaaccagagtatggcaccggagggatggtaaatggcagaatgtacattttcactgttctggagcacccgtggccccacttcagtag

SEQ ID NO: 181294 - DNA, 918 bp, synthetic construct
  misc_feature 1..918: note = Description of Artificial Sequence: Synthetic coding sequence
  source 1..918: mol_type = other DNA
atgggcgtggtgcaccgggacctgaagcccgagaacctgctgctggcgtccaagtgtaagggtgccgctgtgaaacttgcagacttcggactggccatcgaagtgcagggggatcaacaggcctggttcggctttgctggtactccaggataccttagcccggaggttctccgtaaggaagcatacggtaagcctgtggatatctgggcctgcggagtgattctgtatattctgctcgtagggtacccaccattttgggatgaagatcagcacaagctgtatcagcagatcaaagctggcgcatacgattttccttctcctgagtgggacacagtgacacctgaggccaagaacctcattaaccagatgctcacaattaatccagctaaaaggatcacggcacatgaggctctgaaacatccttgggtgtgtcagaggtctactgtggcatccatgatgcacaggcaggagacggtggagtgccttaagaagtttaacgctcgcaggaagcttaaaggagctatcttgaccaccatgctggctactcgtaacttctcagttggacggcagacaacagcgccggccaccatgagcacagctgcctctgggactactatgggcctggtggagcaggcaaaatccctgctaaacaagaaagcggatggagtgaagccacagaccaattccacgaagaatagcgcagcggcaacctcccccaaaggcacgcttccacctgcagctctggaaccccagacgactgttattcacaacccagtagatggaatcaaggaaagcagcgatagcgctaatactacgattgaagacgaggatgccaaggctcggaaacaggagattatcaagaccacagaacagctgatcgaagctgttaacaatggtgacttcgaggcatatgcatag

SEQ ID NO: 181295 - DNA, 1437 bp, synthetic construct
  misc_feature 1..1437: note = Description of Artificial Sequence: Synthetic coding sequence
  source 1..1437: mol_type = other DNA
atggccagcaccaccacctgcacccggttcaccgacgagtaccagctgttcgaagagctcggaaagggagcattctcggtggtgcgccgctgcatgaagattccgaccgggcaggaatatgccgccaaaataattaacacaaaaaagttatcggctcgggatcatcaaaaactcgagcgtgaggccaggatctgtcgcctgctaaagcatcctaacattgtgcgcctacatgactccattagcgaggaggggttccattacttagtcttcgatctagtcaccggcggagaattatttgaggatatcgtggcaagagaatactactctgaggccgacgctagtcattgcattcagcaaattctcgaatcggtgaaccactgtcatctgaacgggatcgtgcatagagacctgaagcctgagaacctgttgctggccagtaaaagcaaaggtgctgccgtaaagttagccgattttgggcttgcaatcgaggtgcagggagatcagcaggcctggtttggattcgccggcacacctgggtacctgtcgcccgaggttctgcggaaagacccatacggaaaacccgttgatatgtgggcttgtggcgtcatcttgtatatcctactcgtaggttatcctcctttctgggacgaggaccagcatagactgtatcaacagatcaaggcgggcgcctacgatttccccagccccgaatgggatactgtgacccccgaggccaaggatctcataaataaaatgctcacaatcaaccccgccaagcgcatcactgcctctgaggccttgaagcacccatggatttgtcagaggtctacagttgccagcatgatgcacagacaagagaccgttgattgtctgaaaaagttcaacgcgcgtcgtaagctaaaaggcgctatcttaaccactatgttggccactaggaacttctcagctgctaagagcctcctgaaaaagcctgacggcgtaaaggaatccactgagagctccaatacaaccattgaggacgaagacgtaaaggccagaaagcaggaaatcatcaaggtgactgaacagctgatcgaagctatcaataatggcgacttcgaggcatatactaaaatctgtgacccagggctgacagcctttgaacccgaagcactgggaaacctcgtggagggaatggatttccacaggttttatttcgagaacgccctgagtaagtctaataagcctattcataccatcatcctaaatcctcacgtccacctagtcggagatgacgcagcctgcatcgcctacataagactcacgcagtacatggacgggtcaggaatgcctaagacaatgcagagcgaggagactagggtttggcaccggcgcgacggcaagtggcagaatgttcattttcatcgtagtggttcacctactgtcccaatcaaatag

SEQ ID NO: 181296 - DNA, 1500 bp, synthetic construct
  misc_feature 1..1500: note = Description of Artificial Sequence: Synthetic coding sequence
  source 1..1500: mol_type = other DNA
atggccagcaccaccacctgcacccggttcaccgacgagtaccagttgttcgaagaactcggcaagggggctttctcggtagtcagacggtgtatgaaaatacctactggacaggagtacgctgcaaaaatcataaataccaagaagttgtctgctagggaccatcagaagttggaacgggaagccagaatatgccgcctgctcaaacatccaaacattgtgcgcttgcacgacagcatctcagaggaaggatttcactatctggtgttcgatttagtcaccggcggtgagttgttcgaggacattgtcgctagggagtactactctgaggccgacgcgtcacactgtatccagcagattttagagtctgtgaaccattgccatctgaacggcatagtccaccgcgatctcaagcctgagaatctcctgcttgcatcaaagtcaaaaggagcggctgtcaaacttgccgatttcggcctggctattgaggttcagggggaccaacaggcctggttcggctttgccggcacacccggttatttgtctccggaagtactgaggaaggacccatatgggaagccagttgatatgtgggcctgtggcgtcattctgtacattctattggttggatacccaccattctgggacgaagatcagcacagactttaccaacaaatcaaagccggtgcttacgactttcccagccccgagtgggacaccgtgactccagaggcgaaagatttaatcaataaaatgctcaccattaacccagccaaaaggattaccgcctccgaggcccttaagcacccgtggatctgccagagatcgactgtcgcatctatgatgcataggcaggaaacggtggactgccttaaaaagtttaatgcccgccgaaagctcaaaggcgccatactgaccaccatgttggcaactagaaattttagtgccgcaaaatctctgctcaaaaaacctgacggcgtgaaggagtctaccgagtcaagcaacaccaccatcgaagacgaggacgtcaaggctaggaaacaggaaatcatcaaggtgaccgaacagctgatcgaagccattaacaacggagatttcgaggcctatacgaagatctgcgaccctgggctcacagcctttgagccggaagcacttggcaacctcgtcgagggcatggattttcatagattctattttgaaaacgcactctctaagtctaacaagcccatccacacaatcatattgaatccacacgtgcatcttgtcggtgacgatgccgcatgcattgcctatataagattaacacagtatatggacggatccggaatgcctaagacaatgcagagtgaggaaaccagggtctggcacaggagggacggtaaatggcagaacgtccattttcaccggtctggctcgcctaccgttccgattaagcctccttgcatacccaatgggaaggaaaacttctccggaggaacctccctctggcaaaacatatag

SEQ ID NO: 181297 - DNA, 1437 bp, synthetic construct
  misc_feature 1..1437: note = Description of Artificial Sequence: Synthetic coding sequence
  source 1..1437: mol_type = other DNA
atggccagcaccaccacctgcacccggttcaccgacgagtaccagctctttgaggagcttggtaagggggccttttccgtagttcgccgttgtatgaaaattccaactggacaggagtatgccgctaaaattatcaatacaaaaaaactttctgcacgggaccatcagaagctagaacgcgaagcccgtatctgtaggctgctgaaacaccccaatatagtgaggctgcacgattcaatcagcgaggagggattccattacctggtgtttgatctcgttactggaggggaactgttcgaggacattgtcgcaagggagtattatagcgaagcagacgccagccactgcatccaacaaatcttggagagtgttaatcattgccacttgaacggcattgtgcacagggatttgaagcccgagaatctgctgctcgcttctaaatccaagggcgctgccgtgaaactggctgattttggcctggctatagaggtgcagggcgaccagcaagcgtggttcggattcgccggaacccctggctatctgagcccagaagtgctcagaaaagacccctacggaaagccggtggatatgtgggcttgtggagtgatcctttatatactgttagtgggatacccccctttctgggacgaagatcagcaccgtctgtaccagcaaatcaaagcaggagcttacgatttcccctcccccgaatgggacacggtaacccctgaggctaaggacttgatcaataaaatgctaaccatcaatcccgctaagagaattactgcatccgaagcccttaaacacccctggatttgccagcgctccacagttgcgagtatgatgcatcgacaggaaaccgtcgattgtctgaaaaagttcaatgctcggagaaagctaaagggcgcaattctgacaacaatgttggcgacacggaattttagcgccgctaagagcttgctgaagaagcccgacggggtaaaggaatctaccgagtccagcaatactaccatcgaggatgaggatgttaaagcccggaaacaggagatcatcaaggtgacggagcaacttatagaagccattaacaacggcgacttcgaagcctatacaaaaatatgcgatcctggcttgacagctttcgagcccgaggccctcggcaatctcgtggagggaatggacttccatagattttacttcgagaatgcgctgtcaaaaagtaacaagccgatacacactattattctgaatccccacgtgcatctcgtgggggatgacgctgcctgtatcgcctatattcggctgacgcagtacatggatggaagtgggatgccgaagaccatgcagagcgaggaaactagggtgtggcatagaagagatggcaaatggcaaaatgtgcattttcaccgctcaggatcccctactgtccctatcaaatag

SEQ ID NO: 181298 - DNA, 1479 bp, synthetic construct
  misc_feature 1..1479: note = Description of Artificial Sequence: Synthetic coding sequence
  source 1..1479: mol_type = other DNA
atggccagcaccaccacctgcacccggttcaccgacgagtaccagctctttgaagagctgggtaagggcgctttttcagtggtgcgtcggtgcatgaagatccccaccggccaagagtacgctgcaaagattatcaacaccaagaaactgtccgcaagggatcaccagaaactggaacgcgaagcaaggatctgccgactgttgaagcatccaaacatcgttaggctacatgactcaatcagcgaggaaggctttcattatctggtctttgacttagtcaccggcggcgaactctttgaggacattgtggcgcgggagtattactcggaggcagatgcaagccactgcatccagcagattctcgagagtgtgaaccactgccaccttaatggcatcgtccatcgggatctgaaaccagagaacttactgctcgccagtaagtctaaaggagccgctgttaagttggcagactttgggctggcaatcgaggtgcagggggaccaacaggcatggttcggattcgcagggacaccagggtatctgtcaccagaagtcttacgcaaagacccttacggcaaacctgtggatatgtgggcatgcggcgtaatcctttatatcttgctggtaggctatccaccgttttgggacgaggaccagcaccgcctgtaccaacagattaaggccggagcgtatgattttccctcaccagagtgggacactgtaactcctgaggctaaagatcttatcaataaaatgctgaccattaatcccgccaaacgcatcaccgcgtctgaggccttgaaacacccatggatctgccagcgctccacagtcgcttctatgatgcatagacaggaaactgttgactgtctgaagaaattcaatgccaggcggaagctgaagggagcaatcctgactactatgttagcaacgcggaatttcagtgccgccaagtccctcctcaagaaaccggacggcgtgaaggaaccccagaccactgtgatccataaccccgatggcaacaaggaatccactgaatcttctaatactacgatcgaagacgaggacgtgaaagctcgtaaacaggaaatcatcaaagtgacagagcagctcatcgaggccattaataatggagacttcgaggcttacaccaagatctgtgaccctggactgacagcgtttgagcccgaggccttaggaaatctcgtggaggggatggactttcaccgattctactttgagaatgcactttcaaaatcaaataaacccatccatacaatcatcctgaatccacatgtacacctggttggggatgatgccgcttgtattgcctacataaggctaacccaatatatggacggtagtggcatgcctaagactatgcagtccgaggagacacgggtttggcaccgtagagacggcaaatggcaaaatgtgcacttccatagaagcggcagccccactgtgcccatcaagtag

SEQ ID NO: 181299 - DNA, 1533 bp, synthetic construct
  misc_feature 1..1533: note = Description of Artificial Sequence: Synthetic coding sequence
  source 1..1533: mol_type = other DNA
atggccagcaccaccacctgcacccggttcaccgacgagtaccagttgttcgaggaactcggaaaaggagcttttagtgtggttcgccgttgcatgaagatcccgacaggccaggagtatgctgctaaaatcattaatactaagaagttgtccgctagagaccatcagaaactagagcgggaagctagaatttgcagattgctgaagcatccaaacatcgtccgcctgcatgatagcatttcagaggagggcttccactacctggtgttcgatctcgttaccgggggcgagctgtttgaagatattgtggctcgcgaatactactctgaggctgacgcctcccactgcatacagcagatcctggagagcgtgaatcactgccaccttaatggaatcgtgcatagggaccttaaaccggagaatttgctgcttgcaagtaaatccaagggggcggctgtgaagctggccgatttcgggttggccatcgaagtccaaggtgatcaacaggcttggtttgggtttgctggcactcctgggtacttaagccccgaggtcctgcgcaaggacccatacggcaagcctgtggacatgtgggcctgcggcgtgatcctgtacatccttttagtgggttatccgccattttgggacgaagaccagcatagactctatcaacagattaaggccggagcgtatgatttcccgtcaccagaatgggacacggtgacgccggaggccaaagacctgataaacaagatgctgaccatcaatccagcgaaaagaataacagcaagcgaggccctaaaacacccttggatctgtcagcgaagcacggtggctagtatgatgcacaggcaggagaccgttgactgtctcaaaaaatttaatgctcgtcgtaaactgaagggcgcaatactgaccaccatgcttgcaaccagaaacttttctgcagctaaaagtcttttgaagaagcctgatggagtgaaaaaaagaaagagtagcagttctgtgcaaatgatggagtcaacggagtccagtaacaccacaatcgaagatgaggatgtcaaggcacggaagcaggaaatcatcaaggtcaccgaacagcttatcgaggctattaataacggggacttcgaagcatacactaagatttgtgaccctggccttacagcttttgaacccgaggccctgggcaatcttgtagagggcatggactttcaccgattttacttcgagaacgctctgagtaagtcaaataaacctatccatacgattattcttaatcctcacgttcacctggtgggggacgacgcagcctgtattgcatatattcgcctcacgcagtacatggatggcagtgggatgccgaagacaatgcaaagcgaagagacacgcgtatggcataggagggacggaaaatggcaaaacgtgcattttcaccgttccgggagtccaacggtaccaatcaagcctccatgcatccctaacggaaaggaaaactttagcggcggaacttcactatggcagaacatatag

SEQ ID NO: 181300 - DNA, 1542 bp, synthetic construct
  misc_feature 1..1542: note = Description of Artificial Sequence: Synthetic coding sequence
  source 1..1542: mol_type = other DNA
atggccagcaccaccacctgcacccggttcaccgacgagtaccagctgtttgaggaacttggaaagggggctttcagcgtggtcagaaggtgcatgaaaattccaaccgggcaggagtacgccgcaaaaatcattaacacaaagaagctgagcgcaagggaccaccagaagcttgagagggaagcccgtatttgccgattgctgaaacaccccaacattgtgagactgcacgactctatcagcgaagaagggtttcattacttggtgttcgacctcgtgacaggcggcgagctctttgaggatatcgttgccagggagtattactcagaagctgatgcgagtcattgcatccagcaaatactggaaagtgtgaatcattgccaccttaatggcatagtacacagggacttaaagccagaaaacctgcttctggccagtaagagcaaaggagccgcagtcaagttggcagattttgggcttgcaatagaggtgcaaggggatcagcaggcctggttcgggttcgcggggacgccaggctacttgagccccgaggttctgaggaaggacccctacggaaaacccgtcgacatgtgggcttgtggtgtcatactgtacatcctgctggttggctatcctcccttttgggacgaagaccagcataggctctatcagcaaataaaggccggcgcttacgacttcccaagtcctgagtgggacactgtgactcctgaagctaaggacttgatcaacaaaatgttaacgattaacccagctaagaggatcactgccagtgaggcgctgaagcacccctggatatgtcagcgatctaccgtggcctccatgatgcacagacaagaaactgtggactgtctcaagaagtttaatgctcgccggaagctgaaaggtgctattttgacgacgatgctggccacacgtaatttctcagctgctaaatctttgctcaaaaagccggacggagtcaaagagccacagaccaccgttatccacaatccggatggaaataaggaatccacagaaagttcaaacacaactatcgaagacgaggacgtcaaggcacgtaagcaggaaataatcaaagtgaccgaacagctgattgaagccatcaacaacggtgactttgaggcatatactaagatttgtgatcctggcctgacggcctttgagccggaggcgctcggcaacctggtcgagggaatggatttccacaggttctatttcgagaacgcactctccaaatcgaataagccaattcatacaatcatactcaatccccacgttcacctcgtgggcgacgatgctgcatgcatagcttatatccggctgactcagtacatggacgggagtggcatgcctaagaccatgcaaagtgaggagactcgggtgtggcaccgaagggacggaaagtggcagaatgtgcactttcatcggtctggctcccccacagtgccaataaaacccccttgtataccaaacggcaaagaaaactttagcggtgggacttctctatggcaaaacatttag

SEQ ID NO: 181301 - DNA, 1560 bp, synthetic construct
  misc_feature 1..1560: note = Description of Artificial Sequence: Synthetic coding sequence
  source 1..1560: mol_type = other DNA
atggccagcaccaccacctgcacccggttcaccgacgagtaccagctttttgaggaactcggaaaaggggccttttctgtggtgcggcggtgtatgaagatacctaccggacaggagtatgctgctaagattattaacactaagaagctcagcgccagagaccaccagaaactcgaacgggaggccagaatatgtagactcttgaaacaccctaatattgtgcgtcttcacgactccatttctgaggaaggtttccattacctcgtctttgatctggttacaggcggggagctctttgaagatatagtggctcgggaatattacagcgaggccgatgcctcacactgtatacagcagatcctcgagtctgtgaaccactgtcacctgaacggaatcgttcatagggatctgaaacccgagaatctcctgttggcatctaagagtaaaggcgctgccgtgaaactagctgactttggattggcaattgaggtgcagggagatcagcaggcatggtttggattcgccggtaccccgggttacctcagccccgaggttctgaggaaggacccttatggcaaacctgtggacatgtgggcctgcggagtgatcctatacatcttgctcgtgggctacccccctttctgggatgaagatcagcatcggctttatcagcagatcaaagcaggggcatacgactttcctagccccgagtgggacacggtgacaccagaagcgaaggatttaattaataaaatgttgaccatcaaccccgcaaaacggataactgcatctgaggccctgaaacacccttggatctgtcagcgctcaaccgtggcgtctatgatgcatcgacaggagacagtggattgtctgaagaagtttaatgcccggaggaagttgaaaggtgctatcctaacaaccatgctagccactcggaacttttccgccgccaagagcctgttaaagaaaccagatggagtcaaaatcaataataaggccaacgtcgtgaccagcccaaaagagaatatccccactcctgcccttgagagtaccgagagtagcaacactaccattgaggatgaagacgtaaaggcacgaaagcaagagattattaaagtcacagagcaacttatcgaggcaataaataatggcgactttgaagcttataccaagatttgcgacccaggtctaactgcctttgagcctgaggccctgggcaacctcgtcgaaggtatggacttccatagattttattttgagaatgccctgtctaagtcaaacaaacccattcacaccattatccttaatccccacgtgcatttagtaggtgacgatgctgcctgcattgcatatatacggctgacccagtacatggatgggtccggtatgcccaaaacaatgcaatccgaggagacccgggtgtggcacaggcgcgacggcaaatggcaaaatgtacacttccataggtctgggtcacccactgttcctatcaaacctccatgtataccgaatgggaaggaaaattttagcggcggaacgtctctgtggcagaacatttag

SEQ ID NO: 181302 - DNA, 1575 bp, synthetic construct
  misc_feature 1..1575: note = Description of Artificial Sequence: Synthetic coding sequence
  source 1..1575: mol_type = other DNA
atggccagcaccaccacctgcacccggttcaccgacgagtaccagctattcgaggagctcggcaagggcgctttctccgtggtgcgaaggtgtatgaagatccccacagggcaagaatacgccgcaaaaataataaatactaagaagctatcagcgcgagaccaccagaaacttgaaagggaagccagaatctgtaggttgttgaagcacccaaacattgtgcggctgcatgacagcatttctgaggaaggatttcactaccttgtattcgacctggtgactggaggtgagctgtttgaagacattgtggcacgcgagtattattctgaggcggacgcaagccactgcatacaacagatcctggagagtgtgaatcactgccatctgaacggcatcgtgcatcgggatctcaagcccgagaacctgctcctggcctcaaaatctaaaggggcagctgtcaaactggctgactttgggctcgccattgaggttcagggcgaccagcaggcttggtttggctttgcaggaaccccaggatatctgtctccagaagtcctgaggaaagatccttatggtaagcccgtggacatgtgggcgtgcggcgtcatcctgtacattttactggtgggctatccccctttttgggatgaggaccagcatcgcttgtatcagcagattaaagcgggggcctatgacttccctagccctgagtgggatacggtaaccccggaagccaaagaccttattaacaaaatgctgactatcaatccggcgaagagaattaccgctagcgaggccctcaaacatccgtggatctgccaacggtcaaccgttgcctccatgatgcaccggcaagaaaccgttgactgcttgaagaagttcaacgcccgcagaaagttaaaaggagcaatcctcactactatgctggccacacgcaatttctctgctgccaaatccctcctaaagaaacccgatggtgtgaagaagcggaaaagctccagctccgtgcaaatgatggaacctcagaccactgtaatacataaccccgatgggaataaggagagcacagagagcagcaataccactatcgaagatgaggacgtgaaagctaggaaacaggagatcatcaaagtcacagagcagttgatcgaagcgatcaataacggagattttgaggcatacaccaaaatctgtgaccccgggctaaccgccttcgagccagaggcactcgggaacctggttgagggaatggattttcaccgattttatttcgagaacgcactttctaaaagcaacaagccgatccacacaattattctcaaccctcacgtccacttggttggcgatgatgccgcatgtatagcctacataagactcacccagtacatggatggatccggtatgcccaaaacgatgcagagcgaggaaacccgggtttggcatcggagagatggtaagtggcaaaacgtgcattttcatagaagtggcagtccgaccgttcccatcaagcctccttgcatccccaatggtaaggaaaactttagcggcggaacaagcctgtggcaaaatatctag

SEQ ID NO: 181303 - DNA, 1470 bp, synthetic construct
  misc_feature 1..1470: note = Description of Artificial Sequence: Synthetic coding sequence
  source 1..1470: mol_type = other DNA
atggccagcaccaccacctgcacccggttcaccgacgagtaccagctcttcgaagagttagggaagggcgccttttctgtggtgcggagatgtatgaagatacctaccggccaggaatatgccgcgaaaattattaacacgaagaaactctcagcacgggatcatcagaaactggagagggaggctagaatttgccgcctgctgaaacatccgaatatcgtacggctgcacgactccatatcagaagagggattccactatcttgtgtttgatcttgttaccggaggcgagctttttgaggacattgtggctcgggagtactactcagaagcagatgctagccactgcatccagcagatcttagagagcgtgaaccactgtcaccttaatggcattgtccaccgggatctgaagcccgagaatctgctgctagcgagcaaatctaagggagccgccgtgaaacttgccgacttcggtttggcaatagaagtgcagggcgatcagcaggcctggtttggcttcgccggcaccccaggctacctatcaccagaggtgctgagaaaggatccttacggcaagcctgtagacatgtgggcctgcggagtcatcctgtatattctgctggtcggttaccctcctttctgggacgaggatcagcaccgcctatatcagcagataaaggccggggcatacgattttccaagccctgagtgggacacagtcacacctgaggcgaaagatctgattaataagatgctgactatcaatcctgccaagagaattacggctagcgaggcgttgaagcacccctggatctgccagcgctctactgtggcttcaatgatgcataggcaggagaccgtggactgcctgaagaaattcaatgcaaggcgaaagctgaaaggcgcaatactgaccactatgttagccacaagaaatttctcagcagccaaatccctgctcaaaaagcctgacggcgtgaagaaacgtaaatcctctagttcagttcagatgatggaatcaacagagtccagcaacacgacaatcgaggatgaggacgtgaaagctagaaaacaggaaattatcaaagtcactgagcagctaatcgaggccattaataacggcgactttgaggcctatacaaagatctgtgatccaggcctgacagccttcgagcccgaggcactcggaaatctagtagaaggcatggactttcataggttctacttcgaaaacgccctctctaagtcaaataagccaattcacacgatcatactgaacccccacgttcacttggtgggcgatgacgctgcctgtatagcttacatcaggctgacccaatacatggatgggtccggcatgccaaaaaccatgcagtcagaggaaacacgcgtctggcacagacgcgacggcaaatggcagaacgtgcacttccatcgttctggcagcccaaccgtcccaatcaagtag

SEQ ID NO: 181304 - DNA, 549 bp, synthetic construct
  misc_feature 1..549: note = Description of Artificial Sequence: Synthetic coding sequence
  source 1..549: mol_type = other DNA
tgacggaagctgaagggcgccatcctgaccaccatgctggccacccggaacttctcagctgctaagtcacttctgaagaaacctgacggggtgaaggaaagcactgagtcttcaaatactacgatcgaggacgaggatgtgaaggcccggaaacaagagatcattaaggtgacagagcaattgatcgaggccattaacaacggcgacttcgaggcctacactaaaatctgcgaccccgggctgaccgccttcgaacctgaagcgttgggcaaccttgtggagggaatggacttccacagattttactttgagaatgctttatccaagtctaataaacctattcacaccataattcttaatccacacgtgcatctggttggagacgacgccgcttgtattgcctatatcagactcacacaatacatggatggatcgggcatgcctaaaactatgcaatcggaagagacgcgcgtatggcataggcgtgacggaaagtggcaaaatgtgcacttccatcgttctggatcccccacagtcccaatcaagtag

SEQ ID NO: 181305 - DNA, 1437 bp, synthetic construct
  misc_feature 1..1437: note = Description of Artificial Sequence: Synthetic coding sequence
  source 1..1437: mol_type = other DNA
atggccagcaccaccacctgcacccggttcaccgacgagtaccagttgttcgaggagctgggaaaaggtgcattttccgttgttaggagatgcatgaaaattccaacgggacaagaatacgcagctaagataattaacaccaagaagcttagcgctagggaccatcagaaattggagagagaagcgcgtatctgcagacttcttaaacatcccaatattgtgcggctccatgattcaatctccgaagaaggcttccactacctggtgtttgacctcgtaacaggaggagagctctttgaagatatcgtggcccgggaatattactctgaggccgatgcctcccattgtattcagcagatccttgagtccgtgaaccactgccacttaaatggcatagtccaccgcgacctgaagcctgagaacctgctgttggcctccaagtcgaaaggtgcggccgtcaaattagctgacttcggcctggctattgaggtgcagggggaccaacaggcttggttcggatttgctggaactccgggttatctcagtcccgaggtcctccgcaaggacccttatggaaaacctgtcgacatgtgggcctgcggtgtgatattatacattctgctggtgggttatcctcccttttgggacgaggaccagcaccgattgtaccagcaaatcaaggcaggagcatacgacttcccttcacccgagtgggacaccgtgaccccagaggcaaaagatctaatcaataagatgcttacaattaatcctgccaagaggatcacagcatcagaggccctgaagcacccatggatatgccagcgcagtactgtcgcctccatgatgcacaggcaggagactgtggattgtctgaaaaaatttaatgctcggagaaaattgaaaggggcgatcctgaccaccatgttggccacccgcaacttctccgcagctaaatctcttctaaagaaaccagacggagtgaaagaatcaaccgagtcatccaatactacaatcgaagatgaagacgtgaaggcccgaaaacaagaaattattaaggtgacagaacaacttatcgaggccataaataacggagacttcgaggcctataccaagatttgcgatcctgggctgacagcctttgagcccgaagctctagggaatctggttgaggggatggattttcataggttctatttcgagaatgcactgagcaagtctaataagcccattcataccatcatcttgaatccccatgtacacttggtaggtgacgatgccgcctgtatcgcctatattaggctgacccagtatatggacggaagcggcatgccaaaaacaatgcagtcagaggagaccagggtgtggcatagacgcgacggcaaatggcagaatgttcattttcaccgcagcgggagccctacggtgcccatcaactag

SEQ ID NO: 181306 - DNA, 1590 bp, synthetic construct
  misc_feature 1..1590: note = Description of Artificial Sequence: Synthetic coding sequence
  source 1..1590: mol_type = other DNA
atggccaccaccgccacctgcacccggttcaccgacgactaccagctgtttgaggagctgggaaagggagcttttagcgtagtgcgacgctgtgtgaaaaagaccagtacccaagagtatgctgcaaaaataattaatacaaagaaactgtccgctcgcgaccatcagaagctggagcgcgaagctcgcatttgccgtctcctcaaacaccccaacatcgtgcgtctgcacgactctatcagcgaggagggattccattacctggtgttcgacctggtaaccggaggcgaactcttcgaagacatcgtggctagggagtactatagtgaagcggacgccagtcactgtattcatcagatcctcgaatcggtcaatcacatacatcagcacgatattgttcatcgggatctcaaacccgagaatctgcttctggcttccaaatgcaaaggcgcagcggttaagctggcagatttcggcctcgcaatcgaagttcagggtgagcagcaggcctggtttgggttcgctggaactccaggatacctctcgcctgaagttctgcgaaaggacccgtatggaaaacctgtagacatctgggcctgtggtgtgattctgtatatacttctggtagggtaccccccattttgggatgaggaccaacacaagctgtaccagcagatcaaagctggagcctacgactttccatcaccagagtgggacacagtgacccccgaggccaaaaacctaatcaaccagatgctcaccattaaccctgccaagagaataactgcagaccaagcgttaaagcacccttgggtgtgccaacgcagtacagtggcctccatgatgcacagacaggaaactgtggagtgcttgaggaagttcaatgccagacggaagctgaaaggggccatcctcacaacaatgcttgtgtccagaaacttttccgctgccaagagtttattgaataaaaagtcagacggaggagtcaaaaaacgtaagtcctcttcatccgtgcatttgatgcctcagagcaacaacaaaaattcgctcgtatcacctgctcaggagcccgccccactccagacggccatggaaccacagacaacagtagtccataatgccacagatgggattaagggatccaccgagtcatgtaacacgactactgaggatgaagacctgaaagttagaaagcaggaaatcattaaaattactgaacagttaattgaggccattaacaatggggattttgaggcctacaccaaaatttgcgatcctgggctaacatcatttgagcccgaggcgttaggtaatctggttgaaggcatggactttcacaagttttatttcgagaacttgttatcaaagaacagtaagcctatccacacaaccatattgaatcctcatgttcacgtgattggggaggacgctgcatgcatcgcctatatccgtctcactcagtatattgacgggcagggaaggcctaggacatcgcagtcagaggaaacccgcgtgtggcatagacgggacggcaaatggctcaacgttcactatcactgttccggcgcacccgccgccccgttacagtag

SEQ ID NO: 181307 - DNA, 1584 bp, synthetic construct
  misc_feature 1..1584: note = Description of Artificial Sequence: Synthetic coding sequence
  source 1..1584: mol_type = other DNA
atggccaccaccgccacctgcacccggttcaccgacgactaccagttgtttgaggagttgggtaaaggggcgtttagtgtggtccgtaggtgcgttaaaaagactagtacccaagagtatgctgccaagatcatcaacacgaagaagttaagtgccagagatcatcaaaagctggaacgggaggccagaatttgcaggctgctgaaacatcccaacatcgtccgcctgcacgacagcataagcgaggagggattccattaccttgtctttgaccttgtcaccggaggggagctgttcgaggacattgtagctcgcgagtattacagtgaagccgatgcatctcattgcatacatcaaatccttgagtcagttaatcatatccaccagcacgacatcgtccaccgtgacctgaagcccgaaaatttgctcctcgcttctaaatgtaaaggggcagcggttaagctcgcggatttcgggctggcgatagaagtccagggagagcagcaggcatggtttggcttcgccggtacgccaggctacctctctccagaggtgctgcgtaaggacccctacggtaaaccagtggacatctgggcttgcggggtcattctgtacatcttattagtcggatacccacctttttgggatgaagaccagcacaaactttaccagcagattaaggcaggtgcatatgatttcccctcacctgagtgggataccgtgacccccgaggccaaaaaccttatcaatcagatgttgactataaatcccgcaaaaagaataactgccgatcaggctctcaaacatccctgggtctgtcaacggagcaccgtcgcttccatgatgcatcggcaggaaaccgtggagtgtctaagaaagttcaacgccaggcgcaaactaaagggtgccatccttactacaatgctggtttcccgcaatttctccgtaggacgacagtcttctgcccccgcaagccctgctgcctcagccgccggtcttgccggacaggcagcaaagtccctgctcaataagaagagtgacgggggcgtgaagaagagaaaatccagctcctctgtgcatctcatggagccgcagactactgttgtccacaacgctaccgacggaatcaaagggagtaccgagagctgcaatactaccactgaggatgaggacctaaaggtgcgaaaacaagagattataaaaatcaccgaacagcttattgaagctatcaacaacggagactttgaagcgtataccaaaatctgtgatcccgggctcacctcctttgagccagaagcactcggcaatctggtcgagggcatggatttccacaagttttacttcgaaaacctgcttagtaaaaactccaagccaatccacaccaccattctgaacccccacgtacacgtgattggtgaggacgcagcctgcattgcatatatccgattaacccagtacatcgacgggcagggacggcctcggacgtctcaaagcgaggaaacgcgagtctggcataggcgggacggcaagtggttaaatgttcattaccactgctctggtgcccccgctgccccactgcaatag

SEQ ID NO: 181308 - DNA, 1671 bp, synthetic construct
  misc_feature 1..1671: note = Description of Artificial Sequence: Synthetic coding sequence
  source 1..1671: mol_type = other DNA
atggccaccaccgccacctgcacccggttcaccgacgactaccagctttttgaagagctggggaagggagccttctcagttgtgagacggtgtgtgaagaaaaccagtacccaggagtacgcagcaaaaattatcaacacaaagaagctttctgcccgtgatcatcaaaaattggagagagaagcgcggatctgtaggctactcaagcatccaaacatagtgcggctccacgactcgatatcagaagagggtttccattacctggtgttcgatttagtcacagggggagaacttttcgaggacatcgtagcccgagaatattactctgaggccgacgcatcgcattgtatacaccagatcctggagagcgtgaatcatatccaccagcacgatatagttcacagagatctgaagcccgagaacctgttactcgccagtaagtgtaaaggcgcagccgtgaaactggctgactttggacttgctattgaggtacagggggagcagcaggcttggtttggcttcgccggtactcctggctacctcagccccgaggtgctgcgcaaagacccatacggcaagcctgtcgatatctgggcctgcggcgttattctctacatcctgcttgttggctacccccccttctgggatgaggatcagcacaaactgtaccaacagattaaggcgggcgcctatgattttccctcacccgagtgggatacagtgacccccgaagctaaaaacctgataaatcagatgctgactattaacccagccaaaagaattaccgccgatcaggccctgaaacacccttgggtttgtcagaggtccaccgtggcttctatgatgcacaggcaggagaccgttgaatgtctccgcaaattcaatgcacgacggaaactcaaaggggcgatattgacgaccatgctcgtgagccggaatttctcagcagcaaaatccctcctcaacaaaaagagcgatggaggagttaagcctcagtctaataacaaaaatagtcttgtgtcccccgcccaggagcccgctccattgcaaacagcgatggaacctcaaacgaccgtcgtccacaatgccaccgacggaataaagggatccactgaatcctgtaacaccactacagaggatgaagatcttaaggcagcaccactgcgcacaggaaacggttcatccgtgccggagggacgttcgtcgcgcgaccgtaccgcaccttccgctggcatgcaaccccagcctagcttgtgttcctcggccatgcgcaaacaggagatcattaaaatcactgaacagctgatcgaggctattaacaacggagattttgaggcttatactaagatttgtgacccaggccttacttccttcgagccagaggccttgggaaacttggtggaaggcatggattttcacaaattctacttcgaaaacctgctaagcaaaaatagcaagcccattcatactaccatcctcaatcctcacgttcatgtgatcggcgaggatgcagcatgcatcgcatatatcagactgacccagtacattgacgggcagggacgcccaaggaccagtcagagcgaggagactagggtctggcaccggagggatggaaagtggctgaacgtgcactatcactgttctggcgcgccagctgctcccttgcagtag

SEQ ID NO: 181309 - DNA, 1488 bp, synthetic construct
  misc_feature 1..1488: note = Description of Artificial Sequence: Synthetic coding sequence
  source 1..1488: mol_type = other DNA
atggccaccaccgccacctgcacccggttcaccgacgactaccagctgtttgaagagctcggaaaaggagctttcagtgttgtccgacgctgcgtgaagaagacttccactcaagaatacgccgccaagataattaatactaagaaactgtccgcacgggaccaccagaagttagaaagggaagccagaatctgccggcttctcaaacatcctaacatcgtccgcctgcacgattctatctccgaggaaggctttcactacttggtcttcgacttggtgaccggaggagagttatttgaagacatcgttgccagagaatattactcagaggcggatgctagccactgtattcaccagatcctggagtccgtgaaccatatccatcagcacgatatcgttcatagggatctgaagcctgaaaatctgcttttggcgtctaagtgcaagggagccgctgtgaaattggccgattttggtttagcgattgaggtccaaggggaacaacaggcctggttcggctttgccgggacccccggatatttgtctcctgaggtgttacgtaaggatccctatggaaaaccggtggatatttgggcgtgcggcgtcattctttacatactgctggtgggatacccccccttttgggatgaagaccagcacaagctctaccagcagataaaggccggagcctacgacttcccttctcccgaatgggacactgtgactcctgaagcaaagaatctgatcaatcagatgctgacaataaatcctgcaaaaagaatcaccgcggatcaggctttgaagcacccatgggtgtgccaaaggtctaccgtcgcatccatgatgcacagacaggaaactgtggagtgtctgcggaagtttaacgctcggaggaagctgaagggagctatcctgaccaccatgctggtgagtagaaacttttccgctgctaaatctctactgaacaagaaaagtgacggtggcgtgaaggagccccagacaacagtggttcacaacgccactgacgggatcaagggttcgaccgaaagctgcaacaccacaacggaggatgaagatctgaaggtgcggaagcaagaaattattaaaattactgaacaactcatagaggctatcaataacggcgattttgaagcttataccaaaatctgtgatcccggtctgacatccttcgagcctgaggcgctgggcaatctggtagagggcatggatttccacaagttttactttgagaacctgctgagcaaaaattcaaaacccatacacaccacaattctgaaccctcatgttcacgtcataggcgaggacgccgcctgcatcgcctacattcggttgactcagtatatagatggccaagggagacccagaacaagtcagtctgaagaaacgagggtgtggcatcgtcgagacggaaaatggctaaatgttcactaccattgtagcggggcacccgccgcccccctccagtag

SEQ ID NO: 181310 - DNA, 1551 bp, synthetic construct
  misc_feature 1..1551: note = Description of Artificial Sequence: Synthetic coding sequence
  source 1..1551: mol_type = other DNA
atggccaccaccgccacctgcacccggttcaccgacgactaccagctgttcgaagaactcggtaaaggagctttctccgtcgttcggaggtgtgtcaagaagacttctactcaggagtatgccgcaaaaatcatcaatacgaagaaacttagcgctcgcgaccaccaaaagctcgagagagaagcccggatctgtagactcttgaagcaccctaatatcgtcaggctccatgacagcatttccgaggagggattccactatctggtcttcgatttggtgacgggtggagagctgttcgaggacatcgtcgcacgagagtactattcagaagcggacgcctctcactgcatccatcaaatcctggagagcgttaatcatatccaccaacacgatatcgtgcatagggatcttaaacccgagaacctgctcctggcctctaagtgcaaaggagccgcagtcaagctcgccgatttcgggctcgccatcgaagtgcagggagagcaacaggcatggttcggtttcgctggtacgccgggctatctgtctcccgaggtgctgcgcaaggatccgtacgggaaacccgttgatatctgggcatgtggcgtcatcttgtatatattgctcgtcggttatccacccttttgggatgaggatcagcacaaattgtatcaacagatcaaggcaggagcctacgactttccatcccccgagtgggacaccgtgacccctgaagccaagaatttaattaatcagatgttgactataaacccagccaaacgcataacggctgatcaggcactgaagcacccttgggtttgccagcggtccacagtagcaagtatgatgcaccgccaggaaacggtggaatgccttcgcaaatttaatgcaagacgcaaattaaagggcgccatcctgacgacaatgttggtttcccgaaatttcagtgtgggccgacagagcagcgcccccgcttccccagccgcatctgccgccgggctggcaggacaggcggctaagtcgctcttgaacaaaaagtctgacgggggcgtcaaagagccgcagaccactgtggttcacaatgctacagatgggatcaagggctcgacggaatcttgcaacacaacaactgaggatgaagaccttaaggttcgcaagcaggagatcataaagatcactgaacagctgattgaagcaatcaataatggagattttgaggcctacacaaagatatgcgatcctgggctcaccagctttgagcccgaggccctcggcaatttagtggaggggatggactttcacaagttctacttcgagaacctactgtctaaaaattccaagcccatacatactacaatactgaatcctcacgttcatgtgatcggggaagatgcagcctgcatagcatacattcgtcttacccagtatatcgacggacaaggaaggcctaggacaagccaatcggaggagacccgcgtgtggcaccgacgcgacgggaagtggcttaatgtacattaccactgttcaggcgctccagctgccccactccagtag

SEQ ID NO: 181311 - DNA, 1602 bp, synthetic construct
  misc_feature 1..1602: note = Description of Artificial Sequence: Synthetic coding sequence
  source 1..1602: mol_type = other DNA
atggccaccaccgccacctgcacccggttcaccgacgactaccagctgtttgaggagctgggcaaaggggcattctccgttgtgaggagatgtgtcaagaaaacgagtactcaggagtatgctgctaagattattaataccaagaaactgtctgcccgggaccatcagaagctggagcgcgaagccagaatctgcagattactcaagcatcctaacatcgtacggttacacgacagcattagcgaagaagggttccactacttagtcttcgatctggtgacagggggggagctctttgaggacatcgtcgcccgggaatactactcagaagcagacgcgtcccactgcattcatcagattttggaatcggtgaaccatattcatcaacacgatattgtgcacagagatttgaagccggaaaacttgcttctggcctctaaatgtaagggggcagcggtgaagctagcagattttggtctcgcaatagaagtacagggggagcagcaggcctggtttggtttcgccggaactcccggatatctctcccctgaggtcctgcgaaaggatccttatgggaagccagtggatatctgggcctgtggcgttattctgtacatcctacttgtgggctatcctcctttttgggatgaagaccagcacaagttgtaccaacagatcaaggccggggcgtatgattttcctagtcctgagtgggacactgtgacgcctgaggcaaagaacttgatcaaccagatgctgactattaatcctgccaagcggatcacagccgatcaagcactcaaacacccgtgggtttgtcagagatctactgttgcctccatgatgcatcgccaggaaaccgtggagtgtctgcgaaaattcaatgctcggaggaaattgaaaggcgccattctcacaaccatgctggtgagtaggaacttttccgccgccaagagtctgcttaataagaaatctgacggcggtgtcaaggagccacagactaccgtcgtgcacaacgcaacagacggtatcaagggatccaccgagtcctgcaataccacaaccgaggacgaagatctcaaggccgcacccctgcgtactggcaacggtagctccgtgcctgaaggccgatcctctagggacagaaccgcaccctccgcagggatgcagccccagccatcactctgtagctctgccatgaggaaacaagagattataaagattactgagcagctcatcgaagccattaataatggcgactttgaggcctacacaaaaatttgtgatccaggcttgacatcctttgaacctgaggctctcggcaacctggtcgagggtatggactttcataagttttacttcgaaaaccttttaagcaagaacagtaagcctatacataccactatactcaacccgcatgtccacgtaatcggcgaggacgcagcgtgcatagcctacattaggctaactcagtatattgacgggcagggaaggcccagaacatcacagtcagaagagaccagagtctggcacaggcgagacgggaaatggttgaacgtacactatcactgctccggcgcaccggctgcgcctctgcaatag

SEQ ID NO: 181312 - DNA, 1677 bp, synthetic construct
  misc_feature 1..1677: note = Description of Artificial Sequence: Synthetic coding sequence
  source 1..1677: mol_type = other DNA
atggccaccaccgccacctgcacccggttcaccgacgactaccagctgttcgaagaactgggaaagggggcgttctccgttgtccgacggtgcgtcaaaaaaacctcaacgcaagagtatgcggccaagattattaatacaaaaaaattaagtgctagagatcaccagaagctcgagagggaggcccgaatttgtcggctgctgaaacatcccaacatagttagactgcacgattccatctccgaggagggatttcactacctggtgttcgacttagtcactggcggagaactgttcgaagatatcgtggcccgcgagtattactccgaagccgatgcttcccattgtatacatcaaatcctcgagagcgtgaaccacattcaccagcacgacattgtgcacagagacttgaagcctgagaacctgttactggccagcaaatgcaagggtgcagccgtgaaactggcggactttggtttagccatagaagtgcagggcgaacaacaagcgtggtttggcttcgccggaaccccaggatatctttcccctgaggtcctgagaaaagacccatatggtaagccggtggatatctgggcgtgcggtgtgatcctctacatcttgctggtgggctatccccccttctgggacgaggatcaacataaactgtaccagcaaataaaagccggagcctatgattttcccagccctgaatgggacactgtgacccctgaggctaagaatctcatcaaccagatgttgacaataaatccagctaaacgtattaccgctgaccaggctttgaaacacccgtgggtgtgccagcggtcaaccgtcgcctcaatgatgcatcgtcaggagacggtggagtgcctgagaaaatttaatgcacgcagaaaattgaagggggctatcctcactaccatgttggtttctcgaaacttttccgccgctaaatccttgctcaacaagaagagtgatgggggcgttaaaaagcgaaaatccagctcaagcgtccacctgatgcctcaatcaaataataagaattcgcttgtcagtcctgcacaggagcctgcccccctccagactgccatggagccacagaccaccgtggttcacaatgcaaccgatggaatcaagggcagcacagaatcttgtaacacgactactgaagatgaagatcttaagggtagcgtgcccgagggccgaagctcacgggaccgaaccgccccctcagccgggatgcagccccaaccgtctctgtgttcctccgccatgcgtaagcaggaaatcataaaaatcacagagcagcttatcgaagctattaacaatggcgacttcgaggcatacactaaaatctgcgatccggggttaacctctttcgaaccggaagccctgggcaacctagtagagggcatggacttccacaagttttacttcgaaaacctcctgagcaaaaattcgaagccaatacataccactatactcaatcctcacgtccacgttattggggaagacgccgcttgtattgcctacataaggctcacacagtacattgacggacagggtagacctcgtacttcacaatctgaggaaaccagagtctggcaccgacgcgacgggaaatggctgaatgtacactaccactgtagcggtgcccccgccgctccactgcagtag

SEQ ID NO: 181313 - DNA, 1767 bp, synthetic construct
  misc_feature 1..1767: note = Description of Artificial Sequence: Synthetic coding sequence
  source 1..1767: mol_type = other DNA
atggccaccaccgccacctgcacccggttcaccgacgactaccagctcttcgaagaactcggcaaaggagcgtttagcgtcgtgcgcagatgtgtgaaaaaaaccagcacacaggagtacgctgcgaaaattatcaacacaaaaaagctttcagcgagagaccaccagaagctcgaacgggaggcccggatttgtagacttctaaagcacccgaacattgtccgcctgcatgactctatcagtgaggagggcttccactacctggtttttgacctggtgacaggcggtgaactatttgaagacatcgtggcaagagagtattactccgaagcagatgcctcccactgtattcaccagatcttggagtctgtgaatcatatccatcagcatgacatcgttcaccgcgaccttaagccggaaaatttactcttagcctcgaagtgtaaaggcgctgcggtgaaacttgccgacttcgggctggctatagaagttcaaggcgagcagcaggcttggtttggcttcgccgggacgcctggatatctgagcccagaggtgctgagaaaggacccctacggcaaacccgtggatatctgggcgtgcggtgtgattctctacatactgctggtcggataccccccattttgggacgaggaccagcataaactttaccagcagatcaaagcgggggcatacgatttcccatcccccgagtgggacactgttacacccgaagccaaaaacttaattaaccagatgctgactataaaccctgctaaacgcatcaccgctgatcaagccctcaaacacccctgggtgtgtcaacgtagcaccgtcgcttccatgatgcatcgtcaggaaaccgtcgagtgcttaaggaaattcaatgccaggaggaaacttaagggcgccatcctgacgacaatgttggtgtcacggaacttcagtgtaggacgccagtctagcgcgcctgcctcacccgccgctagcgccgctggcctggctgggcaggcagcaaaaagcctgttgaacaagaaatcggatggaggcgtcaaaaaaagaaagtccagcagcagcgtgcatttgatgccacagtctaacaacaaaaattccctcgtaagcccagcacaggagcccgccccactccagaccgccatggagcctcagactaccgttgtccacaatgcgaccgacgggatcaaaggctcaacagaaagctgcaacactaccaccgaggatgaggacctgaaagccgcacccctgaggactggaaatggttcctcagtgccagaaggaagaagttcccgtgacagaactgctccgtccgccggaatgcagccccagccctctctttgctcttcagcaatgcgtaagcaggagatcattaaaatcacagagcagctgattgaagcaattaataacggcgacttcgaggcctacacaaaaatttgcgatcccggactgacctcttttgagccagaagctttagggaacctggtggaagggatggacttccacaaattctactttgaaaatttgctgagcaagaacagcaagccaattcacaccactattctaaatccgcacgtgcacgtgataggggaagatgcagcttgcatcgcctatatccggctcactcagtatattgacggacaaggccgacctcgtaccagtcagagcgaggagacacgcgtgtggcacagacgagatggcaaatggctaaacgtccactatcattgctccggggcccctgccgcccccctccaatag

SEQ ID NO: 181314 - DNA, 1362 bp, synthetic construct
  misc_feature 1..1362: note = Description of Artificial Sequence: Synthetic coding sequence
  source 1..1362: mol_type = other DNA
cggctgctgaagcaccccaacatcgtgcggctgcacgacagcatctcagaggaggggtttcattatctcgtcttcgatctcgtaaccggcggcgagctatttgaggatatcgtggcacgggaatattatagcgaagccgacgcaagccattgcatccaccagatcctcgaaagcgttaatcatatccatcagcatgacatcgttcacagggacctcaagccagaaaacctgctgctggcctccaagtgtaagggagccgcggtgaagcttgcggacttcggcttggccatagaggttcaaggagaacagcaggcttggttcggatttgctgggacgcccggctacctgagccccgaggtgctgcgcaaggacccctacggaaaacctgtggacatatgggcttgtggggtgatcctctacatacttctcgtgggatatccacccttctgggacgaagaccaacataagctgtatcagcagattaaggcaggcgcttatgactttcccagtccagagtgggacacggtgacaccagaggccaaaaacctcatcaaccaaatgctgaccatcaatccagcaaaaagaatcaccgccgaccaggctttaaagcacccttgggtgtgccagcgatccaccgttgccagcatgatgcacaggcaagaaaccgtggaatgcctccggaaatttaacgctcgccgtaaactcaagggcgccatcttgaccaccatgttggtttcccggaatttctcagccgctaagagtctgctgaataagaagtcagacggcggagttaagccacagagcaacaacaaaaacagtttggttagtcccgcccaagaaccagctcccctgcagaccgccatggagccccagactactgtagtccacaatgcaacagatggcatcaaaggttcgaccgagtcctgcaatacaactacggaggatgaggatttgaaggttcgtaagcaggagatcattaagataaccgaacagcttattgaggccatcaacaatggcgatttcgaagcttacacaaaaatctgcgacccgggactcacatcgttcgagccggaagccctcggaaacttggtcgagggtatggactttcacaaattttacttcgagaacctgttatcgaagaactctaagccaatccacaccacaatcctgaacccccacgtgcacgtgataggcgaagacgcggcatgcattgcttatatcaggctaacccagtacatcgatggccagggcagacctcgtactagccagagcgaggagacaagagtctggcataggcgggacggaaagtggcttaacgtgcactaccactgctccggcgctcccgcggcacccttacagtag

SEQ ID NO: 181315 - DNA, 1008 bp, synthetic construct
  misc_feature 1..1008: note = Description of Artificial Sequence: Synthetic coding sequence
  source 1..1008: mol_type = other DNA
tgataccagcagatcaaggccggcgcctacgacttccccagccccgagtgggacacagttacacccgaagccaagaatcttatcaatcaaatgctgaccattaaccctgctaaaagaatcaccgctgaccaggcactgaagcatccatgggtgtgccagcgatcgactgtagccagtatgatgcatcgccaggaaactgtggagtgcctgagaaagttcaacgctcgacgcaaacttaagggtgcaatcttgacaacaatgctggtgtcacggaactttagcgccgccaaaagcttgctgaacaaaaaaagcgatggaggcgtgaaaccacaaagcaacaacaaaaacagcctggtgtcacctgcccaagagcctgctcccctgcaaacagccatggaacctcaaacaacagttgttcacaatgccaccgacgggattaaaggaagtactgaatcttgcaatacaactacggaagatgaggatctcaaggccgcgccgctgcgcacgggcaacggctcatcggtgcctgagggccgctcatcccgagataggactgcgcccagtgccggtatgcagccccagccatccttatgtagttccgctatgagaaagcaggaaatcatcaaaattaccgagcaactgatcgaggccatcaataatggggattttgaagcttacaccaagatatgtgaccccgggcttacctcctttgagcccgaagctttgggtaatctggtggaagggatggattttcacaagttttactttgagaacctgctttctaaaaacagcaagccaatccataccacaattctgaaccctcacgtgcacgttattggggaagatgccgcgtgcatcgcttacatccgactgacgcaatatatcgatgggcagggccgacccaggacttctcaaagtgaagagacccgggtttggcaccggcgcgacggaaagtggcttaatgttcactaccactgttccggagctccggcagcccctctgcaatag

SEQ ID NO: 181316 - DNA, 543 bp, synthetic construct
  misc_feature 1..543: note = Description of Artificial Sequence: Synthetic coding sequence
  source 1..543: mol_type = other DNA
atggccaccaccgccacctgcacccggttcaccgacgactaccagttgtttgaagaactcggtaaaggagcatttagtgtggtcagacggtgtgtaaagaagacctccacccaagagtacgccgccaagattattaacacgaaaaagctcagcgcccgcgatcatcaaaaactggaaagggaggctcgtatttgccggcttttgaaacatcccaatatcgcaactattcacggcggaattcatgacgcctcttctggcgactgtggggtcttcgctcaggttcagtgtcctgaaaagacagaaggctgccacccccacgatcatgcatgcttacaggaactgttgtcctgccagaaacccatcgaacaggaggtcggatggagatgtcaagctacagagcaacagcagaagcagtcaaggaaacctagtccccgtgccagagccctggcggatggacatggggccactaaccactgtggcacgcagcggtacagatgggaccagggtctccatcgggagctgcagcaccaccatcggaggtag

SEQ ID NO: 181317 - DNA, 240 bp, synthetic construct
  misc_feature 1..240: note = Description of Artificial Sequence: Synthetic coding sequence
  source 1..240: mol_type = other DNA
atgagcgagatcctgccctacagcgaggacaagatgggccggttcggcgctgaccctgaaggctcggatctctctttcagctgtcgtctgcaggacaccaactccttcttcgcagggaaccaggcgaaaaggccaccgaagctcggccagatcggtagagctaaacgggtggtgattgaagatgatcggatagatgatgtgcttaaagggatgggggagaaaccccccagcggagtgtag

SEQ ID NO: 181318 - DNA, 1422 bp, synthetic construct
  misc_feature 1..1422: note = Description of Artificial Sequence: Synthetic coding sequence
  source 1..1422: mol_type = other DNA
atgctgaaggtgaccgtgcccagctgcagcgccagcagctgcagctccgtcaccgcaagtgctgcacccggtaccgcctctctggtcccagactactggatagacgggtccaaccgagacgccttgtcagattttttcgaggtcgagtctgagctcggccgtggcgcaacctcgatcgtctaccgatgcaagcagaaagggacccaaaaaccatacgccttgaaagtcctcaagaaaactgtggataagaagattgtgcgcaccgagataggagtattgctccgcttaagccatcctaacattatcaaactgaaagaaattttcgagacacccaccgagatctcgctggtcctagagctggtaacaggtggggagctgttcgatcgcatcgtggagaagggctattactcagaaagggatgcagccgatgcagtcaagcaaatcttggaggccgtggcatacctgcacgaaaatggcatcgtacatcgagatctgaagccagagaatttgctctatgcaactcccgctcccgacgcccctcttaagatcgccgatttcggcctcagtaaaattgtcgagcatcaggtacttatgaagactgtctgtggtaccccgggctactgcgcccccgagattcttaggggatgtgcctatgggcctgaagtggacatgtggagtgtgggcataatcacctatatcttgctctgtggcttcgaacctttctatgacgagagaggtgatcagttcatgtttcgcagaatccttaattgtgaatattatttcatttctccctggtgggacgaggtatcccttaacgctaaagatttagttcgtaagctgatcgtgctggaccccaaaaagcgactcacaacctttcaagcgctacaacatccatgggtgacaggcaaggcagcgaattttgtacacatggacaccgctcagaaaaagttgcaggagtttaacgccaggagaaagcttaaggctgccgtgaaagcagtggttgcttcctctcgcctcggctcagcttcatcttcccatgggtcaatacaggaatctcataaggcctcacgcgacccgtctccaattcaagacggcaacgaggatatgaaagccattcctgaaggagagaaaattcagggagacggcgctcaggccgctgtaaaaggggcacaggcggaactgatgaaggtccaagcactggaaaaagtgaagggcgcagacataaatgccgaagaggcacccaaaatggttcccaaggccgtggaggacggaattaaggtcgccgatttagagctggaggaagggcttgctgaggagaaactcaaaactgtggaggaagctgcagccccacgcgagggacaaggctcgagtgctgtgggatttgaagttcctcagcaggatgtaatcttgcccgagtactag

SEQ ID NO: 181319 - DNA, 429 bp, synthetic construct
  misc_feature 1..429: note = Description of Artificial Sequence: Synthetic coding sequence
  source 1..429: mol_type = other DNA
atgctgaaggtgaccgtgcccagctgcagcgccagcagctgcagcagcgtaaccgccagcgcagcccccgggacagcgtctctcgtgcctgattactggatcgatggcagcaatcgggacgctctgtccgatttcttcgaagtggagtcagagctcggacggggagctacaagcatagtgtaccgctgtaaacagaaggggacccaaaagccgtacgccctgaaagtgttgaagaaaactgtcgacaaaaaaatcgtgcgaaccgagattggggtcttacttcgtctttctcaccctaacataatcaaacttaaggagatttttgagacacctactgagatttccctcgtgctcgagttggtgacaggtggtgagctatttgaccgcattgtcgagaaaggctattacagtgagagagatgccgcctag

SEQ ID NO: 181320 - DNA, 1422 bp, synthetic construct
  misc_feature 1..1422: note = Description of Artificial Sequence: Synthetic coding sequence
  source 1..1422: mol_type = other DNA
atgctgaaggtgaccgtgcccagctgcagcgccagcagctgcagctccgtgactgccagcgccgcacccggcaccgcctctctggtacctgattactggatagatggctccaaccgggacgctcttagtgatttcttcgaggtcgagagcgagctgggacgcggtgccacatcaatcgtctatcgttgtaaacagaagggcacgcaaaagccctacgctttaaaagttctgaagaagaccgtggataagaaaatcgttcgtacagaaatcggagtgcttctgcgattgtcacacccaaatattatcaagctgaaggagatctttgaaaccccaaccgagatcagcctggtacttgagcttgtgaccgggggggaactttttgatagaatagttgagaaggggtactactctgagagagacgcagctgacgctgtgaaacagatcctggaagccgttgcgtacctgcatgaaaatggcattgtccaccgtgatttaaagcccgaaaacctgttgtatgccacccccgcccctgatgcgccactaaaaattgcagacttcggtctgtcaaaaatcgtagagcatcaggtccttatgaagaccgtgtgtggtactccaggctactgtgcccccgagatcctcaggggatgcgcatacggtccagaagtcgacatgtggagtgtgggcattatcacgtacattctgctgtgcggttttgaacctttttatgatgagcgtggggaccaattcatgtttaggcgaatacttaactgtgaatattactttatcagtccttggtgggacgaggtttcactcaacgcaaaggacctggtacggaaactgatcgtcctggaccctaagaagcgactgacaacatttcaggccctccaacacccgtgggtcaccgggaaagccgccaatttcgtgcacatggataccgcacagaaaaaactccaagaatttaatgcccggaggaaactgaaggccgcagtaaaagccgttgtcgcctcatctcggctgggctcggcttcttcaagccacggcagcatccaggagtcacacaaagcttcccgggaccctagcccgattcaagacggaaacgaagacatgaaggctatacccgaaggtgaaaaaatccaaggtgacggcgcccaggccgctgtcaagggagcccaggccgagctgatgaaagttcaggcgttagaaaaagtgaagggggcagatatcaacgccgaggaggcaccgaagatggtccctaaagcggtcgaggacgggatcaaggttgctgacctcgagctcgaggaagggctggccgaggagaaactaaaaactgtggaggaagcagcagcgcctcgcgaagggcagggcagctcggccgtcggatttgaagtgccacagcaggacgtgatcctgcctgagtattag

SEQ ID NO: 181321 - DNA, 2766 bp, synthetic construct
  misc_feature 1..2766: note = Description of Artificial Sequence: Synthetic coding sequence
  source 1..2766: mol_type = other DNA
atggccgacgacgacgtgctgttcgaggacgtgtacgagctgtgcgaggttattgggaagggcccattttctgtggtgaggaggtgcatcaatcgcgagactggacagcagttcgccgtcaagatcgtcgatgtcgccaaatttacttcaagccccggactgagtacagaggacttgaagcgagaggccagcatatgccacatgctgaagcatccccacattgtggagcttctagagacttattccagtgatggaatgctgtatatggtctttgaatttatggacggagccgatttatgttttgaaatagtgaaacgggccgacgctggctttgtctactcagaagccgttgcatcccactacatgagacagattctggaagctctgcggtattgtcacgacaacaatatcattcatcgagacgtcaagccccactgcgtcctgctcgcaagcaaagagaacagtgctcccgttaagttgggaggttttggggtggccattcagttaggcgaatcaggcctcgttgcaggcggcagggttgggacaccccactttatggcaccagaagtcgttaaaagagaaccatatgggaagcccgttgatgtgtgggggtgcggtgttattttgtttatcctcctcagcggctgcttgcccttttatggtacaaaagagcgactcttcgagggaattattaaaggtaaatataaaatgaatccaaggcagtggtctcacatcagcgagtcagcaaaagacctcgtcagaaggatgctgatgcttgacccggcagaacggatcactgtctatgaggccctaaaccacccctggcttaaggagcgagatcgctacgcctataagatacacttgcctgaaacggtcgaacagctcagaaagtttaatgcccgcaggaagttaaaaggggctgtgctagcagctgtgtccagccataagtttaattctttctatggagatccccccgaggagctgcctgatttctctgaggatccaacttcaagcgtactgttgattgtctctcgggctgtgagtcaggtgctagacagcctcgaggaaatccacgctttaaccgactgcagcgagaaagacctggattttctgcacagcgtattccaagatcaacacctgcataccctgctggatctgtacgacaagatcaataccaaatcctcgcctcaaatccggaatccaccaagcgatgccgtgcagcgagcaaaagaggtcctggaggagatctcatgctaccccgaaaataacgacgctaaagagctgaaaagaatcctcacccaaccacacttcatggcactgctccagacccatgatgtggtggcccacgaggtgtactctgatgaggccctacgcgtgacgcctccccccacatccccatatctgaatggagatagtcctgagtcagcaaatggtgacatggatatggaaaatgtgacaagggtgcgacttgtacagttccaaaaaaacacggacgaaccaatggggattaccctaaagatgaatgagctgaatcactgcatagtggctaggatcatgcacggcggtatgatccacagacaggggactttacatgtgggagacgaaatacgcgagattaacggaatttccgtggccaaccagacagtggagcagcttcaaaagatgctgagagaaatgagaggttccattacttttaaaatcgtgccatcatacagaacccaatcttcttcatgtgaacgggactcaccaagtacaagccgtcagtccccagccaacgggcacagcagcacgaataatagcgtgagtgatctcccaagcactactcagcccaaaggtagacagatttacgtcagagcccagtttgagtacgacccagccaaggatgatctaataccatgcaaagaagcaggaatcagattcagggtgggtgatatcattcagatcattagtaaggatgatcataactggtggcaaggaaagttggagaatagcaaaaacggaacagcaggcctgattccttctcccgaactccaggaatggcgcgtggcctgtatagccatggagaaaacaaaacaggagcaacaggccagctgtacatggttcgggaaaaaaaagaaacagtacaaggacaagtacttagccaagcataatgccgatttggttacttacgaagaggtggtgaaactccccgccttcaaacgaaaaaccctggttttgcttggagctcatggcgttggccgtagacatatcaagaacactctcataaccaagcacccagacaggttcgcctacccgatcccccacactactcgccccccaaaaaaagacgaagagaacgggaaaaattactatttcgtgtcccacgatcagatgatgcaggatatttctaataatgagtatctagagtatggctctcacgaagatgccatgtacggtactaaactggagacaatcaggaagatacacgaacaggggcttatagcaatactggacgtggagcctcaagcacttaaagtcctaagaacggccgaatttgctcccttcgtggtgttcattgcggcccccacgataacacctggcctgaacgaagacgagtcactccagagactgcaaaaagaatccgatattctccagcgcacctacgcacactatttcgatttgacaattatcaataacgaaatagatgagaccattagacatctcgaagaagcagtagagttagtgtgtaccgccccacagtgggttcccgtgagttgggtttactag

SEQ ID NO: 181322 - DNA, 2730 bp, synthetic construct
  misc_feature 1..2730: note = Description of Artificial Sequence: Synthetic coding sequence
  source 1..2730: mol_type = other DNA
atggccgacgacgacgtgctgttcgaggacgtgtacgagctgtgcgaggtgattggaaaaggcccattctccgttgtgagacggtgcatcaatagggagactggccagcaattcgctgtgaagatcgtggacgtggctaaatttacgtcttcacccggactgagcaccgaggacctcaaacgggaagcctctatctgtcatatgcttaagcaccctcacattgttgaactactggagacatactccagcgacggcatgctctatatggtctttgaatttatggacggcgccgacctgtgtttcgagattgtcaagagggcagatgccggtttcgtttactcagaagcagtggccagccattacatgcgccagatcctcgaagctctgagatactgtcatgataataatattatccacagggatgttaagccccattgcgtcctgctagcaagtaaggaaaatagcgcccccgtgaagttaggcgggttcggcgtcgcgattcagttgggggagagtggcctggtggccggaggtagggtgggtaccccccattttatggctcctgaggtggttaaacgcgagccctatggtaagccagtggatgtgtggggctgtggcgtaatcctttttatattgctttctgggtgtctgcccttctacggaaccaaggagcgattgttcgaggggattatcaaaggtaagtacaagatgaatcctcgccagtggagccacattagtgaatcagccaaagatctggtgagaaggatgctcatgcttgacccggcagagcgcattactgtttacgaagcacttaatcacccttggcttaaagaacgcgatcgctatgcctataaaattcatttgccggagacagttgaacagcttagaaaattcaacgcacgcaggaagttgaagggagcggtgcttgcagccgtaagttcacataagttcaattccttctacggtgaccccccagaggagcttcctgacttcagtgaggatcccaccagctccgtactcctgatcgtgtcgagggcggttagtcaagtactagacagcctagaggagatccacgctctgaccgactgcagcgagaaagacctcgattttttacactcagtgtttcaagatcagcacctccacaccctgctcgacctgtatgataagatcaatactaaaagttcaccccagatccgaaacccaccctcagacgcagttcaaagagcgaaggaggtccttgaggagatatcttgctaccccgaaaataatgacgcaaaggagctgaaacggattttgacccaacctcactttatggcactgttgcagacccacgacgtagtcgctcatgaggtgtatagcgacgaggcactccgagttacgcccccgccaactagcccatatctgaacggcgattccccggagtctgcaaacggcgacatggacatggagaatgttactcgcgtcaggttggtccagttccagaaaaacaccgacgagccaatgggcataacactgaagatgaatgagttgaaccactgtatagtcgctcgaataatgcacggaggcatgatccaccggcagggcacactgcatgtgggcgacgaaatcagagagatcaatggaatctccgtggcaaaccagactgtcgagcagcttcagaaaatgttacgagagatgcggggctccattacgtttaaaattgttccctcttaccgcacccaatctagctcctgcgaacgagattccccttccacgtcccgtcagagtcccgctaatggacactccagtaccaacaactctgtgtcgatatatgtccgggcgcagttcgagtacgatcctgccaaagacgaccttataccatgcaaagaagctggaattaggtttcgagtcggggatatcattcagataattagcaaagatgaccacaattggtggcagggcaagctagagaatagtaagaatggaaccgcaggattgatacccagtcccgaactccaagagtggcgggtcgcctgtatagccatggaaaagaccaaacaggagcagcaagcctcctgcacatggtttgggaaaaagaagaaacagtacaaggacaagtacctggcgaagcacaatgccgatctggttacctatgaggaggtggtaaaattgcccgccttcaaaaggaaaacattggtgctcctaggcgcccatggggtcgggcggaggcatatcaaaaacactcttatcacgaaacatcctgataggttcgcctaccccataccacacactacaaggcctcccaagaaagacgaagagaacggtaaaaactattattttgtgtcacacgatcagatgatgcaggacatatccaacaatgaataccttgagtacggatcccatgaggacgctatgtatggaactaagcttgaaacgatccggaaaatccatgagcagggactaattgctatcttagacgtggaaccacaggcactgaaagtcctgcggacagctgaattcgccccttttgtcgtgttcatcgcggcaccaacaattacacctggcttgaatgaagacgagagtctgcagcgtctgcagaaggagtcagatattttacagcgcacatacgcccactattttgatctgactattatcaataatgagattgatgaaactattcgccacctggaggaagccgtagagcttgtgtgcaccgccccccaatgggtgccagtctcgtgggtgtactag

SEQ ID NO: 181323 - DNA, 1773 bp, synthetic construct
  misc_feature 1..1773: note = Description of Artificial Sequence: Synthetic coding sequence
  source 1..1773: mol_type = other DNA
atggccgacgacgacgtgctgttcgaggacgtgtacgagctgtgcgaggtgatcgggaagggaccgttctctgtcgttcgcagatgtattaaccgcgagaccggtcagcagtttgccgtgaagattgtggatgtggcaaaattcacatctagtcctggactgagtacagaggatctgaaaagggaagctagcatttgccatatgcttaagcaccctcatattgtggaactcctggagacctatagcagcgacggtatgctgtacatggtgttcgagttcatggatggcgccgacttatgcttcgagatagtaaagagggcagacgctggtttcgtgtacagtgaggctgttgcaagccattatatgagacagatactcgaagcactcaggtattgccacgacaataacataattcaccgcgatgtgaaacctcattgcgttctcctagcttcgaaagagaattccgctccggtcaagttaggaggcttcggtgtagcgattcagcttggagaaagcggccttgtggctggcgggcgggtcggtacacctcattttatggcaccggaggtggtcaagcgggagccttatggtaagccagtagatgtgtgggggtgcggcgtcattttgttcattctgctatcaggatgtctgcctttttatggtactaaagagcgacttttcgagggaattattaaaggcaagtacaagatgaatcccagacagtggtctcacatatctgagtccgctaaggacttggtgaggaggatgttgatgctagatccagcggagcgcataactgtctatgaggctttaaaccacccttggctgaaggaacgggaccgttacgcttataaaatacacctgccagagacagtggagcagctaaggaagttcaacgctcgacgcaagctcaaaggagccgtgctggctgccgtcagttcgcataagtttaattcattctatggcgatccgcccgaggaattacccgattttagcgaggatccaacgtcaagcgggctgcttgccgcagagagagccgtgagtcaggtgctcgactccctcgaggagatccatgctctcacagactgctcagagaaggatctcgactttctccactctgtgtttcaggaccagcatctccacacactccttgatctctacgacaaaatcaacacaaaatcgtcgccacagattagaaacccccctagtgacgcagtccagcgagctaaagaggtgcttgaagaaatctcttgctatccagagaacaatgacgcaaaggagctgaaacgcattctgactcagccccatttcatggcgctgctccaaactcacgatgtggtcgctcacgaggtgtacagcgatgaggccttgcgagtcactccaccgcctactagcccgtacctcaacggggacagtcccgaatctgccaacggggacatggatatggagaatgtgacccgggtcaggctggtgcagttccaaaagaatacagatgagcctatgggtatcactctcaaaatgaatgaattaaaccattgtatcgtcgcacggataatgcacggtggaatgatacaccgacagggtaccttgcacgtcggagatgagataagggagatcaatggaatcagtgtagccaaccagacagttgaacaattgcagaagatgctgagggagatgcggggatccattacctttaaaatcgttcccagctaccgtacacagtcctcctcatgcgaggtgatgactctcacaaatcacccccatcttttatag

SEQ ID NO: 181324 - DNA, 2730 bp, synthetic construct
  misc_feature 1..2730: note = Description of Artificial Sequence: Synthetic coding sequence
  source 1..2730: mol_type = other DNA
atggccgacgacgacgtgctgttcgaggacgtgtacgagctgtgcgaggtcattggtaaaggcccttttagcgtggttcggagatgcattaatcgagagacggggcaacagtttgccgtgaaaattgtggacgttgccaagtttacatcctcaccaggactctcaacggaggacctgaaacgagaggccagcatctgccacatgctaaaacatccgcacatcgttgagctactggagacctattcatccgacggtatgttgtacatggttttcgagtttatggacggagccgatctgtgtttcgagatagtgaagcgcgctgatgcaggcttcgtctactccgaggcagtcgcctcacattacatgcgacagattctagaggccttgcgctattgccatgacaataatatcatccaccgggatgtgaaaccccactgcgtcctgctagcctctaaggaaaattctgcaccggtgaagctgggtgggttcggcgtagccattcaactgggtgaatccggcctggtggctggaggccgggtcggcacaccacattttatggcccctgaggtggtaaaacgagagccatacggtaaacctgtcgatgtgtgggggtgcggcgttatcctgttcatccttctgtcgggatgcttgcccttttacgggaccaaggagagactgtttgaaggtattatcaagggaaaatacaagatgaaccctcggcaatggagccatattagtgaaagtgctaaagatctcgtgcgcaggatgctgatgctagaccctgccgagagaataaccgtctacgaggcactgaatcacccttggctaaaggagagggatagatacgcctacaagattcatctgcccgaaacagtggagcagctgaggaaattcaacgcccggcgtaaactcaaaggcgcagttcttgctgcagtgagttcccataaattcaatagtttttacggcgacccgcccgaagagcttccagacttttctgaagatcctacatcctccggcctcctcgctgcagaacgtgcagtcagccaggtactggactcactggaggagatccacgctctaactgattgcagcgaaaaggaccttgactttttacattcagtatttcaggaccagcacctgcacactctcctggacctgtacgacaagattaatactaagagctcacctcagattagaaacccaccatccgatgccgtgcaacgtgcgaaagaagtcttagaggaaatatcctgttatccagagaacaacgatgctaaggaactgaagcgaatcctgacacaaccgcacttcatggccctgcttcagactcacgacgttgtagcccacgaagtgtactccgatgaggccctccgggtgacgcctcctccaacgtctccctatctgaatggagactcacctgaaagtgccaatggtgatatggacatggaaaatgtgactcgcgtacggctcgtgcagtttcaaaaaaacaccgatgagcccatgggaattacactgaagatgaatgaactcaatcactgtatagtggcccgaatcatgcatggagggatgatacaccgccagggcaccctgcacgtgggtgatgagattcgtgagatcaatgggatttccgtcgccaaccaaaccgtggaacagctgcagaaaatgctgcgggagatgagaggcagcattaccttcaaaatcgtaccatcctacaggacacagagcagttcctgcgaaagagacagcccgagcacttctcggcagtcgccagctaatggccacagctctaccaacaattcggtttcaatctatgtgcgggctcagttcgaatatgatccagctaaggacgacctgatcccctgcaaggaggctggaatccggtttcgggttggggacatcattcagattattagtaaggacgatcacaattggtggcagggcaaactggagaactctaagaatgggaccgctggactgattccgtccccggaactgcaggaatggcgggtcgcatgtatagcgatggagaagactaagcaggaacagcaagcatcttgcacttggttcgggaaaaaaaagaaacagtacaaggataaatacctcgccaaacataacgccgatcttgtgacctatgaagaagtcgtgaagctgcctgccttcaagcgaaaaaccctggtgttactcggagcccacggggttgggaggcgccacattaaaaacacgctaataactaagcacccggatcgcttcgcctacccaatacctcacacgactcggccccctaaaaaggacgaggagaacggcaaaaattattacttcgtgtcgcatgatcagatgatgcaggatatctctaacaatgagtatttagaatatggcagccacgaggacgcaatgtacggcacaaagctggagaccatcagaaaaatacacgaacaaggcctgatcgccatcctcgatgtcgaaccacaagccttaaaggttctgcgcacagcggaatttgcacccttcgtagtattcattgcagctcccaccatcaccccagggctgaacgaagatgaaagtctgcagagactccagaaggagtccgacattctacagcgtacatacgcccactatttcgacttgacaatcatcaacaacgaaattgacgagactattaggcacctggaggaggccgtggagttggtctgtaccgctccccagtgggttccagtgtcctgggtttactag

SEQ ID NO: 181325 - DNA, 2781 bp, synthetic construct
  misc_feature 1..2781: note = Description of Artificial Sequence: Synthetic coding sequence
  source 1..2781: mol_type = other DNA
atggccgacgacgacgtgctgttcgaggacgtgtacgagctgtgcgaggtgatcggcaagggtccgttttcggtggtcaggagatgtatcaatcgcgaaacgggccagcaatttgccgtcaagattgtggatgtggccaagttcacatcgtcccctggtctgagcactgaggacctcaagagggaggcctcaatttgccacatgctgaaacaccctcatattgttgaattgcttgaaacctactcgtctgatgggatgttatacatggtgtttgaattcatggatggcgccgacctgtgcttcgaaatcgtgaaacgcgcagatgctgggtttgtctatagcgaagccgttgcctcccactatatgagacagatcctcgaagccctgcgctactgccacgacaacaacatcatccacagagatgtaaaaccacattgcgtgctcctagccagcaaagagaattccgcccccgtaaagctcggagggtttggcgttgctatccagttgggagagagtgggttggttgcgggcggcagagtcggcacgccacactttatggctcctgaggtggttaagcgcgagccctacggcaagccggtcgacgtctggggctgcggagtcatcttatttatccttctctccggttgccttcccttttacggcaccaaggagcgtttattcgagggaatcatcaaaggaaagtacaagatgaacccccggcagtggtcccacatctccgagtccgcaaaagatctagtcaggaggatgttaatgcttgatcccgccgaaaggataaccgtatacgaagcactcaatcacccatggctcaaagagcgagaccgatacgcttacaaaatccacctgcccgagaccgtagagcagctgagaaagtttaacgcaagacgcaaactgaagggcgctgtcttagccgcagtaagctctcataagttcaacagtttctacggggacccgccagaagaactccctgatttttcagaagaccctacttcgagcggtctcttggccgccgagagagctgtgagccaggtgctggatagcctcgaagagattcacgctctgacagattgttctgaaaaagacctggattttctccatagcgtgttccaggaccagcacttgcatacactgctggacctctacgataagatcaatactaagagttcaccccagatccggaaccctccctccgacgctgtacagagagctaaggaggtgctggaggaaatcagttgctaccctgagaataatgatgctaaagaactcaagagaatcctgactcaaccacacttcatggctctgttacagacccatgacgtggttgctcatgaggtgtattctgacgaggctctgagggtgacgcctccacctacatccccttatcttaacggggactctccggagtccgccaatggagacatggacatggaaaacgtgacccgagtgcgcctcgtccaatttcagaagaacaccgatgaacccatgggtataacactgaagatgaacgagctgaatcattgtatcgtagctagaataatgcatggtggtatgattcaccgccagggaacactccatgtaggtgacgaaatcagggagatcaatggcatctctgtggcaaatcagacagtggagcaactgcagaaaatgttacgcgaaatgcggggatctattacattcaaaatcgtgccctcgtacaggacacagagttcctcttgcgaaagagacagtccttccacttcacgccagtccccagccaacggccacagctcaaccaataatagtgtgagtgacctcccctccactacgcagcccaaaggcagacagatttacgttcgagcgcaattcgaatatgacccggcgaaagatgacttgatcccctgtaaagaagccggaatacgcttcagggttggcgatatcatccagatcatctccaaagatgaccacaactggtggcaggggaaactggaaaatagcaaaaatgggaccgcaggccttattccctccccggaactccaggaatggagggtagcctgtatagccatggaaaaaactaagcaggaacaacaggctagctgtacttggttcgggaagaagaaaaaacaatataaagacaagtacctggctaagcacaacgctgtgttcgatcaactcgatctggtgacatacgaagaggtggtgaaactcccagccttcaagcgcaagacattggtgttgcttggggcccatggtgtcggtcgacgacacattaaaaatactctcatcaccaagcacccagaccggttcgcttaccccatccctcacaccacccggccccccaaaaaagatgaagaaaacggcaagaattactattttgtatctcatgaccagatgatgcaagacattagcaataacgagtacctggaatacggcagccacgaagatgcaatgtacggaaccaagcttgaaacgattcgcaagattcacgagcaggggcttattgccatacttgacgttgagccccaagctcttaaggtgcttcgaacagctgagtttgccccgttcgtggtgttcatcgccgctcctacaatcactccgggcctgaacgaggacgagtccctgcagagactccagaaggagagcgatattttacagaggacatatgcacactactttgatctgacaattatcaacaacgagattgatgaaaccattcgacaccttgaggaggccgttgagctcgtctgtactgccccccagtgggtgcctgtttcttgggtttattag

SEQ ID NO: 181326 - DNA, 2766 bp, synthetic construct
  misc_feature 1..2766: note = Description of Artificial Sequence: Synthetic coding sequence
  source 1..2766: mol_type = other DNA
atggccgacgacgacgtgctgttcgaggacgtgtacgagctgtgcgaggtaatcggtaaaggcccattctccgtggttcgccggtgcatcaatcgcgagaccgggcagcagttcgcggtcaagattgtggatgtcgccaaattcacaagctcccccggcttgtctacagaggacctgaaacgggaggcttctatttgccacatgctgaaacacccacacattgtggaactccttgagacctactcttcagacggaatgctgtatatggtttttgagtttatggatggcgccgatctgtgttttgagattgtgaagcgggcagacgccggattcgtgtactccgaagccgtggcctctcactacatgcgtcaaatccttgaggctctgagatactgtcacgacaataacatcatccatcgggacgtcaagcctcactgtgtgttgttagctagcaaagaaaatagcgcccctgtgaaactggggggatttggggtggctatccaactaggcgaatccgggctggtagccggagggagagttggtacacctcatttcatggcgcccgaagtggtaaaacgcgagccttacggaaaacccgtcgatgtgtggggctgtggagttattctgttcatcttgctgtccggttgcctgccattctatggtaccaaagaacgcctctttgaggggatcatcaagggcaaatacaagatgaacccgcgacagtggtctcatataagcgaaagtgccaaagatcttgtgaggagaatgctcatgctagatcctgcagagagaatcacggtctacgaggcattaaatcacccatggcttaaagaaagggataggtatgcttacaagatccatctaccagagaccgttgaacagctaaggaagtttaacgcacggcgaaaactaaaaggcgccgtgctggccgctgtaagttctcacaagttcaattctttctacggggatcctcctgaagagctgccagatttctctgaggatcctacaagctccggtctgttagccgcagagcgggccgtgtcacaagtgctcgattctctcgaggagatccacgcactcacagattgttccgagaaggacctggacttcctgcactccgtcttccaagatcagcacttacatactctgttagatctctacgataagatcaacactaagtcttctccccaaattaggaacccgcccagtgatgccgtgcagcgggccaaggaagtcctggaagagatctcctgctatcccgaaaacaacgatgccaaagaactgaaaaggattctcactcaaccccatttcatggccctgctgcaaactcatgacgtggtcgctcatgaggtatactccgatgaagctctgagggttactccgcccccaacatctccgtaccttaatggagatagccccgagtctgcaaacggggatatggatatggaaaacgtgacccgggtcaggctagtacaattccagaagaacacggatgagcctatgggtattacccttaaaatgaatgagctaaatcattgtatagttgcacgaatcatgcacggcgggatgattcaccgccagggaacactacatgttggggatgagatccgagaaattaatggcatttcagtggccaatcagactgtcgaacagttgcagaagatgctgagggaaatgcgcggctcaattaccttcaagattgtcccttcgtatcgcactcagtctagctcctgtgaaagagattcgccctctacctctaggcaatctccggccaatggccattcttctaccaacaattcagtctcggatctcccgagcaccactcagcctaagggacgacagatatacgttcgagcccagtttgagtacgacccagcaaaggatgatctgattccgtgcaaggaggctgggatccggtttagagtgggggacatcattcagattatttcaaaagacgatcataactggtggcaaggcaagctcgagaattctaaaaatggaacggcaggcctcatccctagccccgagcttcaggagtggcgtgtggcatgtatcgcgatggagaagaccaaacaggaacaacaggcatcttgcacgtggtttggaaaaaagaagaagcagtacaaagacaagtacctggccaagcacaacgccgacctggtgacttatgaagaggtcgtcaaactccccgcatttaaacggaaaaccctcgtactcctgggggcccatggcgtgggcagacggcatattaagaataccctgataaccaaacatcctgataggtttgcctaccctattccccataccacccgcccacctaaaaaggacgaagaaaacggcaagaattactattttgtgagccatgatcagatgatgcaggatattagcaataacgaatatctggaatatgggagccatgaagatgctatgtatggaaccaagctggagacgataaggaagatccatgagcagggtctcatagccatcctggatgtcgaacctcaggccctcaaggttctgcggacggctgaatttgctccttttgtggttttcatagctgccccaactattacacctggcctcaacgaggacgaatccctgcagcgactgcagaaagaatccgacattttacagaggacctacgcacactacttcgatctgacaatcatcaacaacgaaattgacgagaccattagacacctggaagaagccgtggagcttgtttgtactgcaccacagtgggtgccagtttcctgggtgtactag

SEQ ID NO: 181327 - DNA, 1146 bp, synthetic construct
  misc_feature 1..1146: note = Description of Artificial Sequence: Synthetic coding sequence
  source 1..1146: mol_type = other DNA
gacgagatccgggagatcaacggcatcagcgtggccaaccagaccgttgagcagttgcaaaaaatgttgcgggagatgcggggttccatcacatttaaaattgtgccctcatatcgtactcaaagttctagctgtgagagggattctccgagcacgtccagacagtctccagcgaatggccactcttccacaaataacagtgtgtccatctacgtgcgggcccagttcgagtatgatcccgccaaagatgacctgataccttgtaaagaagctggcattcgctttcgagtgggcgacatcatccagattatttccaaggatgaccataactggtggcagggaaagttggaaaacagcaaaaatggcaccgcaggcctgattccttccccggagctgcaggagtggagggtcgcctgcattgctatggagaaaacaaaacaggagcagcaggcttcttgtacttggtttggaaagaagaaaaaacagtacaaggacaagtatttggcgaagcataatgccgtctttgatcagcttgacttagtcacatatgaagaggtcgttaaactacctgcctttaaaaggaagacactcgtgctgctcggtgcccatggcgtgggacgccgtcacatcaagaacacactcataacgaagcacccagacagatttgcttaccctatcccacacacaacaagacctcccaagaaagatgaagaaaatggaaaaaattattatttcgtgagccatgatcagatgatgcaagatatttccaataacgaatatctagagtatggttcccatgaggatgccatgtatggaacgaaattggaaacaattcgaaaaatccacgagcaaggactgatcgccatcctagacgtggaaccccaagcactgaaggtgctgcggactgcggagtttgcccctttcgtggtatttattgctgcccccaccatcacacctggcctgaacgaagatgaatcacttcaaaggctccaaaaggagagcgatatccttcagcggacttatgcccactatttcgatctcacaatcataaacaacgagatcgacgagacgatccggcacttagaggaagccgtcgagctggtgtgcaccgcaccacaatgggtgccggtgtcgtgggtgtactag

SEQ ID NO: 181328 - DNA, 1557 bp, synthetic construct
  misc_feature 1..1557: note = Description of Artificial Sequence: Synthetic coding sequence
  source 1..1557: mol_type = other DNA
ctgtacgacaagatcaacaccaagagcagcccccagatccggaacccaccatcagacgcagtccagagagccaaagaggtcttggaggagatctcgtgttatcctgagaataatgatgccaaggaactcaagagaatcttaactcagcctcattttatggcactgctgcaaacacacgacgtggtggcacacgaggtttactctgacgaagctctgcgcgtgacaccacctcccacctctccctacctcaacggcgatagtcccgagagtgcaaatggggatatggacatggaaaacgtgacaagggtgcgcctcgttcagtttcagaaaaacaccgacgagcccatgggcatcactctgaagatgaacgagttaaatcattgtattgtcgctcggatcatgcacggggggatgattcacaggcagggcacgctgcacgtgggagatgagatcagggagattaacggcatcagcgtggccaaccagacagttgaacagctgcagaaaatgctccgcgagatgagaggctccatcaccttcaagatagtgcctagttatagaactcagtcttcctcatgtgaagacctcccgtcaactacccagcctaaaggaagacagatctacgtgcgagcccaatttgagtacgatcctgctaaggatgacctgattccctgtaaagaggcaggcatccggttccgagtcggtgacatcatccagattatatccaaagatgaccacaactggtggcaggggaaactcgagaacagcaaaaacgggaccgccggcctcatccccagcccggaattgcaggaatggcgtgtcgcctgcatagccatggagaagacaaaacaggaacagcaggcctcgtgcacatggttcggaaagaagaaaaagcagtacaaagataaatatcttgctaagcacaatgccgtgttcgatcagttggatctggtgacctacgaggaggtcgtaaaacttcctgcctttaagcggaagacactcgtcctgctgggagcccacggcgtgggaaggcgtcacatcaaaaacaccctgataaccaaacaccctgaccgctttgcttatcctataccacatacaacccggcctcctaagaaggacgaggagaacggcaaaaattattattttgtcagccacgatcagatgatgcaggacatctctaataatgagtacttagaatacggcagtcatgaggacgcaatgtacggcactaagttagagacaatcaggaagattcacgagcaaggccttatagctatcctggatgttgaaccacaggcactgaaagtactgcggaccgctgaattcgccccttttgtcgttttcattgcagccccgactatcacccccggcttgaacgaggatgaaagcttgcagagactgcaaaaggagagtgatatcctgcagcgtacctacgcacactactttgatttaaccatcattaacaatgaaattgacgagaccatccgccacctggaggaggctgttgagctggtgtgtaccgcaccacagtgggtgcctgtaagctgggtttattag

SEQ ID NO: 181329 - DNA, 2694 bp, synthetic construct
  misc_feature 1..2694: note = Description of Artificial Sequence: Synthetic coding sequence
  source 1..2694: mol_type = other DNA
atggccgacgacgacgtgctgttcgaggacgtgtacgagctgtgcgaagttatcggaaaggggcctttttcagtcgtgaggcgttgtatcaatagagaaactggacagcaatttgccgtgaaaattgtagatgtggccaaatttactagcagtcctggcctctctactgaggatctcaaaagagaagcctctatttgtcacatgttgaaacaccctcacattgtcgagcttttggaaacatattcatctgatggtatgctgtacatggtctttgagtttatggatggagccgacttgtgtttcgaaattgttaagcgagctgacgctgggttcgtttattccgaggctgtggcctcacactatatgagacaaatacttgaggcgctccgatactgtcacgacaataatattattcatcgagatgtgaagcctcactgtgtccttctagccagcaaagagaactcggcacctgttaaactcggtggcttcggagtggccattcagttaggcgaatcgggcctggtggccggtggccgagtgggtaccccgcattttatggccccagaggttgtgaaaagggagccctacgggaaacctgtggatgtatgggggtgcggagtgattctcttcatcttactttcaggctgcctgcctttttacgggaccaaggagcgcctctttgagggaattatcaaagggaagtacaaaatgaatcctcgccaatggagtcacatcagtgagtctgccaaagatctggtgcgtcgcatgctgatgttggaccccgcagaacggatcaccgtatatgaagcactgaaccatccttggctgaaggaaagagaccgctacgcatataagattcatctgccagagaccgtggagcagcttaggaaattcaacgctcgccggaaattgaagggagctgtgctggccgcagtgtcatcacataaattcaactctttttacggcgacccaccggaggagctacccgactttagcgaggatcccacctccagtggcgccgtgtctcaggtattggactccctggaagaaatacatgccttaaccgattgttccgagaaggatctggattttctgcattctgtcttccaagaccagcatctgcacactcttctggacctgtacgacaaaataaatactaagtccagtcctcagattcgtaatcctccatctgacgctgttcagcgcgccaaagaagtcttggaggaaattagttgttaccccgaaaacaacgacgccaaagagcttaagcggatcctcacacaaccccacttcatggctctgctccagactcacgatgtggtggcccatgaggtgtattcagacgaggcgcttcgggtaacccctcccccaacttccccttatcttaatggggacagccctgagtctgctaacggagatatggatatggagaatgtgactcgggtgcggctcgtacagttccaaaagaatacagatgagcccatggggatcacattaaaaatgaatgagctgaatcattgcatcgtggcacgcattatgcacggaggcatgatccaccgccagggaacacttcacgtgggagatgaaattcgtgagattaacggaatcagtgttgctaatcaaaccgtggaacaactgcaaaagatgcttcgggaaatgcggggatccatcacctttaaaatagttccatcttatagaacccagtcaagctcctgtgaagaccttccgagtaccacgcagcccaagggccgccagatctacgtgcgtgcccaatttgagtacgacccagccaaggacgatctgattccatgcaaagaggcaggaattcgatttcgagtcggggatattatccagatcatcagtaaggatgaccacaactggtggcaagggaagctggagaatagcaaaaacggtacagccggcctgatcccttctcccgaactgcaggagtggcgagtcgcttgcatcgcaatggagaaaacaaaacaggaacagcaggcttcatgcacctggttcggaaagaaaaaaaaacagtataaggataagtatctggccaagcacaacgccgtgttcgaccaactcgatctagtgacatatgaagaggttgtgaagctccccgcctttaaaagaaagaccctggttttgctgggggcgcacggtgtgggccgacgacacataaagaatacactgatcactaaacatccggaccgattcgcctaccctatcccccacacaaccagaccccctaaaaaggacgaggaaaatggcaagaattactacttcgtcagccacgaccagatgatgcaggacatcagcaacaatgaatatttggaatatggctctcacgaagacgctatgtacggcactaagttagagaccatccgcaagatccacgagcagggactgatcgcgatattagatgtcgaaccgcaggctctaaaagtgctgcgaaccgccgaatttgctccattcgttgtcttcatcgcggcgccaaccatcaccccgggcttaaatgaagacgagtctctgcagcgccttcagaaggaatccgacatacttcagaggacttacgcacactattttgacttgactattattaacaacgagattgacgagactattcgccacctggaggaggctgtagagcttgtatgcacagccccccaatgggtccctgtgagctgggtatactag

SEQ ID NO: 181330 - DNA, 2697 bp, synthetic construct
  misc_feature 1..2697: note = Description of Artificial Sequence: Synthetic coding sequence
  source 1..2697: mol_type = other DNA
atggccgacgacgacgtgctgttcgaggacgtgtacgagctgtgcgaggttatcggaaaggggcctttcagtgtggtccgcagatgtataaatcgcgagacagggcaacagttcgctgtgaagatcgtggacgtggccaagttcaccagtagccccgggctttcaactgaagatttaaagagagaggcgtccatctgccatatgctaaagcacccccacatcgtcgaactcctcgagacctactcgagcgacggtatgctgtatatggtgttcgaatttatggatggagccgatctgtgcttcgagatcgtgaagagggcagatgctggatttgtttatagtgaggccgtggcgtcacactatatgcgtcagatcctggaagccctgaggtattgccacgacaataatataatacatagggacgtaaagcctcactgcgtccttttggcatctaaagagaattctgcgccagtgaagctgggcggcttcggcgtcgcgattcaactgggagagtccggtctggtggccggcggacgagttggaactccacactttatggcccctgaggttgttaaacgagagccctatgggaaaccagtggacgtctggggatgtggggtgattctttttattcttctgtccggatgcctccccttttatgggaccaaggaacggttgttcgaaggcatcatcaaaggcaagtacaaaatgaatccgcgtcagtggtctcacatatctgagagcgcaaaagacctggttagacgaatgctgatgctcgatcccgcagagaggattactgtctatgaggccttaaatcatccctggctgaaggagagagacagatatgcctataaaattcatctccctgaaacggtggagcagcttcggaagtttaacgcccggcgtaaattaaagggggcagtacttgcagccgtatcttcacataaatttaacagtttttatggcgacccccctgaagagctgccagacttttcagaggaccccacctctagtgggctgcttgccgcggagagggccgtgagccaggtactggatagtttagaggaaattcatgccctgaccgattgtagcgaaaaggacctcgacttcctccatagcgtgttccaggatcaacacctgcatacacttctagacctgtacgacaagattaatacgaagtcctctccccagatccgcaatcccccaagtgatgccgtacagcgggctaaggaggtgctggaagaaatctcatgctatccggaaaacaatgatgctaaggagctgaaaaggattttaacccagcctcactttatggctcttctccagactcatgacgtcgtcgcacacgaggtgtactcagacgaggcgttacgtgtgacacctccgcccacctccccctatctgaatggggatagtccagagtccgccaatggggacatggacatggagaatgttactagggtgcgtctagtacagttccagaaaaacaccgacgagcctatgggcatcacactgaaaatgaacgaactgaatcactgcattgtcgcccggattatgcatggcgggatgattcaccgccagggcacattgcacgttggtgacgaaattcgggaaatcaatgggatttctgtagctaaccagacggttgaacagttacaaaaaatgttgagggaaatgcgtgggtctatcacttttaagattgtgcctagctataggactcaatcatcatcctgcgaagaccttcccagtactacacagccgaaaggtcgtcagatctacgtgcgagcgcagttcgagtacgatccagccaaagacgatttaattccttgtaaagaagccggaatcagattcagagtgggtgatatcatccagatcatctctaaagacgatcataattggtggcagggcaaattagagaacagtaagaatgggacagctggtctcataccgtcgcccgagctgcaggagtggcgcgtcgcctgtattgccatggagaagacgaagcaagaacagcaagcttcctgcacttggttcggtaaaaaaaagaagcaatataaggacaagtacctggcaaagcacaacgccgacttagtgacctatgaagaggtcgttaaattaccagcctttaagcgcaaaacgttggtgttgttgggagcacacggggtgggtcgacgacatatcaagaacactctgatcaccaaacaccccgatcgctttgcgtaccctattccgcatactacacgacccccgaagaaagacgaagaaaatggaaaaaattattatttcgtgtctcacgaccagatgatgcaggatatctctaataatgagtacctggagtatggaagccatgaggacgccatgtatggtacaaagctcgaaaccatcagaaagatacatgagcaagggctgatcgctatcctggacgtcgagcctcaggccctcaaggtcctccgcactgctgaatttgcgccttttgtcgtcttcatcgccgcccccacgataaccccggggctgaatgaggatgaatctttacagcgcctgcagaaggaatctgatatcctgcagcgcacatacgctcattactttgacctaacgatcatcaataatgagatcgacgagacaataagacatctggaggaggccgttgagctggtatgcacggctcctcagtgggtaccagtgtcttgggtgtattag

SEQ ID NO: 181331 - DNA, 3237 bp, synthetic construct
  misc_feature 1..3237: note = Description of Artificial Sequence: Synthetic coding sequence
  source 1..3237: mol_type = other DNA
atggccttctacagctgctgctgggtgctgctggccctgacctggcacacctctgcttacggccctgaccagcgcgctcagaaaaaaggcgatattattttgggaggactttttccaatacactttggggtggccgcaaaggaccaggatctgaaaagccgacccgagagtgtggaatgcattcggtacaatttcagaggattcagatggctacaggcaatgatttttgccatcgaagaaatcaactcctcaccagctctgcttcctaatcttacattggggtataggatcttcgacacctgtaacactgtgtctaaagctcttgaggcaactctctcattcgtggcccagaacaaaatcgattctctgaatcttgacgaattctgtaactgctcagaacatatcccatccacaatagccgttgtgggggctacaggctccggcgtgtctaccgccgtcgcaaacctgctcggactgttttacataccccaggtgagctacgcgtcctcttcccgacttctgtccaacaaaaatcagttcaaaagttttcttcgaactataccaaacgacgaacaccaggccaccgccatggctgatatcatcgaatacttccgctggaattgggtggggacaatcgccgccgacgatgactatgggagaccaggcattgagaaatttagggaggaggcagaggaaagagatatctgcattgacttcagtgaactcatatcccagtacagcgacgaggaggaaatccaacatgtcgtggaggttatccagaactctacagccaaagttatcgtggtcttcagctccgggccggacctcgaacctctgatcaaggagatagtaaggagaaatattacaggcaagatctggcttgcctcagaagcctgggcctccagcagtctcatcgctatgccgcagtacttccacgtagtgggcgggacaatcggattcgcccttaaagctggacagattccgggctttcgcgaattcctgaagaaagttcacccacggaagagcgtccacaacggtttcgcgaaagagttttgggaggaaacattcaactgccatcttcaggagggagccaaggggcctctgccagtggacacgttcctcaggggacacgaagaatctggcgacaggtttagtaacagctctaccgcatttcgccctctgtgcaccggcgatgaaaacatatcatctgtggagacaccttacattgattatacacacttaaggattagttataatgtgtatctcgcagtatattcaatcgcccatgcacttcaggacatttacacctgtctacccggaaggggcttatttacgaatggatcatgcgccgatattaagaaagtggaggcctggcaggttctcaagcatctcaggcacttaaacttcacaaacaacatgggagagcaggtcactttcgacgagtgcggagatttagtggggaactacagcattattaactggcatcttagccccgaagacgggagcatcgtgtttaaggaggtgggctattataatgtgtatgccaagaagggcgaacgattgttcattaacgaggaaaagatactgtggtctggattctctcgcgaggttccgttctcaaactgctctcgtgattgccttgcggggaccaggaaagggatcatagagggggagccaacctgttgtttcgagtgcgtagaatgcccagacggagaatattccgacgagacggatgcctccgcttgcaataaatgtcccgacgatttttggagcaacgagaatcatacgtcctgcatcgccaaagaaatcgagtttttgtcttggacagagccattcggcatcgctctcaccctttttgcagtattggggatcttcctcaccgcctttgttctgggggtctttattaagtttcgaaacacacccatagtcaaagccactaacagggaattgagttacctgcttctcttctccctcctctgctgcttcagtagctcactgttttttataggtgagccacaggactggacttgccgattgcggcagcctgcttttgggatttcatttgtgctgtgcatcagctgtatcctggttaagacaaatagggtgcttcttgttttcgaggccaagataccgaccagctttcatcggaaatggtggggcctcaatctgcaatttctgctggttttcctctgcacttttatgcaaatagtaatctgtgtcatctggctgtacactgcccctccgtcttcctaccgcaatcaggagcttgaggacgagatcatcttcattacgtgtcatgaggggagcctcatggccctgggcttcctgataggctacacgtgcctgctggccgccatttgcttttttttcgcttttaagagtcggaaactccctgagaatttcaatgaggccaagttcatcactttctccatgttgatttttttcatcgtctggatctccttcatccctgcatacgcaagtacctacggtaagttcgtctccgcagtcgaagtgatcgccattctggcagcctctttcggcctgctcgcctgcatcttcttcaacaaaatttacatcattttgttcaagcccagcaggaacactatcgaggaagttcgctgcagtacagccgctcacgcattcaaggtggcagctcgcgccacactgcgcagaagtaacgtgagcaggaagcggtcatcttcactgggcggctccacgggcagtacaccaagttctagtatctcctccaagtctaactcggaggacccctttccccagcctgaacggcaaaagcaacagcaacctctcgccctaacacagcaggaacagcagcaacagccccttacgctcccccagcagcagagaagccagcagcagccacgttgcaagcaaaaagtgatctttggaagcgggacggtgacattctccctttcctttgatgaaccacaaaagaacgctatggcacatagaaacagtacccaccaaaattcactagaggcccagaaaagttctgacacactgactagacacgaaccattgctgccattgcagtgtggagaaacagatctggatctgactgttcaggaaaccggtttacaggggccagtgggaggcgaccagcggcccgaggtggaagatcctgaggagttgtctcctgctttggtagtctcctcaagtcaaagcttcgttatttctggaggtggtagcaccgtcacagaaaacgtggtgaactcctag

SEQ ID NO: 181332 - DNA, 3237 bp, synthetic construct
  misc_feature 1..3237: note = Description of Artificial Sequence: Synthetic coding sequence
  source 1..3237: mol_type = other DNA
atggccttctacagctgctgctgggtgctgctggccctgacctggcacacgtctgcgtatggtcctgatcagcgcgcccagaagaaaggggatataattttaggcggcttatttccaatacactttggggtcgcagccaaggatcaggatctcaaatctaggccggagagtgtggagtgtataaggtacaactttagaggattccgctggctgcaagcaatgatttttgcaattgaggaaataaatagctctcctgccttgctccccaatctcaccttgggttatcgcatctttgacacctgcaatacagtgtcaaaggctcttgaagccacactcagttttgttgctcagaacaaaatagactccctgaacctggacgaattctgcaactgtagtgagcatatcccctccacgatcgcagtggtcggcgcgactggttcaggggttagcaccgctgtggctaatctgttaggcctattttacattccgcaggtgtcatacgctagcagctccaggctgctgtccaacaaaaatcagtttaaatcttttctgcgaactattcctaatgatgagcaccaggcgaccgcgatggccgacatcatcgagtatttccgatggaattgggtgggaacaatcgccgcagacgatgattacggccggcccggaatcgaaaagtttagagaggaggctgaggagcgcgatatctgcatagatttctccgagcttatcagccagtactccgatgaggaagagattcagcacgtcgtggaagtgatccagaattccaccgcgaaggtgatcgtggtgttttctagcggccccgacctggagccgctcatcaaggaaatagtccggcggaacattactgggaaaatatggctggcaagtgaggcctgggcatcctcaagtctgatcgcaatgccacaatatttccacgtggttggtggcacaattggctttgcactcaaggccgggcagatcccaggcttcagagagttcttgaagaaagttcaccctcgcaaaagcgtgcataatggattcgccaaagagttctgggaggaaactttcaactgtcacctacaggaaggcgccaagggccctctccccgtcgataccttcttgcgcggccacgaagagtcgggtgatagattttctaacagttcaaccgcctttaggcctctttgtaccggggatgagaacattagcagcgtggaaacaccctatattgactacacccacctgcggataagctacaatgtgtatctggctgtatattcaattgctcacgccttacaagacatatatacttgtctccctggcagggggttgtttactaatgggagttgcgccgatatcaagaaggtggaagcttggcaggtcttaaagcacctgaggcatttgaatttcacaaataacatgggcgagcaggtgacgttcgacgagtgtggcgacctagtcgggaattacagtattattaattggcacctaagccctgaagatggctcgatcgtcttcaaagaggtggggtattataacgtgtacgcaaagaagggggaacggctcttcataaatgaagaaaaaatcctgtggtcaggatttagtagggaggtgcctttctcaaattgttctcgtgactgtctcgcggggacacgaaagggtattatagaaggcgaaccaacctgctgtttcgaatgtgtcgagtgccccgatggggaatattcagatgagactgacgcctccgcgtgcaacaagtgtcccgacgacttttggagcaatgaaaaccacactagctgtattgccaaagagatcgaattcctgagttggaccgagcccttcgggattgccctcacactgtttgccgttcttggtatctttctgaccgccttcgtcctgggagtgttcattaagtttcggaacacccctattgtcaaggctactaatagagagctgagttacctcctgctgttcagtctgctgtgttgcttctcgagttcattgttttttatcggagagccacaggactggacatgtcgccttcgccagcccgcgtttggtatatctttcgttctgtgcatctcatgtattttggttaaaactaacagagtgttgctggtgtttgaggctaaaataccaacctcgttccatcggaagtggtggggtctcaacctccagtttctgctggtcttcctgtgtactttcatgcagatcgtgatctgcgtgatttggctttataccgcaccaccaagctcatatcgcaaccaggagttagaagacgagatcatcttcatcacgtgtcatgaaggctctctgatggccctgggctttctcataggatacacttgcctcctggcagcaatctgctttttctttgcctttaaaagccgaaaactaccagagaacttcaatgaagccaagttcatcaccttttcaatgctcatcttcttcatcgtgtggataagttttatccccgcctacgccagcacttacgggaaattcgtcagtgcagtggaagttatcgccatcttggctgcttcctttggcctgctagcttgcattttttttaacaaaatttacattatattgttcaagccttcccggaacactattgaagaagtgagatgcagtacggctgcacacgccttcaaagtggccgcgcgggcaactctgcgcaggtcaaatgtctctagaaaacgatccagcagcctgggcggaagcacagggtctaccccaagctcaagtatatccagcaagtcaaactcggaagatccctttccccaaccagaacggcagaagcagcagcagcctttggccctgacacaacaggaacagcagcagcagcctctcaccctgccacagcagcaacgatcacagcagcagccgagatgcaaacaaaaagttatttttggctctgggaccgtcacctttagtttgagtttcgatgaacctcagaaaaacgccatggctcacaggaactctacacaccagaacagcttggaggctcagaagagcagtgatacactgaccagacacgaacctcttctccccttgcaatgtggggaaacggaccttgacttaaccgttcaagagacaggactgcagggacccgtgggtggcgatcagagacccgaagtggaagaccccgaggaactatcccctgccttggtcgtgagttcctcacaatcattcgtcatctcgggaggcggaagtaccgttacagaaaatgtggtgaattcttag

SEQ ID NO: 181333 - DNA, 3267 bp, synthetic construct
  misc_feature 1..3267: note = Description of Artificial Sequence: Synthetic coding sequence
  source 1..3267: mol_type = other DNA
atggccttctacagctgctgctgggtgctgctggccctgacctggcacacgagcgcctatggcccagaccagcgcgcacaaaagaagggcgatattatactgggagggctctttccgatccactttggcgtcgctgccaaggatcaggatctgaagtctaggccagagtctgttgagtgtatccggtataactttcggggctttcgttggttgcaagctatgatctttgctattgaggagatcaactcctctcccgctctattgcccaatcttaccctggggtatcgcatctttgacacatgcaacacagtatccaaagccctggaggctactctcagctttgttgcgcaaaataaaatcgactctctgaacctggacgagttctgcaattgttcagagcacatcccatctaccatcgccgtggttggagcgactggctctggcgtctctactgccgttgctaatctacttgggttgttttacatcccccaagtcagttatgcctcttcctcgcggctgctgtctaacaaaaaccagttcaagagttttctccgcacgatcccgaatgacgaacaccaggccactgcaatggctgacattatagagtactttcgttggaattgggtcggcacgatcgccgcagacgatgactacggccgacctggaatcgagaaattccgcgaggaagcagaggagagagatatatgcatcgacttctccgaactgatatcccagtacagcgacgaggaggagatacagcacgtggtggaagtgattcagaacagcacagccaaagtaattgtggtattctcctccggcccggatctggagccactaatcaaggaaattgttcggaggaacataacgggtaaaatctggctggcatccgaagcgtgggcgagttcttctctcatcgcaatgcctcagtatttccatgttgtggggggcacaatcgggtttgcccttaaggctggacaaattccaggtttcagggagttcctaaaaaaagtgcacccgagaaagagcgttcataatggattcgctaaggaattttgggaggaaacttttaactgccaccttcaagagggcgctaagggcccactccccgttgatacctttcttcgcggccatgaggagtccggcgaccgctttagcaattcttctactgctttcaggcccctctgtactggcgatgagaatatatcaagtgtcgaaaccccctatattgactacacccaccttcggatttcatataatgtgtacctggcagtctattcaatcgcgcatgccctgcaggacatctatacttgccttccaggccgcggactgtttaccaatggctcttgtgccgacattaaaaaagtggaggcctggcaggtgcttaaacatctaagacaccttaatttcacaaacaatatgggtgagcaggtgaccttcgacgagtgcggggaccttgtcggaaactactccattataaactggcacctgtcacccgaggacggaagcattgtgttcaaggaggtcgggtactataatgtttatgctaagaagggagaacggttattcattaacgaggagaaaattctctggtccggattttcccgtgaacctctaacgttcgtattatctgtgttgcaagtgccctttagcaactgcagtcgagactgtcttgcgggtactcggaagggtatcatagaaggagagccaacttgctgcttcgagtgtgtggagtgtcctgatggcgaatacagcgacgagactgacgctagtgcttgcaataaatgtcctgatgacttctggagcaatgaaaatcatacttcatgtatcgcaaaggagattgagtttctgagttggacagagcccttcgggatcgccttaacactgttcgccgtactggggatctttttgactgcctttgtgcttggagtgttcatcaaattccgtaatactccaattgtgaaagcaacaaacagggagctttcttatttgttattattttctctgctctgctgcttttccagcagccttttcttcataggcgaacctcaagattggacttgtagactcaggcagcccgcctttgggatatctttcgttctgtgtatctcctgtatcctagttaaaacaaatcgggtcctactggtttttgaggctaagatccctacatccttccaccgtaagtggtgggggctaaacttacaattccttctggttttcctgtgcacatttatgcagattgtcatttgcgtgatctggctgtataccgcacctcccagcagctacaggaaccaggagctcgaggatgagatcatcttcataacatgccacgaagggtccctaatggcattagggttcctgatcgggtatacctgcttgttggccgctatttgtttttttttcgcctttaaatcccggaagctgcctgagaatttcaatgaggcgaaatttatcaccttttcaatgctcatcttttttatcgtgtggataagcttcatccccgcttacgcttccacgtacggaaaattcgtctcagctgttgaggttattgctatattggctgcctctttcggactcttggcatgcatattctttaataagatatacattatcctctttaagcctagccgcaatacaatagaggaagtgagatgttcaaccgcagcgcacgccttcaaggtggcagcaagggcaactctcaggcgttccaacgtaagccggaaacggagctctagccttgggggttcaacaggctctacaccgtcttcctccatctctagcaaaagcaatagcgaagatccattcccacagcctgagcgccaaaagcagcagcagccgttagctctgacccaacaagagcaacagcagcaaccactgactttgccccagcaacagcgaagccagcagcagccgaggtgcaagcaaaaagtgatttttgggtccggtactgtcactttctctctaagctttgatgagcctcagaagaacgccatggcccatcgcaacagcacccaccaaaacagtctggaagcacagaaatccagcgacaccttaacccgccacgagccattgctccccctgcagtgtggcgaaacagatcttgatctgacggtgcaggaaaccggactgcagggccctgtgggaggcgaccaaagaccagaagtcgaggaccctgaggaattatcccctgctctagtggtgagcagctcccagtcgttcgtgatttcaggcgggggcagtactgtaacggaaaacgtggtgaatagctag

SEQ ID NO: 181334 - DNA, 978 bp, synthetic construct
  misc_feature 1..978: note = Description of Artificial Sequence: Synthetic coding sequence
  source 1..978: mol_type = other DNA
atggcccggcccgtgagcgaccggacccccgcccccctgctgctggggggacctgcaggcactccacccgggggaggcgcactccttggactgcgctctctgctgcagggtacctctaagccaaaagagcctgccagctgtctccttaaagagaaggagcgcaaagccgcgcttcctgctgcgaccactccaggcccggggctcgaaactgctggaccggccgacgcacctgcaggagcagttgtaggcggcgggtctcccaggggtagaccaggtccggtgcccgctccaggactcttggctccgctactgtgggaacgaaccctcccattcggtgatgtagaatatgttgacctcgacgctttcctgctggaacatggactgccgccaagccctccccctcctggagggccctcacctgagccgagcccagcaaggacacccgcgcccagccctggacctggctcctgcggctctgcatcacctcggtcctcccccggacacgcccccgcccgggccgctttgggcacagcaagtggccaccgagctggtttaacgtctagggatacacctagccctgtcgacccagatactgttgaggtcctgatgacattcgaaccagatcctgcggacctggcattgtcctctatccccggccatgaaactttcgaccctagaagacatcggttcagcgaggaggagttgaaaccacagcccattatgaaaaaggcccgtaagatacaggtccccgaagagcagaaggatgagaagtattggagtcgccgttacaagaacaacgaggctgccaaaagatcaagagacgctaggcgcctcaaggaaaatcagatcagcgtgcgagccgcatttttggagaaagagaatgccctcctgagacaggaagtcgtagcagtgcgccaggaactgagtcattatcgagctgtgctgtcccgttatcaggctcagcacggcgctctatag

SEQ ID NO: 181335 - DNA, 969 bp, synthetic construct
  misc_feature 1..969: note = Description of Artificial Sequence: Synthetic coding sequence
  source 1..969: mol_type = other DNA
agccagcggggcaagggcacctgccccggcagccaccggaaccacgcctcctcattgccttcacatggcttggttagcatccaggggatctccgcccctgccggacagtggccggccccgcctccctggtcccaggaaggaatgcagtgccatcgggacctcgctctcagtcaggccctctgggggtggcaactgtccaagcagtccggatgggcacatccctctctgccacactccccactgcccagcacagtgcactcttgtagctgggcccccccccatctgcagaggcatcttcctctggcaaccgtttctcccggcactacacagctaacccagggacccgctggtaggaccctcggccagacccaggcctcctgtcctgaacctagaccgtccatggatgctgtggatgccacaatggagaaactgagggcccagtgtctgtctcgcggagcgagcggcattcagggattggcccggttcttcaggcagttggatcgcgatgggtcgaggagtctagacgctgatgaatttaggcagggcctggccaagctcgggttggttctggatcaggcggaagccgagggtgtgtgtcggaagtgggaccgcaatggatctggcactctggacttagaagagtttctgcgggctctgaggcctccaatgagccaggcacgtgaggcagtgattgccgctgcatttgcaaagctggacaggtccggggatggagtggtgacagtagacgacctgcggggagtgtactcaggtcgggcacatcccaaggttcgaagtggcgaatggacagaggatgaggtgttgagaagattcttggacaacttcgattctagcgagaaagatggacaggtcaccctggcggagttccaggactattactccggagtgtctgctagcatgaacaccgatgaggaatttgtggctatgatgacatcagcttggcaactgtag

SEQ ID NO: 181336 - DNA, 489 bp, synthetic construct
  misc_feature 1..489: note = Description of Artificial Sequence: Synthetic coding sequence
  source 1..489: mol_type = other DNA
atggacgccgtggacgccaccatggagaagctgcgggcccagtgcctgagtcggggtgcaagcgggatccaaggcctggcccgtttttttcgccagctggatcgggatggttctaggtctttagatgcggatgagttccgtcagggcctggccaaattaggcctggtgctcgatcaagccgaggcagaaggggtctgtcgaaaatgggacaggaacgggtcagggacactggatctggaggagttcctacgagctctgagacccccaatgtcccaggccagggaagccgtgatcgcggccgcttttgctaaactggataggtctggagatggtgtggtgaccgtagatgacctgcgcggggtatattccggcagggcccaccctaaggtgaccctagccgaatttcaagactattattctggtgtgagtgcaagtatgaacacagacgaggagtttgtggccatgatgacctccgcgtggcagctgtag

SEQ ID NO: 181337 - DNA, 882 bp, synthetic construct
  misc_feature 1..882: note = Description of Artificial Sequence: Synthetic coding sequence
  source 1..882: mol_type = other DNA
ctgatcaacatcctgtaccgggccgtgatcagcgaccccgagcagaatctggcaatagagcaaaaggaatccgaccatatcctgccggattcaaagatgacaccgctccggttcaggaagagaacgttgcatgagacaaagatacgcacccactcaactttaacagagaacgtcttgagccacaaactacagttcgacgggcgcattgtcagccgcacaaatgtcctacctttcatccagaagtccatttattctcatcagtgcgggcgccgcaaaggtaaacagtataggctcggggatttttatgtcggagctactcttaccttcttaagctcggaccaccttagcctgcccgaatcaatcaaagaaaacacacttttaaaattgagaattaccaacatcgatcagatcgcacttgatagcttgaagacagcttcaatggaacaggaggacgacatcattatccaagaaaccaatgacagattggtcttcaaggccattcaggatgtacttaaggagaagttacataaaagaggcgtgcgaatactgaccggcttgggaaaatatttccaacaattggataaagaggggaatgggcttctcgacaaggctgacttcaagcaagccttaaaggtcttccatctcgaggtgagcgagaaggacttcgagagtgcttggcttatcctcaatgacaacggtaatggcaaggttgactacggcgagttcaagcgtggaattattggcgagatgaatgaatatcgaaagtcatacgtgcgcaaggcgttcatgaagctagactttaacaagtctggcagcgttcctattatcaacattaggaagtgctactgcgctaaaaagcatagtcaggttatcagcgggtag

SEQ ID NO: 181338 - DNA, 1149 bp, synthetic construct
  misc_feature 1..1149: note = Description of Artificial Sequence: Synthetic coding sequence
  source 1..1149: mol_type = other DNA
atgatcgaccacctgagccgggccgtgatcagcgaccccgagcagaatctagccattgaacagaaggagagcgaccacattcttcccgactcgaaaatgaccccactcagattccggaagcgtaccctgcatgaaaccaaaattagaacacatagcaccctgacagagaacgttttgagccataagctgcagtttgatgggcgaatcgtttcaaggaatggcagggacgcctgcagggaactgatcggatttttcttcacccacgaccagagcctgactatctacgagtacaggcagttcggcaaaaatcgtaccaatgtcctgccctttatacaaaagagcatttattcccaccagtgcggccgccgaaagggcaaacagtatcggctaggggatttttacgttggcgcaactttgacctttctgagcagcgaccatctgagcctcccagagagtattaaagaaaatactctactaaaattacggataaccaatattgatcagatcgccctggacagtctgaaaacagccagcatggaacaagaggatgacattatcatccaggaaactaacgatcggctagtcttcaaggcgatacaagatgtcctcaaagagaaattgcataagcgaggcgtccggatccttacgggactcgggaaatacttccagcagttggataaagaaggcaacggcctgctcgataaagctgatttcaaacaggcattgaaagttttccatctggaagtatccgagaaagacttcgaaagcgcttggctgattctcaatgataatgggaacggcaaggtcgattacggcgaatttaaacgtggtataattggcgagatgaatgagtataggaagtcttacgtgaggaaagcctttatgaagctcgacttcaacaaatccggaagtgtgcctataattaatattcgtaaatgttactgcgcaaaaaagcacagccaggtaattagcggtcactccaccgaggaggagattaagtcctcattcctggaaacactgaaagtggcctgcagtaaaagtgatgaggtgtcgtatggcgaatttgaggactactacgaggggctcagtatcggcattgtggacgacgaggatttcgtgaatatacttcggacaccttggggaatctag

SEQ ID NO: 181339 - DNA, 1674 bp, synthetic construct
  misc_feature 1..1674: note = Description of Artificial Sequence: Synthetic coding sequence
  source 1..1674: mol_type = other DNA
atgggcaacagcttctgctacaccgccgtgtactgcatgatcaacaccggaacccagatggatctggaggttaagggggtcgcggccaccagtcggtctcagatacagcctttctttggtcgcaaaaagcctctccaacaaagatggacctccgagtcctggacgaatcagaatagttgtcctcccgtggtgccgaggctagacctcggatctttagtggattccgacgacgaagacaatttttcctacattcctctgtctacagccaatctgccgaactctagttctaccctgggttgggttaccccctgccaaactccttacacgcagtaccacctaaacaagctggatcagaacatcatcccagagaatttacccgcccccaccgataagtgcaagctgaagtaccagcagtgtaagactgaaatcaaggaagggtataaacagtatagccaaagaaacgccgagaatacaaaatccaatgttacccataaacagtctcctcgcaataagatcgatgagaagtgcgtgcaggatgaggaagccaatactgacgacctcacgacgttagatcggaaggccatcctgcagcaggggtatgccgacaactcatgcgacaagcagcagcgtgcacggaaattggatgccgaaatcgtcgccgcagagaagaagaaacagatcgtggccgaacaggtcatgattgaccatctgagtcgggcagtgatatctgacccggagcaaaacctcgccatcgagcagaaagaatccgatcatatccttccagacagtaagatgacaccgctgcgatttcgtaagcgaactctgcatgagaccaagatcagaacacatagcacactcaccgagaacgttctgtcacataagttacagtttgacggtcgcatagtgagccggaacggtcgcgatgcatgtagggaactgatagggtttttcttcacccacgaccaaagcctgaccatttatgagtacaggcagtttggaaagaatcgaaccaacgtgcttccttttatccagaaatctatctattcccaccagtgtggccgccgcaagggaaagcagtacaggctgggcgatttctacgttggggcaaccttaacctttttatcttcagatcacctaagccttcccgaatctattaaagaaaacacgttgctgaagctccgcatcacaaacatcgaccaaattgccctggattcactaaagactgcctccatggagcaggaagatgatattatcattcaggagactaacgatcgactggttttcaaagcaattcaggatgtgctgaaggaaaagctacataagcgtggcgtccgaatccttacaggactgggtaagtactttcagcagctagacaaggagggcaacgggcttctggataaggcagactttaagcaggcattgaaggtgttccacctggaagtgtccgagaaagatttcgagtctgcgtggcttattctcaatgataatggcaatggaaaggtggattatggcgaattcaagaggggcatcattggggagatgaacgagtacagaaagtcttatgtgcgaaaagccttcatgaaattagacttcaacaagagtgggtcggtccccatcattaatatccgcaaatgctattgcgcgaagaagcattctcaggtaatcagtgggtag

SEQ ID NO: 181340 - DNA, 615 bp, synthetic construct
  misc_feature 1..615: note = Description of Artificial Sequence: Synthetic coding sequence
  source 1..615: mol_type = other DNA
atggagcaggaggacgacatcatcatccaggagaccaacgaccggctggtcttcaaagccatccaggacgttctgaaagaaaagctgcataagagaggcgtccgcatcctgacaggcctcggaaagtacttccagcaacttgataaggaaggtaatgggctgctggacaaggctgactttaaacaagccctgaaagtttttcatttagaggttagcgagaaggatttcgagtctgcctggcttattctaaacgataatggaaatgggaaagtggactacggggaatttaaacggggcataattggcgaaatgaacgagtataggaaatcgtatgtgaggaaagcgttcatgaaacttgactttaacaaatctgggtcggtccccataataaacatcagaaaatgctactgcgccaagaagcatagccaggtgatttcgggccactccacagaggaagagattaaaagctcattcctcgaaacactgaaggtagcttgttcaaagtccgatgaggtgtcctatggtgaattcgaagactattatgaggggctgtctattggcatagtcgatgacgaagactttgtgaatatccttcgaactccctgggggatatag

SEQ ID NO: 181341 - DNA, 3009 bp, synthetic construct
  misc_feature 1..3009: note = Description of Artificial Sequence: Synthetic coding sequence
  source 1..3009: mol_type = other DNA
atggccgcccacgagtgggactggttccagcgggaggagctgatcggacaaatatctgacatcagggtacaaaacttgcaggtggaaagagagaatgtccagaaacggacattcaccagatggattaacctgcacttggagaaatgtaacccacccctcgaggtgaaggacctgtttgtggacattcaggacggcaagattctgatggcactcttggaggtccttagtggacgcaaccttttacacgagtataagagttcttcccacagaatcttcagactgaataatatagcaaaggccttaaagtttttagaggattctaatgttaaattagtctccattgatgcggcagagatcgcagacggaaaccccagcctggtgttgggtctcatctggaacatcattctttttttccaaattaaggaactgacaggaaacctgtcccgcaacagtcctagctcttcactatcacctggaagtggtggtaccgactccgattcatccttcccgccaactcccacggccgagcgttctgtggcaatttctgtcaaggaccagcgcaaggcaataaaggctcttttggcatgggttcaaagaaaaacaagaaaatatggcgtggccgtgcaggatttcgccgggtcctggcgctccggacttgcattcctcgctgtgatcaaagcaatcgatccgagtttggtggacatgaagcaggccctagagaacagcacaagagagaacctggagaaagcatttagcatcgcccaagatgcactgcacatacctaggctgctggagcccgaggatatcatggtggacacacctgacgagcagtctatcatgacgtacgtggcccagttcctcgaaagatttccggaactggaggctgaggacatcttcgattctgataaagaagtgcctatcgaaagcacctttgtcagaataaaggagactcctagtgagcaggagtccaaggtcttcgtcctcaccgagaacggagaacgaacgtacacagttaaccatgagacctcacaccccccacccagtaaagtgttcgtttgtgacaagcccgaaagtatgaaggaattcagactcgatggagttagctctcacgcactgtccgatagctccacagagtttatgcatcaaattatcgaccaggtgttgcagggcggcccagggaagacttcagatatcagtgagcctagtcccgaaagctctatcctcagtagtagaaaagaaaacggaaggagcaattccctccccatcaagaaaacggtgcacttcgaagctgacacctataaagacccattctgttcaaagaatctgtctctgtgcttcgagggttcacctagggtcgctaaggaaagtctgcggcaagatggtcatgtgctcgcggttgaagtggccgaagagaaagaacagaagcaggaaagctccaagatccctgaatcctcatccgataaagtagcaggcgacatctttttagtggaaggaactaacaataactctcagtcaagctcctgcaacggcgccttagagagtactgctcgccatgacgaggagagtcactcgctgtcaccaccaggggaaaacaccgtgatggccgatagcttccagatcaaggttaacttaatgactgtggaggctcttgaagagggagattatttcgaggcgatccccttgaaagccagcaaatttaattctgaccttatcgactttgcatcaacctcccaggctttcaacaaagtccctagcccacacgaaaccaagccagatgaagacgccgaggcatttgagaaccatgcggagaagctgggaaaacgcagtattaaatctgctcacaaaaagaaagatagcccagagcctcaggtgaagatggacaaacatgaaccgcaccaggattctggcgaagaggctgaaggctgcccctccgccccagaagaaacccccgtagataagaagcccgaggtgcacgagaaggccaagcggaagtccacgaggcctcactatgaggaagaaggagaggatgacgatctacaaggggttggcgaagaactgagtagcagccctcccagcagctgcgtttccttggagactctgggaagtcatagcgaggaaggattggacttcaagccatctccccctctgtcaaaagtgtcggtgattcctcacgaccttttctatttcccacactatgaagtgcccctggcagcggtgttggaagcttatgtcgaagacccggaagacctgaagaacgaggaaatggacctggaggagccagagggctatatgccggatctcgactcccgtgaagaagaagctgatggctcccaaagcagtagttctagcagcgtccctggagaatcacttcccagtgccagtgatcaggtactctacctttctaggggcggggtgggaactacgcccgcttcagaaccagcgcccttagcaccccacgaagatcatcagcagcgagagacgaaagaaaacgaccccatggatagccaccagtcgcaggagtcacccaatttagagaacatagccaaccccctagaggaaaacgtgactaaggagagcatctcttccaagaagaaagagaaacgaaagcacgtggatcacgtagaatcctccctttttgtcgctccgggctctgtgcagagttccgacgacctggaggaagactcatccgattacagtatcccctcacggacgagccattcagatagtagcatctatctacgccggcatacccacaggtctagtgaatcggatcacttttcctatgtccagctcaggaatgcagccgatctggatgaccgtcgtaaccggattctcactaggaaagcgaattcgtccggcgaggccatgtcgctcggaagccactctccccagtccgactcactgacccaactcgtacagcagcctgacatgatgtatttcatcctgtttctgtggctccttgtgtactgtctcttgctcttcccccagctggatgtgtcaaggctatag

SEQ ID NO: 181342 - DNA, 450 bp, synthetic construct
  misc_feature 1..450: note = Description of Artificial Sequence: Synthetic coding sequence
  source 1..450: mol_type = other DNA
atggccgaccagctgaccgaggagcagatcgccgagttcaaggaggctttcagcctgtttgataaagacggcgatggtactataactaccaaagaattggggacggtaatgaggtctctgggacaaaatccaacggaagctgaacttcaggacatgattaacgaagtggacgcagacggcaacggcacaattgattttccagaattccttacaatgatggcccgaaagatgaaggacaccgacagcgaggaagaaatccgagaagctttcagggtgttcgataaggatggcaacggctatattagtgcggccgaactcagacacgtgatgactaatctgggcgaaaagctgacggacgaggaggtggatgagatgatcagggaagctgacatcgacggagacggacaagtaaactacgaagaattcgtgcagatgatgaccgcaaagtag

SEQ ID NO: 181343 - DNA, 450 bp, synthetic construct
  misc_feature 1..450: note = Description of Artificial Sequence: Synthetic coding sequence
  source 1..450: mol_type = other DNA
atggccgaccagctgaccgaggagcagatcgccgagttcaaggaggccttcagtctttttgataaggacggtgacggaactatcaccactaaggagttgggcacagtcatgagaagcctgggacagaacccgactgaagccgaactgcaggacatgataaatgaggtggacgcagatggaaacggaacaattgacttccccgaatttctgacaatgatggctcgcaagatgaaggacaccgattccgaagaagaaattagggaggctttccgagtatttgacaaagacggaaatggctatatctcggcagccgagcttcgacacgtgatgactaacctcggcgagaaactcaccgacgaggaggtggatgagatgatccgtgaggctgacattgacggcgacggccaggtgaactacgaggagttcgtacagatgatgactgccaagtag

SEQ ID NO: 181344 - DNA, 450 bp, synthetic construct
  misc_feature 1..450: note = Description of Artificial Sequence: Synthetic coding sequence
  source 1..450: mol_type = other DNA
atggccgaccagctgaccgaggagcagatcgccgagttcaaggaggcattttccctgttcgataaagacggtgatgggacaatcactacgaaagagctgggtaccgtcatgcgatcgctgggccagaatcctacagaggcagaactccaggacatgattaatgaggtagacgccgatggcaacgggacaatcgatttccccgagtttctgacgatgatggccaggaaaatgaaagatacggatagcgaggaggagatccgggaagcgttccgggttttcgacaaggacgggaatggatatattagcgctgccgagctgaggcacgttatgactaacctgggggaaaagctcactgatgaagaggtggacgagatgatcagggaagccgacatcgatggagatggccaggtgaactatgaagagtttgtccagatgatgactgctaagtag

SEQ ID NO: 181345 - DNA, 450 bp, synthetic construct
  misc_feature 1..450: note = Description of Artificial Sequence: Synthetic coding sequence
  source 1..450: mol_type = other DNA
atggccgaccagctgaccgaggagcagatcgccgagttcaaggaggcatttagcctcttcgacaaagacggagacgggacaatcacaaccaaagaactgggaacagtcatgcgttcacttgggcagaatccgacagaggccgagcttcaggacatgatcaacgaggtagatgccgatggcaatggcaccatagacttcccagagttcctgaccatgatggctcgcaagatgaaggacaccgattcagaagaggagataagagaggctttccgagtgttcgataaggatggcaatggctatattagcgctgccgaactgcgccacgtgatgaccaatctgggagagaaacttaccgacgaggaagttgacgaaatgatacgcgaggccgacatcgacggagatggccaagttaattacgaagaatttgtgcagatgatgacagcaaagtag

SEQ ID NO: 181346 - DNA, 5022 bp, synthetic construct
  misc_feature 1..5022: note = Description of Artificial Sequence: Synthetic coding sequence
  source 1..5022: mol_type = other DNA
atgtggcgggccgagggcaagtggctgcccaagaccagccggaagtctgtgagccaaagcgtcttctgcggaactagcacatattgtgtcctcaacaccgtgccacctatcgaggatgaccacggtaattctaacagctctcacgtcaagatcttcctgcctaagaaactgttggaatgtctgcctaaatgttctagtctgccgaaagaacgccaccgatggaacacaaatgaagagatcgctgcttacttgatcactttcgaaaaacacgaggagtggctgactacttctcctaaaacaagaccgcagaatggttccatgatactgtataacaggaagaaggttaagtatcgaaaggacggttattgctggaagaagcggaaggatggcaagacaacacgggaggaccatatgaagctgaaggttcaaggcgtggagtgtctgtacgggtgctacgtgcattcttcgatcattccaacatttcaccggcggtgctactggctactgcagaacccagacatcgtgctcgtccattaccttaacgtgcctgccattgaagactgtggaaaaccatgcggccccattctgtgtagtattaatacggataagaaggaatgggctaagtggaccaaggaggagctaatcggacaactcaagccgatgttccacggcatcaagtggacctgcagtaacggcaacagtagtagtggctttagtgtcgagcaactcgtgcagcagatcctcgactctcaccaaaccaagccacagcctaggactcacaactgcctttgtaccggctcacttggagccgggggatccgtccaccacaagtgtaatagcgcaaagcaccgcatcatctcgccaaaagtagaaccacgcaccggagggtatggctcacattctgaagtacagcataacgatgtcagcgaagggaagcacgagcacagccattcgaaggggtcatcacgggaaaaaaggaatgggaaagtggccaaaccagtactgctgcaccagtcctccacagaagtgagctccaccaatcaggtcgaggtgccagatacaactcagtccagccccgtttctatttcatcagggttgaacagcgacccagacatggtggacagccccgtggtcactggggtttctggtatggctgttgccagcgtcatggggtctcttagtcagtctgcaaccgtgttcatgagcgaggtgacaaacgaggccgtttatacaatgagccccacagcaggccctaaccatcacctgttatcccccgatgccagccagggactggttctggctgtgtcttctgatggccataagttcgctttccctaccacaggcagcagcgaatcactgtccatgctgcccactaatgtgtccgaggagctggtgcttagtaccacactggacggcggccgtaagatccctgagacgactatgaactttgatcccgactgcttcctgaataatcccaagcaaggccagacttatggcggaggtgggttgaaggctgagatggtgagcagcaacatcagacactcacctcctggagagaggtcgttctctttcactacagtcttaactaaggaaattaaaaccgaggacactagctttgagcagcagatggccaaagaagcatactccagtagtgctgccgcagtagcagccagctcactaacccttacagccggctcatctcttttaccttccggcggcggcctaagtccatctacgaccctggagcagatggacttctccgcaatcgattctaataaggattatacttcaagctttagccagactggacacagtccacacatacatcagacccccagccccagttttttcttacaggacgcgtcgaagcccctgcccgtggagcagaatacccacagctctctgagcgacagcggagggacctttgttatgccaacagtcaaaacagaggccagctcccagacgagttcctgctcaggtcacgttgagacccgtatagaaagcacttcttctctacatctgatgcaattccaggccaacttccaggctatgaccgcagaaggtgaggtaaccatggaaacctcccaagccgccgagggaagtgaagtgttattgaagtcgggtgagttgcaggcgtgctcctctgagcattacttgcagcccgaaacaaacggagttataaggtctgccggcggcgtgccgatattgcctggtaatgtggtgcaggggttatatcctgtggcacagccatcactcggcaatgcctctaacatggaactgtcccttgatcactttgacatttcattctctaaccaattttctgatctcatcaacgacttcatttcagttgagggtggatctagtaccatctatggtcatcagctcgtgtcaggggactctactgccctcagccagagcgaggatggtgcacgcgctccatttactcaggccgagatgtgtctcccatgctgctctccacagcagggctctctgcagttaagcagtagcgaaggcggcgcatccactatggcatatatgcatgtggccgaagtagttagtgcagctagcgcgcaaggtaccctgggaatgcttcagcaatctggccgggttttcatggtcaccgactacagcccagagtggtcttaccctgaggggggcgttaaggtcctgataaccgggccctggcaagaagcctccaacaattacagttgtctattcgatcagatatcagtccctgcttcattgattcaacccggcgtacttaggtgttattgccctgcccacgacaccggcctcgtcacgcttcaggtggcctttaacaaccaaatcataagcaactccgtggtctttgagtataaagctagggcactgccaaccctgccatctagtcagcatgactggttgagtctggatgataaccaatttcgaatgtccatccttgagcgccttgagcagatggagcgtaggatggccgaaatgactggcagtcaacagcataaacaggcctcaggcggtggcagctctggcggagggagcgggagcggcaacggcgggagccaagcgcagtgcgcgagtggaaccggcgcactcggctcatgcttcgaaagtcgtgttgtcgttgtgtgcgaaaaaatgatgtccagggcctgctgggcaaagtccaagcatctcatacatagtaaaacatttagagggatgacgctcctgcacctggctgcagcacaggggtatgcgactttaatacaaacccttataaagtggcgcaccaaacacgctgattctattgatctagagctggaggtggatccactgaacgtcgatcacttctcctgcacccctctgatgtgggcatgtgccttagggcacctagaggcagccgtggtgctctacaagtgggaccgccgggctatttcaatccccgattccctggggcgcctgccactgggcatcgcacgttcacgcggtcacgtgaaactcgcagagtgccttgaacatcttcaacgcgatgagcaggcccaactcggacagaacccgaggatacattgtcctgctagcgaggagccaagtaccgagtcttggatggcccaatggcacagcgaggcaatctctagtccggagattcctaagggcgtgacagtgatcgctagcacaaatcctgagctgcgtcgccccaggagcgagccctcaaattactattctagcgagagccacaaggattaccccgcccctaagaaacacaagcttaaccccgaatactttcagaccagacaggagaaacttctgcccaccgcccttagtctggaggaaccgaacattcgaaagcagagcccgagcagcaagcagtctgtcccagaaacacttagcccatccgagggcgtccgggacttcagccgggagctctcgccgcccacccccgaaactgctgcttttcaggctagcgggagccagccagtcggaaagtggaatagtaaggacctgtatattggggtctccacggtgcaagtgacggggaatcctaagggaacctccgttgggaaagaggctgctcctagccaggtgcggcctcgggagcccatgtccgtgctgatgatggccaatcgagaagtggtcaacacagagttgggctcctacagggattcagcggagaacgaggagtgtggtcagcccatggacgacatccaagtgaatatgatgacattggcagagcacatcattgaagccacccctgaccgcatcaaacaggaaaacttcgtgcccatggagagctccggactggagcggacagatccagccaccattagtagcacgatgagctggcttgcctcttatttggcggacgcagactgtctgccttctgcggcacagattcggtcagcctacaatgaacccttaacaccctctagtaacacaagcctctctcccgtagggtcccccgtctcagaaatagcgttcgaaaagcctaatctgcctagcgctgcggactggtctgaatttctgagcgctagtacctcagaaaaggtggaaaacgagttcgcccagctgacgctttctgaccacgagcagcgtgagctgtacgaagcggcccggttggtacagacagcctttaggaaatacaagggacggccgctgcgcgaacagcaggaggtcgccgccgctgttattcagagatgttatcgcaaatataagcagtatgcactgtacaagaaaatgacacaggcggcgattctgatccaatccaagttcagatcctattacgagcagaagaagtttcagcagtcacggcgggccgccgtgcttatccagaagtattacaggagttataaaaagtgcggcaagcgacggcaggctagacggactgccgttatcgttcagcagaagctccggagcagtctcctaactaagaagcaagaccaagccgccaggaagattatgagatttctgaggagatgccggcactcgcctctggtcgatcataggctctataagcgaagtgagagaatcgaaaaaggccagggaacatag

SEQ ID NO: 181347 - DNA, 1911 bp, synthetic construct
  misc_feature 1..1911: note = Description of Artificial Sequence: Synthetic coding sequence
  source 1..1911: mol_type = other DNA
atgatgagccgggcctgctgggccaagagcaagcacctgatccactccaagacttttcgcggtatgacccttctccatcttgccgcagctcaaggctatgccacactaatacagacactcatcaaatggcgtaccaaacacgcagactcgatcgacttagagttagaggtagatcctctgaacgtggaccatttttcttgcactccactgatgtgggcctgcgccctaggacacctcgaggctgcggttgtactgtacaagtgggaccggagggctataagtatcccagattccctggggaggctgccattgggcatagccaggtcccgtggacatgtcaagctagccgagtgcttggagcacctccagagggacgagcaggcccagctcgggcagaatccccgaatccattgccccgcgtccgaagagccctccaccgaatcttggatggcgcaatggcattccgaagccattagcagtcctgaaatcccaaagggtgtaaccgtgattgcttccactaaccccgagcttcgtaggccccggagcgagccttcaaattattacagcagtgagtcacacaaggattatcctgccccaaagaaacacaaactgaaccctgagtactttcaaactcggcaggaaaagctactccctactgcattgagtctcgaggaacctaatattcgcaagcaaagtccatccagtaaacagtcggtccctgaaactctctccccttctgagggcgttcgggattttagtcgtgagctcagtccccctacccccgaaaccgctgcgttccaagcctcaggcagtcagcctgtgggaaaatggaactccaaagacctctatataggcgtttcaactgtccaggttacaggcaacccgaaggggaccagcgtcggcaaggaagccgccccctcacaggttcgacctagagagcccatgagcgtcctgatgatggcaaatcgggaggtggtaaacactgaactgggttcctatagggacagtgccgagaacgaagaatgcggacaaccgatggacgacattcaggtgaacatgatgactctcgccgaacatatcatcgaagccactcccgatcggatcaagcaggagaacttcgtcccaatggaaagcagcggactcgagagaaccgatccagccaccatcagtagtaccatgtcttggcttgcttcctacctcgcggacgcagactgtctccccagcgccgctcagataaggagtgcttacaacgaacctctgacaccgtcctcaaatacttcactgtcgccagtcgggagcccagtctcagagatcgcatttgagaaacctaatctgccgtcagccgctgactggtctgagtttctaagtgcaagcacctccgaaaaagtcgagaatgaattcgctcaactaacgctctctgatcatgaacagcgtgaattgtacgaggccgcccggctggttcagaccgcattccgcaagtacaaagggagacccctgagagaacaacaggaggtagccgcagcagtgattcaacgatgttaccgtaagtataaacaagggaaaaacatttgtctgaagtacgccttgtacaagaagatgacacaggctgccatactcatccaatctaaattcagatcttactatgagcagaagaaattccagcaaagtcgccgtgctgcggtactgattcaaaagtactataggtcctataagaagtgcggaaaaagacgacaggcacgacggaccgctgtgatcgtgcagcagaagctccgaagtagcctcctgaccaagaagcaggaccaagccgccagaaaaataatgaggtttctaaggaggtgcaggcacagagtgaaggaactaaagaaggctaaggagctggaggacatccagcagcaccccctcgccatgtag

SEQ ID NO: 181348 - DNA, 2151 bp, synthetic construct
  misc_feature 1..2151: note = Description of Artificial Sequence: Synthetic coding sequence
  source 1..2151: mol_type = other DNA
atggcctgccccgtgagccccgaccacaagcaggagggcgcccacgacaccggtcttgtgacactgcaggttgctttcaacaatcagataatttccaactcagtggttttcgaatacaaagcgagggcgctccctacactcccatcgtctcagcacgattggctgagtttggatgataatcagtttcgcatgagtatcctggagaggttggaacagatggagcgacgaatggccgagatgactggctctcagcagcacaaacaggccagtgggggggggtccagcggcggtgggagtggcagcgggaatggaggaagccaggcccaatgcgcaagtggcaccggagcattagggtcctgctttgaaagtcgggttgtcgtggtgtgtgagaaaatgatgagccgcgcttgttgggccaagtctaagcatctcatacattccaagaccttccggggcatgaccctacttcatctggccgccgctcagggatacgcaactcttattcagaccctgataaaatggcggacaaagcacgccgacagcatcgacctcgagctggaggttgaccccctgaacgttgatcatttttcttgtactcctcttatgtgggcctgtgccctgggacacctcgaagccgcagtggtgctgtacaagtgggaccgaagggctatttctatccccgactccttaggaagactgccacttggcattgccagaagcagagggcacgtgaagttagccgagtgccttgagcacttacagcgcgatgagcaggcccagttaggccaaaatcctcggatccattgcccggcctcagaggagccatccactgaatcctggatggcccagtggcattcagaggccatttccagtccagagattcctaaaggcgtaacggtaatcgcctccacgaaccccgaactgcgccgtccccggagcgaaccgtcaaactactacagctccgagagtcataaagattacccagccccgaaaaagcacaaattgaacccagaatactttcagacccggcaggaaaagctcctgcccacagcgctgtctctggaagagcctaatatccgaaaacagtctccttcctccaagcaaagcgtacctgaaaccctctcacccagtgaaggggtacgcgatttctccagagagctatcaccacctacgcctgagacagccgcttttcaggcatctggctcccaaccagtgggcaagtggaatagtaaggatctctacatcggcgtcagcacagtgcaagttacgggcaacccgaagggaactagcgtcgggaaagaagccgccccctcccaggtgaggccgcgggagcccatgtctgttctgatgatggccaaccgggaggtggtgaatacagagctcggttcctatcgggacagcgcggaaaacgaagagtgcgggcagcccatggacgacattcaggtaaacatgatgacactcgccgagcatatcatcgaagcaacgctttcaagcactatgtcctggctggctagctacctcgctgatgctgactgcctgccatctgccgcccagatcaggagcgcatataacgagccacttaccccatcttccaacacaagcctcagccctgttggaagcccagtgtctgaaatcgcctttgaaaaggttgaaaatgagtttgcccaactgaccttgtctgaccatgagcaacgggagctgtacgaggccgctcgcctagtgcagaccgccttcagaaagtacaagggcaggcccctgcgcgagcaacaggaagtagcagccgccgtgattcagcgttgctaccgaaagtacaagcagtacgcattgtataaaaagatgactcaggctgcaatcctgatccagagcaaattccgctcatactatgaacagaagaagttccagcaatctcgcagggctgccgtgttgatccagaagtactacaggtcctacaaaaaatgcggtaagcggcgacaggccaggcgtactgccgtcattgtgcagcagaagttacgttccagcctactgactaagaagcaggatcaggcggcgcgcaagattatgcgctttctcaggcgttgcagacaccgggtaaaggaactcaagaaagccaaagaattggaggatatccagcagcatcccctggccatgtag

SEQ ID NO: 181349 - DNA, 4980 bp, synthetic construct
  misc_feature 1..4980: note = Description of Artificial Sequence: Synthetic coding sequence
  source 1..4980: mol_type = other DNA
atgtggcgggccgagggcaagtggctgcccaagaccagccggaagtctgtgtcccagagcgtgttttgcggtacatcaacatactgtgtcctgaacactgtcccaccgatagaggacgatcatggcaactcgaactcttcacacgtgaaaatctttctgccgaagaagctcctggaatgcttgcccaaatgcagcagcctacctaaggaacgccatcgctggaacaccaacgaggagatcgctgcatacctcatcaccttcgaaaagcacgaagagtggcttactacttccccgaagaccagacctcaaaatggctcaatgatcctttacaacaggaaaaaggttaaatatcgcaaggatggctactgttggaagaagagaaaagatggcaaaacaacacgggaggaccatatgaagctgaaggtgcaaggggtcgaatgcctctatggatgttatgtacactcatcaattattccaacttttcaccgtagatgttactggctacttcagaaccccgacatcgttctggtccattatctgaatgtgcccgccattgaggattgcggaaagccgtgcggcccaatcctttgtagtattaatacagataagaaggaatgggcaaagtggacaaaagaagaattaatcggccaactaaaacctatgttccacggaatcaagtggacttgctctaacggaaatagctcttccgggtttagtgtggagcagctggtccagcagattctggactcccatcagaccaaacctcagcccaggactcacaattgtctgtgcaccgggagcctcggagcaggaggttcagtacatcataagtgcaactccgccaagcacaggattatcagcccaaaggttgaacctcggaccggtggatacggttcccactcagaggtgcagcacaacgatgttagtgaaggcaaacacgagcattcccattctaaagggagtagtagggagaagagaaacgggaaggtggcaaagccagtgctactgcatcagtcgtctacggaagtgtcctccaccaatcaagtcgaggtacctgatactacacagagctctcctgtctcaattagtagcggcttgaactctgacccagatatggtagactcacccgtagtgacaggcgtttctggaatggctgtggctagcgtcatgggatccctgagccagtcagcaacagtattcatgtctgaggtgaccaacgaggcagtatatacaatgtcccccactgccggacccaaccatcatctgttgagcccagatgcctctcagggtcttgtccttgcagtgagcagcgacggccacaaatttgctttccctactacagggtccagtgagtctctgtcaatgctgccaacaaatgtgtctgaagagctggtactttccacaaccttggatggaggtcgtaaaatccctgaaactaccatgaacttcgaccctgactgttttctgaacaacccgaaacagggccaaacctatggcggcggcgggcttaaagccgagatggtctctagcaatattagacattcacctcctggcgaaaggtccttcagctttaccaccgtcctgaccaaagaaatcaaaacggaggatacgagtttcgaacagcaaatggccaaagaagcttattccagtagtgccgcggcagtggcggcatcttcattgacactgacagccggctcctccctgttaccgagcggcggcgggctcagtccctcaactaccctggaacagatggacttctccgctatagactccaacaaagattacacctccagcttttctcagacaggtcattcacctcatattcatcaaactcctagtccctcgttttttctccaggatgcctctaagcctctgccagtggagcaaaatactcactcctcccttagcgattcagggggcaccttcgtgatgcccacagttaagaccgaagcgtcaagtcagacctcctcatgctctggccatgtggagactcgaattgagagcaccagctccctgcacctcatgcagtttcaagctaacttccaagccatgactgcagaaggggaggtcaccatggagacaagtcaggccgccgaggggtccgaggtgctgcttaagagcggcgagctgcaggcttgctccagtgaacactacctgcagccagaaaccaatggagtgataaggtcagctggaggcgtaccaatcctgccaggaaacgttgtccagggcctgtaccccgtggctcagccatccctgggtaacgcctccaacatggagctgtctctggaccattttgatatttcattctccaatcagttctccgacctgatcaatgattttatcagtgttgaaggcgggtcttcaacaatctacggacatcagcttgtgtctggtgattccaccgcactgagtcagtcagaagatggtgctagagcccctttcactcaagcggagatgtgcctcccatgctgctccccacaacagggcagtcttcagctgtctagcagtgaggggggtgcctctactatggcctacatgcacgtcgcggaggttgtcagtgccgctagtgcgcaaggtactctgggaatgctgcagcagtccggccgggtgttcatggtcaccgactattcccccgagtggtcataccccgagggtggcgtgaaggtactaatcaccggaccctggcaggaagcctccaacaattatagctgtctgtttgaccaaatctctgtgcccgcgagcctgattcaacccggggtgctccgctgttattgtcccgcacacgacacaggcctggtgactctacaggttgcattcaataatcagattattagtaatagcgtcgtgtttgagtacaaggcccgagcactccccactctgccatcatcccagcatgattggctgtcactggacgacaatcagttccgcatgagtatcttggagagactggagcagatggaaaggagaatggccgaaatgacaggctcacaacagcacaagcaggcctccggcgggggtagttctggtggcggctctggttccggaaacggagggtcacaggcccagtgcgcatcgggcacaggagcactcgggtcctgctttgagtctagggtcgttgtggtgtgcgagaaaatgatgagtcgggcgtgttgggctaagagtaagcatctgattcactctaagacattcaggggtatgactttgctccacctggccgcagcacaggggtacgccacactgatccaaactcttattaaatggcgcactaagcacgctgactccatcgatctcgagctagaggtggaccccctgaatgtggaccactttagttgtactcctctgatgtgggcctgcgccctgggacacctggaagctgcagtagtgctgtataaatgggatcggagagccatatcaataccggactccttgggacgcttgcctttaggaattgcccgtagtcgtggacacgtgaaactcgccgagtgcctagaacatttacaaagagatgagcaggctcaactcggacagaacccacgcattcactgtccagcctctgaagagccttccaccgagagttggatggcccagtggcatagcgaggccattagcagtccagaaataccgaagggtgttacagtcatcgcctcaactaatcctgagctgaggagacctagatccgaaccctccaactattatagcagcgagagccataaggactaccccgccccaaaaaaacacaaactcaaccctgaatactttcagacacgacaggaaaagctcctgcctacagcccttagcctggaggagcccaatatcaggaagcaaagcccatccagcaaacaatcagtgcctgaaaccctgtcccctagcgagggagtgcgtgacttcagtagagaactcagcccgcccactcctgaaacggctgccttccaggccagtgggtcccaaccggtgggcaagtggaacagcaaagacctttacattggagtttccactgttcaagtgacaggcaaccctaagggaacatccgttggtaaagaagctgcccccagccaggtgagacctagagaaccaatgtctgtgctgatgatggctaaccgcgaggtggtgaacaccgagctcggctcatatcgggatagcgcggagaatgaagagtgtggccagcctatggacgacatccaggtgaacatgatgacactggccgagcacatcatcgaggccacacccgaccgcatcaagcaggaaaattttgtccccatggaatctagcggcttggagcgcacagaccccgcaactatctcttccacaatgagctggctcgcctcctacttagcagatgccgactgcctcccgtcagcggcacaaattagactgtcgccggtgggcagtccagtctcagagatagcttttgagaaacctaacctgcctagcgctgctgattggtccgaatttctgagtgcatccacctccgagaaggtggagaatgagttcgcacagctgactctgtcggaccacgagcaaagagagctctatgaagctgcccggctggtgcagactgcatttcgtaaatataagggtcgtcctcttcgcgagcaacaggaggtggccgctgccgttatccagcggtgctatcggaagtataagcaatatgcgctgtacaaaaaaatgacccaggctgcaattctcatacagtcaaaatttcggagctattacgaacagaagaagtttcagcagtcaagacgggcagcagtactaatccagaaatattacagatcctacaaaaaatgtgggaaaaggcggcaggctagacgaaccgcagtgattgtccagcagaagctccggagctccctgttaacgaagaagcaggaccaggcagcgaggaagatcatgcgcttcttgaggcgctgccgacatcgagtgaaagaactgaaaaaggcgaaagaactggaggacatccagcagcaccctctggcaatgtag

SEQ ID NO: 181350 - DNA, 243 bp, synthetic construct
  misc_feature 1..243: note = Description of Artificial Sequence: Synthetic coding sequence
  source 1..243: mol_type = other DNA
atgtggcgggccgagggcaagtggctgcccaagaccagccggaagagtgtgtctcagtctgtgttttgcggcacatctacttactgtgtcctgaatacagtgccaccaatagaggatgatcacggtaatagtaacagtagtcacgtcaagatcttcctgccaaagaagctcctggaatgtctgcctaaatgcagtagcctgcccaaggagcgacaccgatggaatacaaacgagcggtcttag

SEQ ID NO: 181351 - DNA, 306 bp, synthetic construct
  misc_feature 1..306: note = Description of Artificial Sequence: Synthetic coding sequence
  source 1..306: mol_type = other DNA
atgtggcgggccgagggcaagtggctgcccaagaccagccggaagtccgtgtcacaatccgtcttctgtggcacttctacatattgtgtgctgaacacagttccccctatcgaggatgatcatggcaattctaactccagccatgtcaaaattttcctcccaaagaaactgctggagtgtttgccaaagtgttcctctctgcctaaagagcggcaccgctggaatacaaacgaagcacttactactcacctctttatgggagccgctaaaaagcgcgaccctcagagctggagtcatgagggttag

SEQ ID NO: 181352 - DNA, 3609 bp, synthetic construct
  misc_feature 1..3609: note = Description of Artificial Sequence: Synthetic coding sequence
  source 1..3609: mol_type = other DNA
atgaacaccaaggacaccaccgaggtggccgagaacagccaccacctcaagatcttcctcccaaagaagctgctcgaatgtttgcctcgatgtccgctattgcctcctgaacgactgcgctggaacaccaacgaggaaatcgcgagctacctcatcacgtttgaaaagcacgacgagtggctgagctgtgcccctaagactagacctcagaatggcagcataattctgtacaaccgcaaaaaagtgaagtatcgcaaggatgggtacctatggaagaagcggaaggatggcaaaacaaccagggaagaccatatgaaattaaaggtccagggcatggagtgcctgtacggatgttacgtccattctagtatagtccctacatttcaccgtcggtgctactggctgctgcagaaccccgatatagtcctggtgcactacctgaatgtcccggcattggaggattgtggtaaaggctgcagtcctatcttctgttcgatatcatctgaccgtcgcgagtggctgaagtggagcagagaggaattgctgggacagctcaaacctatgtttcacggtataaagtggtcatgcgggaacggcacggaagaatttagcgtcgaacaccttgtgcagcagattctggacacacaccctactaaaccagccccgcggactcatgcttgtctgtgttccggagggcttggctctgggtcccttacccacaaatgttcaagcactaagcataggattatcagcccaaaggtagaaccccgcgcgctgacactcacctccatcccgcatgcccacccacctgaacctcccccgctcattgccccacttcctccagaattgcctaaggcgcacacttcaccctcttcatctagcagttccagcagcagcggattcgccgaaccattggagatccgaccatcccctccaacttctagaggagggagctcccgaggggggacggcaatactgcttctcacgggattagagcagagagccggcgggttaacaccgacacgacacctagccccgcaggccgatccacggccatccatgtctcttgccgtagtggttgggacggagccgtctgcccctcctgcacctccttcaccagctttcgacccagatagatttctgaactctccacagcgagggcagacttacggcgggggacagggagtgtccccagacttccctgaggcggaggccgcccacacaccgtgctctgctctagaacctgccgcagctctggagcctcaggccgccgcacgaggcccccccccccagtccgtggccggcggtcgcaggggtaactgcttctttatacaagacgatgactcaggggaagagctaaagggccacggcgctgctcctcccattccttctccacccccctcccctcccccatcgccagcgcctctggagccttctagcagagtaggccgaggcgaggcactttttggggggccagtgggagcgtccgagctggagccattttctttaagtagctttccagatctgatgggagagctcatctccgacgaggccccctccatcccagcaccgacaccccaactatcaccagccctctctacgattactgacttttcccccgagtggtcttatccggaggggggggtgaaggtgctcataacaggcccttggactgaggccgcagaacattacagctgcgtgttcgatcacatcgcagtccccgcctctttggttcagcccggagtcctgcggtgttactgcccagcccacgaggtggggctcgtgtccctgcaggtagccggacgggagggcccgctcagcgcctcggtcttgtttgaataccgggcccggcggtttctttcactgccttctacacagttggactggctgtcattggatgacaatcaatttcgaatgagtatattagagaggctggaacagatggagaaaagaatggccgaaatcgctgccgccggacaagtgccttgccaggggcccgacgcacccccagtacaggacgagggtcagggccccggattcgaagctcgggtagtggtcttggtcgaaagtatgattccacgctccacatggaaaggacccgagcggctggctcatgggtctcccttccgaggaatgagcttgctacacctcgctgctgcccagggctatgcccgtctgattgagacgctgtctcaatggagaagcgtggaaaccggtagcctggacctggaacaggaggtcgacccattaaacgttgaccattttagctgcacaccgttgatgtgggcgtgtgccctcggccatctcgaagccgccgtcttgctctttcgctggaaccgacaggcccttagcatcccggatagcctgggccgattgcccttatccgtcgctcattcccgaggccacgtcaggcttgcacggtgcctggaagagctgcagagacaggaaccttcagtggagccacctttcgcgctgtctcccccttcctcatcacctgatacaggcctaagctcggtgtcatcccccagcgagcttagtgatggtactttctccgtgacctccgcctattcctctgccccagacggctcccctcctcctgccccactgccggcttcagagatgactatggaagatatggcacctgggcaactcagcagcggggtgccggaggcacctttgctgttaatggattacgaggccactaactccaagggaccactttctagtctgccagctctgcctccagcctcagacgatggggctgcacctgaggatgccgatagtccccaggctgtggacgttatcccggtcgacatgatcagcctagcaaagcagattattgaggccactcctgaaagaatcaagagggaggacttcgtgggtctacccgaagcaggggctagcatgagagaacgcaccggtgccgttgggttatcagagaccatgtcgtggttggcttcatacctggagaatgtggatcactttcccagcagtacacctccttcggaactcccattcgaacgcggtagactggctgtgccctccgccccctcctgggccgagttcctgagcgcaagcacttcaggcaagatggagagtgactttgctctgcttacattatccgatcacgagcagcgagagctctacgaagccgcgcgcgtgatacaaactgcttttcgtaagtataaaggtaggagattaaaggagcaacaggaagtggccgcggctgtaatccagaggtgctacagaaagtacaagcagctaacatggatagctctcaagtttgctctgtataaaaaaatgacccaagccgcaattcttatacagtctaagttccggagttattatgaacagaaaaggtttcaacagtctcgtcgcgctgctgtactgatacagcaacactatcgatcctaccgccgcagaccgggaccacctcaccggacttcggcaacacttccagcgagaaataagggctccttcctgactaaaaagcaggatcaggctgctcggaagattatgcggttcctgcggcgctgtcgccaccgcatgcgcgaactaaagcagaatcaggaactcgaggggctaccacaaccaggtctggccacgtag

SEQ ID NO: 181353 - DNA, 3588 bp, synthetic construct
  misc_feature 1..3588: note = Description of Artificial Sequence: Synthetic coding sequence
  source 1..3588: mol_type = other DNA
atgaacaccaaggacaccaccgaggtggccgagaacagccaccacctgaagatttttcttcccaagaagctcctggaatgtctgcctagatgccccctgctgccaccagagaggctgcgctggaatactaacgaggaaatagcttcttaccttattacattcgagaaacatgacgagtggctgtcttgcgctccaaagacccgaccccagaacggatcaataatcctgtacaaccgaaaaaaggtcaagtaccgaaaggacggctatctgtggaaaaagcggaaggacggcaaaactactcgggaagaccacatgaagctcaaagtgcagggaatggaatgcctgtatgggtgttatgttcacagcagcattgttccaacattccatcgacgatgttattggttattgcaaaaccctgatatcgtgctggttcactacctgaatgtgcctgctctcgaagattgtggcaaagggtgctcacctattttctgttctatcagtagcgatcgcagagaatggctgaaatggagccgggaagagctgttgggccagctcaagcctatgttccacggtataaagtggagttgcggcaatggcactgaagagttcagcgtggagcacctcgtgcagcagatcttggacacgcaccccacaaaaccagcaccacgaacgcacgcctgtctctgcagcggggggcttggctctggcagcctaacccataaatgttcctcaaccaagcacaggataatctcgcccaaggtggagccccgcgcgttaactctgacaagcataccccacgctcacccacctgaaccaccccccctcatcgccccactccctcccgagttaccaaaagcacacacctcgccgagctcttccagctcgagcagttcatctggctttgctgaaccactggaaatacgaccatcccccccaacatcgcgtggggggtctagccggggggggactgccatactgctgcttacggggttagaacagcgagcaggggggttgacaccaacacggcaccttgcaccgcaagctgatccacgcccttccatgtcacttgccgtggtggtgggaacagagccctcggcgccacctgctccgccatcccctgcttttgatcctgaccgctttctcaattcaccccagagggggcagacatatggcggaggacaaggagtgagtccggactttccagaggccgaggctgcccacactccatgcagcgccctggagcctgctgcagctctagaaccccaggcagccgcacgcgggccccctccccagtccgtagctggcggacggcggggcaattgcttcttcatccaagatgatgactctggggaggagctgaaggggcatggggcggctccccctatcccctcaccccccccctcgccacctcccagccctgcccctctcgagccaagctcaagagtaggccgtggagaggccttgtttggcggaccagtaggagccagtgaactggagcccttctccctctcgagtttcccggacctgatgggcgagctgatttctgacgaggccccctctattccagccccgacccctcagttgtcccctgccttgagtacgatcaccgacttttctccagaatggagttacccagaaggcggggttaaagttctaatcaccgggccttggacggaagccgccgagcactactcctgcgtttttgatcacatcgccgtgcctgcatccctcgttcagcctggcgtcctgcgctgctactgtccagcacacgaggtgggtttggtgtccctacaggtcgccggtcgggaaggacccctgtctgcatccgtgttgtttgagtaccgggcccgtcgttttctctctctaccttctacccagctggattggctgagccttgatgataaccaattccgcatgtccattctagagaggctcgagcagatggagaaacggatggccgagatcgccgcagcaggacaagtgccatgccagggcccagacgctcccccagtccaggacgaaggccaaggccccggattcgaagcacgcgtggtcgttcttgttgagtccatgattccgagaagcacatggaaaggccccgagcggcttgctcacggcagcccgttccgaggaatgtcactgctccacctcgcagctgctcaaggctacgccagacttattgagacactctcccagtggcgttccgtcgagacaggctcactggacctggagcaggaggtcgaccctctgaacgtcgaccatttctcctgtaccccactcatgtgggcctgtgctctaggtcatctggaagcggcagtcctgctgtttcgctggaaccgccaggccctctcaattcctgattccctgggacgacttccccttagtgtggctcactcgagaggacacgtgcgcctcgctaggtgcctcgaggagctgcagcgacaagagccatccgtggaaccgcctttcgccttgagccctccaagcagctcaccagacacaggcttgtcttcagtttccagcccatcagaacttagtgatgggaccttctcggtgaccagtgcctactcgtccgctcctgatggtagtcctccacctgcgcctctccctgcttcggaaatgaccatggaggatatggcaccagggcaactctcctccggcgtccccgaggctcccctccttctgatggactatgaggctactaacagtaaagggcccttgagctcattgccagcccttcctcctgcatcggatgacggtgcggctccagaggatgctgatagcccccaggcagtggatgttatccccgtggacatgatctctctggccaaacagattatagaggctacccctgagagaattaaaagagaggactttgttgggctgccagaggcaggtgcctctatgagggagcgaacaggcgccgtgggattgtctgagacaatgagctggctggcaagttacctcgagaacgtagaccattttccttccagcactcctccgtccgaattgccgttcgagcggggccgacttgccgttccgagtgctccctcctgggcagagttcctgtctgcctcaacctctggaaaaatggagagcgacttcgccctgttgacactgtctgaccacgaacaaagggaactgtatgaagctgctcgtgtcatccagaccgcttttcggaagtacaaaggtcgaaggttgaaagagcaacaggaagtggctgcggctgtgatacagcgctgttatcggaagtacaagcagttcgctctgtacaagaaaatgacgcaggccgccattcttatccaatccaagttccgctcttactatgagcagaaaaggttccagcagtctcgaagggcggccgtcttgatccagcagcattatagatcttacaggagaagacccggacctcctcaccggacctctgctacgctgcccgcccggaacaaaggttcctttcttaccaaaaagcaggaccaggcagcgagaaagatcatgcggttcttgcgcagatgtaggcaccgaatgcgtgagctgaagcagaaccaggaacttgaaggattgccgcagcctgggttagctacttag

SEQ ID NO: 181354 - DNA, 3606 bp, synthetic construct
  misc_feature 1..3606: note = Description of Artificial Sequence: Synthetic coding sequence
  source 1..3606: mol_type = other DNA
atgggcaccgacagccccagcccccggcccctgcggcccggcgtgaccctgcctcccggggcattgacgatgaataccaaggatactacggaagttgcagagaattcacaccacctgaagattttcctgcctaaaaagctcctggaatgcctgccgcggtgtcccttgctccctcctgagagacttcgctggaatacaaatgaggaaattgctagctacctgatcactttcgagaagcatgacgagtggctgtcctgtgcccctaaaactagaccccagaacggtagtatcatcctttataacagaaaaaaagttaagtatcggaaggatggctatctgtggaaaaaacgcaaggatggaaaaaccacacgtgaagatcatatgaagctgaaagtacaggggatggagaaccctgatattgtgttagtgcattacctcaatgtgccagcactggaggattgtggcaaagggtgctccccaatattttgttccatcagcagcgacaggcgggagtggctcaagtggtctagggaggaacttcttggacaactcaagcccatgtttcatggcatcaagtggtcatgtgggaacgggacagaggagttttcagttgaacatcttgtccagcagatcttagatacacaccccactaagcccgctccccggactcacgcgtgcctgtgctccggcggtctgggctccgggtccttaacccacaaatgcagttcaaccaaacaccgcattatcagcccaaaggtggaacctcgtgccctgactctcacgtccatcccccacgcccatccccccgagccacccccgctgattgcccctctgccccccgagttacctaaggcccatacatctccctcttcaagcagttccagttcttcttcgggtttcgcagagcccctggagattagaccaagcccaccaacatccagaggcggctccagcaggggcggcacggctattctcctcctgaccggccttgagcagcgtgccggtggtctaacgcccacgcgtcatctggctccacaggccgatccccggccaagtatgtccctcgccgtggtggttggtactgagccaagtgctccgccggcccccccaagtccagcctttgatcccgaccggtttctgaatagtccccagcgcggccagacctacggcggaggccagggagtgagccccgactttccggaggctgaagccgcacatacaccctgctccgccctggaaccagcagccgctctggaacctcaggccgcagcaagaggtccaccgcctcaaagcgtcgctggagggcgtcgtggcaattgctttttcatccaggacgacgacagcggggaggaactgaaaggtcacggcgcagcacctcccattcctagtccccccccatcaccccctccgtcgccggccccactagaacctagctcccgcgtgggcaggggcgaggctcttttcgggggacctgtcggggcttccgagctggagccctttagtctgtcgagctttcccgacctgatgggtgagttgatctccgatgaggcaccatcaatccccgcccccactcctcagctgtctccagctctgtcaaccattacagacttctcgccagagtggtcataccctgaaggcggagtgaaggtgctcataaccggaccatggactgaggccgcagaacattattcgtgtgtgttcgaccacattgctgtacccgccagtctggttcagccgggggtgttgcgctgctactgcccagctcatgaggtcgggcttgttagcctgcaggtggcggggcgggaagggccattaagtgcttcagtccttttcgaatacagggcacggcgcttcttgagtctaccctccacgcaactcgactggctttccctggacgacaaccaattccgaatgtcaatcctggaacggctggaacagatggaaaagcgcatggccgagatcgctgccgccggtcaggtgccatgccagggccccgacgcacctccggtacaagatgagggtcaaggccctggatttgaagcccgggtggtcgttctggtagagagcatgattcccaggtctacatggaaaggcccagagagattggcgcacgggagtccattccgcgggatgtcccttcttcaccttgccgcagcccaaggctatgctagactgatcgaaacgctgagccaatggaggtctgtcgagactggaagcctagatctcgagcaggaggttgacccattgaatgtggatcacttctcatgtacccctctgatgtgggcttgtgccctcggacatctggaggctgccgtccttctttttaggtggaacaggcaggctctgagcattccagactccctcgggcgtctgcctctgagtgtcgctcattccagaggacacgtgagactggcacgatgcctagaggaactgcagcggcaggagccctctgtcgagcctcctttcgctctcagccctccatcgtcatcccctgacacaggccttagttctgtgtcaagcccgagcgagctctcagacggcaccttctccgtgacctccgcctactctagcgcgccggacggttcaccaccccctgctccgctgccagcttcagaaatgacgatggaagacatggccccagggcagctgtcgtctggcgtcccagaagctcctcttctgctgatggattatgaggccactaacagtaaggggcctctctcttcattacctgccctcccccctgcctcagacgatggcgcggcccccgaggatgctgactctcctcaggcagttgacgtgattcccgtggatatgatttccctggccaagcaaataatcgaggccacacctgaacgcatcaagagagaggattttgtaggcctgccggaggctggtgcatccatgagagaacgtactggagcagtgggactgtcagaaacaatgagttggttggcaagttacctcgagaatgtggaccatttcccctcttccacgccccctagtgagctccccttcgagcgtggccggctcgccgttcccagcgcaccgtcctgggcagagtttctgagcgccagcacctccgggaaaatggaatcagattttgcgctgctgactctgtctgatcacgagcagcgcgagctgtacgaagccgcacgggtgattcagacagcgtttcgcaagtacaaagggagacgcctgaaggagcagcaggaagtagcagccgctgtcatacagaggtgctacaggaagtataaacagctgacttggatcgctctcaagttcgcactgtacaaaaaaatgacgcaggctgcgatactgatccagagtaaatttcgaagttactacgagcagaaacgtttccagcagagtcgtagggcagctgtgcttatccagcagcactacaggtcttacagacgccgcccgggtcctccgcaccggacatcggccacactgcccgctagaaataaggggagcttcctgacaaagaagcaggatcaggcggcccgtaagattatgcggttcctgcgtaggtgtcgccaccgaatgcgggagctcaagcagaatcaggaactggaggggctgccccagccaggcctggctacgtag

SEQ ID NO: 181355 - DNA, 3594 bp, synthetic construct
  misc_feature 1..3594: note = Description of Artificial Sequence: Synthetic coding sequence
  source 1..3594: mol_type = other DNA
atggccgccgccgccgtgacccggggcacccccggcgagaacagccaccacctgaaaatattcctgccaaaaaagctccttgagtgccttccccgatgccccctgctcccacccgagcgccttcgttggaacacgaatgaggaaatcgcgagctatctaattaccttcgaaaagcacgacgaatggctcagctgtgctcccaaaacgcgtccccagaacgggagcatcatattatataacagaaagaaggtcaaatatagaaaggatgggtacctctggaaaaagcggaaggatggaaagacaacccgcgaggaccacatgaaactcaaggtgcaaggtatggagtgtctgtacggctgctacgtacactcttctattgtgccaacattccatcgcagatgctattggctgctgcaaaacccggatatagtgcttgtgcactatctgaatgtgcccgctctcgaagattgcggcaaggggtgctctcctatcttctgtagtatttcatcagatcgaagggaatggctcaaatggtcacgggaagaactgctgggacagctcaagcccatgtttcacggcatcaaatggtcctgcgggaatggcactgaagagttcagtgtggagcacctggtgcagcagatactggacactcacccaactaagccagcaccacgcactcatgcatgtctgtgcagcggcggactgggtagcggcagcttaacccacaaatgctcgtccacaaagcacaggattatctctccaaaagtcgagcctagagcactgacgttgacctctattccccacgcacatcctccagaacctccaccactgattgccccactgccaccggagctgcccaaagcacatactagcccatcttccagtagctcatcctcctctagcggattcgcagagcctctggaaatacggccatcaccgcccacttcaagaggaggttcgagccgaggaggcacagctattctgctcctaactggcttagagcagcgggctgggggattaacccccactaggcacctggcaccacaggcagatccacggccttccatgagcttggctgtggtggtaggcacagaaccaagcgcacctcccgcccccccttcacccgctttcgacccagacaggtttttgaattcccctcagagaggtcaaacctacggcggtggccagggcgtaagccccgactttcccgaagcagaggctgcccacaccccatgcagtgccctggagccggccgctgctctcgagccacaggcagccgctcgtgggccccccccccagtctgtcgcgggcggccggaggggtaattgcttttttatccaagatgacgactcaggagaagaactgaagggccacggcgccgcccctcctattccttcccctcccccgagccccccgccctctccggcgccactagagccatctagtagagtcggaagaggagaagcgctgtttgggggaccagtaggcgcatccgaattggagcctttctcactatctagcttccctgatctgatgggggaactgatttctgacgaagctccttctattcccgcacctactccccaattgagcccagccttgagtaccatcactgatttcagccctgagtggagctatcccgaaggaggcgtaaaagtgcttatcaccggaccctggactgaggcggccgagcactatagctgcgtcttcgaccatatcgcagtcccagctagtcttgtgcagccaggtgtgcttcggtgttattgtcccgcccacgaagtcggattagtctcactgcaagttgccggaagggaaggccccctcagtgctagcgtcctgttcgagtatagagctcgccgatttctgtctctccctagcacccaactcgactggctctcgctggatgataaccagttcagaatgtccattcttgagcggcttgagcagatggagaagcggatggcggagattgcggcggccgggcaggtgccatgtcaaggtcctgacgcccctcccgtccaggacgaaggacaggggccaggatttgaggcaagagtcgtggtcctcgtcgagtccatgataccgcgtagcacgtggaaggggcctgagaggctcgcacacggatctccgtttcggggcatgtccctcctccacttggctgccgcccagggttacgccagactgatcgaaaccctgagtcagtggcgctcagtggaaactgggtcccttgacctggaacaagaagtcgatccgctcaacgtcgatcatttctcgtgtactccgctgatgtgggcttgtgccctgggacacctcgaggctgccgtcctgctcttccggtggaatcgtcaagccctttctatcccagattctttaggtaggttgccgctctctgtcgcccattctagggggcatgtgcgcctcgctaggtgcttggaggagctgcagaggcaagaaccatccgtcgaaccacccttcgctctgagccctccgtctagctcccctgatactggtctgtcaagcgtctccagcccttcggagctgtccgatggtacttttagtgtgacttctgcctactcctccgctccagacgggtctcccccaccggcccccctgcctgcatctgagatgacaatggaagacatggcccccggccaactgtcaagtggcgtccccgaggcacccctgttgctcatggactacgaggccaccaacagcaaggggccgctgagtagcctgcctgcactcccacctgcatctgacgacggcgcagcacctgaggacgcagatagcccccaggccgtggatgtgatacctgtagatatgataagtttagctaaacagattatcgaggcaactcctgaacgcattaaaagagaagacttcgtcggcctacctgaagccggagcatccatgcgggaacgtaccggggccgtgggtctaagcgaaactatgagctggctcgcctcctacctagagaatgtggaccactttccgagcagcacgcctccttctgaactccctttcgagagaggccgcctggctgtgccctcagcgccatcatgggcggagtttctgtctgcaagcaccagtgggaagatggaatctgattttgctctgttgactctatccgaccatgaacaacgagagctttatgaagctgcgcgggtgatccaaacagcattcagaaagtacaaggggaggcgcttgaaggagcaacaggaggtcgccgcagccgtcatccaacgctgttatcgcaaatataagcagtttgcattgtataaaaaaatgactcaggctgctattttaatacagtcaaaatttcggagctattatgagcaaaagaggttccagcagtccaggcgcgctgcagtactgatccagcagcactaccgctcttacagacgccgacccggacctccacatcggacctccgcgactctgccagccaggaataagggctcattcctgacaaagaaacaggatcaagctgctcggaaaattatgcgcttcctgaggaggtgccggcacagaatgcgcgagcttaagcagaaccaggagctggagggcctgccgcaacccggactggcaacctag

SEQ ID NO: 181356 - DNA, 3726 bp, synthetic construct
  misc_feature 1..3726: note = Description of Artificial Sequence: Synthetic coding sequence
  source 1..3726: mol_type = other DNA
atgggcaccgacagccccagcccccggcccctgcggcccggcgtgacgctacccccaggcgccttgacaatgaacacaaaagataccactgaggttgctgaaaactcacatcatctgaaaattttcctgcccaaaaagctgctggagtgtctgccgcgttgtcccctgctcccccctgagcggctccgctggaacacaaacgaagagatagcttcgtacttaatcacatttgaaaaacatgacgaatggctctcttgtgctcccaagaccaggccacaaaatgggtcaatcatcctctataaccggaaaaaggtgaaatacagaaaagacggctacctgtggaaaaagagaaaagacggcaagactacccgggaagatcatatgaaactgaaggtacagggaatggagtgtctgtacggctgttatgtgcattccagcattgtgcctacctttcatagacggtgttactggcttctgcagaaccccgacatagttttagtacattatctgaacgttcctgccttggaggactgcggcaaagggtgttctcctatcttctgcagtatctccagcgacagacgtgagtggctcaagtggtcacgggaagagcttctgggacagctcaagccaatgttccacggcatcaagtggtcctgcggaaatggtacagaggagtttagtgtggagcatttggtccagcagattctggatacgcatcctactaagcccgctcctaggactcatgcctgcttatgctcaggcggactgggaagtggtagtttgactcataagtgcagctccaccaagcacagaatcatatcccccaaggtggagcctagggctctgacacttactagtataccccacgcgcacccaccagagcctccacctctgatcgcccctttgcctcccgaattaccaaaggctcatacatccccatcttcttcttcctcctcctcttctagcggttttgccgaacccctggagattagaccctcccctcccacaagcagaggaggctcttctcgggggggaaccgcaatccttctactgaccggcctcgaacaacgggcaggaggattgacaccgactagacatctggctccccaggccgatccgagaccaagcatgtcgctagctgtggtcgtcggcactgagccatctgcgccccccgctccaccaagtccagctttcgaccctgatcgattcctgaactcaccgcagagaggacagacttatggtggaggtcagggcgtatcgcctgacttcccagaggctgaagccgcgcatacaccttgtagtgcactggagcccgctgcagctctggaaccgcaagcggccgctagaggcccgcccccccaatccgtggctggaggtcgccggggcaactgcttctttatccaagacgacgattctggcgaagagctgaagggccatggtgccgcaccgccaatacccagtccgccaccaagcccccccccgtctcccgcccccctggagcccagcagccgggtgggccgcggtgaagcactgtttggtggtcccgtgggagcctcggagctcgagccattttctttatcatcattccccgatctgatgggggaactaatttctgacgaggcccccagtatccctgcacccacacctcagttgtctccagccctctctaccatcacagacttttcacccgagtggagttatcccgaagggggggtgaaggtattaattacaggtccttggacagaagccgccgaacactattcttgcgtgtttgatcatatcgccgtgcctgcaagtctcgtgcagcctggggtgttgcggtgctactgccccgctcacgaggttggtctggtgagcttacaggtggccggccgcgaaggccctctgtcggccagtgtgttgtttgaatacagggctcggcgcttcctctcactgcccagtactcaattggactggttgagtctggatgataaccagttcaggatgtcgatccttgagcgtctcgagcagatggagaagaggatggcggagatcgcagccgcaggccaagtaccctgtcaaggccccgacgcaccccctgtgcaggacgaaggacaggggcctggattcgaggctcgagtggtcgttcttgtcgaatcaatgattcctcgcagtacgtggaagggcccagaacgcttggcacacggctctccatttcgaggaatgtcactgctccacctggctgcggcgcagggctacgcccgactcattgagacactgtcacagtggaggagtgttgaaactggaagcctcgatctggaacaagaagtggatcccctcaacgtcgatcacttctcatgtacacctttaatgtgggcctgcgcccttgggcatctggaggctgcggtactgctcttccggtggaaccggcaggctcttagcattccagattccctgggtcgcctgcccttgagtgtggcgcactcgaggggtcacgtccggctcgcgcgctgcctggaggagttgcagaggcaggagccttcagttgagccaccttttgccctgtcgccccctagttcctcacccgataccggactctcttcggtgtcgtccccatcagagctgagcgacggaacgttttccgtaacctctgcctacagcagtgcccccgacggttcacctccccccgcgccacttcctgcgtcggagatgaccatggaggatatggcccctgggcaacttagctctggagtgcctgaggctccccttttactcatggactatgaggccaccaattccaaaggacctctgtcctcgctgcccgctctgccccccgcttcagatgatggggcggcccctgaagatgccgactctccacaggcagtagacgtgataccggtggatatgatttctctggccaagcagatcatcgaggccaccccagagcgcataaagcgtgaagactttgtgggcctgcccgaagccggagcctctatgcgtgagcggacaggagcagtcgggctgtcggaaactatgtcctggctcgcgtcttatctcgaaaatgtggaccatttcccgagctctactcctccttctgagttacccttcgagcgtggtcgcctcgcagtcccatctgctccctcttgggctgaattcttgtcagcttccacctctggcaagatggagtctgactttgcgctgttgaccctctccgatcatgagcagcgggagctgtacgaagctgctagagtaattcaaactgccttccgcaagtacaagggcaggaggctaaaggagcagcaggaggtggccgctgcagtgattcagcgctgctaccgcaagtacaaacagttgacctggatagccctcaagtttgcgttgtacaagaagatgacacaggcggcaatcctgattcagtccaagtttaggagttactacgaacaaaagcgctttcagcaatcccggagggcagcggtgctgattcaacaacactatcggagctaccgcagacgaccaggcccaccccacaggacctcagcgacactgcctgcccggaataaactgctaagccaccaggaggctggacccggtagcccagaagatcacgaaattcccgcggccctgccaactcaggacgaggggaccgaggcagagcctggagctgggcgggctagtccagcaggcaccgggcatatgacgtggcccccccccttttctccgccgtgggggcgcttagtgcagtcctag

SEQ ID NO: 181357 - DNA, 4470 bp, synthetic construct
  misc_feature 1..4470: note = Description of Artificial Sequence: Synthetic coding sequence
  source 1..4470: mol_type = other DNA
atgggcgacgccgccgacccccgggagatgcggaagaccttcatcgtgccggccataaaacctttcgaccattatgatttttcccgggctaagattgcctgtaaccttgcctggctcgtggcaaaagcatttggtacggagaatgtaccagaggagttacaggagccattttatacagatcagtatgaccaagagcacatcaagccaccagtggtaaatctgctgctctccgcggagctgtactgccgagcaggctcccttattctcaagtctgatgcagctaaacctcttcttggtcatgatgcggtgatccaggctttagcacagaaagggttgtacgttactgaccaggagaagcttgtgaccgagcgagatcttcataagaagcccatccagatgtctgcacacctggctatgattgacaccctaatgatggcctacacagtcgaaatggtgtccattgaaaaagtcatagcatgtgcacaacagtatagcgccttctttcaagccaccgacctgccctatgacatagaagatgccgtgatgtattggatcaacaaggtcaatgaacatctgaaggacattatggaacaggagcagaaactgaaagagcaccacaccgtggaggccccgggaggccagaaaagcccttccaaatggttctggaagctcgtgccagcccgatacagaaaggagcagacacttctcaaacagctaccctgtataccactggttgaaaatttgttgaaagacggtactgacgggtgtgcgctggccgcgctgatacatttttattgtccagatgtggtccggctggaagatatctgtctgaaagagactatgagtctcgctgactcgctttataaccttcagctgatccaggaattctgtcaagagtaccttaaccagtgttgccatttcacactggaggatatgctgtacgccgcatcctctatcaaaagcaattatctggtctttatggccgagctgttctggtggttcgaagtcgtgaagccatcttttgtgcagccaagggtcgtccggccacagggagcggagcctgttaaagacatgccaagtattcctgtactgaacgccgccaagcggaacgtgctggatagttcttcagatttcccgagctcgggagaaggagccacctttactcaatcccatcaccacctgccctcccggtacagcagacctcaagcccactccagtgcatccggagggattagacgtagtagttcaatgtcatatgtcgatggctttatcggcacatggcctaaggaaaaacgttcttcagtccacggcgtgtcgtttgacatcagctttgataaagaagacagtgtgcagcgatccacacctaatagaggcattaccaggagtatctcaaacgaggggctgactcttaataatagccacgtcagcaagcatattagaaaaaacctgtcgttcaagccaataaatggggaggaggaagccgagtctatcgaggaagagctcaacatcgacagtcactccgaccttaaatcgtgtgttcccctgaatacgaacgagctaaacagtaatgagaatattcactacaagctccctaatggggccctgcagaataggatcctcttggacgagtttgggaaccaaatagaaacccccagtattgaggaggcgctgcaaattattcacgataccgaaaaaagccctcacactcctcagcccgatcagatcgctaacgggtttttcctgcatagtcaggagatgagcattctcaattcgaatatcaagctgaaccaaagttcccctgacaacgttacagataccaagggtgcactttctccaatcaccgacaacactgaagtcgacaccggaattcatgtcccctccgaggatattcctgagactatggatgaggattcctcactgagggactatacagtaagtctggattctgacatggatgatgctagtaagtttctgcaagactacgacatcaggaccggcaacaccagagaagccctgagcccctgtccaagtactgttagcacgaagtcacagccagggtcgagcgcatcctcctcttctggggtgaaaatgaccagcttcgcagagcagaagttcagaaaacttaaccatacagacggaaagagtagcggctcttctagccagaagacaacccctgaggggtcagagctcaacatccctcacgtagtagcatgggcccagatcccagaagagactggacttcctcaaggcagggatactacccaattactcgccagcgaaatggttcatctcagaatgaaacttgaggaaaagcggcgagccatcgaggcccagaagaaaaagatggaggcagccttcacaaagcaacggcagaaaatgggtaggaccgcatttctgactgtggtaaagaagaaaggtgacgggattagcccactccgggaagaggccgcaggcgctgaggacgagaaggtctataccgatcgggccaaggaaaaagaaagccagaagactgacggacagcgtagcaagtcccttgcagacatcaaggagtcaatggaaaacccacaggctaaatggctgaaatctcctaccaccccgatcgacccggagaagcaatggaatctggcaagccccagcgaggaaacgctgaatgaaggagagatcctggaatataccaagtcaattgagaagctaaactcctccctgcactttctgcaacaggaaatgcagcgcctgagcctccagcaggagatgttgatgcagatgagagagcagcaatcttgggtgatctcccccccgcaaccgtcgccccagaagcagatcagggatttcaagcccagtaagcaggccgggttgtctagcgcaatagcccccttttccagcgatagccccaggcctacacatcccagtccgcaaagcagtaacagaaaatcagcctccttcagtgtgaaaagccagcgtactcctagaccgaacgagttgaagatcaccccactaaaccggacgctgaccccaccgagatctgttgatagtctcccacgcctgcgacgtttttcgccatcacaggttcctattcagacccgttctttcgtctgcttcggagatgacggtgagccccaactcaaggaatctaagcctaaggaagaagtcaagaaggaagagctagaaagcaagggaactcttgaacagcggggccacaatcccgaggagaaagagattaagccttttgaatcaacggtgtcagaggtactgtctcttcccgtcacagaaactgtgtgcttgactcctaacgaggaccaactcaaccagcccacagagccccctccgaagccggtgtttccccctaccgcaccaaaaaacgtcaatctgattgaggtctcactcagcgaccttaaacctccggagaaggcagacgtgccggtggaaaaatacgacggggaatctgacaaggaacagttcgacgacgaccaaaaagtttgttgtgggttcttctttaaagacgatcagaaggccgaaaatgacatggcgatgaagcgggcggcactgctggagaaacgcttgagacgggagaaggagacgcagctgcgcaaacagcagctggaagcagagatggaacataaaaaggaggaaaccagaaggaaaactgaggaagagagacagaaaaaagaagacgaacgcgcacgtcgggagtttataaggcaggagtacatgcggcgtaagcagctcaaattgatggaggatatggataccgtcatcaagcctcgcccacaggtagtgaagcaaaagaagcagagaccaaagagcatccatagggaccatatcgagtcacctaagacacctattaagggaccacctgttagcagcctgtccctcgcctctctgaacaccggtgataacgagtcagttcatagcgggaagaggaccccccgttccgaaagtgtggagggcttcttaagcccctcacggtgtggatctcgtaacggtgaaaaagattgggagaacgcgagcactacaagtagtgttgcttccgggactgagtacaccggaccaaaactgtataaggagccgtctgccaagtctaacaagcatattattcagaatgctctggcgcactgttgcctggctgggaaggtgaacgaaggacaaaaaaagaaaattctcgaggaaatggagaagtctgatgcaaataactttctgattctttttcgcgatagtggatgtcagtttaggagcttgtacacgtactgtccagaaaccgaagagataaataagttgaccggcataggccccaagagcataacgaaaaagatgatcgagggtttatataagtataacagtgaccggaagcagttttcgcatatacctgccaagacactgtctgcctccgttgatgcaataactatccactcacacttgtggcagaccaagaggcccgtaacgcctaagaagttattacccaccaaggcgtag

SEQ ID NO: 181358 - DNA, 4437 bp, synthetic construct
  misc_feature 1..4437: note = Description of Artificial Sequence: Synthetic coding sequence
  source 1..4437: mol_type = other DNA
atgggcgacgccgccgacccccgggagatgcggaagaccttcatcgtcccggctataaagcccttcgaccactatgacttcagtagggccaaaatagcttgtaatcttgcatggctagtggcgaaggcctttggaaccgagaatgttcctgaagagctgcaagaaccattttacacagaccagtacgatcaagaacacatcaaaccgccggtggtgaacctgctgctctctgcggaactgtactgtcgagcaggctctctgattctgaaatccgatgcggccaagcccctgctgggacacgacgccgtgatccaggccttagcgcaaaaaggtctatacgtaactgatcaggaaaaactcgtcactgagagggacctccacaaaaaaccaatacagatgtctgcccaccttgctatgattgacacactaatgatggcttatacagttgaaatggtcagcatagagaaggtgattgcttgcgcacagcagtactctgccttcttccaggcaactgacctcccctacgatattgaggatgccgtcatgtattggataaacaaagttaacgaacacctcaaggacatcatggagcaggagcagaagctcaaggagcaccatactgtcgaagcacctgggggtcagaaagccagatatcggaaggaacaaacattgctgaagcagctgccctgcattcccctcgtggagaacctgctcaaagacggtaccgacggttgcgcacttgctgcattgatccacttctattgcccagatgtcgtgcggcttgaagacatctgcctcaaagagactatgagcctggctgattccctgtacaacctccagctgatacaggagttctgtcaggagtatctcaatcagtgctgtcactttactctggaggatatgctttatgcagcctcctcgatcaaaagcaattacctcgtgttcatggcagaactcttctggtggtttgaggtggtgaagccgtccttcgtgcagccacgagtcgttagaccgcagggggctgaaccggttaaggatatgcccagtatccccgttttgaatgcagcaaagagaaatgtgcttgactccagctccgattttccatcatctggtgagggcgctacatttacccagtctcaccaccacttaccgagtcgttactcacgcccccaagcccattcttctgcatccggtgggataagaagatcgtcgtccatgtcatatgttgacggctttatcggtacttggcctaaggaaaagagaagctcggtccacggcgtcagtttcgacatcagcttcgacaaggaggacagtgtgcagcgctccacaccaaatagaggtattactcgttctatcagcaatgagggcctcaccttgaacaatagccacgtgtcaaaacacatacgaaagaacttaagtttcaaacccatcaatggggaggaggaggctgagtctatagaggaagaactgaacatcgattcccatagcgacctgaagtcctgcgtgccactcaacactaatgaactgaattccaacgagaatatccactataagctgccaaacggtgcactgcaaaacaggatcttgttggatgagtttggcaaccagattgaaaccccgagtatagaagaagcactgcagataatccacgatactgaaaagtcacctcacacacctcaaccggaccaaatcgccaacggcttttttctgcactcacaagagatgtctatcctcaattctaatattaaactaaatcaatcttccccagacaacgtcactgatacaaagggagccctcagccccatcacagataacaccgaagtggacaccggcatacacgttccttccgaggatatccctgagacgatggacgaagactcctctctccgcgattacaccgtgtcacttgattccgatatggacgatgctagcaaattcctgcaggattacgacatcagaacaggaaacacacgcgaagcgctatctccgtgcccgagcacagtgtccactaaatcgcagcccggctccagcgcctcgagctcttctggggttaagatgacctcttttgcagaacagaaatttagaaaactcaaccacacggatggaaaatcctcagggagtagttcccagaaaactactccagaaggttcagaactcaacatcccacacgtggtcgcatgggcccagatccctgaggagaccggcctgccacaggggagagatactactcagctgctggcctcagaaatggtccatctcagaatgaaactggaagagaagcgaagagcaatagaagcccagaaaaagaaaatggaagccgctttcaccaagcagcgtcaaaagatgggtaggaccgctttcttgacagtcgtgaagaaaaaaggcgacgggataagcccactccgggaggaggcggcaggggccgaagacgagaaggtttacaccgacagggccaaggagaaagagtcacaaaagactgacggtcagcggagtaagagcctggccgatattaaagaatcaatggagaacccccaagccaagtggttgaaatccccaaccacccctatagaccctgaaaagcagtggaatcttgcctctccttctgaagagaccctcaacgaaggtgagattctcgaatacaccaagtccatcgaaaaactgaattccagcctgcatttcttacagcaggaaatgcaacggctatccctacagcaagaaatgctaatgcagatgcgtgagcagcaatcctgggtaatcagtccccctcaaccatcacctcagaagcagattagagatttcaagccctcaaaacaggcaggcttgtcgagcgcgatagccccattttccagcgactctccgcggcctactcatccaagtcctcagtctagcaacagaaaaagcgcaagttttagcgtgaagtcgcagaggaccccaagacccaacgaactgaaaataacacccctgaacagaacactcactcccccacgttctgttgattctctccctcgccttaggaggttctctccgtcccaagtgccaattcagacacgaagttttgtgtgttttggagatgatggagaaccccagttgaaggaatctaagcccaaggaggaggttaagaaggaagaacttgagagtaaaggaaccctagagcaacgcggtcataacccagaagagaaggagataaaacctttcgaatccactgtgtctgaggtgctctctctgccagttactgagactgtctgtctcacgccgaatgaggatcagctgaaccagcctacagagcctcccccaaagccagtcttccctcctaccgccccaaaaaacgtgaatctgatagaggtatctctaagtgacctcaagccaccagagaaggccgacgtgcccgtggagaaatacgacggcgaatctgataaagaacagtttgatgacgaccagaaggtgtgctgtggcttcttctttaaagatgaccagaaggctgaaaacgacatggctatgaagcgggcagcgttgttagaaaaaaggctacggcgagaaaaggaaactcagctgcggaagcagcagctcgaggccgagatggaacacaaaaaggaggagacccgtagaaagactgaggaggagcgccaaaagaaagaagatgagcgtgcccgaagagagttcatcagacaggagtacatgcgacggaaacaattgaagctgatggaggacatggacaccgtaattaaaccgaggccgcaagtggtaaagcagaaaaaacaacgacctaaatctatccacagagaccacatcgaaagtcctaagacgccaatcaagggcccgcccgtgtcttcactgtccttggccagcctcaatactggggataacgagtcagttcattccggtaaaagaactcccaggagcgagtcggttgaggggttcctcagcccatcccggtgcggcagccgaaatggagagaaagattgggaaaacgcatctaccacttcctctgttgcttccggaactgagtacaccggacccaagctttataaagagcccagcgccaagtctaataaacatataatacaaaacgcgctggctcattgctgccttgccggaaaggtcaatgaggggcagaagaagaagatcctggaggagatggagaaaagcgatgcaaataacttcctcatcttatttcgggactctggctgtcagtttaggtccctttacacctactgcccggaaaccgaggagatcaacaaactgaccgggattggccctaagtctatcaccaagaagatgattgaggggctgtacaagtataatagcgatcgcaagcaattctctcacatccccgccaagacactcagcgctagcgttgatgctatcaccattcattcacacctgtggcagacaaagaggccagtcaccccaaagaaactgctgcccaccaaggcctag

SEQ ID NO: 181359 - DNA, 4389 bp, synthetic construct
  misc_feature 1..4389: note = Description of Artificial Sequence: Synthetic coding sequence
  source 1..4389: mol_type = other DNA
atgggcgacgccgccgacccccgggagatgcggaagaccttcatcgtgcccgccataaagccctttgaccactacgatttctctcgagctaagatcgcctgcaacctcgcctggctcgtggctaaggccttcggcacagagaacgtaccagaggaactgcaggagcctttctacacggaccagtacgaccaagagcacattaagccaccagtggtgaatctcttgttgtcggccgaactctattgtagggccggctcgctgattcttaaatctgacgctgctaagccccttttggggcacgacgcagttatccaggcactagcccagaagggtctttacgtcaccgaccaagagaagttagtgaccgagcgggatctgcataagaagcctatccagatgtcagctcacctcgcaatgatcgacactcttatgatggcgtatacagtagaaatggtgagcatcgagaaggtgatcgcatgtgcccagcagtactctgcattctttcaagccactgatctgccatatgatatcgaagacgctgtaatgtactggattaacaaagtgaacgagcacctgaaggacatcatggagcaggaacagaaactgaaagaacatcatacagtcgaggccccaggaggtcagaaggcacggtatcggaaagagcagactctgcttaagcagctgccatgcataccacttgttgagaatttactgaaagacgggaccgatggctgcgccttggccgctctgattcatttttactgtccagacgtggtccggctggaggacatctgcctcaaggagaccatgagccttgccgattcactgtacaatctccagctgattcaagagttttgccaggaatacctgaatcagtgctgtcatttcactcttgaagatatgctgtacgcggcctcctctattaaaagtaattacctagtcttcatggcagaacttttttggtggttcgaggtcgtaaaacccagctttgtgcaaccaagggtggttcggccccagggggccgaacccgtgaaggatatgccatctatcccagtcttgaatgcggccaagaggaacgttctagacagctccagtgactttccctcacggtatagccggcctcaggctcactctagcgcttccggcgggatcagaagatcctcaagcatgtcctacgttgatggtttcatcggtacctggcccaaggagaagcgtagttccgtgcacggcgtgagtttcgacatctcgtttgacaaagaggacagcgtgcagcgcagcacgccaaatagaggcatcacacggagtatctccaatgaaggcttgaccctgaataactcccatgtgtccaaacatatcagaaaaaatttgtcatttaaaccaattaatggtgaggaagaagccgagagcattgaggaagagctgaacatcgatagccattccgatcttaagagctgcgttccacttaataccaacgaactgaacagcaatgagaatatccactacaagttaccgaatggagccctgcagaaccggatcctacttgacgaatttggcaatcagatcgaaacaccttcaattgaagaggccctgcagataatccacgatactgagaaatccccccacacaccccagccagatcaaattgccaacggcttttttctgcactcgcaagagatgtctatcctgaacagcaatatcaaacttaatcagagctcacccgacaatgtgactgatacgaaaggtgccctttcacctattactgacaatactgaagtggacactgggattcatgtgccctccgaagacattccagagaccatggatgaggattcctccctgcgcgactataccgtaagtctggattcggacatggatgatgcttccaaatttctccaggactacgatatcagaaccgggaatacccgggaggccctatctccctgtccttcgaccgtgtctaccaaatcgcagcccggctcttccgcatcatcctccagcggagtgaaaatgacctcatttgctgaacagaagtttagaaagttaaatcataccgacggtaaaagtagtgggtctagcagtcagaaaaccactcctgaaggaagcgagctcaacatccctcacgtggttgcgtgggcacaaattccggaagagactggtcttcctcagggacgggacacaacgcagctgttggcgtccgaaatggtgcacctgcgtatgaaactggaggaaaagagacgggccattgaggctcagaaaaagaagatggaagccgccttcaccaaacagcgccaaaaaatggggaggactgcatttctgaccgtggtcaagaaaaaaggggacggtatctctcccctccgcgaggaggccgcaggcgccgaggatgaaaaggtgtacaccgatagagcaaaagaaaaggagagccagaaaacggacggtcagcgcagcaagtcactggccgacataaaggaatccatggagaatccacaggctaagtggcttaaatccccaactactcccattgatcctgagaaacaatggaacctggcaagcccatcagaggaaaccctaaacgagggggagatcctggaatacaccaaatccattgaaaagctcaattcttctttacacttccttcagcaagaaatgcaacgcctttctttgcaacaggagatgttaatgcagatgagggaacaacagtcctgggtgattagcccccctcagccatctcctcagaagcagatccgcgacttcaagccatctaaacaagccgggttgtcttcggccatcgccccgttttcttcagactcaccaaggcccacccacccctccccccagagttccaatcggaaaagtgctagcttctctgtgaaatctcagcgaacacctaggcccaatgagctgaaaattacccctctgaatcgcactctcacacccccccggagcgtggactccctaccgcgtctaaggagattcagccccagtcaggtgccgatccagacacgttcctttgtgtgtttcggggacgatggggaacctcagttaaaggagagcaagccaaaggaggaagtgaaaaaggaggaactggagagcaagggaacacttgaacagaggggtcataaccctgaagaaaaggagatcaagcctttcgagagtactgtgtctgaagtactctccctgccagtgacggagaccgtatgcctgacccccaacgaggatcagcttaaccagccaaccgaaccaccaccaaaacccgtgttcccccccactgcacccaagaatgtgaatttgatcgaggtgtccctctccgatctcaagccacccgagaaggctgacgtgcctgtcgagaagtacgatggcgagagcgataaagagcagttcgacgatgaccaaaaggtctgctgcgggtttttttttaaagacgaccagaaggcggaaaacgatatggctatgaaacgggccgcactcctcgaaaaacggctacgacgcgagaaggagacccagctgagaaagcaacagttggaggcagagatggaacacaaaaaagaggagaccaggcgtaagacggaagaggagaggcagaaaaaggaggacgagcgcgctagaagagagtttatccggcaggaatatatgaggcgaaaacagctcaaactgatggaagacatggacactgtgattaagccacggccacaagtagttaagcagaagaagcagaggcctaagtctatccaccgtgaccacattgaatctccaaaaacgcccatcaaagggcccccagtgagttccctgtccctggctagccttaatacaggagacaacgaatccgtgcattccggcaaacgtaccccaaggagcgagagcgtggaggggttcctcagtcccagtaggtgcgggtccaggaatggagaaaaagattgggaaaatgccagcaccacatcaagcgtagcgagcggcacggagtataccggcccaaaactgtataaggagcctagtgccaaatctaataagcacattattcagaatgctctggcgcattgttgcttggccggcaaagtgaacgaaggtcagaaaaaaaaaattctcgaagagatggaaaagagtgacgccaataacttcctcatattgttcagggatagcgggtgccagtttaggtctctgtatacatactgccctgagacagaggagattaataagctgactggcataggccccaagtcaattactaagaagatgattgagggtctgtataaatacaactccgaccgcaagcagttttcacacattcctgctaagactctctccgctagcgtcgacgccatcactatccatagtcacttgtggcagactaaacggccagttactccgaaaaaacttctgcccactaaggcatag

SEQ ID NO: 181360 - DNA, 450 bp, synthetic construct
  misc_feature 1..450: note = Description of Artificial Sequence: Synthetic coding sequence
  source 1..450: mol_type = other DNA
atggccgaccagctgaccgaggagcaggtgaccgagttcaaggaggctttttccctttttgacaaagatggagatggctgcattaccactcgggaactgggaaccgtaatgcggagcctaggacagaaccccacagaggccgagctgcgggatatgatgagtgaaatcgaccgtgatggaaatggtaccgtggattttccggagtttttaggcatgatggccagaaagatgaaggacactgataacgaggaagagatccgggaggccttccgtgtgttcgacaaggatggaaacggattcgtatcagccgcggagctgcggcatgttatgacacggcttggtgagaaattaagtgacgaagaagtcgacgagatgattagggctgctgataccgacggcgacggacaggttaactacgaggaatttgtgcgggttctggtgagtaaatag

SEQ ID NO: 181361 - DNA, 546 bp, synthetic construct
  misc_feature 1..546: note = Description of Artificial Sequence: Synthetic coding sequence
  source 1..546: mol_type = other DNA
atgggcctgcagcaggagatcagcctgcagccctggtgccaccaccccgctgagtcctgccagaccacaaccgatatgactgagcgactttctgcggaacaaatcaaagagtacaaaggtgtattcgagatgttcgacgaggagggcaatggagaggtaaaaacgggggaacttgagtggctgatgtcactcctaggaatcaaccctactaagagcgaattggcctctatggcgaaggacgtggaccgcgataacaagggtttttttaactgcgatggttttctggcattgatgggcgtttatcatgagaaggctcagaatcaggaatccgagctgagggcagccttccgcgtttttgataaagagggcaagggttacatcgactggaatacgttaaaatacgtccttatgaacgcgggtgagccattgaatgaggtggaggccgaacagatgatgaaggaggccgacaaagatggtgacagaacgattgattatgaggagtttgttgcaatgatgaccggggagtcgtttaaacttatccagtag

SEQ ID NO: 181362 - DNA, 495 bp, synthetic construct
  misc_feature 1..495: note = Description of Artificial Sequence: Synthetic coding sequence
  source 1..495: mol_type = other DNA
atgggcctgcagcaggagatcagcctgaccgagcggctgagcgccgagcaaattaaggagtataaaggcgtgttcgaaatgttcgacgaagaaggcaacggagaggtgaagacaggcgaactggaatggctcatgtcgctgctcggcatcaatccgaccaaatctgagttggctagtatggctaaagacgtggacagagacaacaagggtttctttaattgcgatggtttccttgcccttatgggggtttaccacgagaaagcccagaatcaggaatctgaacttagagctgccttccgagtgtttgacaaagagggcaaaggctacatcgattggaataccctcaagtacgtccttatgaacgccggggagcctttaaatgaggtggaagccgaacagatgatgaaggaggcagacaaagacggcgaccgcacgatcgattacgaggaatttgtcgctatgatgactggagagtcttttaaactcatccaatag

SEQ ID NO: 181363 - DNA, 1779 bp, synthetic construct
  misc_feature 1..1779: note = Description of Artificial Sequence: Synthetic coding sequence
  source 1..1779: mol_type = other DNA
atggagggcaagtggctgctgtgcatgctgctggtgctgggcaccgccatagtggaggctcatgacggccacgacgacgacgtaatcgatatcgaggacgatcttgatgacgtgatagaagaagttgaggatagtaagccggatactaccgcccctccatccagccctaaagtcacttataaggctcctgtccccactggagaagtctactttgctgacagctttgaccggggaaccctttcgggatggatcctctccaaggcaaaaaaagacgatacagatgacgaaatcgcaaagtatgatggcaaatgggaggttgaggagatgaaagaatccaagctcccaggggacaaagggctggtcctgatgtctcgcgccaagcatcacgccatcagcgctaaactgaacaagccattcctcttcgacaccaagccactgatcgtccagtacgaggtgaattttcagaatggtattgaatgtggtggagcatatgttaaactgctgtcaaaaactccggaactgaaccttgatcagttccatgacaagactccctacaccattatgttcgggcccgataaatgcggagaggattataagctgcacttcatttttcggcataaaaacccaaagacgggcatctacgaggagaagcatgctaagcgtcccgacgccgatctcaaaacatactttaccgacaagaaaacacatctctataccctgatactcaatcctgataatagcttcgaaattctcgtagaccaatcagttgtcaactctggaaatctgcttaatgacatgaccccccctgtaaacccttcacgtgagattgaggacccagaagacagaaagcctgaagactgggacgagcgtccaaagatcccggaccctgaggccgtcaaacctgacgattgggatgaagatgcacccgctaaaatacccgacgaagaggcaacaaaacccgaaggatggctagacgatgagcccgagtatgtgccagacccagacgctgagaagccagaagattgggacgaggacatggacggagaatgggaggctccacagatagccaacccaagatgcgaatccgcacccggatgtggcgtgtggcagcggccggtgatagataatccaaactataaggggaagtggaaaccaccaatgatcgacaacccgtcttatcaggggatctggaaacccagaaaaatcccaaatcctgacttttttgaagacttggaacctttccggatgaccccatttagcgctataggcctcgagctctggtctatgacaagcgacatctttttcgacaacttcatcatttgcgccgaccggagaatcgtggacgactgggcaaacgatggatggggcctcaagaaggccgccgatggggcagctgaacccggagttgtgggtcaaatgatagaggccgccgaagaaagaccgtggttgtgggtagtgtacatattaactgttgccctgccagtattcttggtgattcttttttgttgctctgggaaaaaacaaacatcaggaatggaatacaagaaaactgatgcacctcagcccgatgtaaaagaggaggaagaggagaaagaggaggagaaagacaaaggggacgaggaagaagagggagaagagaaacttgaggagaagcagaaaagtgacgcggaggaggatggcggcaccgtctcccaggaagaggaggaccgcaagcccaaggcggaggaagatgaaatcctaaacaggtcaccccgcaataggaaacctcgccgtgagtag

SEQ ID NO: 181364 - DNA, 852 bp, synthetic construct
  misc_feature 1..852: note = Description of Artificial Sequence: Synthetic coding sequence
  source 1..852: mol_type = other DNA
atgctgctggtgctgggcaccgccatcgtggaggcccacgacggccacgacgatgatgtgatcgacatcgaagatgatttggatgacgtgatcgaagaggtcgaggattccaaacccgataccaccgcgccccccagttctccaaaagtcacctataaggccccggtgcctacgggcgaagtgtacttcgcagactcctttgatcgtggcacactgagtgggtggattctgagtaaagcaaagaaggatgatacagacgatgagatcgcaaaatacgacggcaaatgggaagtcgaagagatgaaggagtccaaactccccggggataaaggcctcgtcctgatgtctagggctaagcaccatgcaatatccgctaaactgaacaaacctttcctgtttgacacaaagcccttgatcgtgcagtacgaggtcaatttccagaacggaattgaatgtggcggcgcttacaactgctttctcaagcaccagaacagcacctgggatcagttccacgacaagacaccctacaccatcatgttcggtcccgataaatgtggggaagattataagttgcattttattttcaggcataagaacccaaagaccggaatctacgaggagaaacacgcaaagcgtcccgacgccgacttgaaaacatactttaccgataaaaaaacacacctctatactcttattcttaacccagacaattctttcgagattcttgtggaccagtccgttccacctgtgaacccatcacgcgagatcgaggatcccgaggataggaaacccgaggattgggacgagagacccaaaatcccggatcccgaggctgtgaaacctgacgactag

SEQ ID NO: 181365 - DNA, 984 bp, synthetic construct
  misc_feature 1..984: note = Description of Artificial Sequence: Synthetic coding sequence
  source 1..984: mol_type = other DNA
atggagggcaagtggctgctgtgcatgctgctggtgctgggcaccgcaatagtggaggctcacgacggccacgacgacgatgtcatcgacatcgaagatgaccttgatgatgtgatcgaggaagtcgaggagatgaaggagagtaagctaccaggtgacaaggggctggtcctgatgtcacgggccaagcatcatgcgatcagtgctaagctgaataagcccttcctctttgacacaaaaccactgatcgtgcagtacgaggtaaatttccagaatgggatcgaatgtggcggggcctacgtcaaattgctgtctaaaacgccggagctgaatctggatcagttccacgataaaactccctatactattatgtttggaccagataagtgcggtgaggattataaactgcacttcattttccggcataaaaatcccaagactggaatctatgaagagaaacatgccaaacgccccgatgctgacctcaaaacttactttacggataaaaagacacatctatacaccctcatcttgaatcctgacaattctttcgaaattctagttgatcaatcagtggtgaattcgggtaatcttctcaacgacatgactccaccagtgaacccgtctcgtgagatcgaagacccagaagatagaaaacctgaggactgggacgaacggcccaaaattccagatcccgaagcagtgaaaccagacgactgggatgaggacgcacccgccaaaatacccgacgaggaagcaacaaaacctgaaggctggctggatgacgaacccgaatatgtacccgatccagatgccgagaaacctgaggactgggatgaagatatggatggagagtgggaagctccacaaatcgccaaccccagatgtgaaagcgcccctgggtgtggcgtgtggcagagacctgtggtcgatatccagaagactagcaggcatcaccaccagcaggctcctgtggagcactag

SEQ ID NO: 181366 - DNA, 1884 bp, synthetic construct
  misc_feature 1..1884: note = Description of Artificial Sequence: Synthetic coding sequence
  source 1..1884: mol_type = other DNA
atggccgaccggcggacccccacccccttcgccggctgccggctgcccagacaaagacgggcgcgcgacgctagccaagtaagcgcccccggcaccagaagaattatggaggggaaatggctgttgtgtatgcttctagtgctcgggaccgccatcgtggaggcgcacgatggccacgacgatgacgttatcgacatcgaagacgatttggacgatgtgattgaagaggtcgaagattcaaagcccgacaccacagcaccgccttctagcccaaaagtgacatacaaggccccagtgcccaccggcgaagtctatttcgccgattccttcgaccgtggcacactctcgggctggatcctgagcaaggcgaagaaagatgataccgacgatgagatagctaagtatgacggtaagtgggaggtggaggagatgaaagagtcaaaactgcctggtgataagggtctagtgctaatgagcagagcaaaacatcatgccatttctgcgaaactcaacaaaccatttctatttgatacaaagccactcatagttcaatacgaggtcaacttccagaacgggatcgaatgcggaggtgcctatgtcaagctgttatctaaaacacccgaactgaatctcgaccaatttcatgataagaccccatatacgattatgttcggccccgacaaatgcggcgaagactacaagctgcactttatattccgacacaaaaacccaaagactggcatttacgaggaaaagcatgcaaagcgcccagatgccgatctaaaaacttactttacagataaaaagactcacttatacactctgatacttaacccagataactccttcgaaatcctagtggatcagtcggtggtgaactcaggaaatctgctgaacgacatgaccccgccagtaaacccaagcagagaaatagaggatcccgaagaccggaagccagaagattgggacgagaggcccaaaattccagaccctgaggctgtgaagccggacgattgggacgaagatgcccccgcgaagataccagacgaagaggccactaagcccgagggatggctggatgacgaaccagaatatgtgccagacccagacgctgagaagcccgaggattgggatgaggatatggacggcgagtgggaagccccgcaaatcgccaacccacggtgcgagagtgctcctggctgcggagtgtggcagagacctgtaatcgacaatcccaattacaaagggaagtggaagcctccgatgattgacaacccctcatatcagggaatctggaaaccacgcaagattcccaaccccgacttctttgaagatctcgaaccgtttcgtatgaccccattcagtgcaatcggtcttgagctatggtcaatgacatctgatattttcttcgataatttcataatttgcgctgaccggcgaatcgtggacgattgggcgaacgacggttggggactgaagaaggcagcggatggcgccgccgagccaggtgtggttggtcaaatgattgaagccgcggaagaacggccatggctttgggtggtgtatatactgaccgtggccctgcccgtcttcttagtaatcttgttctgctgtagtggtaaaaagcagaccagcgggatggagtataagaagacagacgcaccgcaacccgacgtaaaggaggaggaggaagagaaggaggaagaaaaagacaagggagatgaagaagaggagggtgaagaaaaactcgaggaaaaacagaagtctgatgcggaggaggatggggggaccgtgtcacaggaagaggaagaccgcaagccaaaagccgaggaagatgaaatattgaaccgttccccacggaaccgaaagcctagacgggagtag

SEQ ID NO: 181367 - DNA, 1779 bp, synthetic construct
  misc_feature 1..1779: note = Description of Artificial Sequence: Synthetic coding sequence
  source 1..1779: mol_type = other DNA
atggagggcaagtggctgctgtgcatgctgctggtgctgggcaccgccattgttgaggctcatgacgggcatgacgatgatgtgatcgacatcgaggatgacttggacgacgtgatagaagaggtggaggacagtaaacccgacactacagccccaccgtcctccccaaaggtgacttacaaagcccccgtgccaactggcgaggtgtactttgcggactcgttcgaccgaggaaccctgtccggctggatcctgtccaaggcaaagaaagacgacacagatgacgaaatcgctaaatatgatgggaagtgggaggtggaggagatgaaagagagcaaacttcccggcgataaaggtttagtcttgatgagccgggcaaaacatcatgctattagtgccaaactgaacaagcccttcctctttgatacgaaacccctcattgtgcaatatgaagtcaactttcagaatgggatcgagtgtggcggtgcttatgttaagcttctgtccaaaactcctgagctcaatcttgatcagttccacgacaagaccccctatactataatgtttggccccgacaagtgcggtgaggattacaaactgcattttatttttaggcacaagaacccaaaaaccggtatatatgaggagaagcatgccaaaagacctgacgctgacctcaagacatacttcacagacaagaaaacccatctgtataccctgattctcaatcctgataatagctttgaaatcttagtggatcagagcgtcgtaaattccggtaacctgttaaatgatatgaccccccccgtgaatccaagccgcgaaatagaggacccagaagatcgtaaacctgaggattgggatgagaggccgaagattcccgatcctgaggcagtcaaacctgatgactgggacgaagacgctcctgcgaaaattccggacgaagaagctaccaagcctgaagggtggctcgacgacgagcctgagtacgttcccgaccctgacgctgagaaaccagaagactgggacgaggacatggatggagagtgggaagctccccagatagccaatccgcgatgtgaatctgcacccgggtgcggggtttggcagaggcctgtaattgacaatcccaattacaaaggaaagtggaagcctcccatgatcgataatccctcatatcagggcatctggaaaccaagaaaaatacccaatcctgatttttttgaggacctggagcccttcaggatgacacccttttctgccatcggattggaactctggtcgatgacctcagacatcttcttcgacaactttatcatttgcgcggaccgacgaattgtggacgactgggccaatgatggctggggtctgaaaaaggccgctgatggagccgccgaacctggtgtggtgggtcagatgatcgaggcggcggaggagaggccatggttatgggtggtgtatatcctcacggttgccctccctgtttttctcgtgatcttgttctgctgctcaggcaagaagcagacgtctggtatggagtataagaagacagatgcaccccagccagatgtgaaggaggaggaggaggaaaaagaagaggaaaaagataaaggagacgaggaggaggaaggggaagagaagttagaagaaaagcagaaaagcgatgctgaggaggacggtggaactgttagccaggaggaagaagaccgcaagccaaaggccgaagaagatgagattttaaatcggtcccccagaaatcgcaagcctcggcgggaatag

SEQ ID NO: 181368 - DNA, 405 bp, synthetic construct
  misc_feature 1..405: note = Description of Artificial Sequence: Synthetic coding sequence
  source 1..405: mol_type = other DNA
atggagggcaagtggctgctgtgcatgctgctggtgctgggcaccgctatagtcgaagcccacgatggccacgatgacgatgtgatagacatcgaggatgatctggacgacgtgatagaagaggtggaagactccaagcccgatacaaccgcccctccctccagtccgaaggtgacctataaagctcccgttcccacgggggaagtatacttcgccgactctttcgatagggggacgctgtccggatggattttgagcaaggccaaaaaagatgacacagatgacgaaattgccaagtacgatgggaagtgggaggtggaggaaatgaaggaatcaaagttgccaggggacaaaggcctcgtcctgatgagccgggccaaacatcacgccatcagtgctaaatag

SEQ ID NO: 181369 - DNA, 507 bp, synthetic construct
  misc_feature 1..507: note = Description of Artificial Sequence: Synthetic coding sequence
  source 1..507: mol_type = other DNA
atggagggcaagtggctgctgtgcatgctgctggtgctgggcaccgcaattgtagaggcacacgacgggcacgacgatgacgtgattgatattgaggatgaccttgacgatgttatcgaggaggttgaggactctaagccagacactactgcccctccctccagtccaaaggtgacttacaaggcgcctgtacctacaggagaagtatatttcgcggactcatttgaccgcgggactctgtccggttggatcctgagtaaggcgaagaaagacgatacagacgatgagatcgccaaatacgatgggaaatgggaagtcgaggagatgaaggaaagtaaactgccaggggacaagggactagttctgatgtcgagggccaaacaccatgcaatttcagctaagctgaacaagccctttctctttgacacaaagccccttatagtgcagtacgaagtgaacttccagaacggtattgagtgcggcggtgcttatgtgaagttgctgtag

SEQ ID NO: 181370 - DNA, 1779 bp, synthetic construct
  misc_feature 1..1779: note = Description of Artificial Sequence: Synthetic coding sequence
  source 1..1779: mol_type = other DNA
atggagggcaagtggctgctgtgcatgctgctggtgctgggcaccgcaatcgtggaagctcatgatgggcatgatgacgacgtcatcgacatcgaggatgatctcgatgacgtaatcgaggaggtggaagactcgaagcccgatacaacggctccacccagttccccgaaagtgacttacaaggcaccagtgcccacaggcgaggtctacttcgccgacagttttgatcgagggacgttgtcaggatggattctgtctaaagcaaagaaagacgacactgatgatgagatcgctaaatacgacggcaagtgggaagtagaagaaatgaaagagtctaagttgcccggagataaggggctggtccttatgagccgcgccaagcaccacgccatctctgctaagctgaataagccctttctgttcgacaccaaaccactgattgtgcaatacgaagtcaacttccagaacggcatcgagtgcgggggggcatacgtgaagctactgtcaaagacccctgaactcaacctggatcaattccatgacaaaaccccgtatacaatcatgttcggcccggacaagtgtggggaagactacaagctgcacttcatttttcgccacaagaaccctaagacaggaatttacgaagagaagcacgcaaagaggcccgatgccgacctgaagacctactttacagacaagaagacccacctgtacaccctcatcctgaacccagataactcttttgaaatcctggtagatcaaagcgtggttaactctggcaatctcttaaacgacatgaccccccccgttaatccatcccgggagattgaagacccagaagacaggaagcccgaggactgggacgaacggccaaagattccagatccagaagccgtgaagcctgacgactgggatgaggatgcccccgcaaagataccggacgaagaggccacaaagcctgaaggttggctcgacgacgagcctgaatacgtgccagatccagacgccgaaaagcccgaggactgggatgaagatatggatggagagtgggaggcgccgcaaatcgccaatcctagatgcgaatctgcccccgggtgcggcgtgtggcaacggcccgtcattgataatcccaactacaagggtaaatggaagccccccatgatcgataatcctagttatcagggaatctggaaaccaagaaagattcctaaccctgactttttcgaagatctggagcccttccgcatgacacccttctccgcaattggactggaactctggagcatgacgagcgacatattcttcgacaatttcataatctgcgccgaccgccggatagtagatgactgggccaatgatggctggggattgaagaaggcggctgacggggcagccgaaccaggggtggtcgggcaaatgattgaggccgccgaagagaggccatggctctgggtggtatatatcttgaccgtcgcgttacctgtattcctggtcattctcttttgttgttctggaaaaaagcagacatctgggatggagtacaaaaaaactgacgctccacagccggatgtaaaggaggaggaggaggaaaaggaggaggaaaaagataagggcgacgaagaggaggagggagaggagaagcttgaagagaagcagaaatccgacgctgaagaagatggggggaccgtgagccaagaagaggaggaccggaaaccaaaagctgaagaggacgagatcttgaaccggtccccgcggaaccggaagccccgccgggagtag

SEQ ID NO: 181371 - DNA, 240 bp, synthetic construct
  misc_feature 1..240: note = Description of Artificial Sequence: Synthetic coding sequence
  source 1..240: mol_type = other DNA
atggagggcaagtggctgctgtgcatgctgctggtgctgggcaccgctattgtcgaggcccacgatggccatgacgatgatgtgattgacatcgaggacgacttggatgacgtgatcgaggaggttgaagatagcaagcctgatactaccgcccctccaagtagcccaaaggtgacgtataaggcccctgttcctactggtgaggtatacttcgcagacagttttgatagggggacttag

SEQ ID NO: 181372 - DNA, 99 bp, synthetic construct
  misc_feature 1..99: note = Description of Artificial Sequence: Synthetic coding sequence
  source 1..99: mol_type = other DNA
atggagggcaagtggctgctgtgcatgctgctggtgctgggcaccgcaatcgtcgaagcacacgacggtcatgacgatgatgtcatagatattgaatag

SEQ ID NO: 181373 - DNA, 1455 bp, synthetic construct
  misc_feature 1..1455: note = Description of Artificial Sequence: Synthetic coding sequence
  source 1..1455: mol_type = other DNA
atgaaggagagcaagctgcccggcgacaagggcctggtgctgatgtcacgagccaagcatcacgcgatcagcgccaaattgaacaaaccattcctgtttgacaccaagcctctgatcgtgcaatacgaagtaaatttccaaaatggcattgaatgcggaggcgcatatgtgaaactgttgtccaaaaccccagagctaaacttggatcagtttcatgataaaactccatacaccatcatgtttggacccgacaagtgcggcgaagattacaagttgcatttcatctttcgacataaaaaccctaaaactgggatatacgaagaaaaacacgcgaaaagaccggatgccgacctcaaaacctatttcacagataaaaagacacatctgtataccctaatcctaaacccggacaactcgtttgaaatcttggttgaccagagtgtagttaattctggaaacctgttgaatgacatgactccgccagtgaatccatctagagaaattgaggaccccgaagataggaaacctgaggattgggacgaacgaccgaaaattcctgatccagaagcagtcaagcctgacgactgggacgaagacgccccagccaaaatccctgacgaagaggctactaaacctgagggctggctggatgatgagccagagtacgtaccggatcctgatgctgaaaaacccgaagactgggatgaagatatggatggggagtgggaggccccccagatagccaacccgagatgcgagtctgcgccggggtgtggagtgtggcaacgtccggtcatagacaaccccaactacaaaggcaagtggaagccacccatgatcgacaacccctcctaccagggaatctggaagccgaggaagatccccaatcccgattttttcgaagatctcgagccttttcgcatgactcctttcagcgccatcggtctagagctttggagcatgacatcagacatctttttcgataacttcattatctgcgccgaccgccgcatcgtagacgactgggccaatgatggttggggactaaaaaaagccgcggatggagcggccgagccgggagtggtcgggcagatgattgaggctgctgaggagagaccttggttatgggtggtgtatatactgactgtggcccttcctgtgtttctggtaattctcttttgctgctccggcaaaaagcagacttccgggatggagtataagaaaacagatgccccccagcccgacgttaaagaagaagaagaagaaaaagaagaggagaaagacaaaggggatgaggaggaagagggggaagagaagttggaagagaaacagaagtctgacgccgaggaagacggaggcactgtatcccaagaagaagaagacaggaagcccaaggctgaagaggatgagatcctcaaccggagtcctcgcaacagaaagccacgcagggagtag

SEQ ID NO: 181374 - DNA, 324 bp, synthetic construct
  misc_feature 1..324: note = Description of Artificial Sequence: Synthetic coding sequence
  source 1..324: mol_type = other DNA
atggagggcaagtggctgctgtgcatgctgctggtgctgggcaccgctatcgttgaagcgcatgatgggcacgatgatgacgtgatcgacatcgaagacgacctcgacgatgttatcgaagaggtagaagacagcaaaccagacactacggctccgcctagcagccctaaagtcacatataaagcccccgtcccaacgggcgaggtttatttcgctgacagcttcgatcgcgggaccttgtcgggctggattttgtccaaagccaagaaagacgacacagacgacgagattgcaaagtatgatggcaagtgggaggttgaatag

SEQ ID NO: 181375 - DNA, 435 bp, synthetic construct
  misc_feature 1..435: note = Description of Artificial Sequence: Synthetic coding sequence
  source 1..435: mol_type = other DNA
atggagggcaagtggctgctgtgcatgctgctggtgctgggcaccgccattgttgaggcacacgatggccacgatgatgatgtgatcgacattgaagatgaccttgatgatgttatagaagaggtcgaggactctaagcctgacactacagcgccaccctcctcacctaaggttacatacaaggcccccgttcctactggagaggtctacttcgctgactcctttgacagaggcacattgagcgggtggatactttccaaggcgaagaaggacgacactgatgacgagatcgcaaagtatgacggaaaatgggaagtcgaagagatgaaggagtctaagcttcccggagataagggattagtgctcatgagtcgtgcaaagcaccacgctatatccgcaaagcttaataaacccttcctgttcgacacgaagtag

SEQ ID NO: 181376 - DNA, 420 bp, synthetic construct
  misc_feature 1..420: note = Description of Artificial Sequence: Synthetic coding sequence
  source 1..420: mol_type = other DNA
atgcgggccggccggggcgccacccccgcccgggagctgttccgggatgctgccttccccgctgccgactccagcttattctgcgacctgagtacacctctggcgcagtttcgcgaggacatcacctggcggaggccacaggagatttgcgctaccccccggctgtttccggacgatcccagggaaggccaggtgaagcagggacttctgggtgactgttggttcctctgtgcttgcgcagccctacaaaagtcacggcaccttctcgatcaggtctcctgtccagtgcagctgcctgcagactggacttgcaaggttcagcctgtctggcttgaatttccttgcttacccattagctgcaggcttcgcgtgtctagtgacacctcgccggattctgctacttgggggtcctggaagtag

SEQ ID NO: 181377 - DNA, 417 bp, synthetic construct
  misc_feature 1..417: note = Description of Artificial Sequence: Synthetic coding sequence
  source 1..417: mol_type = other DNA
atgcgggccggccggggcgccacccccgcccgggagctgttccgggacgccgcttttccagccgccgacagcagcctgttttgtgacctgtcaacccctctggcccagttccgcgaggacattacatggcgacggcctcaagtcccggaaggcgggcgctcccaggatgcgcctccccttctgcttcaggaacccctgctgtcatgcgtgccacatcgttacgcccaagaggtcagcagattgtgcctgctgccagctggcacctacaaagttgttccgagcacttatctccctgatactgagggggcctttactgtcacaatcgccactcggatagacagaccctcgatacactcccaggaaatgctcggacagttcctgcaggaggtctccattatggctgtgatgaagacctag

SEQ ID NO: 181378 - DNA, 1554 bp, synthetic construct
  misc_feature 1..1554: note = Description of Artificial Sequence: Synthetic coding sequence
  source 1..1554: mol_type = other DNA
atgcgggccggccggggcgccacccccgcccgggagctgttccgggatgccgcctttcccgctgccgattcttctctgttttgcgacctgtctacccccctagcacaattccgtgaagatatcacctggcgcaggccgcaagaaatttgtgccacgccgcggctgttcccagacgaccctcgagagggccaggtgaagcagggtctacttggagactgctggttcctgtgtgcctgtgccgccctacagaaatctcggcacctcttagatcaagtcattccacccggacaacctagctgggccgaccaggaatatcgaggctcctttacctgtcgcatctggcagttcggacgctgggtggaggttactacagatgaccggctgccatgtttggcaggacggctctgcttttcaaggtgccagagggaagacgtgttctggctcccgttgctggagaaggtgtacgccaaagtgcacggaagctacgagcacctttgggccgggcaggtagcagacgcactggtcgacctgacgggcgggctggccgaaaggtggaatctgaagggagtcgcgggctcaggaggacagcaggacagaccagggagatgggaacacagaacatgcaggcagctgcttcatctgaaagaccaatgtcttatctcctgttgtgtcttaagtccgagggcgggtgcccgcgagcttggcgagtttcacgcattcatcgtatccgatcttagggagttgcaggggcaagccgggcagtgtatacttttgttgagaatccaaaatccctgggggaggcggtgctggcaaggactttggagggaaggcggcgaagggtggtcacaggtggatgcagccgtggcatccgagctgctgtcgcagttacaggaaggagagttctgggttgaggaagaggagttcctgcgcgagtttgacgaactgacagtggggtaccctgtcaccgaagcaggacatctgcagtccctttacacagagcgactgctgtgccatacccgagctcttccaggcgcctgggtgaagggacaatcggcgggcggttgccgcaacaactctgggttcccttcaaatcctaaattctggttgcgggtgtcggagcccagcgaggtttacatcgcagtgctacagagatcccggctgcacgctgctgattgggcaggtagggcgcgggctttagtcggtgactcccatacctcctggtctccagctagtataccgggaaaacattaccaggccgtgggcctccatctctggaaggtgcctgagggagggagatcacaagatgctcctcccctgttacttcaggagcccctgttaagctgtgtgcctcaccgttacgctcaagaagtgtcaagactctgcctgctacctgctgggacatataaggtggtcccatctacttacctgccagacactgagggggcgtttacagtaactattgcaacaagaattgataggccatctatacattctcaggagatgctgggacagtttttgcaggaagtgtcaatcatggccgtgatgaaaacctag

SEQ ID NO: 181379 - DNA, 1335 bp, synthetic construct
  misc_feature 1..1335: note = Description of Artificial Sequence: Synthetic coding sequence
  source 1..1335: mol_type = other DNA
atgcgggccggccggggcgccacccccgcccgggagctgttccgggacgccgcttttccggcagctgactcatctctattttgtgatctgagcacccccctggcccaatttagggaggatattacctggcggcggccacaggagatctgcgcaacgccacggttattccctgatgatcctagagaaggccaggtgaagcagggcttacttggcgactgttggtttttgtgcgcatgtgcagctctccagaagagccgacatctgcttgatcaggtgattccgcctggacagcctagttgggctgatcaggagtatcgaggttccttcacgtgtaggatctggcagttcgggcgctgggtcgaagtcactactgatgatcgccttccctgcttggccggccgactgtgctttagccgatgccagagagaggacgtgttttggctgcctcttctcgaaaaagtgtatgcgaaggtccacggctcttacgaacacctctgggccggacaggtggctgacgctttggtcgatttgacaggtgggctggccgagaggtggaacctgaagggagtggccggcagcggtgggcagcaagatcgacctggcagatgggagcaccgcacatgtcgccagctgctgcacctgaaagatcagtgcctaattagctgctgcgtactgagccctcgggccggagctcgcgaactgggggagttccatgctttcattgtgtctgacttaagggaacttcagggacaggcaggtcagtgcatcctactgctccgtatccagaacccctggggccgccgttgttggcagggcctgtggcgggagggcggggaggggtggagccaggttgatgctgccgtcgcctctgagttgttgtcccagctccaggaaggagaattctgggttgaggaggaagagtttcttagggagtttgatgaactgactgtaggctaccccgttaccgaagccggacaccttcagtccctttacaccgagagattgttgtgccatactcgtgcgcttccaggtgcatgggtgaagggccagagtgccggcggttgtaggaacaattccggatttccatccaaccccaagttttggctcagggtttcagagccaagcgaggtgtacattgcagtactgcaacggagtagactacatgctgctgattgggcaggtagggccagagccctggtaggagacagtcatacaagctggtcacccgcctctatccctgggaaacattaccaggcagtgggcctgcacctctggaagggcgttaccctaggcacaaccctgttccccgtcccatcttggatgtggcctacctag

SEQ ID NO: 181380 - DNA, 2019 bp, synthetic construct
  misc_feature 1..2019: note = Description of Artificial Sequence: Synthetic coding sequence
  source 1..2019: mol_type = other DNA
atgcgggccggccggggcgccacccccgcccgggagctgttccgggacgcagcatttcctgccgcagattcatccctgttttgtgatctctccacacctttagctcagtttagagaagacattacttggcgccgcccgcaggagatctgcgcaacacctcgcctttttccagatgacccccgagaggggcaggtgaagcagggactgctcggcgactgctggttcctgtgtgcttgtgctgccctccagaaaagtcgccacctccttgaccaagtgattcctcccggccagccctcatgggccgaccaggaatacagggggtcttttacttgccgcatttggcagtttgggcgctgggtggaagtgactacagacgacagactcccctgccttgcggggcggctgtgcttctcccggtgtcagagagaagatgtcttttggttaccactgctggagaaagtgtacgctaaggtccacggaagttacgagcatctgtgggctggccaggtcgccgacgccctggtcgacttgaccggcggacttgccgaacggtggaatctgaagggagtggccggctctggaggccagcaggataggcccgggaggtgggagcacagaacttgtaggcagctcctccatctcaaggaccagtgtttgattagctgttgtgtgctttccccacgagctggggctagggagctgggggagttccacgcttttattgtttctgacctgagagaactccagggacaggctgggcagtgcatcctattactccgcattcagaacccctggggtagaagatgctggcaggggctctggcgggagggcggggaaggttggtctcaagtcgatgccgccgttgcttccgaattgctgagccagctgcaagagggtgaattctgggtcgaggaagaagagtttctcagagagttcgatgagctgaccgtaggatatcccgtgaccgaggccggccacttgcaatctctatatacagagaggcttctctgccataccagagccctgccgggggcttgggttaaaggccagtcagcgggtggctgcaggaacaactctgggtttccatcaaaccccaagttctggctgcgtgtttccgagccgtctgaggtctatatagcggttctgcaacgttcccggctacatgcagccgactgggccggccgggcacgggctctcgtgggcgattcccatacatcctggtctcccgcatccattccaggaaagcattaccaggccgttggtctgcatctttggaaagtcgagaaacgcagggtgaacctaccacgcgtgctgtcaatgcctccagttgctggtacagcctgtcacgcttacgatagggaggttcacctacgctgcgaactgtcacctggatattatctcgcagtgcctagcaccttcttaaaagacgcacctggagaatttttgctcagggttttctccacaggacgggtctctctgtctgcaattcgcgcagttgcgaagaacactacccccggtgctgcattgcctgccggcgagtggggcaccgtgcagctgcgaggctcatggagagtgggacaaacagctgggggcagccgcaacttcgcgtcttaccctacgaacccatgctttccattcagcgtgccggagggaccgggaccgagatgcgtgaggattaccctacaccagcattgccggccctctgacaccgaatttcacccgataggcttccacatcttccaggtgcctgagggtggcagaagccaggatgcccccccactgctgttgcaggagccactgctctcttgcgtcccacatcgctacgcccaagaggtgtccaggctctgtctgttgccagcaggaacatataaggtcgtaccttctacttacttgcccgatactgagggagcgtttacagtgacaatagcaacacgaatagataggccttccattcactctcaggaaatgctcgggcagttcctgcaagaggtctctatcatggcagtgatgaaaacctag

SEQ ID NO: 181381 - DNA, 2220 bp, synthetic construct
  misc_feature 1..2220: note = Description of Artificial Sequence: Synthetic coding sequence
  source 1..2220: mol_type = other DNA
atgctgtacagccccggccccagcctgcccgagagcgccgagagcctcgatggttcacaggaagataaaccacgcggctcctgtgcagagcctaccttcaccgacacaggaatggtcgcccacatcaacaactcaagactgaaagccaagggggttggccagcatgacaatgcccagaactttgggaatcaaagctttgaagagctgagggcagcctgtctgaggaagggggagctgttcgaagaccctctatttccagccgagccctcatcccttgggtttaaggatctcggtccgaactccaagaacgtgcagaacatttcctggcaacgcccaaaagacatcattaacaatccacttttcatcatggacgggatcagccctactgatatttgtcagggaatcctgggggattgttggttattggccgcgatcgggagcctcaccacctgcccgaaactcctgtatcgggtggtgccacgaggacagtcctttaagaagaattacgctgggatttttcattttcaaatctggcagttcggtcagtgggtgaacgttgtagtggacgatcggctgccaacgaagaacgataaactggtctttgtgcactccactgagaggtccgagttttggagcgcacttctggagaaagcttatgccaagctgtctggaagttatgaggccctatcagggggctctacgatggaagggctggaggatttcacaggaggcgtggctcagtcatttcaattacaacgcccgccccagaacctgcttaggcttcttaggaaggccgttgagaggtcatcactaatgggctgcagtatcgaagttaccagtgactccgaacttgagtctatgaccgacaaaatgcttgtacgcgggcacgcctatagtgtcacagggctgcaggacgtgcactacagaggcaaaatggagacccttatccgggtcaggaatccgtggggacgcattgagtggaacggcgcctggtccgattcagcccgggaatgggaggaagtggccagtgacatccaaatgcagctcctgcacaagaccgaggatggggagttctggatgtcgtaccaggattttcttaataactttaccctgctggaaatctgcaacctcactcccgacacacttagtggggattacaaatcctactggcatactacattttacgaagggtcctggaggcggggatcctcagcgggcggctgccggaaccatcctggtacattctggaccaatcctcaattcaaaatctcgctgcccgagggagacgatcctgaggatgatgctgaaggtaacgtggtcgtctgtacctgcctggtggcccttatgcagaagaactggcggcatgctcgacaacaaggagctcagctccagaccatcgggtttgtgctctacgcggttccaaaagagttccaaaacatccaggacgtccatcttaagaaagagttcttcaccaagtaccaggaccacggattttccgaaatttttaccaacagtagggaggtgtccagccagctccggctaccgcctggagaatatattataatcccaagtactttcgagccccatagggacgctgattttctgttaagggtctttacagaaaagcacagcgagagttgggagctcgacgaagtgaactacgctgagcagttgcaggaggagaaggtcagtgaagatgatatggaccaggatttcctgcaccttttcaagatcgttgcaggtgaggggaaagaaatcggggtctatgaattacagcgcttactaaatcgcatggccatcaagttcaaatcctttaagacaaaaggctttgggttggatgcttgccgttgcatgattaacctaatggataaggatggctccggcaagttagggctactggagtttaaaatcctatggaaaaagctaaaaaagtggatggacatcttccgggagtgcgaccaagatcactcggggacccttaacagctacgagatgcggttagtaatagagaaggcagggatcaaacttaataataaagtaatgcaggtgctggtggcccgctatgctgacgatgatctcatcatcgactttgacagcttcatcagctgctttctgagactgaagacaatgttcacatttttcctgaccatggaccccaaaaatactgggcacatctgtttatcactggaacagtggctgcagatgacaatgtgggggtag

SEQ ID NO: 181382 - DNA, 2220 bp, synthetic construct
  misc_feature 1..2220: note = Description of Artificial Sequence: Synthetic coding sequence
  source 1..2220: mol_type = other DNA
atgctgtacagccccggccccagcctgcccgagagcgccgagagcttggacggcagccaggaagacaagcctcgcggctcctgtgctgagcccacgtttaccgataccggcatggtagcacacatcaacaattcgagactcaaggcgaaaggcgtaggacagcatgacaatgctcagaattttggtaatcagagcttcgaggagctgcgggccgcctgcctcagaaaaggcgagcttttcgaggatcctttgttcccggctgagcccagtagtctcggttttaaggaccttggccccaattcgaagaacgtccagaatatcagctggcagagaccaaaagatatcataaataaccctcttttcatcatggatggaatttctcccacagacatttgtcaggggatcttaggggactgctggctactggccgcgattggatcgttaaccacctgtcctaaattactgtatcgtgtggttccaagggggcagagttttaaaaaaaactacgctggcatatttcactttcagatttggcagtttggacagtgggtgaatgtggtggtggacgatagactccccactaaaaacgataagttagtctttgtccactcaacagagagatctgaattctggagcgcactacttgaaaaggcttacgctaagctctccggaagctacgaagccttgtccggcggcagtactatggaaggcctggaggacttcacaggaggagttgcacagtcttttcagctgcaacgcccaccgcagaatctgctgaggcttctgagaaaagctgtcgagaggtcgtccctcatgggctgttcaatagaagtcacctctgactctgagctggaatcaatgacagacaaaatgttggtgcgtggacatgcttatagcgttacagggttgcaggacgtgcactaccgcggcaagatggagaccctgatccgtgtgcgcaacccatggggtagaattgaatggaacggagcctggtctgatagtgcacgggagtgggaggaggtggccagtgatatccagatgcagctgcttcacaagacggaggacggagagttctggatgagttaccaggactttctaaacaattttactctgctggaaatctgcaacctcacaccagacacactaagcggagactataagtcttactggcacacaactttctatgaaggctcctggaggcgaggtagctctgctggcggttgtcgcaatcaccctggcaccttttggaccaaccctcagtttaagatttccctgccagagggggacgatcctgaggacgatgccgagggaaatgtcgtagtttgtacctgcctggtcgcccttatgcagaaaaactggagacacgctcgacagcagggtgcgcagctccaaaccatcggatttgtcctgtacgcagtcgcttcacccttccagaacattcaagacgtacatttgaaaaaggaatttttcaccaagtaccaagatcatggcttttcggagatttttacaaactccagagaagtgtcatcacagctgagactcccacctggcgagtacataataataccgtctacctttgagccccatcgcgacgccgattttttactgcgtgtgttcaccgaaaagcacagcgaaagctgggagctcgatgaagtgaactacgccgaacaactgcaggaggaaaaagtatctgaagatgatatggatcaagactttctacatctgttcaaaattgttgccggagaaggtaaagagataggtgtgtatgagctccagaggctcctgaatcgaatggccataaaattcaaaagcttcaaaacaaaaggttttggattggacgcttgtaggtgcatgattaatctcatggacaaggacggaagtggaaagctgggactgctggaattcaagattttgtggaagaaacttaagaagtggatggatatcttcagagagtgcgatcaggatcattccggaacgctgaattcctacgaaatgcgcctggttatcgaaaaagcaggcatcaagttgaacaacaaagtgatgcaggtactggtggcccgctatgcagacgatgacttaataattgatttcgactcttttatctcctgctttcttcgactcaaaacaatgtttactttttttctgacaatggatcccaagaacacaggccacatctgcttgtcgttagagcagtggctacagatgacaatgtggggttag

SEQ ID NO: 181383 - DNA, 2160 bp, synthetic construct
  misc_feature 1..2160: note = Description of Artificial Sequence: Synthetic coding sequence
  source 1..2160: mol_type = other DNA
atggccagcagcagcggccgggtgaccatccagctggtggacgaggaggctggcgtcggggcggggcggctgcagctgttcaggggccagagctatgaagcaatccgtgcagcatgtctagattcaggaatactgttcagggatccttattttccggccggaccagatgcccttggttacgaccagctcggcccagactctgaaaaggccaaaggagtgaaatggatgcgaccacacgagttctgtgcggagcctaagtttatctgtgaggacatgagcaggacagacgtgtgccaggggagtttgggtaattgctggtttctcgctgctgctgcttcactcactctgtacccacgacttttacgccgcgtggttcctcctggtcaagatttccagcatggatatgcgggcgtttttcactttcaattatggcaatttgggcgctggatggatgtggtcgtcgacgataggttacccgtgcgagagggtaagctgatgttcgttagatccgagcagcggaacgaattttgggctccacttttagaaaaggcatacgccaaactgcacggatcttatgaagtgatgagaggtggccatatgaatgaggccttcgtcgatttcactggtggtgtgggcgaagtcctttatcttagacagaactcaatgggcctcttctccgccctgcggcatgccctggcaaaagaatccttggtgggagccacagccctgtctgatagaggggagtatcggacagaggaaggtctagtaaagggacatgcgtactccattactggtactcacaaagtctttctcggctttactaaggtgcggctgctgaggctgagaaacccatggggttgtgtcgagtggaccggcgcctggagtgacagctgccctcgctgggatacgctgccaaccgagtgcagggatgcccttttggttaaaaaagaagatggagagttttggatggagctgcgggatttcttactccatttcgatactgttcagatctgtagcctgagcccagaagttctcggaccatcccctgaaggcgggggatggcatgtgcatacatttcagggcaggtgggtccgaggcttcaattctgggggatctcagccgaatgccgagacattttggacaaatccccagttccgactgaccttgcttgagcccgatgaggaagacgatgaggatgaggagggcccttggggggggtggggggcagctggggcccgggggcctgccagaggcggcaggaccccgaagtgcaccgtactactcagtctgatacaacggaaccgcagaaggcttagagccaagggattgacgtatctgacagttggcttccacgtgttccaaattcctgaggagctgcttggcctttgggattctccccgctcacatgcattactcccacggcttctgcgtgccgatagaagccccctctcggcccgccgtgacgtgacacgtaggtgctgcttacggcccgggcattacctggtggtgccatctacagctcacgctggagatgaggccgatttcaccttgcgcgtcttttctgagcgcaggcacaccgccgtggaaattgatgacgtgattagtgcagaccttcagtcactccagggaccctacctgccattagagctagggttagaacagttattccaagaattagcgggtgaggaagaggaacttaatgcgagtcagctgcaagccctacttagcatcgcattggagccagctagggcccatacaagcacgccgcgagaaatcggattacgcacttgcgagcagctactccagtgcttcgggcacggacaatctctcgcattacatcatttccaacagctgtgggggtacctattggagtggcaggccattttcaataagtttgacgaagatacatcgggcaccatgaactcctatgagcttcgccttgctctgaatgctgccgggttccacctcaacaatcagctgacccaaacgttaacttccagatatcgagattctcgcctgagagtcgactttgagcgttttgttagctgtgtggctcatctgacgtgcattttttgccactgttcacagcacctggatggaggggaaggggtgatttgtctgactcatcgccagtggatggaagtcgccacttttagctag

SEQ ID NO: 181384 - DNA, 2448 bp, synthetic construct
  misc_feature 1..2448: note = Description of Artificial Sequence: Synthetic coding sequence
  source 1..2448: mol_type = other DNA
atgcccaccgtgatcagcgccagcgtggccccccggaccgccgccgaaccgcgttcccccggaccagtgccgcatcctgcccagtcaaaagctacagaagccgggggcggaaacccgagcggcatctacagcgcaatcatctctcgaaattttcctatcatcggagtgaaggagaaaacgtttgagcagcttcataaaaagtgtctggagaaaaaagtactttacgttgatcccgagttcccacccgatgaaacttcattgttttactctcaaaagtttccaattcaatttgtgtggaagcggcccccagagatctgtgaaaatccccggtttattatagacggtgccaatcgcactgacatatgtcaaggggagctaggcgattgttggtttctggctgctattgcctgtttgactctcaatcaacacctgctcttcagggtcatcccacacgaccagtccttcattgagaattatgccgggatttttcacttccagttttggcggtatggggagtgggtggatgtggtgattgatgactgcctcccaacctataataaccagctagtgttcaccaaatccaatcaccgcaacgagttttggagtgctttacttgaaaaagcttatgctaagctccacggcagctatgaggccctgaagggaggcaacacaactgaggccatggaggactttaccggtggtgttgcagaattcttcgaaatcagggacgccccttccgacatgtacaaaataatgaaaaaggccattgagcggggttccctgatgggatgtagcatcgacgatggtacgaatatgacttatggaacgtctccaagtgggctgaatatgggtgagctcatcgccagaatggtgcgcaacatggataattctcttctacaagactcagacctggatccgcgggggtctgacgagcgccctacccggactattatcccagtccaatatgaaacgcggatggcctgcggtctcgtgcgaggccatgcctactctgtcaccggactggacgaagttccctttaagggagagaaagtcaagctcgtgcgcctgagaaatccatgggggcaggtggaatggaacgggtcctggtccgatcgatggaaggattggtctttcgtcgacaaggacgaaaaggcacgactgcaacaccaggtgaccgaggacggggaattctggatgtcctatgaagactttatctaccactttactaagctggagatctgcaatttaaccgccgatgctctgcaaagcgacaaactgcaaacgtggacagtcagcgttaacgaggggagatgggtcaggggttgttccgccggcggatgtcgaaacttccccgacacattttggaccaatccccagtaccgccttaaactgctggaggaggacgacgatccagacgattcagaagtgatatgttctttccttgttgcactgatgcaaaagaataggagaaaggatcggaaactgggcgccagcctcttcacaatcggattcgccatctacgaagtgccccaccaaatgcacggcaacaagcagcacctgcaaaaagatttctttctgtacaatgcctctaaggcccgttcaaagacctacatcaatatgcgggaggtgagccagcggttccggctgcccccgtcagagtacgtgatcgtaccctccacgtatgaaccgcaccaagagggtgagtttatactgcgagtgttctccgagaagaggaatctttctgaagaggtagaaaacaccatctctgttgaccgcccagttccaatcatcttcgtctcggatagggcgaatagtaataaggagctaggggtggaccaggagtcagaagagggaaagggtaaaacgagtccggataaacagaagcaatcccctcagccacagccaggctcaagcgaccaggaatcggaagaacaacaacaatttcgcaacatctttaagcagatcgctggggacgacatggagatttgtgctgatgagctcaaaaaggtgctgaatacagtggtgaataaacacaaagacctgaagacccacgggtttactttggaatcctgccggagcatgattgcattaatggacaccgacgggtctggaaagctcaatctccaagagtttcaccatctttggaataaaatcaaagcttggcagaagatctttaaacattatgatactgaccagagcggaaccatcaattcctacgaaatgcgcaatgctgttaacgacgccggattccatctcaacaaccaactttacgatatcataactatgcggtatgcagacaaacatatgaatatagatttcgactctttcatatgctgcttcgtgagactcgagggcatgttccgggcattccacgccttcgacaaggacggcgatggaatcattaagctgaatgtgcttgagtggttgcaactgaccatgtacgcctag

SEQ ID NO: 181385 - DNA, 930 bp, synthetic construct
  misc_feature 1..930: note = Description of Artificial Sequence: Synthetic coding sequence
  source 1..930: mol_type = other DNA
atgcacggcaacaagcagcacctgcagaaggacttcttcctgtacaatgcaagtaaagccagatctaagacgtatattaatatgagagaggtgtcacagcgcttcagactgcccccatctgaatacgtaatcgtgcctagtacgtatgagccccatcaggagggggaatttatactgagagtgttttcagaaaaacggaacctgagtgaagaggtggaaaataccatcagcgttgatagaccagtgcgaaaggagacctacaagcctatcatcttcgtgtccgaccgggccaactcaaacaaagaactcggagtcgatcaagagtccgaggaggggaaaggcaagacatcaccagataaacaaaagcagagcccccaaccacagccaggctcatccgatcaggaaagcgaagaacagcagcagtttaggaacattttcaagcaaattgcaggagatgacatggaaatctgcgccgatgagcttaagaaggtgcttaatactgtggtgaataagcataaagacctgaagacccatggatttactctggagtcctgccgatcaatgatagcgctgatggacacggacggctctgggaagctcaacctgcaggaatttcaccacctgtggaataaaattaaggcctggcagaagatctttaaacactacgacaccgaccaatccggcactataaatagttacgaaatgagaaatgcggttaacgacgccggattccatcttaacaatcagctgtacgacattatcaccatgcgatatgctgacaagcacatgaacattgatttcgactccttcatttgttgcttcgtccggttggagggaatgtttagagcctttcatgcctttgacaaggacggggacggcattattaagctgaacgtgttggagtggctccagcttacaatgtacgcttag

SEQ ID NO: 181386 - DNA, 471 bp, synthetic construct
  misc_feature 1..471: note = Description of Artificial Sequence: Synthetic coding sequence
  source 1..471: mol_type = other DNA
atggagatctgcgccgacgagctgaagaaggtgctgaacaccgtggtgaataagcacaaggatctgaagactcatggctttacgctggagagctgtcggagcatgattgccctcatggacactgacggcagcggaaagctgaatctgcaggaattccatcacctatggaataaaatcaaagcgtggcagaaaattttcaagcactatgatacggaccaaagcggtacaatcaactcctacgagatgaggaacgccgtgaacgatgcaggattccacctgaataaccagctttatgatattatcacgatgcggtatgctgacaaacacatgaacatcgactttgattcattcatatgctgttttgtgcgccttgaaggaatgtttagagcattccatgcttttgacaaggatggggatggcattatcaagctgaatgtgctggaatggttgcagctgaccatgtatgcctag

SEQ ID NO: 181387 - DNA, 2190 bp, synthetic construct
  misc_feature 1..2190: note = Description of Artificial Sequence: Synthetic coding sequence
  source 1..2190: mol_type = other DNA
atgcccaccgtgatcagcgccagcgtggccccccggaccgccgccgagccacgttccccagggccagttcctcatcctgcccagagcaaggctacggaggcaggcggcgggaatccttccggcatatattcagcaataatcagtagaaacttccccattattggcgtcaaagaaaaaacctttgagcagctccacaaaaaatgtctcgaaaaaaaagtgctctatgtcgatccagaattccctccagacgagacctcacttttttacagccagaaatttcccattcagtttgtatggaagcgcccgccagagatttgtgagaatcccaggtttataattgacggagccaatcgcactgacatatgtcagggggagttgggtgattgctggtttcttgcagctattgcctgcctgacactgaatcagcatctgctttttcgggtcatcccgcacgaccagtcatttatagaaaattacgctgggatctttcattttcagttttggcgctatggagagtgggtagacgtcgtcatcgacgactgcctccctacctacaataaccagttagtctttaccaaaagcaaccacaggaatgaattttggtccgctctcttagaaaaggcatatgccaagctgcatggatcctacgaggcactgaagggcggaaacacaaccgaagctatggaggattttactggaggagttgccgaattttttgaaattagagatgcgccctcagacatgtataaaatcatgaagaaagcaattgagcgcggatctcttatgggctgcagtatcgatacaatcattccggtacagtacgagacaaggatggcatgcggcctcgtgagggggcacgcttactccgttactggcctggacgaggttcccttcaagggagagaaagtaaagctggttcgacttcgtaatccctggggacaagtggagtggaatggaagttggagcgatagatggaaggattggtcctttgtggataaagacgaaaaagcccgattgcaacatcaggtcactgaggatggcgaattctggatgtcatatgaggattttatataccacttcactaagctcgagatctgtaatttgactgctgatgcgttacaatctgataaactacagacttggacggtgagcgttaacgagggacggtgggtccgggggtgtagtgccggggggtgtcgaaattttcccgacaccttctggactaacccccaataccgcctcaaactgctggaagaagatgatgacccagacgatagtgaggtgatctgttcattcctagtcgccctaatgcagaagaatcgccgaaaggatcgcaagctgggggcatccttgttcaccattggctttgctatctacgaagtgccaaaggaaatgcacggaaacaaacagcacctgcaaaaggatttttttttgtacaacgcctcaaaagctaggagcaagacctacatcaacatgcgtgaagtttcccagaggttcagactcccccctagcgaatacgtgattgttccatccacttacgagccacatcaggaaggagaattcatcctgagggtcttctctgaaaaaagaaacctttcagaagaggtggagaatacgatcagcgtcgacagacctgttcctcaaccaggctccagcgaccaggaaagcgaggagcagcagcagttccgaaacatctttaagcagatagcaggagacgatatggagatctgtgcggatgagctgaaaaaggtactaaacactgtcgtaaataagcacaaagatctcaagacccatgggtttactctggagagttgcagaagcatgattgccctcatggatactgacggatccgggaagttgaacctccaggagttccaccacctgtggaacaagattaaggcttggcaaaagatttttaagcattacgatacagatcagtctgggactattaactcttacgagatgcgcaatgcagtaaatgatgctggcttccatttaaacaatcagctgtacgatattattaccatgcgctacgctgacaaacacatgaatatcgatttcgacagctttatctgctgcttcgtcaggctcgaaggcatgttcagggccttccacgcgtttgacaaggatggggacggcatcatcaaactgaatgtactcgagtggctgcagctgacaatgtacgcttag

SEQ ID NO: 181388 - DNA, 2187 bp, synthetic construct
  misc_feature 1..2187: note = Description of Artificial Sequence: Synthetic coding sequence
  source 1..2187: mol_type = other DNA
atgagctggcagatcagcctgaagacccagaccacccagcagaagaacgaaatctgcgagaatccgcgatttataatcgacggagccaatcgcaccgacatttgccagggggaactgggagactgttggttccttgccgctatcgcctgcctgactctgaatcagcacctcctcttccgggtgatcccgcacgaccagtcattcatcgagaactacgccggcatcttccacttccagttttggagatacggcgagtgggtcgatgtggttattgacgactgcttaccaacctacaacaaccagctggttttcacgaagagcaaccacagaaatgagttttggtcggccctgctcgagaaagcctacgccaagctgcacggcagctatgaggccctcaaaggggggaatacaaccgaggcaatggaggattttactgggggggtggcagaattctttgagattcgcgacgcaccatccgacatgtacaagattatgaaaaaagccattgaacgaggatctctgatgggatgcagcatcgacgacggaaccaatatgacctatgggactagccccagcggcctgaacatgggcgaactcattgcacgtatggtgcgcaacatggataactccctcctgcaggatagcgatctcgatcctcgcgggtccgatgaaagacctacgagaacaatcatacctgtgcaatacgaaacccgaatggcatgtggtctggtcagaggacacgcttactcagttaccgggctcgatgaagtgcccttcaaaggtgaaaaagtcaagctcgtgcggctgagaaacccctggggccaggtagaatggaacggcagctggtccgatcggtggaaggattggtcatttgtagataaggacgagaaagctaggctccagcaccaggtgaccgaggacggcgaattttggatgagttatgaagatttcatctaccatttcaccaagctcgaaatctgtaatctgactgcagacgcactgcaatcggataagctgcagacttggacggtatccgttaatgaggggagatgggttagaggctgcagcgcagggggctgtagaaacttcccagacaccttctggacaaaccctcaatacaggttaaagcttcttgaggaggacgatgaccccgatgatagcgaagtgatctgtagtttcctggtcgctctcatgcagaaaaaccggcgcaaggatagaaaactgggagcgagcctgtttactattgggtttgccatttacgaggtccctaaggagatgcacggaaacaaacagcacctgcagaaggatttctttctgtacaatgcctctaaggcccgatccaagacatatattaatatgcgagaggtgagccagcgctttcgtctaccaccttcagaatacgtgatcgttccatccacttacgagccccaccaagagggggaatttatcttaagggtatttagcgagaagcgtaacctttcggaggaagtggagaataccatcagcgtcgacagacccgtgccaataattttcgtcagtgatcgggcaaacagcaacaaggagctgggcgtagatcaggagtctgaggaaggtaaaggcaaaacctctcccgacaagcagaaacagagcccccagccccagcccggaagtagtgatcaggagtcagaggagcaacagcaattccggaacattttcaagcaaatcgctggggatgatatggagatctgtgccgacgagctgaagaaagtcctgaatactgtggtcaataagcataaggacctcaagactcatggctttaccctcgagtcttgccgttctatgattgcactcatggatactgatgggtcagggaagctcaacctgcaagaattccatcatctgtggaacaaaatcaaggcttggcaaaaaatcttcaagcattacgacactgaccagtccgggactattaacagctacgaaatgaggaacgcagttaacgacgccggcttccatcttaacaatcagctgtacgatattatcacgatgagatatgctgacaagcacatgaacattgattttgactcattcatttgctgttttgtgagactcgagggcatgttcagggcgtttcacgcctttgacaaggacggtgacggaattatcaaacttaatgttctcgaatggttgcagctgaccatgtacgcatag

SEQ ID NO: 181389 - DNA, 2448 bp, synthetic construct
  misc_feature 1..2448: note = Description of Artificial Sequence: Synthetic coding sequence
  source 1..2448: mol_type = other DNA
atgcccaccgtgatcagcgccagcgtggccccccggaccgccgccgaaccaagaagccccggccccgtaccccacccggcccagagtaaggctacagaggctgggggggggaacccatccggcatctattccgcgatcataagtcgaaacttccctattatcggagtgaaggagaaaacgtttgagcaactacataagaaatgtttggagaagaaagtgctctatgtcgaccctgaatttccccctgacgaaacctctctcttttattctcagaaattccccatccagttcgtttggaagagaccccctgaaatttgtgaaaatccacgcttcatcatcgatggggccaatagaactgatatatgccagggagaactgggggattgctggtttcttgctgccatcgcttgcctgacactgaatcaacatctgctgtttagggtaatcccccatgaccagtcctttattgagaattacgccggaatattccattttcagttttggcggtatggtgaatgggtagatgtggtgattgatgattgtctccctacatataataatcagctcgtattcaccaaaagtaaccaccgcaatgagttctggagcgccctgctggaaaaggcgtatgccaagctccacggcagttatgaggccctgaagggcggaaacacaaccgaggccatggaagattttactggtggggttgccgagttttttgagattcgggatgctccttccgatatgtataaaatcatgaagaaggccatagagcgcgggagcctaatgggatgtagcatagacgatggcaccaatatgacatacgggacatcaccaagcggtctgaacatgggtgaactaatcgctagaatggtgcggaacatggacaactcactcctgcaggactcagacctcgacccaagaggctccgacgagaggcccactagaactatcatccccgtacaatacgagaccaggatggcctgcgggctcgtcaggggtcacgcatattccgttacaggattagacgaggttccatttaaaggcgaaaaggtaaaactggtgagattgcgaaacccttggggtcaggtagagtggaatggcagctggagcgatcggtggaaggattggagtttcgtggataaggacgagaaagcccgcttgcaacaccaggttacagaggacggggagttctggatgagctatgaggatttcatctatcacttcaccaagctggaaatttgtaacctcaccgctgacgccctgcagtctgataagctccagacctggaccgttagcgttaacgaaggtcgctgggtgcggggttgtagtgccggtggctgtagaaatttcccagacacattctggactaacccacaatatcgcctcaaattgcttgaagaggatgatgatcccgacgactcagaagttatttgcagctttctggtcgcactgatgcaaaaaaaccgcagaaaggatagaaaactgggggctagcctgtttactataggattcgctatttacgaggttcccaaagagatgcatggcaataaacagcaccttcagaaagatttctttctgtacaacgccagcaaagctcgctcaaagacttacataaacatgcgcgaagtgtcacagagatttagattgccaccatctgagtacgtgattgtgccatctacctacgagccacaccaggaaggcgaatttatccttcgtgtatttagcgaaaaacggaatcttagcgaggaggtcgagaatacaatctccgtcgatagacctgtgccgatcattttcgtgagtgaccgcgcaaacagcaacaaggaactcggcgtggatcaagagtccgaggaaggcaagggcaagactagccccgacaagcagaagcagtccccacagccacagcccggaagcagcgatcaggaaagcgaagagcaacaacagtttcgcaacatattcaagcagatagcgggcgacgatatggaaatatgcgcggacgagctgaaaaaagttttaaatactgtggtcaataaacataaggacctgaaaacccacgggttcacactcgagtcatgccgctcaatgattgccttaatggatacggatggctccggcaagttgaatctgcaagaattccaccacctgtggaataaaattaaggcttggcaaaagatatttaaacactacgacacagaccagtcgggcacaattaattcctatgagatgcgcaacgctgttaacgacgctgggtttcacctgaataatcagctgtacgatatcataaccatgcgctacgctgacaaacatatgaacattgattttgatagcttcatttgttgcttcgttcgcctagaaggcatgttccgagctttccatgcgttcgacaaggacggcgacgggatcattaaactcaacgtcttggagtggctgcaattaaccatgtacgcatag

SEQ ID NO: 181390 - DNA, 2466 bp, synthetic construct
  misc_feature 1..2466: note = Description of Artificial Sequence: Synthetic coding sequence
  source 1..2466: mol_type = other DNA
atgcccaccgtgatcagcgccagcgtggccccccggaccgccgccgaacccaggtcgcctggccccgtgcctcaccccgcccagagtaaagcgaccgaggcaggcggcggcaaccccagtggaatttatagcgccataattagcagaaattttcctataattggggttaaggaaaagacatttgagcagctgcataaaaagtgcctagagaaaaaagtgctatatgttgaccctgagtttcctccagatgaaacctcactgttttattcccagaaattccccatacagttcgtatggaaacgaccacccgagatctgcgagaatcccagattcattatcgacggggccaatcggaccgatatttgccaaggagaactaggagattgttggtttcttgccgctattgcctgcctgacgcttaaccaacacctattatttcgggtgattcctcatgaccaatcttttattgagaattacgctgggatctttcactttcagttttggcggtacggtgaatgggtcgacgtggtgatcgacgactgccttccaacttataacaatcagctggtcttcaccaagtccaatcaccggaatgaattttggagcgcgctcctcgaaaaggcctatgccaagctccatggctcttatgaggccctcaaggggggcaacaccactgaggctatggaagatttcacaggaggggttgccgagttttttgagatccgcgacgctccctctgatatgtacaagatcatgaagaaagccattgagcgaggttccctgatgggttgttcaattgatgacgggaccaatatgacctacggaacctcacccagcggcttgaacatgggagaacttattgcgagaatggtccggaacatggacaatagcttgctgcaggattccgatcttgaccctagggggtcagacgaaaggccaacaagaaccattatccctgtccagtatgaaacgagaatggcatgtggtttggtgaggggtcacgcttattctgtgacgggcctagacgaagtgcccttcaaaggcgagaaggtgaagctggttaggcttaggaatccttggggacaggtggagtggaatggctcatggtccgacagatggaaggactggtctttcgttgataaggacgaaaaagccagactgcagcaccaagtcaccgaagacggagagttttggatgtcctacgaagacttcatctaccactttacaaagctcgaaatctgcaacctgaccgccgatgctctgcagtctgataagcttcagacgtggaccgtaagcgtgaatgaaggccgctgggtccgtggctgctcggccggcgggtgccggaactttcccgacaccttctggaccaatcctcagtacaggctgaaattgctggaagaagatgacgatcccgacgattcagaggttatttgtagttttctggtggccctgatgcaaaagaacagacggaaagatagaaagctgggcgcttctctctttacaatcgggtttgccatctatgaggtccctaaggagatgcatggtaataagcagcacctgcagaaggattttttcctatataatgcttctaaagccagatcaaagacatacatcaatatgcgagaggtgtcgcaacgtttccggctaccccccagtgagtacgtgattgtcccttcaacatacgagcctcatcaagagggagagtttatcctgcgagtgtttagtgagaaacggaacctctctgaggaggtggaaaacaccatcagcgtggaccgccctgtgaagaagaagaagacaaagcctataatctttgtgagtgacagggcaaattcaaacaaggaactgggagtcgatcaggagtctgaggagggcaaaggtaaaacctcgcctgacaagcagaagcagtcaccacaaccacagcctggctcttccgaccaggagagcgaggagcagcagcagttccgtaatatctttaaacaaatcgctggcgacgatatggagatttgtgctgacgagctaaagaaggtgctgaataccgtggtgaacaagcacaaggacctgaaaacccacgggtttactctcgagtcttgtaggagcatgatcgcgctcatggacacggatggatctggcaaactgaacctccaggagttccaccatttgtggaacaagataaaagcctggcagaagatttttaaacactacgacactgaccaatctggcacaatcaactcctacgaaatgcgcaacgctgtcaatgatgcaggctttcacctgaacaaccagttgtacgacatcatcaccatgcgatatgccgacaagcacatgaacatagacttcgactcctttatttgttgttttgtaagactcgagggcatgtttcgcgcttttcatgcattcgataaggacggggacggcattatcaaattaaacgtcctcgaatggctacagctgaccatgtatgcttag

SEQ ID NO: 181391 - DNA, 930 bp, synthetic construct
  misc_feature 1..930: note = Description of Artificial Sequence: Synthetic coding sequence
  source 1..930: mol_type = other DNA
atgcacggcaacaagcagcacctgcagaaggacttcttcctgtacaatgcaagcaaggcaaggtctaaaacatacatcaacatgcgcgaggtatcccaacggttccgattgccccccagtgaatatgtcattgtgccctccacatacgaaccacaccaggaaggtgagttcattttgagggtgttttctgagaagaggaacctctcggaagaagtggaaaacaccatctccgtagataggccagtgaagaaaaagaagaccaagccgataattttcgtgagcgaccgtgcgaacagcaacaaggagctgggggttgatcaggagagcgaggagggcaagggcaaaacgagccccgataagcagaagcagagcccacagccgcagcctggttcatcagatcaggaatcagaggagcagcagcagttccggaacatttttaagcagattgcaggtgatgacatggaaatttgcgcagacgaactgaagaaggttctcaatacagtggtgaataagcataaggacctcaaaacccacgggtttacgttagaatcgtgccgttcaatgatagctctgatggataccgatggcagtggaaagttgaatctgcaagaattccatcatttgtggaataaaatcaaggcctggcagaaaatttttaagcactacgataccgatcagtccggcaccatcaatagctatgagatgaggaatgctgttaacgatgcaggattccacttgaacaaccaactgtacgatattatcaccatgcgatatgctgataagcatatgaatattgacttcgactcattcatttgttgttttgttcgcctggagggcatgtttagagcatttcacgcctttgataaagatggcgatggaatcataaagttgaacgtgttagagtggctgcaactgacgatgtatgcttag

SEQ ID NO: 181392 - DNA, 471 bp, synthetic construct
  misc_feature 1..471: note = Description of Artificial Sequence: Synthetic coding sequence
  source 1..471: mol_type = other DNA
atggagatctgcgccgacgagctgaagaaggtgctgaacaccgtggtgaacaagcacaaagacctgaagactcatggcttcacactggagtcatgccggagcatgattgctttaatggacacagacggttctgggaaactgaatctgcaggaattccatcacctttggaacaagatcaaggcttggcaaaaaattttcaaacactacgacactgatcagagcggcacaatcaattcttacgaaatgcggaacgccgtgaatgacgctggattccacctcaacaaccaattgtacgacatcattacaatgaggtatgctgacaaacacatgaacatagatttcgatagctttatctgctgctttgtaaggctggaaggcatgtttagagccttccacgcctttgacaaagatggcgacggtatcatcaaactaaatgtcctcgagtggctacagctcaccatgtacgcatag

SEQ ID NO: 181393 - DNA, 1923 bp, synthetic construct
  misc_feature 1..1923: note = Description of Artificial Sequence: Synthetic coding sequence
  source 1..1923: mol_type = other DNA
atgttcagctgcgtgaagccctacgaggaccagaactacagcgccctgaggagagattgtcggagacgcaaggttttgttcgaggatcccctctttccagccactgatgactcactctattacaagggcacccctggccctgcagtcaggtggaagaggcctaaaggcatctgcgaggacccacgcctgtttgtggacgggatctcctcccacgacttgcatcagggccaggtcgggaattgttggttcgtcgccgcttgttcgagcctggcaagccgggagtctctgtggcagaaagtgatacctgattggaaggagcaggagtgggatcccgaaaagcctaacgcctacgctggcatctttcattttcacttttggcgctttggcgagtgggtggatgtcgtgattgacgatcgactccctacagtgaataatcaactcatctattgtcatagtaattcaaggaatgagttctggtgcgcactcgtggaaaaagcgtacgctaaattggcagggtgctaccaggcactggacgggggcaatacggccgatgccctggtcgatttcacaggcggagtatcagaacccatagacctaaccgagggagactttgccaatgatgagacaaaaaggaaccagctatttgagaggatgttgaaagtgcacagcagagggggactgatctccgcttccataaaagctgtgaccgccgccgacatggaggcacgtctggcctgcggactcgttaagggacacgcctacgcagtgaccgatgtacggaaagtgaggctgggccatgggctccttgctttcttcaaaagcgagaagttggatatgatacggctccgaaatccgtggggcgaacgcgaatggaatgggccatggtcagacacgtccgaggagtggcaaaaggtgtctaaatccgagcgggagaagatgggagtcacggttcaggatgacggagagttctggatgacgttcgaagatgtgtgtagatacttcactgacattatcaagtgcagggtgattaacacgtctcatctgagcatccacaagacttgggaagaggccagactacacggtgcctggactctacacgaggaccctagacagaacagaggcgggggctgcatcaatcataaggacactttttttcagaatccgcaatacatcttcgaggtgaagaagcccgaggacgaggttttaatttgcattcagcagaggccaaagagaagtacacgccgggagggcaagggtgaaaatctggccatcggcttcgatatttacaaagttgaggagaatagacagtacaggatgcattccttgcagcacaaggcagcctcttccatttatatcaactcccgtagcgtgtttctgagaactgaccaacccgagggccggtacgttatcatacccacgacgtttgagccagggcacacaggagaattcctgctgagagtgttcactgacgtgccctctaactgtcgggagctccggctagatgagcctccacacacgtgctggtcctcactttgtggatacccccagctggttacccaagttcacgtcttaggcgctgctggattgaaagattctcctaccggagctaactcctatgtcataatcaagtgtgaaggagataaagtgcgatcagcagtgcaaaagggcacaagcacgcctgagtataacgtaaaggggatcttctacagaaagaagctaagccaacccatcaccgtacaggtgtggaaccatcgtgtccttaaagacgaatttctgggacaggtacacctaaaggccgatcccgacaacttgcaggcgctgcatactttgcatctgagggacagaaattcaaggcagccctcaaatctccctgggacagtggccgttcatatactcagttccacctccctgatggccgtgtag

SEQ ID NO: 181394 - DNA, 2043 bp, synthetic construct
  misc_feature 1..2043: note = Description of Artificial Sequence: Synthetic coding sequence
  source 1..2043: mol_type = other DNA
atgagctgcaccggcacccccagctgcatctacctgctgagcgccttatccctccaggaccttgtgctggattgggaaccaaggggtgtcccacctcctctcccgggagctgcagccaccatgttttcatgcgtcaagccatatgaggatcagaattacagcgcactgcggagagattgccggagaagaaaggtgttgttcgaggacccgctgttccctgccaccgacgactccttatactacaagggaacaccggggccagctgtgagatggaagcgaccaaagggaatatgcgaggaccctcgactgttcgtggacggtatctcctctcacgatctgcatcaaggacaggtgggcaactgctggttcgtggcggcatgcagttcactggcttctcgagagtccctatggcagaaggtgatacctgattggaaggagcaggaatgggacccagagaagcctaacgcctacgcaggtatcttccatttccacttctggcgattcggggaatgggtcgatgttgtcatcgacgatcggcttccaactgttaataatcagctgatatactgccactctaattcacggaatgagttctggtgtgccctggtcgaaaaagcatacgcaaaattggccgggtgctatcaggcactagacgggggaaatactgccgatgcccttgtcgattttaccggtggtgtgtcagagccgattgatcttactgaaggtgactttgcgaacgacgagaccaagcgtaatcagctgttcgaaagaatgctcaaggtgcatagcagaggcggactgatatcagcttcgattaaggccgtgaccgccgccgatatggaagcgagactggcttgtggcctcgtgaaaggtcacgcatacgccgtgacagatgtcaggaaagttcggcttggccacggcctgctggcattcttcaaatccgagaaattggacatgattagactgcgtaatccatggggagaaagagaatggaacggcccatggagtgatacaagcgaagaatggcagaaagtgagcaagtcggaaagggagaagatgggcgttaccgtgcaggatgatggagagttctggatgacatttgaggacgtctgtcgctactttaccgacataatcaagtgtcgcgttataaatacatcgcatcttagcatccataaaacatgggaagaggcacggctgcacggtgcttggaccctgcacgaggatcctcggcagaaccggggcggaggatgcatcaaccacaaagataccttctttcagaatccacagtacatcttcgaagtgaaaaagccggaggatgaagtgctcatctgtatccagcagcgtccaaagcggtcaacccgcagggaaggaaaaggggaaaacctcgccattggcttcgatatctataaagtggaagagaacaggcaataccggatgcacagcttgcagcataaggcagcaagcagtatatacatcaactctaggtccgtatttctgagaaccgaccaaccagagggaagatatgtaattatcccaacaactttcgagcctggccatactggtgagttcctgttgcgggtcttcacggacgtcccgagcaactgtagggagctgcgactggatgaaccacctcacacatgctggtcttctctgtgtggctatcctcaattggtcacacaagttcacgtcctgggggctgccgggttaaaagacagccctacgggcgctaatagctacgtcatcattaaatgtgagggcgataaagtgaggtctgctgtccagaagggaacctctacccctgagtataacgtcaagggtatcttctatagaaaaaaattgagtcagcccatcaccgtacaggtgtggaaccacagagtgcttaaggacgagtttttgggccaggttcacctcaaagctgatccggacaacctgcaggctctgcacacattgcatctgcgagaccgcaacagcaggcagccatctaacttgccaggcaccgtcgccgtacatattctgagttccactagtctgatggctgtctag

SEQ ID NO: 181395 - DNA, 294 bp, synthetic construct
  misc_feature 1..294: note = Description of Artificial Sequence: Synthetic coding sequence
  source 1..294: mol_type = other DNA
atgttcagctgcgtgaagccctacgaggaccagaactacagcgccctgcggcgcgattgtaggcgacgaaaagttctattcgaagacccactcttccctgctacagacgactcattgtactacaaaggtacgccgggacctgctgtacggtggaagagacctaagggcatctgtgaagaccccagactgttcgttgatgggatctccagccatgacctccaccagggacaggtgggcaattgctggttcgttgccgcttgttcctcgctggctagcagagaatcactttggtag

SEQ ID NO: 181396 - DNA, 1923 bp, synthetic construct
  misc_feature 1..1923: note = Description of Artificial Sequence: Synthetic coding sequence
  source 1..1923: mol_type = other DNA
atgttcagctgcgtgaagccctacgaggaccagaactacagcgccttacggcgggactgtcgcagacgtaaggtgctcttcgaggatccactgtttcccgcaacagatgactccttgtactataagggaacgcccggtcccgcagtgaggtggaagcgcccgaaggggatctgtgaggatccaaggcttttcgtcgacggaattagctcacacgatttgcatcaaggtcaagtggggaattgctggttcgtagccgcatgctcatctcttgctagcagggaatcactgtggcaaaaggttatccccgactggaaggaacaggagtgggaccccgagaaacccaatgcctacgcaggtatctttcactttcatttttggcgcttcggcgagtgggtcgacgttgtgatagatgataggctgccgaccgtcaataatcaactaatctactgccatagcaactctagaaacgagttctggtgcgcactcgtcgagaaggcttatgcaaagctcgccggttgttaccaagccctggacggtggtaatacagcagacgctctggtagatttcacagggggagtcagcgagccgatcgaccttacagaaggggatttcgctaatgacgaaaccaaacgtaatcagctattcgagagaatgcttaaggttcactcacgcggtggcctgatatctgcatcaatcaaggcagtcacagcagcggatatggaagccagattggcctgtggtctcgtcaaaggccacgcctacgccgtgaccgatgttcggaaggtccgcctggggcatggactcttggccttttttaagagcgaaaagctcgatatgattcggctccgaaacccctggggagagagagagtggaacggcccttggtctgacacctccgaggagtggcagaaggtgtccaaatcggaacgcgagaagatgggagttacggtgcaggacgacggagaattttggatgacctttgaagatgtttgtcggtatttcacagacatcatcaagtgccgggtcattaatacttcacatctgagtattcacaaaacatgggaggaggcccgcctgcatggggcttggaccctgcatgaagacccacggcagaatagagggggggggtgtatcaaccacaaggacactttttttcagaacccacagtacatctttgaggttaaaaaaccggaagatgaggtcctcatctgtattcaacagcgacccaagaggtcgacccgcagggaaggcaaaggcgagaatctggctattggattcgatatttacaaagtcgaggagaacagacagtataggatgcactccttgcagcacaaggccgccagttcgatttacatcaatagccgatcagtgttcctgcgtaccgaccagcctgaggggcggtacgtgattatccctaccacgttcgaacccgggcacaccggtgagttcctacttcgcgtgtttaccgatgtgcccagcaactgtcgcgagctcagactggatgagcctcctcacacatgttggagctctctctgtggctacccacaactagtcacgcaggtgcatgtcctcggcgctgccggactgaaggacagtcctaccggggcaaattcatacgttattattaagtgtgagggcgacaaggtgcgaagcgcagtgcaaaaggggacctccaccccggagtacaacgtgaagggtatcttctaccggaagaaactttcgcagcccattacagttcaagtgtggaaccatcgcgtgcttaaggatgaatttctgggccaggtccatctgaaggccgaccccgataacctgcaagccctccataccctgcacctccgagatcgtaactcgcggcagccctcgaaccttccgggaaccgtagccgtgcacattttatcctctacatcgctgatggccgtatag

SEQ ID NO: 181397 - DNA, 1674 bp, synthetic construct
  misc_feature 1..1674: note = Description of Artificial Sequence: Synthetic coding sequence
  source 1..1674: mol_type = other DNA
atgttcagctgcgtgaagccctacgaggaccagaactacagcgccttgcgcagggattgccgccggaggaaggttctcttcgaggacccgctgtttcccgccacagatgactccctttattacaagggcaccccggggccagcagtccggtggaagcggcctaaatatagtggccacagcctggccccacatcggccggggtggggggacgcgagaaggatggagaacgttccccgaccagggtcttcaggttgcccctcatccagcctgcgcgcacgcgatctcgggatctgtgaagaccctcgcctgttcgtcgacggcatctcctcgcacgacttgcaccaggggcaggtcggcaactgttggttcgtagcggcttgctccagcttggcttcccgcgagtctctgtggcagaaagtgattccagattggaaagaacaagaatgggatcctgaaaagcctaacgcttatgcaggaatatttcacttccatttctggcgtttcggagagtgggtcgatgtcgtgattgacgatcgcctgcccacagtcaacaaccaattgatttactgccacagtaactcgcgtaacgagttctggtgtgcgctcgtagagaaggcctatgcaaaattggccggctgttaccaggccctggacggaggtaacactgctgatgctttggtcgattttacgggcggtgtctctgagcccatcgatctgaccgagggagatttcgccaacgacgagaccaaacgaaaccagctatttgaacgtatgcttaaagtacactcacggggcggcctcatatcagcttctatcaaggcggtgaccgcagctgacatggaagccagactggcttgcgggctggttaagggacacgcgtatgcagttaccgatgtccgaaaggtgagattgggacacgggctcttagcatttttcaaatctgagaagctggacatgatccgacttaggaatccatggggagagagggaatggaacgggccgtggagcgacacctctgaggagtggcagaaggtttctaagagcgaacgcgagaagatgggggtaacggtgcaggacgatggtgagttctggatgacctttgaggacgtgtgtcgctactttaccgacattattaagtgccgggtcatcaatacaagtcatttgtcgatccataagacatgggaggaggcccgtttgcatggtgcctggacgctgcatgaggatcccaggcagaatcggggcgggggctgtattaaccacaaggatacttttttccagaacccgcagtacatattcgaggtgaagaagccagaagacgaggtgctgatctgtatacaacagagacccaagcgttcaactcgcagggagggtaaaggggagaatctagctattgggtttgatatatacaaggtggaagaaaatagacaatacagaatgcattcattgcagcacaaagcagctagttccatatatattaattcacgcagtgtgtttctcaggacagaccagcccgaaggccggtatgtgataatcccaacaaccttcgaaccaggacatacaggagaatttctgctgcgcgtttttaccgacgttccaagcaattgccgcgagctccgtcttgacgagcccccccatacctgttggtcctcactctgcgggtacccccagtggtag

SEQ ID NO: 181398 - DNA, 2442 bp, synthetic construct
  misc_feature 1..2442: note = Description of Artificial Sequence: Synthetic coding sequence
  source 1..2442: mol_type = other DNA
atggacgccaccgccctggagcgggacgccgtgcagttcgcccggctggctgtgcagcgagaccacgagggtcgttatagtgaagctgtattttattacaaagaggcggcacaggccttaatttacgccgaaatggccggcagctccctggaaaatatccaggagaagattactgaatatctggaacgagtccaagcactgcactcagcagtgcaaagcaaaagcgctgatcctctgaaaagcaaacatcagctcgacctggagagagcgcacttcttagtaacccaggcattcgacgaggacgagaaggagaacgtcgaggatgcaatcgagctgtatacagaggccgttgacttgtgtttgaagacaagttatgagacagcagacaaggtactgcagaacaagttgaagcagctggctcgccaagcccttgaccgtgccgaagccctgtcagagcccctcacgaaacctgtgggcaagatttcatccacgagtgtgaagcccaagcccccccccgtcagagcccacttccccttgggggcgaacccttttctcgaacgaccccagagtttcatctcgccacaatcgtgtgacgcgcaaggtcagcgctataccgccgaggagatagaggtcttgagaacaacctctaagatcaatggcattgaatacgttcctttcatgaatgtggatctcagggagagattcgcctaccctatgccattctgtgatcggtgggggaaattaccgttaagtcccaaacagaagacgaccttcagcaagtgggtaagacccgaggaccttacaaacaatcctacaatgatctatacagtgtcatccttttctattaaacagacgattgtctccgactgcagcttcgtggctagccttgctatttcagccgcttacgaacggaggttcaacaaaaaattaatcaccggcattatttatccacagaataaagacggcgaaccagagtacaacccttgtggcaagtatatggtcaaactgcacctaaatggagtccctcgaaaagttatcatcgacgatcagttgccagtggaccacaagggcgagttgctttgttcgtactctaataacaagtctgagctttgggtgagcttaatcgaaaaggcctacatgaaagttatgggtgggtacgactttcccggttcaaattccaacatcgacctgcacgcactcacgggatggatccccgaacgtatagctatgcactcagacagtcaaactttttctaaggacaattctttcagaatgctgtatcaacggtttcacaagggggatgtgttaattaccgcatctacaggcatgatgactgaagcagagggggagaaatggggactcgtcccgactcatgcatacgccgtgctggacattagagagtttaaaggcctcagatttatccagctgaagaacccttggtctcacctgaggtggaaggggcgatactcagagaatgatgttaaaaactggactcctgagctgcaaaagtacctgaacttcgaccctagaactgcacagaagattgacaacggaatcttttggatatcgtgggacgacctctgccagtactatgacgtgatatacttaagttggaaccctggactgttcaaggaatcaacctgtatacactctacctgggatgccaaacagggacccgtcaaagacgcgtacagtctagctaacaacccacagtataagctggaggttcagtgcccacagggaggcgccgcagtctgggtcttgttgtcacggcacatcaccgacaaagacgactttgcaaacaatagggaatttattacgatggtggtctataaaaccgacgggaagaaggtgtattaccctgctgatccacccccttacatagacggcatacgcatcaactcaccacattatctgaccaagattaagctaaccacccccgggacacacaccttcactctcgtcgtttcacaatacgagaagcagaacacaatccattacactgtaagagtctattctgcctgctctttcacgttctctaaaattccatcaccttatacgttgagtaagcgcattaacggaaaatggtccggccagagcgctggcggatgtggaaactttcaggaaactcataagaataaccccatatatcagttccacatagaaaaaacagggcccctgctgatcgagttgcgaggcccccggcagtacagtgtcgggttcgaagtcgtgacagtttccaccctcggagacccgggtcctcacggatttctacgcaagtcttctggggattatagatgcggcttttgttatctggagctggagaacatcccatcagggatttttaatattattccgtcaacctttctcccaaagcaggaagggccattcttcctcgactttaatagcattatccccatcaagatcacccagcttcaatag

SEQ ID NO: 181399 - DNA, 2073 bp, synthetic construct
  misc_feature 1..2073: note = Description of Artificial Sequence: Synthetic coding sequence
  source 1..2073: mol_type = other DNA
atgccctacctgtaccgggcccccggcccccaggcccaccccgtgccgaaagatgctagaattactcacagcagtggacaaagcttcgagcagatgcgtcaggagtgtcttcagcgaggtactctgtttgaggacgcagattttcccgccagcaacagtagtctgttctactcagaaaggccacagattccctttgtttggaagagaccgggtgaaattgttaaaaacccagagttcatcctgggtggagctacccggaccgatatctgtcagggtgaactgggggattgctggctccttgctgcaatcgcctctctaacattgaatcagaaagcactcgcccgcgtgattccacaggaccaaagctttggacctggatacgccggtatcttccattttcagttttggcagcatagtgaatggctggatgtggttattgacgaccggcttcccacattccgggatagactggtcttcctccattcagctgaccataacgaattttggtctgcccttctggagaaagcttacgccaagctgaacggcagctacgaagcgttgaagggtgggagtgccattgaggcaatggaagattttactggtggagtggctgagactttccagactaaagaagcacccgaaaatttttatgaaattcttgagaaggccttaaagcgaggaagtttactgggctgctttattgacactagatcagctgccgagtcggaggccagaactccattcggccttattaaaggccacgcatatagcgtaacaggcatcgaccaggtgtccttcagggggcagaggattgaattgatcagaatcaggaacccgtggggccaagtggagtggaatggatcctggagcgacagctccccggagtggaggagcgttggcccagctgagcagaagcgcctttgccacaccgccctggacgatggcgaattctggatggcattcaaggacttcaaggcgcacttcgataaggtggagatctgtaatctcactccagacgctctcgaggaggatgccattcacaaatgggaagtaacagtccaccagggctcttgggtgaggggatccaccgctggtggttgtcgcaacttcctcgacactttttggaccaacccacagattaagctgtctctgaccgaaaaggatgaaggacaggaagaatgctcttttctggtcgctcttatgcaaaaagacagaagaaagctgaagagatttggcgctaacgtgttaactataggatacgccatctacgaatgcccggataaagatgagcatctgaacaaagatttcttccggtatcacgcgagcagggcgcgttctaagactttcataaacctccgggaagtgtctgataggttcaaactgcctcccggcgaatatattctaatcccaagtaccttcgagcctcaccaggaggcagacttctgtctccggatcttcagcgagaagaaggctatcaccagggacatggacggcaacgtggacatagacctgcctgaacctcctaaaccgacgccccccgaccaggaaaccgaagaggagcagagattccgggcgttgttcgaacaggtggccggagaggacatggaagtaacagcagaggaactagaatacgtcctgaacgcagttctgcagaagaagaaggacattaaatttaaaaagttgagcctgatatcatgcaaaaatatcattagccttatggacacttccggcaacgggaaacttgagttcgatgaatttaaggtgttctgggacaagctgaagcagtggataaatctgtttttacggttcgacgctgataagagcggcactatgtctacgtacgagctgcggacagctctgaaggctgcagggttccaactgagctcgcacttacttcagctaattgtgctgagatatgccgacgaggagctgcagctcgatttcgatgatttccttaactgcttggtaagacttgagaatgcgagtcgggtttttcaggccctgagcacaaaaaataaggagtttattcacctgaacatcaacgaatttatccacctcactatgaacatctag

SEQ ID NO: 181400 - DNA, 1995 bp, synthetic construct
  misc_feature 1..1995: note = Description of Artificial Sequence: Synthetic coding sequence
  source 1..1995: mol_type = other DNA
atgccctacctgtaccgggcccccggcccccaggcccaccccgtgccaaaggacgctagaattacccattcctcgggccaatcatttgagcaaatgagacaggagtgcctccagcgcggtactcttttcgaggacgctgacttccctgcctccaatagttccttattctacagcgagcgcccccagatcccttttgtatggaagcgacctggcgagatcgtcaaaaacccagagttcatattgggcggcgctacaagaaccgatatctgccagggtgaacttggcgactgctggctacttgccgccatcgcttccctcacattgaaccaaaaagcacttgcccgcgtgattcctcaagaccagtcctttggccccggatacgcaggcattttccattttcagttctggcagcattcagagtggctcgacgtggtcattgacgaccggttaccaaccttccgggataggcttgttttcttacactctgcagaccataacgagttttggagcgctctacttgagaaagcctacgccaagctaaatgggtcgtacgaggcgctgaaggggggcagtgcaatcgaggctatggaagatttcactggaggagttgcagaaacttttcaaaccaaagaagcaccagagaatttctacgagatactcgagaaggctctaaaaaggggctctttactggggtgtttcattgatactaggagcgcagcggaaagcgaggcaagaacccctttcggcttgatcaaggggcatgcatattccgtcaccggcatcgaccaggttagcttccgtggccaacggatcgagttgatccgaattaggaacccgtggggacaggtagagtggaatgggagctggagcgaccgcatggccttcaaagacttcaaggcccattttgataaagttgaaatctgcaatctcacccctgatgcactggaagaagatgccattcacaagtgggaggtgactgtgcatcaggggtcttgggtgagaggctcaactgctggaggatgcaggaattttttggacacgttttggactaatccccagatcaagctctctttaaccgaaaaggatgaagggcaggaggaatgttctttcctcgtggcccttatgcagaaggacaggcgaaaacttaagaggttcggcgcaaatgtattgactattggctacgctatctacgaatgccccgataaagacgagcatcttaataaagacttctttaggtaccatgcatcgagggcccgaagtaagacgttcatcaacctgcgggaagtatccgatcgttttaagctccctcctggagaatacatcctcattccatccacctttgagcctcatcaggaggctgacttttgcttgaggattttttccgagaagaaggcgatcactagggatatggacggtaacgtggatatagatctgccggagccccctaaaccaactccacccgaccaggagacggaagaagagcaacggtttcgcgccttgttcgaacaggtagctggcgaagacatggaggtgactgccgaggagctggagtatgttctgaacgctgtcctgcagaagaagaaagacattaaattcaagaagctcagtcttatctcctgcaaaaacattatttctctcatggatactagtggtaacgggaaactggaatttgatgagtttaaagtattctgggacaagctgaaacagtggatcaacctattcctccgcttcgatgcggacaaatctggtactatgagcacatacgaactacggacagccctaaaagccgccgggtttcagcttagctctcatctattacaactcattgtgctccgatatgcagacgaggaactgcaactcgatttcgacgactttctgaactgtttggtgcgcctggaaaatgcctccagagtgtttcaggctctaagtactaagaacaaagagttcatacacctgaacatcaacgagtttatccacttgactatgaacatctag

SEQ ID NO: 181401 - DNA, 1884 bp, synthetic construct
  misc_feature 1..1884: note = Description of Artificial Sequence: Synthetic coding sequence
  source 1..1884: mol_type = other DNA
atgccctacctgtaccgggcccccggcccccaggcccaccccgtgccaaaggacgcgaggatcactcacagctcaggacagtccttcgagcagatgaggcaagaatgccttcaaagaggcacactgtttgaggacgcggacttccccgcctcaaatagctctttattttactccgagcgcccgcagattcccttcgtatggaagcgcccaggcttttggcagcacagcgagtggctggatgtcgtcatcgatgatcggttacccacgttccgggaccggcttgtctttttgcactccgccgaccataacgaattttggagtgctctgctggagaaagcatatgccaaactgaacggcagctacgaggccttgaaaggagggtctgccatcgaagccatggaagacttcactgggggagttgctgaaacattccaaaccaaggaagcccccgagaacttttacgagatactggagaaagctcttaagaggggcagcctgctcggatgctttatcgacactcgcagcgccgccgagagcgaagcccggaccccatttggcctcatcaaggggcatgcttacagcgtaaccggcatcgaccaggtgtccttccgcggacagcgcatcgagcttatcagaatacggaacccgtggggtcaggtggagtggaacggatcatggtcagattcctcaccagagtggagatcagttggccctgctgagcagaaaagactgtgccacaccgcgctagacgatggagagttctggatggccttcaaagattttaaagcgcattttgataaggtggaaatttgcaatctgactcccgacgccctcgaagaagatgcaattcacaagtgggaagtgactgtgcaccagggttcttgggttaggggatcaacagccggagggtgtcgcaattttctagacacattttggaccaaccctcaaatcaagctctccctgacggaaaaggatgaaggacaggaggagtgcagcttcctggtcgctttaatgcagaaagacagacgaaaactgaaacgctttggggcaaacgtactcaccataggttatgcaatctacgaatgtcctgacaaggacgaacatctaaataaggacttcttcagatatcacgcaagccgtgctagaagcaaaaccttcattaacctgagggaggtttctgatcggttcaagctacctccgggcgagtacatactgatcccaagcacattcgaaccacaccaggaagccgacttctgtcttcgtattttctctgaaaagaaggccatcaccagagacatggacggaaacgtcgatatcgacttgccggagccccccaaacctacacctccagaccaggaaacagaagaggaacagcggtttagagccctgttcgagcaggttgctggggaagacatggaggtgactgccgaagagctggaatatgtcctaaacgctgtgcttcagaagaaaaaagatattaagtttaagaaactaagcttaatcagttgcaaaaacatcatttccctgatggatacgtctggaaacggtaagcttgagttcgacgagtttaaggtgttctgggataaactcaaacagtggatcaaccttttcctacgatttgacgccgataaaagcggaactatgtccacatacgagcttcgtacagcactgaaagcagctggtttccaacttagtagtcacctactgcagcttatagttctccgatatgccgacgaagagctgcagcttgactttgacgattttctgaattgcctggttcgcttggagaatgcatcacgcgtattccaggccttatccaccaaaaataaggagttcattcacttaaacattaatgaatttatacacctcaccatgaacatctag

SEQ ID NO: 181402 - DNA, 807 bp, synthetic construct
  misc_feature 1..807: note = Description of Artificial Sequence: Synthetic coding sequence
  source 1..807: mol_type = other DNA
atgttcctggtgaacagcttcctgaagggcggcggcggcggcggcgggggcggaggcggactcggggggggcctggggaatgtgctgggcggtctgattagtggtgccgggggtggcggagggggcggcgggggcggaggcggaggtggcgggggcgggggtggaggcaccgcaatgcgaattcttgggggggtgatcagtgcaattagcgaggccgcagcccaatataatcctgagccacccccccccagaactcactactccaatatcgaggccaatgaaagcgaagaggtgagacaatttcgtcggttatttgcacaactggcgggagacgacatggaggtgtccgcaaccgaactcatgaacattctcaataaggtggtgacgcgacatcctgatctcaaaactgatgggttcggaatcgacacatgtagaagcatggtcgcggtaatggactcagatacaacagggaagctgggatttgaagaatttaaatacctgtggaataatatcaagcgctggcaggccatctacaagcaatttgataccgacagaagcggtacaatctgtagttccgaactccccggggccttcgaagcagccgggttccatctgaacgagcacctgtataatatgataatccgacgatatagcgacgaaagcggcaatatggacttcgacaactttatttcctgcctcgttaggcttgacgccatgtttcgagcttttaaatccctcgataaggatgggaccgggcagatccaggtaaatatccaggagtggctgcagctaacgatgtactcgtag

SEQ ID NO: 181403 - DNA, 2061 bp, synthetic construct
  misc_feature 1..2061: note = Description of Artificial Sequence: Synthetic coding sequence
  source 1..2061: mol_type = other DNA
atgaaccccaccgagaccaaggccgtgaagaccgagcccgagaagaaaagtcagtctaccaaattgagcgtggtgcacgaaaaaaaatctcaagaaggcaagccaaaagagcacacggagcctaagtctcttcccaaacaggcgagcgatacgggtagtaacgatgcacacaacaagaaagcagtgtcgcgctcagctgagcagcagccctcggagaagtcgaccgaaccaaaaactaagccacaagacatgatctctgccggcggggagagtgtggccggtattactgccatttctggaaagcccggagacaagaagaaagagaagaagagcctgacacccgcagtccctgtagagagcaaacccgataagccgtctgggaagtctggcatggatgcggctttagatgacctgatagatacactcggcggacctgaggaaaccgaggaggagaacactacatatactgggccagaagtatccgatcccatgtccagtacatatatcgaggaactggggaagcgggaggtaaccatcccccctaaatatagggagctcctggcgaaaaaagaggggattaccgggcctccagcagactccagtaaacccattgggcccgatgacgctattgatgctcttagcagcgacttcacatgcgggagccctaccgctgctgggaagaagaccgaaaaggaagagagcaccgaagtgctgaaagcacagagcgccggtactgtccgttcggccgcaccacctcaagagaaaaagcgcaaggtggaaaaggacacaatgagcgaccaagctcttgaagcactctcagcatctttgggcacccggcaggccgagccggaactcgatctgagatccatcaaagaagtggatgaggccaaagcaaaggaggagaagttagagaagtgcggagaggacgacgaaacaatcccttctgagtataggctaaagcctgccactgataaggatggaaaacccctcctccctgaacccgaggagaagccgaagcctagatctgagagcgaattgattgatgaactcagcgaagatttcgacaggagcgaatgcaaggagaaaccttctaaacctaccgaaaagactgaggaatccaaagcagcggcgccagcaccggtgagcgaagccgtgtgcagaacctccatgtgttcgattcaatctgcaccacctgagccagccacccttaaagggacggtgcccgacgacgccgtggaggcactggctgatagcctcggaaagaaggaggccgacccagaagatggaaagcccgtcatggacaaggtaaaggagaaggctaaggaggaagatagggagaaacttggcgaaaaagaggagacaatccccccagattataggctggaggaggtgaaagacaaagatggcaagccgctgctcccgaaagaaagcaaagagcagttgccccctatgtctgaagattttctcctggacgccctgtccgaggatttctcagggccacagaacgcatcttcacttaaattcgaggatgcaaagctcgccgcagcgatttcagaagtagttagtcagacaccagcaagcacgacccaggcaggcgccccgcccagagataccagccagtccgataaggacctggacgatgcactggacaagctaagtgattctttaggtcaacgccagccagatcccgatgagaacaagcccatggaggacaaagtcaaagagaaggcgaaagcagagcatagggataagctgggggaaagggatgacacgatccctcctgagtaccgccacctgctcgatgataacggccaggacaagccagtcaaaccacctactaagaagtcagaggactcgaaaaaaccggcagacgaccaagaccccatcgacgccctctccggcgaccttgactcttgcccctcgaccacagagacctctcagaacaccgctaaagataagtgtaaaaaggcggcctcgagcagtaaggctcccaagaatggaggaaaagcgaaagatagtgcaaaaactaccgaggaaaccagcaagccgaaggacgactag

SEQ ID NO: 181404 - DNA, 2271 bp, synthetic construct
  misc_feature 1..2271: note = Description of Artificial Sequence: Synthetic coding sequence
  source 1..2271: mol_type = other DNA
atgagccagcccggccagaagcccgccgccagcccccggccccggagggctgcggctgcccggcgaactcacgaacatgtaagcgagaagacgtctgaaagcccctcaaagccaggtgaaaagaaaggttccgacgagaagaaggccgcgtctcttggatccagtcagagctcgcgaacatatgctggcggcaccgcttcagccacgaaagtgtcagccagtagtggtgcaacctctaaatctagttccatgaatcccactgagacaaaagccgtcaagactgagcccgagaagaaatcacagtccaccaagctatcagtcgtgcatgagaaaaaatcccaagaaggaaagcctaaggagcacacagagccgaaaagcctaccaaagcaggcaagtgataccggcagcaatgatgctcacaataagaaagccgtgagtcgttcggcggaacaacagccctctgaaaaaagcacggaacctaagactaaaccccaggacatgatcagcgcaggcggcgaaagtgtggccggcataacggctatttctgggaagcctggggacaaaaagaaagaaaagaagagtctcaccccagccgtgcccgtcgagtccaaacctgataagccctctgggaagtccggaatggatgcggccctcgatgatttgatcgataccctgggcggccctgaagagacagaagaggaaaataccacctacactggacctgaagtgtcagacccaatgtccagcacgtatattgaggagcttgggaaacgcgaagtcaccatcccccccaaatacagagagctgctggccaaaccgatcgggcccgacgacgctattgatgcactctccagtgatttcacatgtggatctcccactgcagcggggaagaaaaccgagaaagaagagtctaccgaagtgctgaaggcccaatcagcaggtacagtccggtcagcagcgcctcctcaggagaaaaaacgtaaagttgaaaaggatacaatgagcgaccaggccttagaggctttgtcggcctctttagggactaggcaagccgagcccgaattggaccttaggtcaatcaaagaggttgacgaggcaaaggccaaagaggaaaaactggaaaaatgcggcgaggatgacgagaccattccttccgagtacagactgaagccagccactgacaaagacgggaaaccactgctgccagagccagaagagaagcccaaaccgaggtctgaatctgaactaatcgacgaactttccgaagactttgatcgttctgaatgtaaggagaagccctcaaaacccacagaaaagacagaagagtctaaagctgcagccccggctccagtgtccgaagccgtttgccggaccagtatgtgcagcatccaaagcgcaccacctgagccagcaaccctaaaaggcacagtacccgatgacgctgtcgaagcactggccgacagtctcggcaaaaaggaagccgaccccgaggacggcaagccggtgatggataaggtgaaagaaaaggccaaggaagaggacagggagaagctgggcgagaaggaggaaacgattccgccagactacaggctcgaagaggtgaaggacaaggacggcaagccgctgttgccgaaagagagcaaagagcaactacctccgatgagtgaagattttttacttgatgctctctctgaagacttttctggaccccagaatgcatcctcattgaagtttgaagacgctaagctggccgccgctattagcgaggtagtgtcacagacacccgcttcaacaacacaggccggtgcaccccctagagacactagccagagcgacaaggatctggacgacgcacttgataagctgagcgacagccttggccagcgccagcccgaccccgatgagaataagcccatggaggacaaggtgaaagaaaaagctaaagcagaacaccgtgataagttgggtgaacgggatgataccatcccccctgagtatagacacttactggacgataacggccaagataaaccagtcaaaccacctaccaagaaatccgaagattccaaaaaacccgccgatgatcaagatcctatcgatgctttatctggcgaccttgactcttgcccatccactaccgaaacaagccagaacactgccaaggataaatgcaaaaaagccgcgtccagtagcaaagctcccaaaaatggaggcaaggccaaggactccgcgaagactaccgaggagacttctaaacccaaggatgactag

SEQ ID NO: 181405 - DNA, 2088 bp, synthetic construct
  misc_feature 1..2088: note = Description of Artificial Sequence: Synthetic coding sequence
  source 1..2088: mol_type = other DNA
atgaaccccaccgagaccaaggccatccccgtgagccagcagatggaaggaccacacctcccaaataagaagaagcacaagaagcaggccgtgaagactgagccagagaagaagtcccagtccacgaaactcagtgtggtgcacgagaaaaagtcacaggaaggcaaacctaaggaacacacagaaccaaagtccctgcccaaacaagcctccgataccggctccaacgatgctcacaacaaaaaagctgtctccagatccgccgaacagcaacccagcgagaagtctactgaaccaaaaactaaaccacaggatatgatatccgccggtggtgaatccgttgccggcataactgcaatcagtggcaagccaggagacaaaaaaaaggagaagaaatcgttaactcctgccgtacctgtcgagtccaagcccgataaaccatccgggaagtctggaatggatgcggctctggacgatctcatagacacattaggcggcccagaggagactgaagaagagaacacaacctacacgggccccgaggtgtccgatccgatgagctcaacgtacatcgaggagctgggtaagagagaggttacgataccccccaagtaccgcgagcttctcgcaaaacctataggacccgacgacgccattgacgccttgagtagcgacttcacgtgtggcagtcctactgccgctggcaagaaaacagagaaggaggagtccacagaagtccttaaagcacagagcgccggaaccgtccgatctgctgcaccccctcaggaaaagaagagaaaggtcgagaaggacaccatgtccgatcaggctctggaagcgctttctgcctcactgggaacccggcaggcagaacctgagctcgacctccgaagtattaaagaggtggatgaagccaaagctaaggaagagaaactcgaaaaatgcggggaagacgatgagaccatcccatcggagtacaggttgaaaccagcaaccgacaaggacggaaagccactgttgccggagccggaggaaaaacctaaacctagatccgagagtgaactgatcgacgagctgagcgaggatttcgacaggtccgagtgtaaggagaagccttccaagcccaccgagaagacggaagaatccaaagccgcagcaccagccccagtgtcagaagctgtttgcaggacctccatgtgttcgatccagagtgctcccccggaacccgctaccctgaaaggaacagtgccggacgatgcagtcgaagctttggccgattcccttggcaaaaaagaagccgatccagaggatgggaaaccagtaatggataaggtcaaggaaaaggcaaaagaggaggatagggagaagctgggcgaaaaggaggagaccatcccgccggattatcgcctcgaggaagtgaaggataaagatgggaaaccactgctccctaaggagtccaaggaacaactgcctccgatgtccgaggattttctgctggacgccctgagcgaagatttcagcggcccgcagaatgcctccagtcttaagtttgaggacgccaagctggccgctgctatatcagaggtcgtcagccagacacccgccagcactacacaggcaggagcacctccgagggatacctctcaatctgataaggacctggacgatgccctggataagctttccgacagtctcggacagagacagccagacccagacgaaaacaagcccatggaagataaggtgaaggagaaagcaaaggctgaacaccgggacaaactgggggaacgcgatgacaccattcccccagaataccgccacctcttggatgacaatggtcaggataagcctgtgaaacctccgactaaaaaatccgaggatagtaaaaaacccgctgatgaccaagatcctatcgacgccctcagcggcgatctcgactcatgtccttccacaactgagactagccagaatacggctaaagataaatgcaagaaagcagcatcttcgtccaaagcgcccaagaatggtggaaaagcaaaggactccgctaagacaacagaggagacctccaagccaaaggacgactag

SEQ ID NO: 181406 - DNA, 2127 bp, synthetic construct
  misc_feature 1..2127: note = Description of Artificial Sequence: Synthetic coding sequence
  source 1..2127: mol_type = other DNA
atgaaccccaccgagaccaaggccatccccgtgagccagcagatggagggcccacacctgcctaacaagaaaaagcacaagaaacaggctgtgaaaacggagccagagaagaaatctcaatccacaaagctctcagtagtgcacgaaaagaagtcccaggaagggaaaccaaaggagcacaccgaaccaaaatctcttcctaaacaggcttccgacacaggatctaacgatgctcataataagaaggctgtgagccgcagtgccgaacagcagccaagcgaaaaaagtacggaacctaagaccaaacctcaggatatgatatcagccggaggcgaatccgtggcaggcattacggcaatcagcggcaagcctggcgataaaaagaaggaaaagaaatctctgacccccgctgtgccagtggagagtaaaccggacaaacctagcggcaaaagtggaatggacgcagcgctggatgatcttatagatacactgggtgggccagaagagacagaagaggagaacacaacctataccgggcccgaggtgagtgaccccatgtccagcacgtacatagaggagttagggaagcgggaagtgacgattccccccaaatacagagagttgctggcaaagaaggagggtatcacaggtccacctgctgattcttccaaacctatcggtcccgacgatgcgatagacgccctcagcagcgactttacgtgtggcagtcctacggcggccggaaagaaaactgaaaaggaagaatctactgaagtccttaaggcacagtctgctggcaccgttcggtcagccgcacccccccaggagaagaagagaaaagtggaaaaagacactatgagtgatcaagctttagaagcactgtccgcctccctcggcacccgacaggccgagccagagttggacttgcgatctatcaaagaagtggatgaagctaaggcgaaggaagagaaactggagaagtgtggcgaggatgacgaaactattccgtcggagtatcgcctgaaacctgcaaccgacaaagatggcaagcctctcctgcccgagccggaggagaaaccaaaaccaaggtcagagtcagagctgatcgatgagctgtctgaggatttcgacagatctgagtgtaaagagaagccctcaaagcccaccgaaaagacagaagagagtaaggcggcagcccctgcgcctgtgtcagaagctgtgtgccggacatcaatgtgctctatccagtcagctcccccggagcccgccacactaaaaggcactgtgcctgacgatgccgtcgaagctcttgcagactctctgggcaaaaaggaggcagaccctgaagacgggaaaccagtgatggataaagtcaaggagaaggccaaggaggaagaccgagaaaagctcggggaaaaggaagaaaccattccgccagactacaggctggaggaagttaaagacaaagacggcaagcctttgttgccaaaggagtcaaaggaacagcttccacccatgagcgaggacttccttttggatgccttaagcgaggacttctccgggccacagaacgctagctcgctcaagttcgaggatgcaaaactcgcagctgctatctctgaggtggtctcccagacacccgcgtcaactactcaagctggggctcctcctcgggatacctcacagagcgacaaagatctcgacgacgccttagacaaactaagcgactctcttggccaacgacagcctgatcctgacgaaaacaaacccatggaggacaaggtaaaggaaaaggctaaagctgagcacagggacaagctcggagaacgggatgataccatacctcctgagtatcgtcatttgctagacgacaacggtcaagataaacccgtcaagcctcctacaaagaaatccgaagactcaaaaaagcccgccgatgaccaggaccccatagacgcactgtcgggcgatctggactcttgtccttcaactactgagacctctcagaatacagcaaaagataagtgtaaaaaagctgcttcttcctccaaggcaccaaagaacggcggcaaagccaaggattcggcgaaaaccactgaggaaaccagcaagcccaaagatgattag

SEQ ID NO: 181407 - DNA, 2319 bp, synthetic construct
  misc_feature 1..2319: note = Description of Artificial Sequence: Synthetic coding sequence
  source 1..2319: mol_type = other DNA
atgagccagcccggccagaagcccgccgccagcccccggccccggcgcgctgctgccgcgcggagaactcacgagcacgtcagcgagaaaacatctgagtcacctagcaaaccgggcgagaaaaagggatccgacgagaagaaggccgcttcgctgggctccagtcagtctagccggacatacgctggcggcaccgcttcggccacaaaggtgtctgcaagtagcggggcaaccagcaagtcatctagtatgaacccaacagagacaaaagcaatcccggtgtcacagcaaatggaaggaccgcatctacctaataagaaaaaacacaaaaagcaggccgtcaagactgaacctgagaagaaatctcagtccacaaagcccaagtctcttcctaagcaggcaagcgacacaggatctaacgatgctcacaataagaaggctgtgagccgatccgcggagcaacagcccagcgagaagtccaccgaacccaagacaaagccacaagatatgatcagcgctggcggggagtcggtggctggcatcaccgccataagcgggaagccaggggacaaaaaaaaggaaaaaaagagtttgactcctgccgtgcccgtcgagtctaaacctgataagccttcagggaagtctggaatggacgcggctctggacgacctcattgacactctgggcggaccagaagagacagaggaagagaacacgacatatactggacccgaagtatctgacccaatgagcagcacgtatatcgaagagttgggcaaaagagaggttacgatcccacctaaataccgcgagctgctggctaaaaaagagggcatcacggggcctccggccgactcgagtaagccaattggccctgatgacgccatcgacgctctcagttccgatttcacttgcgggtcccccactgctgctggaaagaaaacggagaaagaagaatctacagaggttcttaaggcacagagcgctggtaccgtacgctcagctgcgcctccacaggaaaagaagcgaaaggtcgaaaaagatacgatgtctgaccaggccctggaggccctgtcggcctctttaggcacgcggcaggccgagccagagttggacctgcgatccatcaaggaagtggatgaggctaaggcgaaagaggagaaattagaaaagtgcggtgaggatgacgagaccatccccagtgagtatcgactcaaaccagcaacagacaaggatgggaagcctctgttgccggaacccgaagaaaaacccaagcccagaagcgaaagcgagcttattgacgagctgtctgaagatttcgaccggtcagagtgcaaggaaaaacctagcaaaccgacagaaaaaacagaggagagcaaagcagcggcaccagcgcccgtcagtgaggccgtgtgccgaacttccatgtgcagcatccagagcgcgccaccggaacctgctacccttaagggaactgttcctgatgacgcggtcgaagcattagctgattccttggggaaaaaggaagccgatccagaagacgggaagccggtcatggacaaggtgaaggagaaagcaaaagaagaggatagagaaaaactgggcgagaaggaggagactatcccacccgattacaggctggaagaggtgaaggacaaggatggaaaaccgttactgcctaaggaaagtaaggaacagcttccacctatgagcgaagatttcctgcttgatgcactgtccgaggactttagcggaccgcagaacgcctcaagtctgaagttcgaggacgcgaagctggccgcggctattagcgaggtggttagccaaacccctgcatctacaacacaagcaggcgcaccccctagggatacatctcaatcagataaagacttggacgatgccctggataagctatcggacagcctcgggcaacggcagcccgaccctgatgaaaacaagccaatggaggacaaggtcaaggaaaaagcaaaggccgaacaccgggacaagttgggagagcgggacgacactattccccccgagtatcggcacctgctcgacgataacggccaggacaaaccagttaagccccctaccaagaagtccgaggactctaagaaacccgccgatgatcaggatcctatcgatgcactgtctggtgacctcgattcttgcccgtcgacaacggaaacttcccagaataccgctaaggataaatgtaagaaggccgcttccagctccaaagcccccaaaaatgggggcaaggctaaagactccgctaaaaccaccgaagaaacgtctaaacctaaggacgactag

SEQ ID NO: 181408 - DNA, 2376 bp, synthetic construct
  misc_feature 1..2376: note = Description of Artificial Sequence: Synthetic coding sequence
  source 1..2376: mol_type = other DNA
atgagccagcccggccagaagcccgccgccagcccccggccccggagggccgctgctgcccgccgaactcacgagcacgtgagcgagaagacatccgagagcccctctaagcccggcgaaaaaaaggggtccgacgagaaaaaagcagctagcttaggaagttcccagtccagccgcacttacgcagggggtacagcatcggcaaccaaagtttccgcttcctctggagccactagtaaaagctcatccatgaatcctactgagactaaggccatcccagtgtcccagcaaatggagggcccacacttgccaaataagaaaaaacacaagaaacaggccgttaagaccgaacccgagaaaaagtcccagagcacaaagctgtccgtggtccacgaaaaaaaatcccaagagggtaagccgaaagagcatacggaacccaaatccttacccaaacaagcttcagataccggttcgaacgacgctcacaacaaaaaggcggtctcaagatccgcagagcagcaaccttcagaaaagagcactgaacctaaaacaaagccacaggacatgatttccgcaggcggagagtccgtagccggtataactgccatcagtggtaagcccggagacaagaagaaggagaaaaagtctttaaccccggccgtccccgttgagagtaaaccggacaagccttccggcaagagcggcatggatgcagctctcgatgacctcattgacactctgggaggcccagaagagacagaggaggagaacactacatacactggcccggaagtgtccgatcccatgtcttctacatacatcgaagagctggggaagagagaggttacaatccctccaaagtaccgcgaacttctggccaagaaggagggcatcactgggcctccagctgactccagcaaaccaatcggccccgatgacgctattgatgccctctcttcagactttacatgtggtagcccaaccgccgcaggtaaaaagacggagaaggaagagtcaaccgaggttctgaaggcacagagtgccggcacagtgcgatccgctgccccccctcaggaaaaaaagagaaaggtggaaaaggatacaatgagtgaccaggccttagaagctctgtctgcgagcctcgggacccgccaggccgagcccgagttggatcttaggtccataaaggaagtcgatgaagccaaggctaaggaggagaaactcgagaaatgcggagaggatgatgagacgattccaagtgagtatagacttaaacctgccactgataaagatggaaagcctctgctgccggaaccagaggagaagcctaagccccggagtgaaagcgaactgatcgacgagttatctgaagattttgatcgctcagagtgcaaagaaaagcccagtaagcccaccgagaagacagaggaaagcaaggctgcggctccagcccccgttagcgaggccgtctgccgcacatccatgtgcagcatccaatcagcccccccagagcctgcgacactaaaagggacagttcccgacgacgccgttgaagctctggctgattcactgggcaagaaagaggctgatccagaggacggcaaacccgttatggacaaggtgaaggagaaggctaaagaagaggatcgggaaaaacttggagaaaaggaggaaactatccctccagattataggcttgaggaggtcaaagacaaagacggaaaaccactgctgccaaaagaatcaaaagagcaactccctcctatgtcagaagattttctgttggacgcactttccgaggactttagcggccctcagaacgcctccagcctgaagtttgaagacgccaaactggctgccgcaatctcagaagtggtgtcccagacgccggcctcaactacacaagcaggcgcacctcctcgggatacaagccagagtgataaagatctcgacgatgcgctcgataaactttcagacagtctgggtcagcggcaacccgaccctgatgaaaataaaccgatggaagataaagttaaggagaaagccaaagccgaacacagagataaattgggggaacgtgatgacaccatccccccagagtacaggcatctcttggacgataatgggcaggataaacccgtcaaaccgcccactaagaaaagcgaggacagcaagaagcctgccgacgaccaggaccccatagatgccctgagcggggacctggactcctgtcctagcaccacagagacaagtcaaaataccgcgaaagataaatgcaagaaagccgcttcatcctcaaaagcaccaaagaacggcgggaaggctaaggattctgccaaaacaacagaggagacttccaagcccaaggacgattag

SEQ ID NO: 181409 - DNA, 2265 bp, synthetic construct
  misc_feature 1..2265: note = Description of Artificial Sequence: Synthetic coding sequence
  source 1..2265: mol_type = other DNA
atggccttcgccagctggtggtacaagacccacgtgagcgagaagacgagcgaatccccttccaagcccggcgagaagaaaggctcagatgagaagaaggctgcgagcctcggttcctctcaatcaagccgaacttacgccggcggtacggccagcgctacgaaagtttccgcttccagcggagccacatctaaatcctccagtatgaatcccactgagacaaaggccgtcaaaacagagcctgaaaaaaaaagccagtccacaaaactgagcgtagtgcacgaaaaaaagtcccaagaaggcaagcccaaagaacacacagaacccaaatccctacccaaacaggctagcgacaccgggtcaaatgatgcccataataagaaagcagtttctagatccgctgaacaacaacccagcgagaaatctactgaaccaaagacaaaaccccaagacatgatcagcgccggtggagagtctgtggccggcattactgccattagtgggaaacccggggacaaaaaaaaagagaagaagtctctgaccccggccgtaccagtcgagagcaagcccgacaagcctagtggtaagtccggcatggacgctgcccttgatgatctaatcgatactttgggagggcccgaagaaacggaggaagagaatactacgtatacaggcccagaagtcagcgatcctatgtcttcaacttacatagaagagcttggcaagagagaggtcaccattccccctaaataccgagagctcctggccaaaaaggagggcattaccgggccaccagcagactcctccaaacccatcggccccgatgatgctatcgacgcactctcctccgactttacctgtggtagtcctactgcagctgggaagaagactgagaaggaagagagtaccgaggtgctgaaggcacagagcgcgggtaccgtaagatcggcagcacccccgcaggagaaaaagcggaaagtggagaaagataccatgtccgatcaggcactcgaggctctgtcggcgagtttggggacccgacaagccgaacctgaactcgaccttaggagcatcaaagaagtggatgaggctaaggctaaagaagaaaagttggagaagtgtggagaagatgacgaaaccatacctagtgagtataggctgaagcctgcaaccgataaggatggaaaaccgctcctaccagaaccggaggagaagccaaagccccgatctgagtcggagcttatcgacgaactgtctgaagattttgatcggtccgaatgtaaggaaaagcccagcaagccaaccgagaagactgaggagagcaaggctgccgcacccgcaccagtcagcgaagccgtgtgcaggacttccatgtgttcaatacagtccgcaccgcccgagcccgccaccctgaaagggacagtgcccgatgacgctgttgaggcactggccgatagtctcggaaaaaaagaggccgatcccgaggacggcaagcccgtcatggataaagtaaaggagaaagccaaggaagaagatagggagaaactcggggaaaaggaagaaactattccccccgactatcggctggaggaggtcaaggataaagacgggaagccgctgctccctaaagagagcaaggaacagctcccgcccatgtctgaagactttttgcttgacgctctgtccgaggacttttccggtccccagaacgcttccagtctgaaatttgaagatgctaaactggctgcggcaataagcgaagtggtaagccagacaccagcctctaccacccaagcaggggctcccccccgagacacatcacagagtgacaaagacttggatgacgctttggataaactgtcggatagcctgggccagaggcagccagaccccgacgagaataaacctatggaagacaaggttaaagagaaagcaaaagccgagcatcgcgacaaactgggagagcgggatgacaccattccccctgaatacagacaccttttggacgataatggacaagacaaaccagttaagccgcctaccaagaagagcgaggactccaagaaacccgccgatgaccaagatccgatcgacgctctcagcggagacctggatagttgcccaagcacgactgagacaagccagaacaccgcgaaagacaagtgtaaaaaggcagctagcagctcaaaggctccgaagaacggtgggaaagcaaaagacagcgctaagacaaccgaggagaccagtaagccaaaagatgattag

SEQ ID NO: 181410 - DNA, 2376 bp, synthetic construct
  misc_feature 1..2376: note = Description of Artificial Sequence: Synthetic coding sequence
  source 1..2376: mol_type = other DNA
atgagccagcccggccagaagcccgccgccagcccccggccccggcgcgcagctgcagctagaaggacccacgagcacgtctctgaaaaaacatctgagtctcctagcaagcccggggaaaaaaagggttctgacgagaaaaaggcggcttcgcttgggagcagccagtcttcgagaacctatgcgggcggaaccgctagtgccacaaaggtgtccgctagttctggcgctacatcaaagagtagctctatgaacccaactgagaccaaggcaatcccggtctcccagcaaatggagggtccccacctgcccaacaagaaaaagcacaagaagcaggccgtgaaaactgagcctgaaaagaagtctcagtctaccaaactttcagttgtacacgaaaagaaaagtcaggaaggcaaacctaaagagcatacagaacccaagagcctccccaaacaggccagtgacacagggtcgaatgacgcacataacaagaaagcagttagtagaagtgccgagcagcagccctcagaaaagagtactgaacctaagacgaagccgcaagatatgattagtgccgggggggaaagtgtggctggcattacagccatctcaggcaagccaggcgataagaaaaaggagaagaagagcctgactccagcagtcccagtggaaagcaagcctgataagccttctggtaaatcaggcatggatgctgctcttgatgacctgattgacactctcggaggaccagaagaaacggaagaggagaataccacatatactggtccagaggtgtctgatcccatgtccagcacatatatcgaagagctggggaagagggaggtgacaattccccccaagtaccgggagctgttagcaaaaaaggaaggcattacagggccgccggcggactcctcaaaaccaatcggcccagacgatgccatcgacgctctgagttctgattttacatgcggatcgcccaccgcggcaggaaagaagacagaaaaagaggagagcaccgaggtgctgaaagcccagtccgcggggacagtgagaagcgccgccccgccccaggagaagaagcgcaaggtagaaaaagacacaatgtccgaccaggctctggaggccctcagtgccagtcttggtacacgacaagcggagcctgagctcgacttaaggtccataaaagaggtggacgaggcaaaggcaaaggaagaaaagctcgagaagtgcggagaggacgacgaaactattccttcagaataccgcttaaaacctgcaacagataaggatggcaaaccactgctgccggaacccgaagagaagcccaagccacggtccgaatccgaattgattgacgagctgtcggaagactttgaccgcagcgagtgcaaggaaaaaccctctaaacccacggagaagacagaggaaagtaaagcagcggcacccgcccctgtttctgaagcggtttgcaggacctctatgtgttccatccagtcagctccgccagagcccgctacactcaagggtaccgtccccgatgacgctgtggaggctctagcagattccctcggcaagaaagaggccgatcccgaggacgggaaaccagtgatggataaggtgaaggagaaagctaaggaagaggaccgggaaaagttgggggagaaggaggaaacgataccacccgactaccgattagaggaagtcaaggacaaagatggtaagccccttcttcctaaggaaagcaaggagcagctgccccccatgagtgaagacttcttactcgacgccttatcagaggacttttccggaccacagaatgcatcttccctcaagtttgaggacgcaaaactcgccgccgctattagcgaggtggtgagccagacgccagcttccacgacccaagctggagcccctccacgggacactagtcagtcagacaaggatttggacgatgctctagacaaactatcggacagtctggggcagaggcagccagaccctgacgaaaataaacctatggaagataaggtcaaggagaaggctaaggcagagcacagggacaagttgggcgagcgggacgatactataccccccgagtatagacatctcctcgatgataatggccaggataaacccgtgaagcctccaacgaagaagagtgaagattctaaaaaacccgccgacgatcaggacccgatagacgctctgagtggggatctggatagctgtccatcaactacagaaacatctcagaatactgctaaggataaatgtaagaaggctgccagttcttcaaaggctcctaaaaatggcggcaaggctaaggatagcgccaaaacaacagaagaaacatccaagccaaaagacgactag

SEQ ID NO: 181411 - DNA, 1929 bp, synthetic construct
  misc_feature 1..1929: note = Description of Artificial Sequence: Synthetic coding sequence
  source 1..1929: mol_type = other DNA
atgaaccccaccgagaccaaggccatccccgtgagccagcagatggagggccctcatcttccgaacaagaagaaacacaagaagcaggccgttaagaccgaacctgagaaaaaatcccaaagcactaaacttagcgttgttcacgagaaaaaatctcaggagggaaagcctaaggaacataccgagccaaaatcactccccaaacaggccagcgacaccggctccaatgacgcccacaataagaaggcggtgtcccgtagtgccgaacagcagcctagcgagaaatccactgagccaaaaaccaaacctcaagatatgataagcgcagggggcgagtcagttgccggtatcactgcaatcagcgggaaacccggagataaaaaaaaggagaaaaaaagtctgactcccgccgtgccagttgaatcaaagcccgataagccaagcggaaaaagtggcatggatgcggcactggatgaccttattgacacacttggcggtcctgaagaaacagaagaagaaaacaccacgtacaccggtcccgaggtgtccgaccctatgtcgagtacctatatagaagaactggggaaacgcgaggtcaccattccacctaagtaccgtgaattactcgccaagaaagagggcataaccggtcctcctgctgactcgtcgaaaccaatcgggcccgatgacgcgatcgacgcgctgtcgagcgacttcacatgcggttcaccgacggcagctggaaaaaaaactgagaaggaagagtcaaccgaagtcctcaaagcacagagcgcaggcacagtacgtagcgccgcaccaccacaagagaagaagcgaaaagttgagaaggatacgatgagcgaccaggcgttggaagcactctcagccagcctggggacccgacaggccgagccagagctcgacctgcgctcaatcaaggaagtggacgaggcgaaggccaaggaggaaaaattggaaaagtgcggcgaagacgatgaaactataccctcagaataccggctgaagcctgctaccgataaagatggcaagccattgctccccgagcctgaggaaaaacccaagcctcggtctgaatcggaactgattgatgagctctccgaagattttgacagaagtgaatgcaaggaaaagccttcgaagcccactgaaaaaacagaagagagtaaggccgcagctccggcacctgttagcgaagcagtgtgtagaacaagtatgtgctcaattcagagtgcccctcctgagcccgcgaccctgaagggaactgtacctgacgatgctgtggaagcactcgcagattcgttgggcaagaaggaagccgaccccgaagatggaaaacctgtaatggacaaagtgaaggaaaaggccaaggaggaggatagggaaaagctaggtgagaaggaagagaccatcccacccgattaccgcttagaggaagtgaaagacaaggacggcaagccacttctgccaaaggagtctaaggagcagctgcctcctatgagcgaagacttcttactggatgctctgagcgaggatttcagcgggcctcagaacgcgtcgagccttaaattcgaggatgcaaagctcgcggccgccatttccgaagtagtttctcagactcccgctagcaccacccaggcgggcgcaccccctcgggatacttcacagtccgataaagatttggatgacgcccttgacaagctgtcagactccctgggacaacgccagccggatcctgacgaaaataaaccaatggaggataaggtgaaggaaaaagccaaggctgagcatcgggacaagttgggggagcgcgatgataccattccacctgaatatcggcaccttctggacgataatggacaggacaagcctgtaaagccaccaacaaaaaaatctgaagactccaagtag

SEQ ID NO: 181412 - DNA, 2085 bp, synthetic construct
  misc_feature 1..2085: note = Description of Artificial Sequence: Synthetic coding sequence
  source 1..2085: mol_type = other DNA
atggagggcccccacctgcccaacaagaagaagcacaagaagcaggcagtgaagactgagccagaaaaaaaaagtcaatctactaaactgtctgtggtgcacgagaaaaagtcccaggaaggaaaacccaaggagcatacagagccgaagtcccttcctaagcaggcgtccgatactggaagtaacgatgcacataacaagaaggcagtatcgagatcagccgaacagcagcccagcgaaaagagcacggaaccgaaaactaaacctcaagatatgatatccgcggggggtgaatctgtggctggaatcaccgccatctctggaaaacctggcgacaaaaaaaaggagaagaaaagtttgactccggccgtacccgtggagtcaaagccagataagccctctggtaaaagcggaatggatgccgccctggatgacctcatcgacaccctgggcggtccggaggagactgaagaagaaaacaccacatacaccggccccgaagtatccgacccaatgagctcaacctatatcgaggaactcggaaagcgcgaagttacaatcccacctaaatacagggagctcttagcaaagaaagagggcataaccggcccacccgcggacagcagtaaacctattggtccggatgatgccatcgacgctttgtcgtccgatttcacctgtggatctccgacagccgccggtaagaagactgagaaggaggagtccactgaagtcctgaaggcccagtcggccgggaccgtcaggagcgccgccccaccacaggaaaagaagcgcaaggtggagaaggacactatgtcagaccaggcccttgaggcattatcggcttccctgggaacccggcaggcagagccggaactggaccttcgctcaattaaagaggtggacgaggcgaaggccaaggaagaaaaactggagaaatgtggagaagacgatgagaccatccccagtgaataccgcctgaagcctgctaccgacaaagatgggaagccactacttcctgagccggaggaaaagcccaagccgcgaagcgaaagtgaactaatcgacgagttaagcgaggactttgaccggtcagaatgtaaagagaagccgtcaaagcccacagaaaaaaccgaagagagtaaggccgcagcccctgctcccgtcagcgaggcggtatgccggaccagtatgtgtagcatacagtccgctcccccagagccggctaccctgaaaggcacagtccctgatgacgccgttgaggccctggccgactcactcggcaaaaaggaggccgaccccgaggatggaaagcccgtgatggacaaggtcaaggagaaggccaaggaggaagatagggaaaaacttggtgagaaagaggagacgattccccccgattaccgactggaagaagttaaagataaggacggcaagccgctgctgccaaaggaatccaaggaacagcttccccccatgtccgaggattttcttctcgatgctctgtccgaagacttttcaggtccacagaatgccagctctctcaaatttgaggatgccaagttagctgcggctatttcagaagtggtgtcccagacgcccgcttctacaactcaggccggggcgcccccccgggacacttcacagtcagacaaggacctggacgatgcattagataaactgagcgactccctcggccagcggcagcccgaccctgatgaaaataagcccatggaggataaggtcaaggaaaaagcgaaggccgaacatcgagacaagctcggagaaagggacgacactataccccccgagtaccggcatctgctggacgacaacggccaagataagccagtgaaaccccccacaaagaaatccgaagacagtaaaaagcccgccgacgaccaggatccaatcgacgcgctctctggcgatctcgacagctgcccttcaaccaccgaaacttcacagaacacagctaaagataaatgtaaaaaggctgcctcctctagcaaggcgccgaaaaacggcggtaaggccaaggatagtgccaaaactaccgaggaaacctctaaacccaaggacgattag

SEQ ID NO: 181413 - DNA, 2253 bp, synthetic construct
  misc_feature 1..2253: note = Description of Artificial Sequence: Synthetic coding sequence
  source 1..2253: mol_type = other DNA
atgagccagcccggccagaagcccgccgccagcccccggccccggcgagccgcagcggctagaaggactcacgaacacgtcagtgagaagacttcggagtctcccagcaagcccggtgagaaaaaaggcagcgatgaaaaaaaagcagcgtctctaggaagtagtcagagcagtcggacctacgcagggggtacagcatcagccactaaagtgagtgcctcatccggcgccacctctaagtctagttcaatgaatcccacagagacaaaagccgttaagacggagcccgagaaaaagagccagtcaaccaagcccaagtcgcttccgaagcaggcttccgatactggaagcaacgacgcacataataaaaaagcggtgagcagatctgccgaacagcaacctagcgagaagtctaccgaacccaaaaccaaacctcaagacatgatctccgccgggggagagtccgtggctgggatcacagctatctccggaaaacctggagacaagaagaaggagaagaagagcctgacacccgcagtgcctgtcgagagcaaaccagataaaccctccggaaaatctgggatggacgcagctctggatgatctgattgacacacttggggggcctgaggagacagaggaggaaaatacaacttacacagggcccgaagtttctgatcccatgagcagcacctatatcgaggagcttggtaagcgggaggtgactattcctcccaagtacagggaactgctcgctaagaaagaggggatcacaggaccgccagctgattcctccaaacccataggacctgacgacgctattgacgctctaagcagcgatttcacttgcggctcccctaccgccgctggaaaaaagactgaaaaggaggagagcactgaggtgctaaaggcccagagcgcgggcacagtgaggagtgccgcccctcctcaggagaagaaaagaaaagtggagaaagatacaatgtcggaccaggctctggaagcgctgtccgcttccctggggacgaggcaagccgagccagagctggaccttcggagcatcaaagaggtggatgaggccaaggcgaaggaagagaagttggagaagtgcggcgaggacgatgagactattccatctgaatataggttgaaacccgcaaccgacaaagatggtaaacctctattgccagagccggaggaaaaacctaaaccccggtctgaaagtgaactgatcgacgagctcagtgaagattttgatcgaagcgagtgcaaggagaagccctctaaacctaccgagaagacagaggagagtaaagcagccgcaccggcgcctgtatcagaggccgtttgcagaacatcaatgtgcagtattcaaagcgctccccccgaacctgcaaccctgaagggcactgtccccgacgatgccgttgaggccctggctgactcactgggcaaaaaggaggcagatcccgaggacggcaaaccggtgatggacaaggttaaggagaaagctaaggaagaggatagagagaagttaggagaaaaagaggaaactatcccgcccgattaccgcctagaggaagtaaaggataaggatgggaaacctctcctgcccaaggaaagcaaagagcagctgccccctatgtctgaggattttttgctggatgctctgtccgaagatttcagcggcccccagaatgcatcttcacttaagttcgaggatgcgaaattagctgcagccatctcagaggtcgtgagtcagactcctgcgagcacaacccaagctggagctccgcctagggacacatcccagtccgacaaagacctagacgatgcattagacaaattgagcgacagtctgggccaaagacaacccgatcccgacgaaaacaaaccaatggaggacaaagttaaggaaaaggccaaggctgagcaccgcgacaaattgggcgagcgggatgatactataccgcccgaataccgccaccttcttgacgacaatggccaggacaaacctgtgaagccgcccactaagaaaagcgaggactcgaagaaacctgccgacgaccaagaccctatagatgccctgtctggcgatctggacagctgcccttctaccactgagacttctcagaataccgctaaggacaaatgtaagaaagctgcttcctctagcaaggccccaaaaaacggcggaaaggccaaagattcggccaaaaccactgaggaaacatccaagcctaaagatgattag

SEQ ID NO: 181414 - DNA, 1254 bp, synthetic construct
  misc_feature 1..1254: note = Description of Artificial Sequence: Synthetic coding sequence
  source 1..1254: mol_type = other DNA
atgctgctgagcgtgcccctgctgctgggcctgctgggcctggccgtcgccgaaccagccgtctattttaaggagcagttcctggacggcgatgggtggacttctcgctggatagaatctaagcataaatcagacttcggaaagttcgtcctgtcctcaggcaaattttatggcgatgaagaaaaagacaagggtctccagacatcacaagatgcacggttctatgccctgagcgcatcgtttgagccattttctaacaaaggccagaccttagtggttcaattcacagttaagcacgagcagaatatagactgtggcggaggctacgtgaaactgttccccaactcactagaccagacagatatgcacggggatagcgagtataacattatgtttggcccggatatttgcggacccggcaccaaaaaagtgcacgttatcttcaactacaaaggcaaaaacgtgctgataaataaggatatccgctgtaaggacgacgagtttacacatttatacactttgatcgttcggccagacaatacctacgaggtcaagatcgataattcacaagtggaatcgggctccctagaggacgactgggattttctgccgccaaagaagattaaggatccagacgcctcaaaaccagaagactgggacgagcgcgctaagatcgatgatccaaccgattccaaacctgaggattgggataagcccgaacacattcccgatcctgacgcaaaaaagccagaagattgggacgaggaaatggatggcgagtgggaaccccccgtcatccaaaatcccgagtacaagggagagtggaaacccagacagatcgacaaccctgactataaaggcacttggatacaccccgagatcgataaccccgagtattcccccgacccctccatttacgcctacgacaactttggtgtgctcggcttagatttgtggcaggtcaaatcaggcacaattttcgacaactttcttattaccaacgatgaggcctacgcagaagaattcggaaacgagacttggggtgtaaccaaggccgcagaaaagcagatgaaagacaagcaggacgaagagcaacggttgaaggaggaggaggaggataagaagcggaaagaggaagaggaagcggaggataaagaggatgacgaagacaaggatgaggacgaggaagatgaagaggataaggaggaagacgaagaagaggacgtgcctggccaagccaaagacgagctttag

SEQ ID NO: 181415 - DNA, 891 bp, synthetic construct
  misc_feature 1..891: note = Description of Artificial Sequence: Synthetic coding sequence
  source 1..891: mol_type = other DNA
atgcacggcgacagcgagtacaacatcatgttcggccccgacatctgtggtccaggtactaaaaaggtacatgtgattttcaattacaagggcaaaaatgtactgattaataaggatatccgctgtaaagatgatgaattcacccatttgtatacactgatcgtccgtcccgataatacctacgaagtcaaaattgataattctcaggtggagtcaggctctctggaggacgactgggacttccttcccccgaagaagatcaaggatcctgatgcttccaagcccgaggactgggacgaaagagccaagattgacgatccaactgacagtaaaccagaggattgggataaaccagagcacatccctgaccctgacgctaaaaaacctgaggactgggatgaagagatggacggcgaatgggagccccccgtaattcagaaccctgagtacaagggagaatggaagcctagacagatcgacaacccagattataagggcacgtggatccatccggagatcgacaaccctgagtattccccagaccccagcatctacgcatatgataattttggcgtgttaggacttgacctctggcaggtcaaatccggcacaatattcgataacttcctaattactaatgacgaagcatatgccgaggagtttggaaatgaaacatggggggttactaaggccgctgagaaacaaatgaaagataaacaggatgaggagcagcgtcttaaggaggaggaagaagacaaaaaacgtaaggaagaggaggaggcggaagacaaggaggacgatgaggataaggacgaggacgaggaggacgaagaggacaaagaagaagatgaggaggaggatgtccccggacaggccaaggacgaattatag

SEQ ID NO: 181416 - DNA, 1155 bp, synthetic construct
  misc_feature 1..1155: note = Description of Artificial Sequence: Synthetic coding sequence
  source 1..1155: mol_type = other DNA
atggcccgggccctggtgcagctgtgggccatctgcatgctgcgggtcgcgctggcaacggtctattttcaggaggagttcctggacggggaacattggcgtaatcgctggctgcagagcaccaacgactcccggtttgggcactttagactctccagcggcaagttctacggtcacaaagagaaagacaagggccttcagaccacacagaatggtaggttctacgccattagcgctcggtttaagcctttttctaataaggggaaaaccttggtaatccagtataccgtgaaacacgaacagaagatggattgtggaggcggctacattaaagttttccccgcggacatagaccagaagaatctgaatggaaagtctcaatactatatcatgttcgggccagatatatgcggttttgatattaaaaaggtgcatgtgatattacacttcaagaacaaataccatgagaataagaagctgatacgctgtaaggttgatggttttactcatctgtacacactaatcctcaggccagacctgtcatacgatgtaaagatcgatggccagtcaatcgagagcggtagtatcgagtatgattggaatctcacctctcttaagaaggagacatctccagctgagtcaaaagactgggaacagacaaaagacaataaggcgcaggattgggagaaacattttttggacgcctcaacctcgaaacagtctgattggaatggagatcttgacggggattggcccgcccctatgctgcagaagcccccttaccaagacggtcttaagcccgaaggaatccacaaagacgtctggttacacagaaaaatgaagaacaccgattatctgacccaatatgacctgtctgagtttgaaaacatcggagccatcggactcgagctttggcaggtgcggagtggcaccatctttgacaattttctcattaccgatgatgaagaatacgctgacaatttcggcaaagcaacctggggagagacaaaggggccggaaagggaaatggatgcaatccaggcgaaggaggaaatgaagaaggcccgggaagaggaggaggaggagctgcttagcgggaaaatcaacaggcatgaacactacttcaatcaattccaccggagaaatgagctgtag

SEQ ID NO: 181417 - DNA, 1191 bp, synthetic construct
  misc_feature 1..1191: note = Description of Artificial Sequence: Synthetic coding sequence
  source 1..1191: mol_type = other DNA
atgagcgccaccgaccggatgggcccccgggccgtgcccggcctgcggctggccttactgctgctcctcgttcttgggactcctaagtccggagtccagggccaggaaggcctagattttcccgagtacgatggggtggatcgtgtgattaacgtcaacgccaaaaactataagaatgtgtttaaaaagtacgaggtcttagcgctcctttaccacgaacctcccgaagacgacaaggcttcgcaaagacaatttgaaatggaagaactcattctagaacttgctgcccaggtcctagaggacaagggagtgggcttcgggttggtcgactcagaaaaagatgcggcagtggctaagaagctcggcctaactgaagttgactccatgtatgttttcaagggagatgaggtaatagagtacgatggagagttctcagccgacacaattgtggaatttcttctggatgtgcttgaggacccggttgaacttatcgagggcgagcgcgaactgcaagccttcgaaaacattgaagacgaaatcaagctcatcggttatttcaaaagcaaggactccgaacattataaagccttcgaagatgcggccgaagaatttcatccctatattccattttttgcaacctttgattccaaggtggcgaagaaattgacactgaagctcaatgagatcgacttctacgaagcctttatggaagaaccagtaaccattccagacaagcctaattcggaagaagaaatcgtcaattttgtggaggagcaccggaggtctacactaagaaaattgaagcccgagtccatgtacgagacgtgggaagacgatatggatggtatccacatcgtcgcctttgctgaggaggctgatcccgatggtttcgagttcttagaaacgcttaaggcagtggcacaggataacaccgaaaaccctgatctgagcatcatctggattgacccagacgattttcctcttctcgtgccttactgggagaaaactttcgacattgatttatctgctccacagatcggagtcgttaatgtgactgacgctgacagcgtctggatggagatggatgacgaggaggacctcccaagcgctgaagagctggaagactggttagaggatgtgctcgagggagagatcaatacagaggacgacgatgatgatgatgatgactag

SEQ ID NO: 181418 - DNA, 1173 bp, synthetic construct
  misc_feature 1..1173: note = Description of Artificial Sequence: Synthetic coding sequence
  source 1..1173: mol_type = other DNA
atgggcccccgggccgtgcccggcctgcggctggccctgctgctgctgctggtgttagggaccccaaagagtggagtgcagggccaggagggcctggatttcccagagtacgacggcgtggaccgagtaatcaatgtgaatgccaaaaactataagaacgtgtttaaaaaatacgaagttctcgctctactgtaccacgagccgcctgaggatgataaagcatctcagagacagttcgagatggaagagttaatcctggagctggctgcacaggtactcgaggacaaaggagtggggtttggcttagtggactctgaaaaggacgcagctgtggcgaaaaaactggggctgaccgaggttgactcaatgtacgtgttcaagggggacgaagtaatcgagtatgacggcgagttttcagctgatactatcgtagaatttctgctggacgttctggaggaccctgtggagcttatcgagggtgaacgggagcttcaggctttcgagaatattgaggacgagataaagctcattgggtatttcaagagtaaggacagcgaacactataaggcattcgaagacgctgcagaagaattccatccgtacattccattcttcgcaaccttcgatagcaaggtcgctaagaagctgacgctgaagctcaacgagatcgatttttacgaggcatttatggaagagcccgtgaccatccctgacaagcctaacagcgaagaagagatcgtgaacttcgtggaagagcatagacgatctacgctgagaaagctgaagcctgagtctatgtatgagacatgggaggacgacatggatgggatacatattgtggccttcgcagaagaagccgatccagacggttttgagttcctggaaaccctcaaggcagtcgctcaggacaatacggagaatcccgacttatccataatatggatcgatcccgacgattttcctctgttggtcccatattgggaaaaaacattcgatatcgatctatctgccccgcagattggcgtggtgaacgtgaccgatgcggactctgtctggatggaaatggatgatgaggaagacctgccttccgccgaagagctggaagactggctggaagacgtgctagagggagagattaatacagaagacgacgatgatgatgacgacgattag

SEQ ID NO: 181419 - DNA, 936 bp, synthetic construct
  misc_feature 1..936: note = Description of Artificial Sequence: Synthetic coding sequence
  source 1..936: mol_type = other DNA
atgagcatgcagcggaccacccggatgtgcagccggagcatgcggtgctggcactcatctacgatgaacccacctcggatgaccagacctcacaaggacaacagcctgggattgacagaggtcgatagcatgtacgtgttcaagggcgatgaggttattgagtacgatggtgagtttagcgccgataccatagtggagtttctcctcgatgtactggaggatccagtcgagttgatagagggcgaaagagagctgcaggcatttgagaatatcgaagatgagataaagttgatcgggtactttaagtccaaagactcagaacactacaaagcctttgaggacgctgccgaggaattccatccatatattccgttctttgccacttttgattctaaagtggcgaagaagctgaccctgaagttgaatgagatagatttctacgaggctttcatggaggagcccgtgaccatccccgataaacccaattctgaggaggagattgtaaactttgtagaggagcacagacgatcaaccctcagaaaactcaagcccgagtcaatgtatgagacgtgggaggacgacatggacggtattcatatcgtcgccttcgctgaagaggccgaccctgacggctttgaattcctagaaactctaaaggcagttgcgcaagataacacggaaaacccagacctgtctataatctggatcgacccggacgactttcccctgcttgttccctactgggagaagacattcgacatcgatctgagcgcccctcagatcggggtggtaaacgttactgacgcggattctgtttggatggaaatggacgatgaggaggatctgccttctgcagaagagcttgaggactggctggaggatgtgctggagggcgaaattaacaccgaagatgacgatgatgacgatgacgattag

SEQ ID NO: 181420 - DNA, 1200 bp, synthetic construct
  misc_feature 1..1200: note = Description of Artificial Sequence: Synthetic coding sequence
  source 1..1200: mol_type = other DNA
atgaagcggacccacctgttcatcgtgggcatctacttcctgagcagctgtcgggctgaagagggactcaattttccaacctatgacgggaaagaccgtgtcgtctctctctctgagaagaacttcaaacaggttcttaaaaagtatgatctgttgtgtctgtactaccatgaacccgtatctagcgacaaggtgacacagaagcagtttcaactaaaggagattgttctagagttagtagctcaggtactggagcacaaagcaatcgggtttgtgatggtggacgctaagaaggaagccaagctggctaaaaagttgggttttgatgaggaaggctcgctctatatcctgaaaggcgaccggaccattgagttcgacggcgaattcgccgctgatgttctagtggaattcctcctggacctgattgaggaccccgtggaaattatctcctccaaactcgaagtccaagcctttgagagaatagaggactacatcaagttgataggtttttttaagagcgaggactcagaatactacaaagccttcgaagaggcagcagaacatttccagccatacattaagttcttcgcaacattcgacaaaggggttgctaaaaaattgtcacttaagatgaacgaggtggacttttatgagcctttcatggatgagcccatcgcaatccctaataagccctatacagaggaggagttggtggagtttgtaaaggagcaccaacgcccgacactgaggcggctgcgcccagaggaaatgtttgaaacctgggaagacgatcttaatggcatccacatcgtggctttcgccgaaaaatcagatcccgatgggtacgagtttctagagattctcaagcaggttgcacgcgacaatacagacaaccctgatctttccatcctgtggatcgacccagacgattttccgctgctggtggcctactgggagaagacgttcaagatcgacctgtttagacctcagattggagttgttaacgtcactgatgctgatagcgtctggatggagattcctgatgacgacgacttgccaacggctgaagagcttgaggattggatcgaagacgtgctgagcggaaaaatcaatacggaggacgacgatgaggatgatgacgatgatgacaatagcgatgaggaggacaacgacgacagtgatgatgacgacgatgagtag

SEQ ID NO: 181421 - DNA, 1062 bp, synthetic construct
  misc_feature 1..1062: note = Description of Artificial Sequence: Synthetic coding sequence
  source 1..1062: mol_type = other DNA
atgaagcggacccacctgttcatcgtgggcatctacttcctgagctcatgtagggcagaggaaggactgaacttccccacatatgacggaaaggacagggtggtctctctcagcgagaagaattttaagcaggtgcttaaaaaatatgacttgctctgtctctattatcacgaaccagtcagctccgataaagtgacccagaaacaatttcagctgaaagagattgttctagagcttgtagcacaggtgctcgagcacaaggcaattggttttgtgatggtggatgctaagaaagaagctaagctggcaaagaagctggggttcgatgaggaagggtctctgtatatcctaaagggggaccggactattgagtttgatggagagtttgccgccgacgtgctggttgagttcctactggatctgatcgaagacccagttgagataatttcttccaaactggaggtccaggcgttcgaacgtatcgaggactacataaagcttatcggcttttttaagagcgaggacagcgagtattataaagcattcgaagaggcagcagaacacttccagccttacatcaagttctttgctacattcgacaagggagttgcaaagaaactgagccttaaaatgaatgaggtggatttttacgaaccgttcatggacgagccaatagccattcccaacaaaccctatacagatggttatgagtttcttgagattctgaaacaggttgctagagataacaccgataatcccgatttaagtatactgtggattgaccctgacgattttcctctgttggtcgcctactgggaaaagaccttcaaaattgacctgttcaggccccagataggtgtcgtgaatgtgaccgacgccgatagcgtgtggatggagatcccagacgatgatgatttgccgacggcagaggaactcgaagactggatagaagacgtgctcagcgggaagattaataccgaagatgatgatgaggatgatgacgatgacgataacagcgacgaagaggataacgatgactcggacgatgacgacgacgagtag

SEQ ID NO: 181422 - DNA, 987 bp, synthetic construct
  misc_feature 1..987: note = Description of Artificial Sequence: Synthetic coding sequence
  source 1..987: mol_type = other DNA
atgaagcggacccacctgttcatcgtgggcatctacttcctgagctcctgccgggccgaggaagggctgaattttcctacatatgacggcaaagatcgcgtggtgtctctttcagaaaagaatttcaagcaggtcctcaagaaatatgacttgctgtgtttatactatcacgaacctgttagctctgataaggtgacgcagaagcaatttcaattaaaggaaattgttctggaattggttgcacaggtacttgaacataaggccattggatttgtgatggtggatgcaaaaaaggaggctaaattggccaagaagcttgactataaagcgtttgaggaagcggcagaacactttcaaccctacataaaattttttgctaccttcgacaagggggtggctaaaaaactatcgctgaagatgaatgaggtggacttttacgagccctttatggacgaacccatcgctatcccaaataaaccttataccgaggaggagctggtggagtttgtgaaagaacatcagagacctaccctgcgacgccttagacccgaggagatgtttgagacttgggaggatgatctgaacggaattcatattgtggcctttgccgagaagtctgaccctgatggttatgaattcctcgagatccttaagcaggtcgctagggacaacactgacaaccccgacttgtcaatactctggattgacccggacgacttccccctgctcgtagcttattgggagaagaccttcaagattgacttattcaggccacaaatcggcgtggtgaatgtaactgatgctgacagcgtatggatggaaattcccgacgatgatgatttgcccacagccgaagaattggaggattggattgaagacgtgctgagcggaaagatcaatactgaagatgacgatgaggacgacgacgacgacgataactcagacgaagaagataacgatgattcagatgatgatgatgatgaatag

SEQ ID NO: 181423 - DNA, 948 bp, synthetic construct
  misc_feature 1..948: note = Description of Artificial Sequence: Synthetic coding sequence
  source 1..948: mol_type = other DNA
atggacctgcggcagttcctgatgtgcctgagcctgtgcaccgcctttgccctctccaagccaaccgagaagaaagatcgcgttcaccacgagcctcaactgagtgataaggtgcataatgacgcacagagtttcgattacgaccacgatgcgttcctcggcgccgaagaggctaaaaccttcgaccagctgacaccggaggagagcaaagaaagattagggaagattgttagcaaaatcgacggggacaaggatggttttgtaacggtagacgagctcaaagactggattaagtttgctcagaagaggtggatttatgaggacgtcgagcggcagtggaagggtcacgacctgaatgaagatggactggttagctgggaggagtacaaaaacgcgacatacggatatgtgctggatgatcctgaccccgacgatggtttcaattacaagcagatgatggtaagggacgagagacgctttaagatggctgacaaagatggagacctcattgccaccaaagaagagttcacagcattcttgcaccccgaagaatatgactacatgaaggacattgtggttcaagagactatggaggacattgataaaaacgcagacgggtttatcgaccttgaggagtatataggcgatatgtactctcacgacggaaatacagacgaacccgagtgggtcaaaactgagcgagagcaattcgtggagtttcgagataaaaacagggatggcaagatggacaaggaagagaccaaggattggatcctgcccagcgactacgatcacgcagaggctgaggcgcggcacctggtgtacgaatccgatcagaataaagacggcaaattgaccaaggaggagatcgttgacaagtatgacctctttgtggggagtcaggccacagattttggggaggcactagtcaggcatgacgaattctag

SEQ ID NO: 181424 - DNA, 465 bp, synthetic construct
  misc_feature 1..465: note = Description of Artificial Sequence: Synthetic coding sequence
  source 1..465: mol_type = other DNA
atggacctgcggcagttcctgatgtgcctgagcctgtgcaccgccttcgctctgtccaagcctaccgaaaagaaggatcgagtgcatcacgagccacaactgtcggacaaggtccacaatgatgcccaaagtttcgactatgaccacgatgccttcctcggcgccgaagaggccaaaaccttcgaccagctgaccccagaggagtccaaagaaagattgggtaagatcgtgtccaagatagacggagacaaggatggcttcgtgactgtcgatgagctgaaggactggattttgccaagtgactacgatcatgctgaggctgaagccaggcaccttgtttacgaaagcgatcagaataaagatggaaaactgaccaaggaagaaatcgtcgacaaatacgatctatttgtggggtctcaagccacggacttcggagaagctctcgtcagacacgacgagttctag

SEQ ID NO: 181425 - DNA, 948 bp, synthetic construct
  misc_feature 1..948: note = Description of Artificial Sequence: Synthetic coding sequence
  source 1..948: mol_type = other DNA
atggacctgcggcagttcctgatgtgcctgagcctgtgcaccgccttcgctctgagtaagcctacagaaaaaaaggatcgagtccatcacgagccccagctgtccgataaagtgcacaatgacgctcaatctttcgattatgaccacgacgcatttttaggcgctgaggaagccaagaccttcgatcagcttaccccggaggaatccaaggagagactcggcatgatcgtggacaagatcgatgcagataaggacggatttgtgaccgaaggagaacttaagagctggatcaagcacgcacagaagaagtatatctacgataatgtggagaatcagtggcaagagtttgatatgaaccaagacggattaatcagttgggatgagtacaggaatgtcacttacggcacctacctagacgatcctgacccggacgacggtttcaattataagcagatgatggtacgcgatgagcggcggtttaaaatggcagataaggatggtgatctgattgcaaccaaggaagaatttactgcctttctacacccggaggaatatgactatatgaaggacattgtcgtgcaggagaccatggaggatattgataaaaatgcggacggctttattgatctggaagaatatatcggcgatatgtatagtcatgacggcaacactgacgaaccagaatgggttaagacggagcgcgagcagttcgtcgaattcagagataagaaccgagacggcaagatggacaaagaagagaccaaggactggatcctgccttctgattatgaccacgctgaagccgaggctagacaccttgtctatgagtcagaccaaaataaagacggcaaattgaccaaagaggagatagtggacaaatacgatctctttgtgggatcacaggcgactgatttcggagaggctctcgttcgtcacgatgaattctag

SEQ ID NO: 181426 - DNA, 972 bp, synthetic construct
  misc_feature 1..972: note = Description of Artificial Sequence: Synthetic coding sequence
  source 1..972: mol_type = other DNA
atgaaggagaccgacctgatcatcatggacctgcggcagttcctgatgtgtctttcattgtgcacagcttttgcattgtctaaacctacggaaaagaaggaccgggtgcaccacgagccccagctctcggataaagtgcacaatgatgcgcaaagtttcgattatgatcatgacgcctttctgggggccgaggaagccaagactttcgatcaactgacccccgaagaaagcaaggagagactcgggaaaatagtcagcaagatagacggtgacaaggacggcttcgtcaccgtggacgaactgaaggactggataaagttcgcccagaagagatggatttacgaagacgttgagcgacagtggaaaggtcatgatctaaatgaggacggactggtgagctgggaggagtacaagaacgccacgtacggttacgtcttggacgaccccgatccagacgatgggttcaattacaagcagatgatggttcgggatgaacggaggtttaaaatggccgataaagacggggacttaatcgctacgaaagaagagttcacagcctttctccaccccgaggaatatgactatatgaaagatatagtggttcaggagacaatggaagacatcgataaaaacgccgacggcttcattgacctagaagagtacataggggatatgtatagccatgatggcaatacagatgagccagagtgggtcaaaaccgagcgagagcagttcgttgagttccgggataaaaaccgcgacggcaagatggataaagaagagaccaaggactggattctgcctagcgattatgatcatgccgaggcagaagctcggcacctggtatacgagtcagatcagaacaaggacggcaaactgacaaaggaggagattgtggacaagtacgatttgttcgtgggaagccaggcaaccgatttcggagaggccctcgtgcgccacgatgagttttag

SEQ ID NO: 181427 - DNA, 444 bp, synthetic construct
  misc_feature 1..444: note = Description of Artificial Sequence: Synthetic coding sequence
  source 1..444: mol_type = other DNA
tgaatcgccaccaaggaggagttcaccgccttcctgcaccccgaggagtacgactacatgaaggatattgtagttcaggagaccatggaggatattgataagaatgctgacggcttcatcgatctggaggagtatatcggcgacatgtacagtcacgatgggaatactgacgagccagagtgggttaaaacagaacgagagcagttcgtcgagtttagagacaagaatcgggacggaaagatggacaaggaagagaccaaggactggatcctgccatcagactatgaccacgcagaagcagaagcacgccacttggtgtacgagtcagaccagaacaaggacggtaaactcacgaaagaggaaatcgtggataagtatgatttgttcgtagggagccaggcaaccgatttcggtgaggcccttgtgcggcatgacgagttttag

SEQ ID NO: 181428 - DNA, 675 bp, synthetic construct
  misc_feature 1..675: note = Description of Artificial Sequence: Synthetic coding sequence
  source 1..675: mol_type = other DNA
atggacctgcggcagttcctgatgtgcctgagcctgtgcaccgccttcgcgctgtccaagccaactgaaaaaaaggaccgcgtccatcacgagccccagttgtccgacaaggtccacaatgatgcccaatcctttgattatgatcacgatgcatttctgggggctgaggaagctaaaacgttcgatcagctgactcccgaggaaagtaaagaacgcttgggcaagatagtgagcaaaatcgatggagataaggacggcttcgttaccgttgacgaacttaaggattggattaagtttgcacaaaaacggtggatttacgaggatgtcgagaggcagtggaagggccatgacttgaacgaggatggactggtctcttgggaggagtataagaatgccacctatggatacgtgctggatgatcccgaccctgatgatggcttcaattataagcaaatgatggtgcgggatgagcgaagattcaagatggcagacaaggacggcgacctgattgcaaccaaagaggaatttactgccttcctccacccggaagaatacgattatatgaaagatatcgtggtccaggaaactatggaagatattgacaaaaacgccgacgggtttatagacttggaggagtacataggatggcaggcctatcagggaggagacagatag

SEQ ID NO: 181429 - DNA, 444 bp, synthetic construct
  misc_feature 1..444: note = Description of Artificial Sequence: Synthetic coding sequence
  source 1..444: mol_type = other DNA
atgaaggagaccgacctgatcatcatggacctgcggcagttcctgatgtgtctgtcactttgtacagcctttgctcttagcaagccaacagagaaaaaagatcgagtgcaccatgaacctcaactgagcgacaaagtgcataatgacgctcagagctttgactacgatcatgatgccttcttgggcgctgaagaggccaaaaccttcgatcaattaacccccgaggaatccaaggagcgtctcggtaagatcgtaagcaagatcgacggggataaggacggtttcgtgacggtcgatgagctgaaagactggattaaatttgcacagaaaagatggatatacgaggatgtcgagcgccagtggaagggccatgatctgaatgaagacggcctcgtgtcctgggaggagtacaagaatgctacctacgggtatgtgcttgaatag

SEQ ID NO: 181430 - DNA, 513 bp, synthetic construct
  misc_feature 1..513: note = Description of Artificial Sequence: Synthetic coding sequence
  source 1..513: mol_type = other DNA
atggacctgcggcagttcctgatgtgcctgagcctgtgcaccgcctttgcactgagtaaaccaactgagaagaaagacagagtgcatcatgaacctcagttgagtgacaaagtacataatgacgcgcagtctttcgactacgaccacgatgcatttttgggagctgaggaggccaagacttttgaccagttgactccagaagagtctaaagagcggctggggatgatcgtggacaaaattgacgccgataaggatggctttgtgactgagggagagctgaagtcctggatcaagcatgctcaaaagaaatacatatacgacaacgtggaaaaccagtggcaagaatttgatatgaaccaggacggccttatatcctgggatgagtacagaaatgttacgtatggtacgtatctggacgatccagaccctgacgatggcttcaattataagcaaatgatggttagagatgaacggcgcttcaaaatggccgacagagctcgcgcagtttgctag

SEQ ID NO: 181431 - DNA, 606 bp, synthetic construct
  misc_feature 1..606: note = Description of Artificial Sequence: Synthetic coding sequence
  source 1..606: mol_type = other DNA
atggacctgcggcagttcctgatgtgcctgagcctgtgcaccgccttcgcactctcaaaaccaaccgagaaaaaagacagagttcaccacgagccacagctcagcgataaggtccacaacgatgcccagtcctttgactatgaccatgacgctttcctgggcgccgaggaggcgaagaccttcgaccagttgaccccagaagagtccaaagaaaggctgggcatgattgtcgataaaattgatgcggataaggatggctttgttacagaaggcgagctcaagagttggatcaaacatgctcagaaaaaatacatctacgacaacgtggaaaaccagtggcaggaatttgacatgaaccaggatgggctgattagctgggatgagtatcggaacgtgacctatgggacttatttagacgatccggacccagatgatggatttaattacaaacagatgatggtcagggatgagcggcggttcaagatggcagataaggatggcgacctgattgcaacaaaagaagagatagtcgataagtacgatctcttcgttggtagtcaggcaaccgatttcggggaagcgttggtccggcacgacgaattctag

SEQ ID NO: 181432 - DNA, 798 bp, synthetic construct
  misc_feature 1..798: note = Description of Artificial Sequence: Synthetic coding sequence
  source 1..798: mol_type = other DNA
atggacctgcggcagttcctgatgtgcctgagcctgtgcaccgcctttgccctgtccaagccaactgagaagaaggaccgcgtccaccacgagcctcagctgagcgacaaagtgcacaacgatgcccagtctttcgactatgatcacgacgcgtttttaggcgctgaggaagcaaagaccttcgaccagctgactcctgaagagagtaaggagcgcctcggcaaaattgtgtcaaagattgacggcgacaaagacgggtttgtgaccgtcgatgagctgaaagactggataaagtttgctcagaaaagatggatttacgaagacgtggaaagacagtggaaaggacacgacttgaacgaggatggcctcgtctcctgggaggagtacaagaacgctacttatgggtacgttttggatgacccagaccccgacgatggctttaactacaaacagatgatggtgcgggacgaacgcagatttaaaatggcggacaaagatggagacctgatcgctactaaggaggagtttaccgcgttcctccatcctgaagaatatgattacatgaaggacattgtagtgcaagagacaatggaggatatcgacaagaacgccgacgggtttatagatcttgaggagtacattggtgatatgtactcccacgacgggaacacagacgagtctgaccagaataaagacggcaaactcacaaaggaggagatcgtcgacaaatacgatctttttgtgggcagccaggccactgatttcggcgaagcactcgtccgccacgacgaattctag

SEQ ID NO: 181433 - DNA, 495 bp, synthetic construct
  misc_feature 1..495: note = Description of Artificial Sequence: Synthetic coding sequence
  source 1..495: mol_type = other DNA
atgatggtgcgggacgagcggcggttcaagatggccgacaaggacggcgaccttattgccaccaaagaagaatttacagccttcctgcatcccgaggagtatgattatatgaaggacatcgtggtgcaggaaacaatggaagacatagataaaaatgctgacggattcatagatctggaagaatacatcggcgatatgtactcccacgacggtaacacagacgaacctgaatgggttaaaaccgagcgggagcagttcgtggaattcagggataaaaatagagacggaaagatggacaaggaagagacgaaggactggatcttaccttccgattacgaccacgccgaagccgaagctcgacacctggtgtacgagagtgatcagaacaaggacggaaagttaactaaggaggagattgttgacaaatatgatctctttgttgggtcacaagccactgattttggcgaggcactggtgaggcacgatgagttttag

SEQ ID NO: 181434 - DNA, 972 bp, synthetic construct
  misc_feature 1..972: note = Description of Artificial Sequence: Synthetic coding sequence
  source 1..972: mol_type = other DNA
atgaaggagaccgacctgatcatcatggacctgcggcagttcctgatgtgcttgtccctctgtaccgcttttgctctcagtaagcccaccgaaaagaaggaccgggtccaccatgagccgcaactcagcgacaaagtgcacaacgacgctcagagcttcgattacgatcacgatgctttcttaggagccgaggaggctaaaacattcgatcagctgactcccgaagaatctaaggagaggctaggcatgattgtcgataagattgacgcggataaggatggcttcgtaaccgaaggcgagctgaagtcttggatcaagcatgctcagaagaagtacatttatgacaacgtagagaatcagtggcaagagttcgatatgaatcaggatggtttaataagctgggacgagtaccgcaacgtcacttatgggacctatctggatgatcccgaccctgacgatggattcaattataagcagatgatggtgagggatgaacgaagattcaaaatggcggacaaggatggtgacttgatagctaccaaggaggagtttaccgctttcttgcacccggaggaatatgattacatgaaggatatcgtggtccaggagaccatggaggacatcgataagaacgccgacggatttatagatcttgaggagtacattggcgacatgtactcccatgatggaaacaccgatgaacccgagtgggtgaaaaccgaaagagagcagtttgttgagttcagagataagaacagagatgggaaaatggacaaggaggagaccaaagattggatcctgccctcggactacgaccacgccgaagcggaagcaaggcacttggtatatgagagtgatcagaataaggatgggaaacttacgaaggaggagattgtcgataaatatgaccttttcgtgggctcacaagctacagacttcggggaagctctggtgaggcacgacgaattttag

SEQ ID NO: 181435 - DNA, 1116 bp, synthetic construct
  misc_feature 1..1116: note = Description of Artificial Sequence: Synthetic coding sequence
  source 1..1116: mol_type = other DNA
atggagctggagctggacgccggcgaccaggacctgctggccttcctcctagaagagtctggtgacttgggcaccgcccctgacgaggccgtacgggcaccattagactgggccttgcctctttcagaagttccgtcagactgggaagttgacgacctactctgttccctgctgagcccacccgccagtctcaacattctttcttcctcaaatccttgcttggtccaccacgaccacacttactccttgcccagggaaacagtctctatggaccttgagtctgagtcttgtagaaaggagggaacacagatgacaccacagcacatggaggagcttgctgagcaggaaattgctcgcttggttctgactgatgaggagaagtcactgctcgagaaggagggcctgatacttccagagaccctgccattgactaagacagaggaacagattctgaagagggtgcggcggaagatacggaacaaacggtctgcccaggaatcacgcagaaaaaagaaggtttatgtcggcgggcttgaatcacgcgtgctaaagtacactgcccagaacatggagcttcagaataaagtgcagctacttgaggaacagaatttgagcttactggatcagctgagaaaactccaagccatggttatcgagatttccaacaaaaccagcagttctagcacgtgtatcctcgtcctgttagtgtcattctgtctccttcttgtgccggccatgtacagttctgacacccgaggtagcctgccagcagagcacggtgtgctcagtcggcagttaagggcactaccctccgaggacccttaccagttagagttgccagctttgcagagtgaggtaccgaaggacagtactcaccagtggctggacgggtccgattgcgtgctgcaggctcctggaaatacatcttgtctgctgcattatatgccacaggctcccagtgctgagcccccacttgagtggccgttccctgacctattctccgaacctttgtgtcggggccctattctaccattgcaagcaaacctgacgcggaagggaggctggctccccactggaagcccctcagttattctccaagataggtactccggatag

SEQ ID NO: 181436 - DNA, 1386 bp, synthetic construct
  misc_feature 1..1386: note = Description of Artificial Sequence: Synthetic coding sequence
  source 1..1386: mol_type = other DNA
atgaacaccgacctggccgccggcaagatggccagcgccgcctgctctatggaccccatcgactcattcgagctcctggacctgcttttcgaccggcaagacgggattctgaggcatgtcgagctgggcgaaggctggggccatgttaaggatcagcaggtcctgcctaaccctgacagtgatgacttcctttcatcaattctagggagcggcgattccctcccttcatcaccgttgtggagccccgagggatcggacagtggtatcagtgaagacctgccttctgacccgcaggataccccacctcgcagtggccctgcaacgagccccgctggatgccaccccgcgcagccaggaaaaggcccctgcctgagctaccatcctgggaatagttgctccaccaccactcccgggcccgtgatccaggtccccgaagcttcagtgaccattgatctggaaatgtggtcacccggaggtcgcatttgcgcagaaaagccggcagatccggtggatctttccccgaggtgcaacctcacggtgaaggatttgcttttgagtggatcctcaggggatctgcaacagcaccacttgggggccagctacctactgcggccgggagcagggcactgccaagaacttgtgttaaccgaggatgagaaaaaactgcttgccaaggaaggtattaccctgcctactcagcttcctctaacaaagtatgaggaacgcgtgctcaaaaagatcagaagaaaaatcaggaacaaacagtccgcgcaagagtcaaggaagaagaaaaaagaatacattgacggcctcgagaccaggatgagcgcttgtacggcccagaaccaggagcttcagaggaaggttctgcacctcgaaaagcagaatctgagtctcctggagcagctgaaaaagttgcaggccatagtcgttcaatcaaccagcaagagtgcccaaaccggcacatgtgtggctgtgctcctcctatcattcgccctgatcatcctgccaagtatttctccttttgggcccaataagaccgaaagccctggcgattttgcaccagtgagggtcttttcgcggacacttcacaatgacgcagctagtagggttgccgccgatgcagtccctggcagcgaagcccccggtcccagacctgaagcggataccacccgtgaagagtctcctggctcaccaggcgccgattggggtttccaggacacagctaacctgaccaactccacagaggaacttgataacgccacgttggttttaagaaatgcgaccgaaggactgggccaagtagccttgttggattgggtagctcctggccccagtacaggctccgggagggcgggtctcgaagccgcaggtgatgagctctag

SEQ ID NO: 181437 - DNA, 900 bp, synthetic construct
  misc_feature 1..900: note = Description of Artificial Sequence: Synthetic coding sequence
  source 1..900: mol_type = other DNA
atggccagcgccgcctgcagcatggaccccatcgacagcttcgagttactcgacctgctgttcgacaggcaggatgggatcctgcgccacgtggaacttggagagggctgggggcacgtgaaggatcaggtgctgcccaaccccgacagtgacgacttcttgagtagcattctggggagtggcgattctctgccaagtagtccgctgtggagccccgagggaagtgattcaggtatatctgaggacctgccttccgatcctcaggacaccccaccgcggagtggccccgctacatcccccgcgggttgtcacccagcccagccagggaaagggccatgtctgtcataccaccctggcaactcctgctccacgacaacgcccggtcccgtcatccagcagcagcaccatcttggagcatcgtacctccttaggcctggcgctgggcactgccaggaattggttctgactgaagatgaaaagaagttactggcgaaagaaggaatcactctgccgacacagctgcctctgacgaagtacgaagaaagggtcctgaagaaaatccgtcgcaaaattaggaacaagcagagcgcccaggagagccggaaaaagaaaaaagagtatattgatggcttggaaacgcggagttgttgttgtcccctcccaagttcttctagccctccttcagcccttctcgcccctacaaaacctagggcactcggcacccttagactgtacgaatgcagtccggagctctgcactacaatgctgccacctgcatggctcctgatgctttgtcaggccccacgaccacaggatcccgaccctaggctcacccagcccgagaagtctcttcaggaggctcctggtcagaccggggcctcgcgaacaccaagaacttag

SEQ ID NO: 181438 - DNA, 1260 bp, synthetic construct
  misc_feature 1..1260: note = Description of Artificial Sequence: Synthetic coding sequence
  source 1..1260: mol_type = other DNA
atgaacaccgacctggccgccggcaagatggccagcgccgcctgcagtatggacccaatagactcttttgagctgcttgatctcctgttcgataggcaggatggaattctaagacacgtggaattgggcgaggggtggggtcatgtcaaggatcagcaggttttgcccaaccctgatagtgacgacttcttgagttccattttagggagcggagacagtctgccatcgagccccctgtggagtcccgagggatccgacagtggtatctcagaagatctgccgagtgacccgcaagacactcctccacgcagtggaccagcgacatcacccgctggttgccatccagcgcaaccaggcaaaggcccttgcctgtcataccaccccgggaacagttgcagtacaacgacacccggccccgtgattcaggtgccagaggcatcagtcacaatcgatctggaaatgtggtcaccaggtggccgtatatgcgccgaaaagccagctgacccagtggacttgagcccgcggtgtaacctcacggttaaagacttattgctgagcggctctagtggggacctgcaacagcatcacctgggggcaagttacctgcttcggcccggagcaggacattgccaagagcttgtgctcacggaggacgagaagaagctgctcgctaaggagggaattacactgcccacacagctgccattgacaaagtatgaagagagagtcttaaagaagatcaggaggaaaattcgaaacaaacagtctgcgcaggagagcaggaagaagaagaaagctatcgtggtgcaaagcacatcaaagagcgctcaaaccgggacgtgcgtagctgtgcttctgctttcttttgccctgatcattcttccgagtattagtccttttgggcctaacaaaaccgaatcccctggggattttgctccagtgcgggttttcagccggacgctgcataatgacgcagctagccgtgtcgccgccgacgcggtgcctggctctgaggctcctggcccacgtccagaagcggataccacgcgtgaagaatcccctggctctcccggagccgactggggcttccaagatacagcaaaccttacaaactcgaccgaagagctggataacgcgactctggtcctgagaaacgccaccgaggggctgggccaggtcgccctcttggactgggtggcgcctggacccagcaccgggtctggcagagccggcctggaggccgccggggacgaattatag

SEQ ID NO: 181439 - DNA, 1188 bp, synthetic construct
  misc_feature 1..1188: note = Description of Artificial Sequence: Synthetic coding sequence
  source 1..1188: mol_type = other DNA
atggacctgggcatccccgacctgctggacgcctggctggagcccccggaagatatattttcaactggcagcgtgcttgaactgggacttcactgtcctccgcctgaagttcccgttactcggctacaggagcaggggttgcaggggtggaaaagcggtggagacaggggatgtggcttgcaggagtccgaacctgaagacttcctgaaattgtttatcgatcccaacgaggtgtattgttcagaggccagtcctgggtctgactccggcatcagtgaggatccttgtcatcctgatagtcccccagcccctcgcgcaacgagctcaccaatgctgtatgaagtggtatacgaggcaggagctctcgaacgaatgcaaggggaaactggacctaacgtaggcctgatcagtatacagctcgaccagtggagcccggccttcatggtgcccgacagctgtatggtgagcgaactcccattcgatgcccacgcacacattctgccacgcgctggcaccgtcgcgccagttccctgtaccactctcctgccctgtcaaactctgttcttgaccgacgaggaaaaacggttactcggccaggagggcgtatcgttgcccagccatttgccactcacaaaagcagaggagagggttcttaagaaagtaaggcgtaaaatcagaaacaaacagtcagcgcaggattccaggaggaggaaaaaggagtacatcgatggattggagagcagggtggccgcttgcagcgcccaaaatcaagaactccagaagaaggtgcaggaacttgagcgccataacatctccctggtggcccaactgagacaactacagaccttaattgcccaaaccagcaacaaggctgctcaaaccagcacttgcgtcctaattcttctcttcagcctagccttgataattctgccttctttctcaccattccagtctcgcccggaggccggaagtgaggactaccagccccacggtgttacctcccgtaatatcctaacccataaggacgtaaccgaaaacctggagacccaagtggtggagtctaggctgcgcgagcccccaggggcaaaggacgctaacggctcaacgcgcacgctactggaaaaaatggggggcaagcctcgaccatcagggaggattcgctccgtacttcacgctgacgagatgtag

SEQ ID NO: 181440 - DNA, 1128 bp, synthetic construct
  misc_feature 1..1128: note = Description of Artificial Sequence: Synthetic coding sequence
  source 1..1128: mol_type = other DNA
atggacctgggcatccccgacctgctggacgcctggctggagccccctgaagatatcttcagcacaggaagcgttctggagcttggcctgcactgccctccacctgaggtgcccggtcttcaggagtctgagccagaggacttcctgaagctatttatcgaccccaatgaggtctattgctccgaggcatctcctggttccgattcaggtatcagtgaggacccgtgtcatcccgattctcctcccgcaccacgggcgacaagttctccaatgctttatgaagtggtttacgaggcaggagccctagaaagaatgcagggagagacagggccaaatgtggggttgatctcaatacagctggaccagtggtctccggcgttcatggtccccgatagttgtatggtttctgaactgcctttcgatgcacacgcacacatccttcctcgggccggcacagtggctcctgtgccttgcaccactctgctgccctgtcagactctgttcctgacagacgaagagaaacgtctgctaggccaggagggggtaagcctcccttcacatctgcccctgaccaaagcggaggaaagggtgctgaagaaagtgcgccgcaagataagaaacaagcaatcagctcaggattctcggagaaggaaaaaggaatatattgacggactggagtcccgagtagcggcttgcagcgcccaaaatcaggaactgcaaaagaaagtgcaggagctagagcgacacaacatctctctggtcgcccagctcagacagttgcagacccttattgctcagacatctaataaagcggctcagacgtccacatgtgtcctgattctgctattcagccttgcgttgataattctcccttccttctccccctttcagtctaggcctgaagccgggtccgaggactaccagccccacggggtgacatctcgaaatatcctgacgcataaggacgttaccgagaatttggagacccaggtcgttgagtcccggctaagagaaccccctggagctaaagatgcaaatggcagcaccaggacacttctggaaaagatggggggcaagccccgaccttccggcagaatccggtcagtattgcacgcagatgagatgtag

SEQ ID NO: 181441 - DNA, 654 bp, synthetic construct
  misc_feature 1..654: note = Description of Artificial Sequence: Synthetic coding sequence
  source 1..654: mol_type = other DNA
atggacctgggcatccccgacctgctggacgcctggctggagcccccagaggacatcttcagtacggggtcagtgctcgagctcgggctgcactgtccgccccctgaggtaccagtcaccagacttcaggagcaaggtctacaggggtggaagtccggtggagatagaggctgcggactacaggaatcagaaccagaggactttctcaaacttttcattgacccgaatgaggtttactgcagcgaggcttctccgggaagtgattccggaataagcgaggacccctgtcatccggactcacctccagcacccagagctacctccagtccgatgctctacgaggtcgtctatgaggccggagcactcgagcggatgcaaggggagaccgggccaaatgtgggcctcatatccatccagctggatcagtggagccccgcgtttatggtcccagattcctgcatggtttcagaactgcccttcgacgcccatgcccatatcctcccccgggcgggtacggtggctccggtcccttgcacgaccctgcttccctgccagactttgttcctgaccgatgaagagaaacggctactcgggcaggagggcgtctctttgccgtctcaccttccactgaccaaagttacttgtttcccctag

SEQ ID NO: 181442 - DNA, 1188 bp, synthetic construct
  misc_feature 1..1188: note = Description of Artificial Sequence: Synthetic coding sequence
  source 1..1188: mol_type = other DNA
atggacctgggcatccccgacctgctggacgcctggctggagccccctgaagacattttcagcacaggctcagtacttgaactcggtcttcactgccccccccccgaagtccccgtgactagacttcaggagcagggcctgcagggttggaagagtgggggggataggggatgtggattacaggaatccgaacctgaggattttttgaaactttttattgaccctaatgaggtttactgctccgaggcctcgcctggaagcgatagcggtataagcgaagacccttgtcatcctgattccccgccggccccaagggcaacatcttcccctatgttgtacgaggtggtgtacgaagcaggtgctttagaaaggatgcagggtgaaacaggtcccaacgtgggtctgatcagcatacagctagatcagtggagccctgcttttatggttcccgactcgtgcatggtgagtgagctgccctttgatgcccacgcccacatcttacctagggccggcaccgtcgctccagtgccgtgcacaactcttctcccttgccagacgctcttcttgaccgatgaggagaagcggctactcggtcaagagggagtctcactgccatcccacctgcctctgacaaaggccgaagagagggttctgaaaaaagtgcgcaggaagatccgaaacaagcagtcagctcaggatagtcgcagacgaaagaaggagtacatcgatgggcttgagagtcgcgtggctgcatgctccgctcagaaccaggaattgcagaaaaaagtccaggaattggagagacacaacattagcctggtggcccaactgagacaactccagacactgatagctcagaccagcaacaaagctgcccagacctccacgtgcgtcctgattttactgttctccctggcactcattattctgccaagtttctctcctttccaatcgagaccagaggccgggagcgaggattatcagccgcatggtgtcacctccaggaacatcctcactcacaaggacgtcaccgaaaatttggagacacaggtggtggagtcaagactaagagaaccccccggcgccaaagatgcgaacggatctactaggactttgctcgaaaagatgggagggaagccgcgaccatctggcagaatccgcagcgtcctgcacgccgacgaaatgtag

SEQ ID NO: 181443 - DNA, 1188 bp, synthetic construct
  misc_feature 1..1188: note = Description of Artificial Sequence: Synthetic coding sequence
  source 1..1188: mol_type = other DNA
atggacctgggcatccccgacctgctggacgcctggctggagccccccgaagatattttcagcacaggcagcgttctggagctgggattgcactgcccccccccagaggttccagtgacaaggctgcaggagcagggcttgcagggttggaagtccggaggtgacagaggctgtggtctccaggagtccgagcctgaagactttttgaagctcttcattgaccccaatgaagtgtactgttccgaagcttcaccgggctcagatagtggaattagcgaagacccttgccacccggattctccacccgctcccagggccacatcgagcccgatgttgtacgaagtggtgtatgaggccggggctctggagagaatgcagggggagaccgggccaaacgtggggctcatttctatccagttagaccagtggagccctgcgttcatggtccctgactcttgcatggtgagcgagctaccattcgatgctcatgctcatatcctcccaagagctggtacagttgccccagttccttgcactaccctcctcccttgtcagaccctcttcctgaccgatgaggagaaacgtctcctcgggcaggagggagtcagtctcccttcacatctgcccctgacaaaagcggaggagagggtgctgaagaaagtgaggaggaagatacggaataagcagagcgcccaggatagtcgccgtcgaaagaaggaatatattgacggcctagagagtcgcgtggcggcctgcagcgcccagaatcaagaattgcagaagaaagtccaggagttggagagacataacatctccttggtggctcagctgagacagctccagacactcatcgcgcagacatcaaataaagccgctcagacctccacttgcgtacttatcctgctgttttccctggccctgattattttgcctagcttctctccttttcagagccgtcccgaggccggcagcgaggactaccagccccacggcgtgactagtcgaaacatcctgacacacaaggacgtcacagaaaatctggagactcaggttgtcgaaagcaggctccgggagccgcccggggccaaggacgccaacggcagcacaagaacgctcctggagaagatgggcggcaaaccaaggcccagcgggcggattcgctctgttttacacgcagatgaaatgtag

SEQ ID NO: 181444 - DNA, 747 bp, synthetic construct
  misc_feature 1..747: note = Description of Artificial Sequence: Synthetic coding sequence
  source 1..747: mol_type = other DNA
atggtgcccgacagctgcatggtgagcgagctgcccttcgacgcccatgctcacatcctgcctcgggctggcacagtcgcacctgtaccttgtaccacacttttgccatgccagaccctctttcttacagacgaagagaagcgcctgcttgggcaggaaggcgtgagcctgccgtcgcacctcccgctgactaaagctgaggagcgggttctcaaaaaagtccggaggaaaatcaggaacaaacaatccgcacaagacagccgacggcgcaagaaggagtatattgatgggttggaatctagagtagccgcttgttctgcacagaaccaagaactgcagaaaaaggtgcaggagcttgagaggcacaatataagcttggtcgcccagctgcgccagctccagactctgattgcacagactagcaataaggcggctcaaacttctacctgcgtgttaattcttctattttccctagccctcatcatccttccgtctttcagtcctttccaatctcgtccggaggctggaagcgaagactatcagccccacggtgtgacctcgagaaatattctgacccacaaagatgttaccgaaaatcttgagactcaggtggtagaatcacgactaagggagccccccggcgcaaaagatgctaacggttccacccgcacattgctggaaaagatgggagggaagccacgccctagtgggcgtatacggagcgtcctccacgccgacgagatgtag

SEQ ID NO: 181445 - DNA, 549 bp, synthetic construct
  misc_feature 1..549: note = Description of Artificial Sequence: Synthetic coding sequence
  source 1..549: mol_type = other DNA
atggacctgggcatccccgacctgctggacgcctggctggagccccccgaggatattttttctaccggcagcgtccttgagctaggcttgcactgtcctcctccagaggtaccggttacgaggctccaggagcagggactgcaggggtggaagagtggcggggaccgggggtgtggactccaagaatctgaacctgaggatttcctgaagctgtttattgaccctaacgaagtctactgctccgaggcctctccgggttccgatagtggtatctcagaggacccctgtcaccccgactcccccccggcacctcgggccacaagcagtcccatgctctacgaggtcgtgtacgaagccggcgcccttgaaagaatgcagggagaaaccggtccaaacgtgggcctgattagcatccaactggaccagtggtctccagccttcatggtcccggattcttgtatggtgtccgaactccctttcgatgcccacgctcacatcctgccgcgggccggtacagtggcccctgtgccgtgcactacgctcgtttag

SEQ ID NO: 181446 - DNA, 687 bp, synthetic construct
  misc_feature 1..687: note = Description of Artificial Sequence: Synthetic coding sequence
  source 1..687: mol_type = other DNA
atggacctgggcatccccgacctgctggacgcctggctggagccccccgaggacatcttttcaaccggctctgtgctcgagctcggtctgcactgcccccctcccgaggtaccaggcctgcaagaatctgagccagaggatttcctaaaactctttatcgacccaaatgaagtgtactgcagcgaagctagcccaggcagtgatagtggaatcagtgaagacccttgccatcctgactcgcccccggctccgagagcgaccagttcccccatgctgtacgaggtcgtctacgaggccggcgctctggagcgcatgcagggcgagaccggccccaatgtgggactgattagtatccagctcgatcagtggtctccggctttcatggtccctgatagctgcatggtatccgagctaccctttgacgcccatgcccacatcctgccaagagctggaactgtggcgccagtcccgtgcacaaccctcctgccctgtcagaccctatttctgaccgacgaagagaagagacttctgggtcaagagggggtgagtttgccatcccatctgccactgaccaaagctgaggaacgtgtgctgaaaaaagtcaggcggaaaatcagaaataagcaatcggctcaggacagtaggaggaggaagaaggagtacatcgacggtttggagagccgctag

SEQ ID NO: 181447 - DNA, 1047 bp, synthetic construct
  misc_feature 1..1047: note = Description of Artificial Sequence: Synthetic coding sequence
  source 1..1047: mol_type = other DNA
atgagcaagtgcgcccggaagaagtacatcaagaccaacccccggcagatgacaatggagacagttgaatcgcagcacgatggatccataacggccagcctcactgaatcaaaatcagctcacgttcaaacccagaccggacaaaattcaataccggcccttgcacaggtatccgtggctggctcaggaacccggagaggctcaccagccgtcacgctggtgcagctcccctctgggcagacaatacatgtgcagggggtgatccaaaccccacaaccgtgggtgattcagtccagtgagattcataccgttcaggtcgctgcaatcgccgaaactgatgaaagtgctgagagcgagggcgtaatcgattcacataagcgacgagaaatcctgtcccggcggcccagctatagaaaaattctcaatgaactcagttctgacgtgccaggggtccccaaaattgaggaagagcgttccgaggaggagggtacccccccctccatcgccacgatggctgtgccgaccagcatttatcaaacgagtacgggccagtatattgccattgcccaggggggcaccatccagatctcaaatccagggagtgatggtgttcagggcctgcaagcccttaccatgactaactccggggcacccccacctggtgctaccatcgtgcagtacgcagcccagagcgccgacggcactcagcagttcttcgtgccagggtcccaggtcgtggtgcaggccgctaccggcgatatgcctacttaccagatcagagcccccacagcagcgcttccacagggcgtggtcatggccgcttctcctggcagcctccacagtccgcaacagctagcagaggaggcaacgcggaagagagagctccggttgatgaagaaccgtgaggcggcacgcgagtgccggagaaagaagaaggaatacgtcaaatgccttgagaacagagttgctgttttagagaaccagaataagaccctaatagaagaactgaaggcgctaaaagacctgtactgtcacaaagtcgagtag

SEQ ID NO: 181448 - DNA, 900 bp, synthetic construct
  misc_feature 1..900: note = Description of Artificial Sequence: Synthetic coding sequence
  source 1..900: mol_type = other DNA
atgagcaagtgcgcccggaagaagtacatcaagaccaacccccggcagatgactatggagaccgtcgagagtcagcatgacggcagcataaccgcgagtctgacagaaagcaaatctgcccatgtgcagacccagacaggacaaaacagtattccggctctggcgcaggtagccgccatcgctgaaaccgacgagtctgccgaatcagaaggcgtgatcgattctcataaacgacgcgagatcctgtcaagacgtccatcttacaggaaaatcttaaacgagttatctagcgatgtccccggggtgcctaaaattgaggaggaaagatctgaggaggagggaacaccccccagtatcgcaactatggcagtgcccacaagcatctaccaaacctcgacagggcaatatatcgctatcgcgcagggcgggacaattcagatttccaatcctggcagtgatggagtgcaagggctacaagcgctaaccatgaccaattccggcgcccctccaccgggcgctaccatcgtgcagtacgccgcacaatccgctgatggaacgcaacaattcttcgtcccaggctcccaggtcgttgttcaggcggctactggagacatgcccacctaccagatcagagcgcctaccgcggccctcccacagggcgtcgtgatggcagcctctcctggctccctgcattctccccagcaattggcggaggaggctacccggaaacgcgagttgcgcctcatgaagaatagggaagccgcacgggagtgccgccggaagaagaaagaatatgtaaagtgcctggagaatcgggtcgccgtgctcgagaatcaaaacaaaacactgatagaagaattgaaagccctgaaagacctgtactgccacaaggtcgagtag

SEQ ID NO: 181449 - DNA, 738 bp, synthetic construct
  misc_feature 1..738: note = Description of Artificial Sequence: Synthetic coding sequence
  source 1..738: mol_type = other DNA
atggtggccgccatcgccgagaccgacgagagcgccgagagcgagggtgtgatagatagtcacaaaagacgggagattttaagcagacgaccaagttacaggaagatcctgaatgagctttccagcgacgtgcccggagttcctaaaatagaggaagaaagatctgaggaggagggcactccaccgagtatagctacaatggctgtgccgaccagcatataccagacttctaccggacagtatatagccatagcacagggggggaccatccagatcagtaatccaggaagtgatggcgtgcagggtttacaagccctgactatgacaaactcaggggctcctcctccaggtgctacgatcgtacagtacgctgcacagtcagcagatggcactcagcagtttttcgttcccggaagccaggtggtcgtgcaggctgctacgggggacatgcccacctaccagatcagggctcctactgccgctctcccacaaggggtcgtgatggcagccagtcctggctctctgcatagtcctcagcaacttgcggaggaagctaccaggaaaagggaactcagacttatgaagaatcgggaggccgcgaaggagtgccgccggcggaagaaggagtacgttaaatgcctggagtctcgagtggccgttctagaggtacagaacaagaagctcattgaagagctggaaaccctgaaagatatctgctcaccgaagaccgactattag

SEQ ID NO: 181450 - DNA, 288 bp, synthetic construct
  misc_feature 1..288: note = Description of Artificial Sequence: Synthetic coding sequence
  source 1..288: mol_type = other DNA
atgcccacctaccagatccgggcccccaccgccgccctgccccagggggttgttatggccgcttcacccgggagcctgcatagccctcagcagctggcggaagaggcaacacggaagagagagctgagacttatgaaaaatcgtgaggcagctcgggaatgtagacgaaaaaagaaagaatatgttaagtgtctggaaaatcgggttgccgtcctggaaaatcagaacaaaactctgatcgaggaactgaaagctctgaaggatctgtactgtcacaaggtagagtag

SEQ ID NO: 181451 - DNA, 903 bp, synthetic construct
  misc_feature 1..903: note = Description of Artificial Sequence: Synthetic coding sequence
  source 1..903: mol_type = other DNA
atgagcaagtgcgcccggaagaagtacatcaagaccaacccccggcagatgacgatggagacagtggaatcccagcacgatggatcaattaccgccagtcttacagaatctaaaagtgcccatgtgcagactcagactggacaaaacagcattcccgctctggcgcaggttgctgcaatcgccgaaaccgatgagtcagcagagagtgagggcgtgatcgatagccataagaggagggaaatccttagcagaaggccctcctatagaaagattctcaatgaactttcttcagacgttccgggagtcccaaaaatagaagaagagcgcagcgaagaggaaggtacccccccctctatcgcaacgatggcagttccaacatctatttaccagacgtctacgggccagtatatcgcaattgcccagggcggaacaatccaaatctccaatcctggttcggacggcgtgcagggcttgcaagctctgaccatgacaaacagcggcgcacctcccccaggcgcaacaattgttcagtatgcagctcagagcgcagacggcacgcaacagtttttcgtgcccgggtctcaagtagtggtccaggctgcgactggggacatgccaacgtatcaaattcgggccccgacggctgctctgccccagggggtagtcatggctgccagcccaggctcgctgcacagtcctcaacagctcgccgaggaagcaactaggaagcgagaactgcgtcttatgaagaatagggaggcggccaaagaatgtcgacggaggaagaaagaatacgtgaagtgcctcgagagccgagttgctgtgctggaggttcaaaataagaagttaatagaggaactggaaacactgaaagacatctgctccccgaaaaccgactattag

SEQ ID NO: 181452 - DNA, 666 bp, synthetic construct
  misc_feature 1..666: note = Description of Artificial Sequence: Synthetic coding sequence
  source 1..666: mol_type = other DNA
atgaccatggagaccgtggagagccagcacgacggcagcatcaccgctagtctcacagagagtaagagcgcgcacgtgcagacacagacagggcagaattccattcctgcccttgctcaggtcgctgctatcgctgaaactgacgagtccgcagagtccgagggcgtgatagacagtcacaaaaggagagagattttaagccgccgtccaagctaccgaaaaattcttaatgaactgtcctccgacgtgcccggtgtgccaaagattgaagaggagaggtctgaagaagaaggtacaccacccagtatcgctacaatggctgtgccaacatcaatataccagactagtacaggacagtacacggcgaccggcgacatgccaacgtatcagattagggccccaacagccgccctgccccagggtgtggttatggccgcttcacccgggagtctccacagcccccagcagcttgctgaggaagcgacccgtaagcgcgagttgaggctgatgaagaatcgcgaagccgctaaagaatgtagaagaagaaagaaggaatacgtgaaatgtctcgaatcacgtgtcgccgtgcttgaggtacagaataagaaactcatcgaggagctcgagactctgaaggatatctgttcgcccaagaccgattattag

SEQ ID NO: 181453 - DNA, 747 bp, synthetic construct
  misc_feature 1..747: note = Description of Artificial Sequence: Synthetic coding sequence
  source 1..747: mol_type = other DNA
atgagcaagtgcgcccggaagaagtacatcaagaccaacccccggcagatgacaatggagactgtggagtctcagcacgacggatccatcactgcttctttaaccgaatccaaatcagctcacgtgcagacccaaaccggtcaaaattcaattcccgccctggcccaagtggcagctatcgctgagactgacgagtccgccgaaagcgagggcgtgatcgacagtcacaagcggcgcgagattctcagccggagaccgagttatcggaaaatccttaacgagctgtcatctgatgtaccgggagttcctaaaatcgaggaggagcgcagtgaagaagaaggcactccacctagcatcgctaccatggccgtgccaaccagcatttatcagaccagtaccgggcagtacaacgaagagaccgagctcgcccccagccacatggctgcagcgacaggagatatgccaacctatcaaattcgagcgccgaccgccgccctgccacagggggtggttatggctgccagcccaggaagcctacacagcccacagcaactggcagaggaggcaacaagaaagagggagctcagactgatgaaaaaccgcgaggccgctcgggaatgcaggcgcaagaaaaaagagtacgttaaatgcttggagaacagggtggccgtgcttgaaaatcaaaataaaaccctaatcgaggaactcaaagcccttaaggatttgtactgtcataaggttgagtag

SEQ ID NO: 181454 - DNA, 327 bp, synthetic construct
  misc_feature 1..327: note = Description of Artificial Sequence: Synthetic coding sequence
  source 1..327: mol_type = other DNA
atggccgtgaccggcgacgacaccgccgccaccggcgacatgcccacttatcagatccgcgctcctaccgcggcccttccccaaggggtggtgatggcggcatcccctggatcactgcactccccccagcagctggctgaggaggccacacgaaagcgagaactccgcctgatgaaaaatcgcgaagcagcccgagagtgtagacggaaaaagaaagaatatgtgaagtgtctggaaaacagagtggctgtcctggagaatcaaaataaaactctgattgaggagctgaaggcgctgaaagacctgtactgtcataaggtcgaatag

SEQ ID NO: 181455 - DNA, 813 bp, synthetic construct
  misc_feature 1..813: note = Description of Artificial Sequence: Synthetic coding sequence
  source 1..813: mol_type = other DNA
atgtggtggcaccagcacaacctgtgcttccggcggcccatcgaggaggactattcgagcggggacgtagaggaaaaggtggccgccatcgccgagacagacgaaagcgctgaaagcgagggcgtgatcgattcacataagcgacgcgaaatactctcgaggcgccccagttatcggaagatcctgaacgagttaagcagtgatgtgccaggggtgcccaaaattgaggaagaaaggtccgaggaggaagggacacctccgtctatcgccactatggccgtaccaacctctatctaccaaaccagcaccggacagtacattgcgatagctcagggcggaacaatccagatatcaaaccccgggagcgacggggtacaagggcttcaggccctgactatgactaactcaggggccccgcccccgggagccaccatcgtgcagtacgccgctcagtctgcggatgggactcagcagttttttgtaccaggcagccaggtggttgtgcaagccgcaacgggagatatgccaacgtaccagatccgagcccctacagctgccttaccccagggggtggtgatggcagcatcccccggctccttacatagtccccagcagctggctgaggaggcgactcggaaacgtgagctgaggctcatgaagaaccgcgaggccgccaaagagtgcagacgtcggaagaaggaatatgtcaagtgtctggaatcaagggttgcagtcctcgaagtgcagaataaaaaactgatcgaagagctcgagaccttgaaagatatttgctcacccaagacagactactag

SEQ ID NO: 181456 - DNA, 999 bp, synthetic construct
  misc_feature 1..999: note = Description of Artificial Sequence: Synthetic coding sequence
  source 1..999: mol_type = other DNA
atgaccatggagaccgtggagagccagcacgacggcagcatcaccgcctcactgacagaaagcaagagtgcccatgtgcagacacagaccggccagaatagcatccccgcactagctcaggtctcggtggctgggtcaggtaccagaaggggctcgcccgccgtgactcttgtgcagttgccctccggccagacaattcacgtccagggggtcatacagaccccgcagccatgggtgatacagagctcagagatccataccgtgcaggttgccgcaatagctgaaacggatgagtccgccgaatcggaaggtgtcattgactcccataaacggagagaaatcttatctcggcgccctagctacaggaaaatcctgaacgaacttagttcagatgtgcccggtgtgcctaagattgaagaggagcgctctgaggaagagggcacccccccgagcatcgcaactatggccgtacccacatctatataccagactagcacagggcagtacatagcaatagcccagggcgggactatccagataagtaaccccggctcagacggagtgcagggtctgcaggccctgacaatgaccaatagtggcgctcctccaccaggcgcaaccatcgtgcagtatgccgcccaatctgctgacggcacccaacaatttttcgtgcccggaagtcaggttgtggttcaggcagccacgggcgacatgccgacctatcagattcgggcccctaccgccgccttgccacaaggcgttgtaatggctgccagcccggggagcctgcacagcccacagcagcttgctgaagaagcaacgcgcaaaagagagttaaggctgatgaaaaaccgagaggcagctcgcgagtgccgtcgcaagaaaaaggaatatgtgaagtgcctagagaaccgggtcgccgtgctggagaaccagaataagacacttattgaagaattgaaagccctcaaggacctctactgtcacaaggttgaatag

SEQ ID NO: 181457 - DNA, 1002 bp, synthetic construct
  misc_feature 1..1002: note = Description of Artificial Sequence: Synthetic coding sequence
  source 1..1002: mol_type = other DNA
atgaccatggagaccgtggagagccagcacgacggcagcatcaccgcctcccttactgaatccaagtccgcgcacgtccagacgcagacaggacagaacagcatccccgcgcttgcgcaggtgtcagtggccgggagtggcactcggcgtggctcccccgctgtgactctcgtgcagcttcccagtggtcagaccattcacgtgcagggagtaatacaaaccccacagccttgggtgattcagtcttcagaaattcacactgtgcaagttgccgcaattgctgaaaccgatgagtccgccgagtccgaaggcgtgatcgattctcacaagaggagggagatcctctcgagacgaccttcgtacagaaaaattttgaatgaactttcttcagacgtgccaggggtacccaagatcgaggaggagaggtccgaggaggaagggactcccccatccatcgctacaatggctgttccgacctccatctaccagacctctacggggcagtacattgccattgcccagggcggtacaatacagattagtaaccctggatccgacggtgttcagggcctgcaggctctgacaatgaccaactcgggtgcccctccccccggggccacaatcgtgcagtacgccgcccagtctgccgatggtactcagcagttcttcgtgcctgggagtcaggtcgtggtccaggccgctactggcgacatgccaacctaccagatccgcgcaccaactgctgccttaccacagggggtggtgatggccgcaagccctggctcgcttcatagtccccagcagcttgctgaagaggctacacgcaagcgcgagctgcgcttgatgaagaatcgcgaagccgccaaggaatgccggcgccgcaagaaagagtacgtcaagtgccttgagagcagggtcgcggtcctggaagtccaaaacaagaaactgatcgaggagcttgagacactgaaagatatatgttcgccaaaaaccgattattag

SEQ ID NO: 181458 - DNA, 414 bp, synthetic construct
  misc_feature 1..414: note = Description of Artificial Sequence: Synthetic coding sequence
  source 1..414: mol_type = other DNA
atgaccatggagaccgtggagagccagcacgacggcagcatcaccgcttctcttacagaaagtaagtcagcacacgtccagacacaaactggtcaaaattccattcctgccttagcccaggtggccgccatagccgagacggatgaaagtgctgagtccgaaggagttattgatagccacaagaggcgagaaatattgagccgtaggccatcttatagaaaaattcttaacgaattgagttctgacgtgccaggggttccaaagattgaggaggagagatctgaagaggagggcacccccccatctattgccacaatggctgtgcccaccagtatatatcagaccagtaccggacagtactccatgtacgccgccattagatacgacactgtgctagctctgtcccttctctag

SEQ ID NO: 181459 - DNA, 666 bp, synthetic construct
  misc_feature 1..666: note = Description of Artificial Sequence: Synthetic coding sequence
  source 1..666: mol_type = other DNA
atgaccatggagaccgtggagagccagcacgacggcagcatcaccgcttctctcaccgagtcaaaatcagctcatgtgcagacccagaccggtcagaattctatcccagcattagcgcaagtggccgcgatagcagaaaccgatgaatccgcggagtcagaaggagtgattgatagccacaaacgccgggaaatcctgtcccgccgccccagctaccgcaagattttgaatgagttgtcgtcagatgtaccaggagtcccgaaaatagaggaggaacggagcgaagaagaggggacccctccttcgatcgccaccatggcagtacctacaagcatctatcaaacctccaccggtcagtacaccgccaccggagatatgcctacgtaccaaattcgtgcccccactgcagccctcccccagggagtggtgatggcagcatctccgggctcactccactcccctcagcagctggccgaagaggctacccggaaaagagaacttaggctgatgaagaaccgggaggccgccaaagaatgtagaagaaggaaaaaagagtacgttaagtgcctggaaagccgtgtagccgtcctggaagttcagaataaaaagttgattgaggaactcgaaactttgaaagatatttgctcccccaagacagattattag

SEQ ID NO: 181460 - DNA, 711 bp, synthetic construct
  misc_feature 1..711: note = Description of Artificial Sequence: Synthetic coding sequence
  source 1..711: mol_type = other DNA
atgagcaagtgcgcccggaagaagtacatcaagaccaacccccggcaaatgaccatggagacagttgagagccagcatgatgggagcatcacagcgagtctgactgagtcaaagagcgcccatgtccagactcagaccggacagaacagcattcccgctctggcacaggtagccgcaatcgccgagactgatgagagcgcagaaagcgagggtgtgatcgatagtcacaagcgtcgggaaatcctgagtcgacggcccagctacagaaagatacttaatgaactgagtagtgatgtgcctggcgtgcccaagatcgaagaggaacgctcagaagaagaagggacacccccgtcaattgctacaatggcagtgcctacttctatttaccaaaccagtactgggcagtatacagctactggagacatgccgacctaccagattagggctccaaccgctgctctgcctcagggtgtggtgatggccgcttctccaggtagtttgcattctcctcagcaactggctgaggaagccacccggaagcgtgagcttaggctaatgaaaaatcgtgaggccgcaagggagtgtaggcgtaagaagaaggagtacgtcaaatgtttggagaatcgggtagcagtcctggagaaccagaacaagaccctgattgaggaactcaaagcactaaaagatttgtactgtcataaggtggagtag

SEQ ID NO: 181461 - DNA, 849 bp, synthetic construct
  misc_feature 1..849: note = Description of Artificial Sequence: Synthetic coding sequence
  source 1..849: mol_type = other DNA
atgtggtggcaccagcacaacctgtgcttccggcggcccatcgaggaagactacagcagtggtgacgtggaggaaaaggtagccgccatcgcagagacagacgagagcgctgagtccgagggcgtgattgatagccacaaaaggagagagatattatcaagacgcccctcctaccgaaagatcctgaacgagctctctagtgatgttcctggagtgcctaaaattgaggaagaaaggagtgaggaggaggggactccaccatcgatcgcaacaatggccgttcccacgagcatctaccaaacaagcactggccaatatatcgcaatcgctcaaggcgggaccattcagatctctaatcccggaagcgatggagttcaggggcttcaagcccttacaatgactaacagcggagccccaccaccaggcgccacaatagtacagtacgccgcacagagcgctgacggaacccagcagttcttcgtccccggctcccaggtggttgtgcaggatgaggagaccgagctagcaccttctcacatggccgctgccactggggatatgcccacctaccagattagagcacccaccgctgcccttccacagggcgttgtaatggccgccagccccggtagcctccacagccctcagcagttggctgaggaagcaactcgaaaacgggaactgcggctcatgaaaaatagagaggccgcgaaggagtgccgccgtcgcaaaaaggaatatgttaaatgtctggagtctcgggtcgctgtgctcgaagtccaaaacaagaaactcatcgaagaactggagactctgaaggacatttgtagtccgaaaacagactactag

SEQ ID NO: 181462 - DNA, 1086 bp, synthetic construct
  misc_feature 1..1086: note = Description of Artificial Sequence: Synthetic coding sequence
  source 1..1086: mol_type = other DNA
atgagcaagtgcgcccggaagaagtacatcaagaccaacccccggcagatgaccatggaaactgtagagtctcaacacgatggctctatcaccgcgagtctgactgaatctaagagtgcacatgtgcagacccagacaggccagaattcgatcccggcactggcgcaggtaagcgtcgccggctccggaacacggagaggcagccctgcagtcacccttgtgcagctgccttccggacagacaatacacgtgcaaggagtgattcagactccacagccatgggtaatccagagctctgagattcatacagtccaagtggctgccatagctgagactgatgagagtgcagagtcagaaggcgtaatagacagtcacaaaaggcgggagattctatctcgccgcccatcctacagaaaaattctgaacgaactttcttccgatgttcccggagtacctaagatagaggaggagcgctccgaagaggaggggacacctccgtccatcgcaactatggccgtccccacatccatctaccagacaagtactgggcagtacattgccatcgcccagggcggcacaatccagataagcaaccctggttccgatggcgtacaaggactacaggcgctaacaatgactaactccggagccccacccccaggggcaactatcgtacagtacgccgcccagtctgccgatggtacgcaacagttctttgtccctggatctcaggtggtagtacaggacgaagagactgaactggcacctagtcacatggccgcagcaactggtgacatgcctacatatcaaatcagagcccctaccgccgcactacctcagggagtagtaatggccgcatcccccggcagcctccacagcccgcagcaactggcggaggaagccactaggaaaagggagctccggctaatgaaaaaccgggaggctgccaaagaatgccgtcgccgaaagaaggagtacgttaaatgcctggaaagccgcgttgctgtattggaagtacagaacaaaaagctgatcgaggaactggaaacactgaaagacatatgttccccaaaaactgactactag

SEQ ID NO: 181463 - DNA, 474 bp, synthetic construct
  misc_feature 1..474: note = Description of Artificial Sequence: Synthetic coding sequence
  source 1..474: mol_type = other DNA
atgagcaagtgcgcccggaagaagtacatcaagaccaacccccggcaaatgacgatggaaaccgtagagtcacagcatgacgggagtatcactgcttccctgacagagtctaaatccgcccacgtgcagacccagacaggacagaactcgatcccggctctcgcccaggtggccgcaattgccgaaaccgacgaaagcgccgaatccgaaggagttattgattctcacaagagaagagaaattctgtcaagacggccctcttatagaaagatcctcaacgagctgtccagtgatgttccaggcgtgcccaagatcgaggaggaaagaagcgaagaggagggcacccctccatccattgccacaatggctgttcctacaagcatttaccagacatcaactggccagtacattgcaatcgcccagggcggtacaattcaaatcagcaacccaggctccgacggcgtacaggggtag

SEQ ID NO: 181464 - DNA, 1038 bp, synthetic construct
  misc_feature 1..1038: note = Description of Artificial Sequence: Synthetic coding sequence
  source 1..1038: mol_type = other DNA
atgaccatggagaccgtggagagccagcacgacggcagcatcaccgccagcttgaccgagtcaaagagcgctcatgtacagactcaaactggacagaactcgatacccgccctggcgcaagtctctgtggctggatctgggacacggcgtggcagcccagctgtgacactggtccagctgcctagcgggcaaacaatccacgtacagggcgtgatccagacgcctcagccatgggtaattcagtcctcggagatccatactgtgcaggtggccgcgatagcggagacagatgagtctgcagaatcggagggcgtgattgacagtcataaaaggcgagagattctgtctagacgaccaagttacagaaagattctgaatgaactatccagtgacgtgcccggagttcctaagatagaagaagaacggtccgaggaggaaggcacccccccttccatcgctaccatggctgtacctacaagcatctaccagacctctacgggacagtacattgctatcgctcaggggggtaccattcagatttcgaatccaggctccgatggggtgcagggacttcaggcacttaccatgaccaacagtggagcacccccacccggcgctaccattgtgcagtacgccgctcaatccgccgatggaactcagcagttcttcgtgcccggatcgcaagttgtggtccaggacgaagaaaccgagctggctccctcccatatggccgctgccactggggatatgccaacctaccagataagggctcctaccgctgcactcccgcagggtgtcgtgatggccgcctctcctggctccctgcactcccctcagcaactggctgaggaggctaccaggaaacgagagctgcgtctgatgaaaaatcgggaagctgccaaagagtgccggaggcggaagaaggagtatgtgaagtgtctggaaagccgggtagcagtgttggaagtgcaaaataaaaaactaattgaggagctggagactctgaaggacatctgctcccccaagaccgattattag

SEQ ID NO: 181465 - DNA, 858 bp, synthetic construct
  misc_feature 1..858: note = Description of Artificial Sequence: Synthetic coding sequence
  source 1..858: mol_type = other DNA
atgagcaagtgcgcccggaagaagtacatcaagaccaacccccggcaaatgaccatggagaccgtcgaaagccaacacgatgggtccattacggcttccctcactgagtcgaaatcggcacacgtgcaaacgcagactggccagaatagcattcccgctttggcccaagtctcagtggctggctccggcaccaggagaggctctcctgccgtcacactggtgcagcttccatcgggccagacaattcacgtgcaaggagttatccagaccccccaaccctgggtcattcaatcttctgagattcacactgtgcaagtcgctgcaatcgccgagacggatgaatccgcagagtcggagggggtgatcgactcccacaagaggcgtgagatactgagccgacggccctcatacaggaagatcttgaatgagttatcctcagacgtccctggagtccctaaaattgaggaagagcggagcgaggaggagggcactcccccttccatagcaaccatggcagtccccacttcgatttaccagacgtccacaggacaatacaccgcaaccggagatatgccgacatatcagattcgcgctcctaccgccgctctcccacaaggcgtagtcatggcagctagtcccggcagcctccactccccgcagcagctggccgaggaggctaccagaaagagagaactcagactcatgaaaaacagagaagccgccagagaatgccgccgaaagaagaaggagtacgtcaagtgccttgagaacagggtggccgttttggaaaatcagaataagacccttatagaggagttgaaagccttgaaggatctgtactgccataaggttgagtag

SEQ ID NO: 181466 - DNA, 288 bp, synthetic construct
  misc_feature 1..288: note = Description of Artificial Sequence: Synthetic coding sequence
  source 1..288: mol_type = other DNA
atgcccacctaccagatccgggcccccaccgccgccctgccccagggggtggtaatggccgcttctcctggcagcctgcactctcctcagcaattggccgaggaagctaccagaaagcgagagctgagactgatgaaaaaccgagaggcggcccgagagtgtaggaggaaaaagaaggagtacgtaaagtgtctggagaacagagtcgccgtgttagaaaatcagaataaaactttaatagaagagttaaaggcactgaaggacctgtattgtcacaaggtagagtag

SEQ ID NO: 181467 - DNA, 810 bp, synthetic construct
  misc_feature 1..810: note = Description of Artificial Sequence: Synthetic coding sequence
  source 1..810: mol_type = other DNA
atgaccatggagaccgtggagagccagcacgacggcagcatcaccgcttccttgacagaatctaagtccgcccacgtacagactcagacaggccagaattcaattcccgctctggctcaggtctccgttgccggatcaggaacaaggcgcgggtcacccgccgtgacactggttcagctcccgagtgggcagaccatacatgtccagggtgtgattcagactccccagccatgggtgattcaatcaagtgaaatccatacggtccaggttgccgccatagcagagacagacgaatccgccgagagcgagggggttattgactcacataaacgtagagagatactgagccgcagaccctcgtatcggaagatacttaacgagctcagctcggatgtgccgggtgtacccaagatagaggaggagagatcggaggaggaaggaacacctccctcaattgctaccatggccgtacccacatctatataccagacgagcacaggccaatacacggccactggcgacatgcctacttatcaaatcagagctcctactgcggctttacctcaaggcgtggtgatggcggcttcgcctggtagcctgcattcacctcagcagctggccgaggaagctacacgaaaaagggagctccgcctaatgaagaaccgggaggccgctagagaatgccgccggaaaaagaaagaatacgttaaatgtctggaaaatcgagtggcagttctggaaaaccagaacaaaacccttatcgaggaacttaaagcactcaaagatctctattgtcacaaagtggaatag

SEQ ID NO: 181468 - DNA, 585 bp, synthetic construct
  misc_feature 1..585: note = Description of Artificial Sequence: Synthetic coding sequence
  source 1..585: mol_type = other DNA
atggtggccgccatcgccgagaccgacgagagcgccgagagcgagggagttatcgactcccacaagcgacgggaaattctgtcccgtcgacccagttacaggaaaatactgaacgaactgtcatctgatgtgcctggcgttcccaagatcgaagaggagcgcagtgaagaggaaggcaccccgccatctattgctaccatggccgtgccgacctctatatatcagacaagcactggccagtacaacgaagagacggagttggcgccaagtcatatggctgctgccaccggggacatgccgacttatcagataagggccccaaccgccgcattaccccagggggtggtaatggctgcgtctccaggctcacttcacagtcctcaacagctggccgaagaagcaacgcggaagagagaactgcgactgatgaaaaaccgggaagccgcgaaagaatgtagaaggagaaaaaaggaatatgttaaatgcctggaatctcgagtagctgtgctggaggtccagaataagaagttaattgaagagcttgaaaccttgaaggatatttgttccccgaaaaccgattactag

SEQ ID NO: 181469 - DNA, 363 bp, synthetic construct
  misc_feature 1..363: note = Description of Artificial Sequence: Synthetic coding sequence
  source 1..363: mol_type = other DNA
atggccgtgaccggcgacgacaccgacgaggagaccgagctggccccctcgcatatggctgccgcaactggggatatgcctacctaccaaatcagagcacccacagctgctctgccccaaggggtggtgatggctgccagtcccgggagcctgcattccccacaacagctcgccgaagaagcaacacggaaacgggagctgaggctgatgaaaaatcgcgaagcggcccgagagtgcaggaggaagaagaaagagtatgtgaagtgtctggagaatagagtcgccgtcttggagaatcaaaataaaactctgatcgaagagctgaaggcgctcaaggacctgtactgccataaggtggagtag

SEQ ID NO: 181470 - DNA, 291 bp, synthetic construct
  misc_feature 1..291: note = Description of Artificial Sequence: Synthetic coding sequence
  source 1..291: mol_type = other DNA
atgcccacctaccagatccgggcccccaccgccgccctgccccagggagtcgtgatggcagcatctccagggagcctgcactcgccacagcagctggcagaagaggcaacgcggaagcgagaactgagactcatgaaaaatcgtgaggcagccaaggaatgcaggaggcggaagaaagagtatgtcaaatgcttagagtctagggtggccgttctcgaagtgcagaacaaaaagttgattgaggagttggaaacgctgaaggacatctgcagccccaagaccgactactag

SEQ ID NO: 181471 - DNA, 339 bp, synthetic construct
  misc_feature 1..339: note = Description of Artificial Sequence: Synthetic coding sequence
  source 1..339: mol_type = other DNA
atgaaccggacccaggagctgagcggccagctgagcgccgccaccggcgatatgcccacatatcaaattcgcgctccgacagccgccttaccacaaggcgtggtgatggccgcttctccggggtcactgcattccccccagcaactcgccgaggaggcaacccgcaagcgagagctgaggttaatgaaaaaccgcgaagctgctcgtgagtgtaggcgcaaaaagaaggagtatgtcaaatgtctggagaaccgagtggccgtgttggagaatcagaataagacactcatcgaagaattgaaagcccttaaggatctatactgccataaagtggagtag

SEQ ID NO: 181472 - DNA, 939 bp, synthetic construct
  misc_feature 1..939: note = Description of Artificial Sequence: Synthetic coding sequence
  source 1..939: mol_type = other DNA
atgagcaagtgcgcccggaagaagtacatcaagaccaacccccggcagatgacgatggaaacggtggagagccagcatgatggaagcattacagccagcctgaccgaatccaaatccgcgcatgtccagacacagactggtcagaactccattcctgctttggcccaggtggccgccattgctgaaacagatgagtcggcagaaagtgagggggtcatagacagtcataaacgccgggaaattttgagcagacgcccaagttacaggaaaatcttgaacgagctctcatccgatgttcccggcgtccccaaaattgaggaagagcgctccgaggaggaaggcactcctccgtccattgccactatggcagtgcccacgtctatctaccaaacgtcaacagggcaatatatagcgatcgcccaggggggcactattcagatctctaaccccgggagtgatggagtgcagggcctgcaggcccttacaatgaccaactccggtgcacctcctcccggcgcgacgatagtacagtacgcagcccagtctgctgacgggacccagcagttcttcgtgcccggcagccaggtggtggtgcaagacgaggaaaccgaactagcaccaagtcacatggccgccgccaccggcgatatgcctacctatcaaattcgtgcaccaaccgccgccttgccccaaggcgttgtcatggctgcgtcacctggctctcttcactctccccagcagttagctgaagaggcaacaagaaaacgagagctcaggctgatgaagaaccgcgaggccgccaaagaatgccgcagacgaaagaaagaatatgtgaaatgtttggaatcccgcgtggccgtgctcgaagttcaaaacaagaagcttattgaggagctcgagaccctcaaagacatatgtagccctaaaaccgactattag

SEQ ID NO: 181473 - DNA, 660 bp, synthetic construct
  misc_feature 1..660: note = Description of Artificial Sequence: Synthetic coding sequence
  source 1..660: mol_type = other DNA
atgtggtggcaccagcacaacctgtgcttccggcggcccatcgaggaggattactcatccggcgacgtggaggagaaagtggccgccatcgccgagaccgatgaatctgccgaaagcgaaggggtgatcgattcccacaagagaagggaaatattgagcaggagaccctcgtaccgcaagatactgaatgagttatcctcagacgtgccaggggtcccaaagatagaggaagagcgctccgaggaggaaggaacccccccttccatcgccacgatggcagtgcctaccagtatctaccagacgtccaccgggcagtataatgaagagacagagctggcaccctcccatatggccgctgccaccggtgatatgccaacgtaccagatccgagctcctactgccgctctaccccagggtgtggtcatggcagcctctcctgggtctctgcattcgcctcagcagttagctgaggaagctaccaggaagagggagttgagactcatgaagaaccgtgaggcagctaaggaatgtcgacggagaaagaaagaatacgtgaagtgcctggagtcaagagtcgctgtccttgaagtacaaaataaaaagcttattgaagagttggaaacactgaaagatatctgcagtcccaagactgattattag

SEQ ID NO: 181474 - DNA, 366 bp, synthetic construct
  misc_feature 1..366: note = Description of Artificial Sequence: Synthetic coding sequence
  source 1..366: mol_type = other DNA
atggccgtgaccggcgacgacaccgacgaggagaccgagctggccccaagccatatggcggccgctacaggtgacatgccgacgtatcagattcgcgctcctaccgcagcattaccccagggggtggtgatggccgctagccccggatcgctgcatagcccgcagcaactagccgaggaggctaccagaaaaagagagctccgcctgatgaagaaccgcgaagcggctaaagagtgtcggcgccggaagaaagaatacgtgaaatgcctggaaagccgcgtggccgtgctagaggtgcagaacaagaagttaatcgaggagttggagacactcaaagacatctgttccccaaagaccgactactag

SEQ ID NO: 181475 - DNA, 330 bp, synthetic construct
  misc_feature 1..330: note = Description of Artificial Sequence: Synthetic coding sequence
  source 1..330: mol_type = other DNA
atggccgtgaccggcgacgacaccgccgccaccggcgacatgcccacataccagattcgggctcccaccgccgcattaccacagggagtggtaatggccgcctccccgggctccctgcattctccccagcaactggccgaggaagctaccaggaagcgggagctcagacttatgaaaaatcgagaggcggccaaagaatgcaggcgaagaaagaaagaatacgttaagtgtcttgaatctcgagtggccgtgcttgaggtgcagaacaaaaagctcatcgaggagttagagaccctcaaggatatctgctcgccaaagactgattactag

SEQ ID NO: 181476 - DNA, 309 bp, synthetic construct
  misc_feature 1..309: note = Description of Artificial Sequence: Synthetic coding sequence
  source 1..309: mol_type = other DNA
atggccgccgccaccggcgacatgcccacctaccagatccgggcccccactgctgctctgccccagggagtcgtgatggcggcctcacctggaagcctccacagtccccaacaactagcagaggaggctactcggaaacgagagctccggcttatgaaaaatcgagaggccgctagagaatgtaggcgcaaaaaaaaggagtacgtgaaatgtctagagaatcgcgtggctgtgctcgaaaaccagaataagaccctgatcgaagagctgaaagccctcaaggacttatattgtcacaaggtggaatag

SEQ ID NO: 181477 - DNA, 414 bp, synthetic construct
  misc_feature 1..414: note = Description of Artificial Sequence: Synthetic coding sequence
  source 1..414: mol_type = other DNA
atgaccatggagaccgtggagagccagcacgacggcagcatcaccgcctctctcacagagagcaaatccgcacacgtgcagacgcagactgggcagaacagcattccagcactggctcaggttgccgcaatcgccgagactgacgaatctgctgagagcgagggcgtgatagactcgcacaagaggcgcgagatactatcgcgacgtccatcttaccgaaagattttaaacgagctgagcagcgatgtgcctggggtcccaaagatcgaagaagagagatccgaagaggaagggactccgccgtcaatcgccactatggcagtccccaccagcatctaccagacgtccacaggacagtacagcatgtacgcggccatcaggtatgacaccgtcctggccctgtcattactgtag

SEQ ID NO: 181478 - DNA, 618 bp, synthetic construct
  misc_feature 1..618: note = Description of Artificial Sequence: Synthetic coding sequence
  source 1..618: mol_type = other DNA
atgaccatggagaccgtggagagccagcacgacggcagcatcaccgcaagtttgacagaatcaaaatcagcacatgtccagactcaaacaggccaaaactccatccccgcactcgcacaggtcgtagccatagctcaaggcggtacaattcagatatccaatccaggatcagacggtgtacagggcctgcaggctctgactatgacgaactctggagccccaccccccggagcgacaatcgttcagtatgccgcccagtcagccgacggaactcagcaatttttcgttcctgggagtcaggtagtcgtgcaagccgccacaggcgacatgcccacgtatcagatcagggccccaacagccgcactaccacagggcgtggttatggctgcttccccagggtctctgcattccccacagcagctggctgaggaagccacaaggaaacgggaactgaggttgatgaagaatagagaggccgccaaagaatgccggcggagaaagaaagagtacgtaaagtgtctggaatcgcgcgtagctgtacttgaggtacagaataagaagctcatcgaggaattagagacgctgaaggacatctgttctccaaagactgattattag

SEQ ID NO: 181479 - DNA, 813 bp, synthetic construct
  misc_feature 1..813: note = Description of Artificial Sequence: Synthetic coding sequence
  source 1..813: mol_type = other DNA
atgaccatggagaccgtggagagccagcacgacggcagcatcaccgctagccttacagaatccaaatccgcccacgtccagacacagactgggcaaaacagcattcctgccctggcacaggttagtgtggctgggtctggaaccaggcgcgggagtccagctgtcaccctcgttcagctgccttctggtcaaaccatccatgtgcagggcgtaatccagaccccccagccttgggtcattcagagctcggagatccataccgttcaagtggccgccatagctgagaccgatgaatccgcagagtccgaaggcgtgattgatagtcataaaaggcgggagattctgtctcggcgcccgagctatcgcaagatcctcaacgagttatcatctgatgtcccgggcgtgcctaagatagaggaggaacgctctgaggaagagggcacacctccctccattgccactatggccgtccctacttctatttaccagacttctactgggcagtacacagcaacaggagatatgcccacataccagatccgtgccccaacggcagctctgccacagggggtggtgatggctgcatccccggggagtttgcactccccacagcagttggccgaagaagccacacggaaacgcgagctccggctgatgaagaatcgggaagcagccaaggaatgcagacggcggaaaaaggaatacgtcaaatgcctggagtctcgagtggctgtgctcgaagtgcagaataagaaactcatcgaggaactggagacactgaaggatatatgttcccctaagaccgactactag

SEQ ID NO: 181480 - DNA, 342 bp, synthetic construct
  misc_feature 1..342: note = Description of Artificial Sequence: Synthetic coding sequence
  source 1..342: mol_type = other DNA
atgaaccggacccaggagctgagcggccagctgagcgccgccaccggggacatgcctacatatcagatacgggccccaacagcggccctcccacagggagtggtaatggccgcatcaccaggatcactccattctcctcaacagctagcggaggaggctactaggaaacgcgaactgcggctaatgaagaatcgtgaagctgccaaggagtgtaggcggcgcaaaaaggagtatgtgaaatgcttagaatccagagtcgccgtcctggaggtacagaacaagaagctgatcgaggagctggagaccttaaaggatatttgcagccccaaaacagactattag

SEQ ID NO: 181481 - DNA, 465 bp, synthetic construct
  misc_feature 1..465: note = Description of Artificial Sequence: Synthetic coding sequence
  source 1..465: mol_type = other DNA
atgaccatggagaccgtggagagccagcacgacggcagcatcaccgcgagtctaacggagagtaaaagcgctcacgttcaaacacagaccggacaaaactccatacccgctttggcacaggtcgatgaggaaactgagctggcaccgagccatatggctgctgctaccggtgatatgccgacatatcagattcgggccccgacggccgccctcccacagggagttgttatggccgccagtcccggaagcctccattctccccaacaactggccgaggaagccacccgcaaaagagagctccgcctgatgaaaaatcgggaggccgccaaagagtgtagacggaggaaaaaggaatatgttaagtgtcttgagtccagggtggcggtgctcgaggttcagaacaaaaaattaatagaggaattagaaaccctgaaggatatttgcagcccaaagactgattattag

SEQ ID NO: 181482 - DNA, 339 bp, synthetic construct
  misc_feature 1..339: note = Description of Artificial Sequence: Synthetic coding sequence
  source 1..339: mol_type = other DNA
atgagcgccgaggtgcccgaggccgccagcgccgaggagcagaaggagatggaggacaaggtgacgtcaccagagaaagccgaagaagccaagctgaaggcccgctatccccatctggggcagaagccaggaggaagtgactttctgaggaaacggctccaaaaaggacaaaagtacttcgactctggagactataacatggccaaagctaagatgaagaataaacagctgcctacagcagctccagacaaaacagaggttaccggcgaccacatcccaacacctcaggatctgccccagagaaaaccgtccctagtcgctagcaaacttgctggctag

SEQ ID NO: 181483 - DNA, 1926 bp, synthetic construct
  misc_feature 1..1926: note = Description of Artificial Sequence: Synthetic coding sequence
  source 1..1926: mol_type = other DNA
atgaccgagaagcccgagttccagagccaggtgtacaactacgccaaggataacaatattaaacaggatagtttcaaagaggagaacccgatggaaactagtgtgtctgcaaatacagatcagctgggaaacgagtactttaggcaacccccgccaagatctcctccactgattcactgtagcggtgagatgcttaagtttaccgagaagagccttgctaaaagtattgcgaaggaaagtgccctgaatccatcacagccaccctcctttctttgtaaaacagccgtcccatccaaggaaatccagaattacggcgaaatccccgaaatgtccgtttcttacgaaaaggaggtgactgccgaaggggtggaaaggcccgaaatcgtctccacatggtcttccgccgggatcagctggcgtagcgaagcctgtcgggagaactgtgaaatgcccgattgggaacaatcagctgagtcactacagccagtccaagaggacatggcgttaaacgaggttctgcagaaattgaaacataccaacaggaagcaagaagttcggatccaagagctgcagtgcagcaatttgtacctggagaagagagttaaggagctgcagatgaaaattactaagcagcaggtcttcatagatgttataaacaagttaaaagaaaacgtggaagagttgatcgaagataagtacaagatcatactggagaaaaacgataccaaaaaaaccctgcagaacctggaagaggtgctcgcgaatactcagaagcatttgcaggaatcgagaaatgacaaggaaatgctccagttacagtttaagaagatcaaggccaattatgtgtgcctccaggaaaggtacatgaccgaaatgcaacaaaaaaataagagtgtttcccagtatctcgagatggataagacgctttcgaagaaagaggaggaggttgaaagactgcagcaactaaaaaaggagcttgaaaaggctaccgcttcagcacttgacctcctcaaacgcgaaaaggaggcccaggagcaggagtttctgtcactgcaggaagaattccagaagctcgagaaggaaaatttagaagagcgccagaaactgaaatctaggcttgagaaactcctgacccaggtacggaatctgcaattcatgtccgagaacgagaggacgaagaacattaagctgcagcagcaaatcaacgaagtgaaaaatgaaaacgctaagctgaagcaacaggtggcgagatccgaggagcagaattacgttccaaaattcgagacagcacagctgaaggaccaacttgaagaggtactcaaaagcgatatcacaaaagatactaaaactactcattccaacctgctgcctgactgcagcccctgtgaagagaggctcaaccctgcggacatcaaacgcgcctcccagctggcatccaaaatgcactcgctgctggcattgatggtgggtctgctgacatgccaggacattatcaatagcgacgcggagcatttcaaggaatctgaaaaggtgtcggacattatgctgcagaagctgaagtccttgcacctgaagaagaagacacttgataaggaagtcatcgactgtgactctgacgaagcgaagtcaatccgtgacgtgccaacactccttggggccaagttggacaaataccactcgctgaatgaggagctggattttctggtgacatcttacgaggaaatcatagaatgtgccgaccagaggctggccataagccatagccagatcgcccatttagaagagagaaacaagcacctggaagatttaatcaggaagccacgggaaaaagctcgcaaacctagatcaaaaagcctggaaaaccatccaaagtctatgaccatgatgccagctctgtttaaggaaaatagaaatgatctcgattag

SEQ ID NO: 181484 - DNA, 2475 bp, synthetic construct
  misc_feature 1..2475: note = Description of Artificial Sequence: Synthetic coding sequence
  source 1..2475: mol_type = other DNA
atgaacaaggactaccagaagttctggagcagccccagcgaccccgtacattttgaggttgacaccagccacgagaaggttgagtcgatgtcggaatctgatacaatgaacgtcagtaatctgtctcagggggtaatgctatcacacagtcctatttgcatggagaccaccggtactacttgtgatctgccccagaacgaaatcaagaactttgagcgggagaacgagtatgaaagcactctgtgcgaagacgcctatggcaccctggacaatctcctgaacgacaataacatcgagaactatagcaccaacgccttgattcaacccgttgacaccattagcataagcagcctgaggcaattcgagacggtgtgcaagttccattgggttgaagcattcgatgacgagatgactgagaagcctgagttccaatcacaagtgtataactacgcaaaggacaataatattaaacaggactcattcaaggaagaaaaccctatggagacatcagtctctgctaacacggaccagctgggcaatgaatattttagacagccccctcctaggagccccccgctcatccattgctccggagagatgctcaagtttactgagaagtctttggccaaatccatcgccaaggagagcgcactcaaccccagtcaaccacctagtttcctttgcaaaacagctgtgccaagcaaagaaatccagaattacggagagatccccgaaatgagtgtgagctacgagaaggaggtcacagccgagggcgtggaaagaccggagattgtgagcacctggagctccgcaggcatatcctggcgcagcgaagcctgtcgagaaaattgtgagatgccggattgggaacagagcgccgagagtctacagcctgttcaggaggacatggcactcaatgaggtactgcagaagctgaaacatacaaatagaaagcaagaagtgaggattcaggagctacagtgcagcaatttgtatttagagaagcgagtcaaggaactgcagatgaaaataacgaagcagcaggtctttatcgatgtaataaataaactcaaggagaacgtggaggaactgattgaagacaagtacaagataatccttgagaagaacgataccaaaaagactctgcaaaatctcgaggaagtcctcgccaacacacagaagcacctgcaggaatccaggaatgataaagagatgctgcagcttcaattcaaaaagatcaaggccaactatgtatgcctgcaggaaaggtatatgacagaaatgcaacaaaagaacaagagcgtcagccaatacctggagatggacaagaccctctccaagaaggaggaggaggtcgagcggctccagcagctaaagaaggagctggagaaggcaacagcctctgccctggatctgctgaaaagggagaaagaagctcaagaacaagagttcctcagcctgcaggaggaatttcagaagcttgaaaaggagaaccttgaggaaagacagaagctcaagagtaggcttgaaaaactcctgacccaggtcaggaatttgcagtttatgtcagagaatgagaggacgaagaatatcaaattacagcagcagataaatgaggttaagaacgagaacgccaagttgaagcagcaagtggctcggagcgaggagcaaaactatgttccaaaatttgagacagcccaactcaaggatcagttagaggaagtgctcaagtccgacatcaccaaggacaccaagactactcactcaaatctcttaccagactgcagtccatgtgaagagaggctaaaccccgctgacatcaaaagagccagtcaacttgcctccaaaatgcatagcttactggccctgatggtgggacttctcacatgccaggacatcatcaactccgatgccgagcactttaaagaaagtgaaaaagtatcggacataatgctacagaagttaaaaagcttgcacctgaagaaaaagaccctcgacaaagaattgctgaaacacaaggatagaattactacgtttcgcgagctcatagccaaagaaaaggctttccaggaccacgcaattaaggtcattgactgcgattcagacgaggcaaagtcaatccgagacgttcctacactactaggggcaaaacttgataagtatcactccctgaatgaggagttagactttctggtgacgtcctacgaggagattatcgagtgtgccgaccagaggttggctattagtcattcacagatcgcccacctcgaggaacggaacaaacatctggaagatctcataagaaaaccaagggaaaaggctaggaagcctcggtccaaaagtttagagaaccatcctaaatctatgaccatgctggcttataatctgtatatctttatcggatatcgactgggtgctgtcgctgacgcttgtaacccatcaactctcggcgggaggggcgggtggattacctag

SEQ ID NO: 181485 - DNA, 2334 bp, synthetic construct
  misc_feature 1..2334: note = Description of Artificial Sequence: Synthetic coding sequence
  source 1..2334: mol_type = other DNA
atgaacaaggactaccagaagttctggagcagccccagcgaccccgtccacttcgaggtggatacatctcacgagaaggtcgaaagtatgagtgagtccgatacaatgaacgtgagcaacctgagccaaggcgttatgttgagtcactcccctatctgcatggaaaccactgggacaacctgcgatctgcctcaaaacgagatcaagaattttgaaagggaaaacgagtacgaaagcacgctttgtgaagacgcctatggcacactcgacaacctgctgaacgataacaacatcgagaactacagcaccaatgccctgatccagccggtggataccataagcatcagctccctgagacagtttgagacggtgtgtaaatttcattgggtagaggccttcgatgacgagatgacagaaaaacccgaatttcagagtcaggtctataattacgctaaagacaataacatcaaacaggactcctttaaagaagaaaacccaatggaaacctcggtctccgctaatactgatcagcttgggaatgagtacttcaggcaacctccaccacggagcccccctcttatccactgcagtggtgagatgttgaagttcacggagaagagtttggcaaaaagtatcgctaaggagtccgccctgaatccttcccagcccccatcctttctgtgcaagacagcagtgccttctaaagagatccagaactacggcgagatcccagagatgtccgttagttatgagaaagaagtgacagccgagggagtggagaggccggagattgtctccacgtggagctctgctggtatctcctggaggtctgaagcgtgtcgggagaattgcgagatgcctgattgggaacagtctgccgaatccctgcagccagtgcaggaagacatggcgttgaacgaggtattgcaaaagctgaagcatacgaataggaaacaggaggtgcgcatccaggaattgcagtgcagtaatctctacctggagaaacgcgtcaaggaactacagatgaagattaccaagcagcaggtattcattgatgtcattaataaactgaaagagaacgttgaagaattgatagaggataaatataagattatattggagaaaaatgatactaagaagacattgcagaacctcgaagaagtgctggccaacactcagaaacatttacaggagtctaggaacgataaagagatgctgcagctccagtttaaaaaaataaaggcaaactacgtgtgcttgcaagagcgctacatgaccgagatgcagcagaaaaataaaagcgtcagccaatacttggagatggacaagaccctgtcgaaaaaagaggaagaagtcgagaggctgcagcaactgaagaaagaactagaaaaggctacagctagcgctctcgatctgctcaaaagggagaaggaagcccaggaacaagagttcttgtcattacaggaggaatttcagaaactggagaaagaaaacctggaggagcgccagaagctgaaatcacggctggaaaagctgctcacccaggtgcgtaacttgcagtttatgtccgagaacgaacgcacaaaaaacatcaaactacagcagcagatcaacgaggtcaaaaacgagaacgccaaactcaaacagcaggttgccagatccgaggagcaaaattacgtccccaagtttgagaccgctcaattaaaggatcagctcgaggaagtcctgaaaagcgacattaccaaggacaccaaaacaactcacagcaatctactaccagactgcagcccatgcgaagaaagactaaatccagcagacattaagcgtgcgtcccaactggcctccaagatgcattcactcctggccctcatggtgggcctgctgacttgtcaagatattattaatagcgacgctgagcatttcaaagagtccgagaaggtgtcagacattatgctgcagaaactgaagtccctgcacctcaagaaaaagacgctggataaggaagtcatagactgcgactccgatgaggccaagagcattcgtgacgtgccgaccctgctgggggccaagctggacaaataccacagcctgaacgaagaactggattttcttgtgaccagttacgaggagattattgaatgcgccgaccagaggctggccattagccacagccagatcgcccatctcgaggaacgtaacaagcacctggaagacctgattaggaagccacgagaaaaggccaggaagcctcggagcaaaagcctggaaaatcatccgaaatcaatgacgatgatgccagctttatttaaagaaaatagaaacgatcttgactag

SEQ ID NO: 181486 - DNA, 2103 bp, synthetic construct
  misc_feature 1..2103: note = Description of Artificial Sequence: Synthetic coding sequence
  source 1..2103: mol_type = other DNA
atgaacaaggactaccagaagttctggagcagccccagcgaccccgtccacttcgaggtggacactagccacgagaaggtcgagagcatgtcagagtccgatacaatgaacgttagtaacctgtcacagggagtgatgctttctcactctcccatctgtatggagactaccggcactacatgcgatttgccccaaaacgagatcaagaacttcgaaagagagaatgaatacgagtccactctttgtgaagacgcttacgggaccttagacaatttactgaacgacaataacattgaaaactattccactaacgctttgattcaacccgtagataccataagcattagtagcctgagacaatttgagaccgtgtgcaagtttcactgggttgaagctttcgacgacgagatgaccgaaaagccagagtttcaatcacaggtatataactatgcaaaggataacaatatcaagcaggattccttcaaagaggagaacccgatggaaacaagtgtcagtgctaatactgatcagctgggaaacgaatactttagacagccacccccgcgcagcccgcctctcatccactgttccggtgagatgcttaaatttaccgagaaatccctggccaagtcaatcgctaaggagtctgcccttaatcctagtcaacccccatctttcctatgtaaaaccgccgtgccttctaaggagatacagaattatggcgagataccggagatgtcagtgtcttacgagaaagaagtgaccgccgaaggcgtcgagcgtccagagatcgtgtctacctggtcgtcggccggtatcagttggaggtctgaggcctgcagggagaactgcgagatgccagattgggagcagagtgccgagtcattacagcccgtgcaagaggacatggctctgaacgaagtactgcagaagctgaaacacactaatcgaaaacaggaagtgaggatccaggaactccagtgttccaacctgtacctcgagaaacgagtgaaggagctgcagatgaaaatcaccaaacagcaggtgttcattgatgtaatcaacaagcttaaggagaacgttgaagaactgatcgaggacaagtacaaaatcattctggagaaaaacgacactaaaaagacattgcagaatctcgaggaggtgcttgctaacactcagaaacacctgcaggaaagccgcaacgataaagagatgctacaattgcaatttaagaaaattaaggccaactacgtctgtctccaggagaggtacatgactgaaatgcagcagaagaataaatccgtgtcccaatatctggagatggacaaaactttgagcaagaaggaggaggaggtggagcggctacagcagttaaagaaagagctcgaaaaggccacagcttccgcgctggatttactgaagcgagagaaagaagctcaggaacaggagtttctgtcgttgcaggaagaattccagaagttagagaaggagaacctggaagagcgacagaaactgaagtctagactggagaagctgctcacacaggtccgaaacctacaatttatgagcgagaacgaacgcactaaaaatattaagttgcagcagcagatcaatgaggtcaagaatgagaatgccaaactcaagcagcaggtggcccgcagcgaggagcagaactacgtgcccaaattcgagaccgcccagctgaaggaccagcttgaggaggtgctgaaatctgacataactaaggacacgaagactacccacagcaacctgctccccgattgttctccatgcgaggagcggctaaaccccgcagatatcaaacgagcgtcccaactcgcaagcaaaatgcacagtctgctggctctcatggttggactgctgacttgccaggacattatcaactcggatgccgagcatttcaaagagtctgaaaaggtttccgatattatgctgcagaagctcaagtcccttcatctgaagaagaagacccttgacaaagaactcttaaagcataaggaccgcataacaacattcagagagctgatcgccaaagaaaaggctttccaggaccatgctatcaaggttttccagggcgtgtag

SEQ ID NO: 181487 - DNA, 2520 bp, synthetic construct
  misc_feature 1..2520: note = Description of Artificial Sequence: Synthetic coding sequence
  source 1..2520: mol_type = other DNA
atgaacaaggactaccagaagttctggagcagccccagcgaccccgtgcatttcgaggtggatactagccacgaaaaggtggagagtatgtcagagtccgatacaatgaatgtgagtaacctgtcccaaggtgtgatgttaagtcactcgccaatctgcatggagacaactggaacaacctgtgatcttccccagaatgagataaaaaatttcgaacgcgagaatgagtatgagagcactctttgcgaggatgcatacggaacactggataacctgctcaacgataataatattgagaattattccacaaatgcgttgatccagcccgtggataccattagcatctcctccttacgccaatttgaaactgtgtgcaagtttcactgggtcgaggccttcgacgacgagatgacggagaagcccgaattccagtcccaggtatataactacgccaaggacaacaacataaaacaggattcatttaaggaggagaacccaatggagaccagcgtctcggcaaataccgatcagctaggtaacgagtatttccgacagccccccccacgaagcccccccctgattcactgttctggggagatgcttaagtttacagaaaagtccctggctaagtcaatagccaaagagagcgcgctgaacccaagccaacctccctctttcctatgcaaaaccgccgtgccttctaaggagatacaaaattatggcgaaatcccagagatgagtgtcagctatgagaaagaggtaaccgctgagggagttgagcgccctgagatcgtgtcaacctggtctagcgccgggatcagctggcgaagcgaggcatgccgagaaaactgtgagatgcctgactgggagcagagcgctgaatcattacaacctgtgcaggaggatatggccctgaacgaggttctccagaagctgaagcataccaataggaaacaagaagtgaggattcaggagctgcaatgtagtaatctgtatcttgagaagagagtcaaagagctgcagatgaaaataaccaaacagcaggtttttatcgacgtcatcaacaagctgaaagaaaatgtggaggagctaatagaggacaaatataaaatcatactggagaaaaatgacaccaagaaaaccctccagaatttggaagaagtcctggcaaacacacaaaagcacctgcaggaatctcggaatgataaagagatgctgcaactacagtttaaaaagatcaaagcgaattacgtgtgcctgcaggaacggtatatgacagagatgcagcagaagaacaaaagcgtgagccagtatctcgaaatggacaagaccctcagcaaaaaagaggaagaggtcgagcgacttcaacagcttaaaaaagagctggagaaagccactgcgtctgcattggacctcctgaagcgtgagaaggaggcacaggagcaagaattcctttccctacaagaggaatttcagaagctcgagaaagagaatttggaggagaggcagaaattgaagagcagactcgagaagctcctgacgcaggtgcgcaacctacaattcatgtcagaaaacgagcgcacaaagaatattaagttgcagcagcagataaatgaggtcaagaacgagaatgcaaagctgaagcagcaggttgcaaggagcgaggagcagaactatgttccaaaatttgagaccgcccagctgaaggaccagttggaggaagtgttaaaatcagacataacaaaggataccaaaaccacacacagtaatctcctgcccgattgttcaccgtgcgaagagaggctgaatcccgccgacatcaagcgcgcgtcgcaactggcatccaagatgcatagccttctcgccctgatggtgggactgctgacgtgccaagatattattaacagcgatgcagaacatttcaaggagagcgagaaggtgagcgatataatgcttcaaaaactcaaatccctgcatctcaagaaaaaaactctggataaggaactattaaaacacaaggatcgcataacgacatttcgggagttaatcgctaaggaaaaagcctttcaggatcatgctatcaaggtgatcgattgtgacagtgacgaggcgaagagtattcgcgatgtacccactctattgggcgccaaactcgacaaataccacagtctgaacgaggagttagacttcttgatcactaagttaggccacctcctggagtcaaaagagaaccattgcaacaggctcattgaagaaaacgacaaataccaaagacatctgggcaacctaattaaaaaggtcacaagctatgaagaaatcatcgaatgcgccgatcagcgtctggctatttcccattctcagatcgcccatctggaggagaggaacaagcacttagaggatctgatccgcaagccacgggagaaggcccgtaaacctcgatccaaatctctggaaaaccacccgaaatcgatgactatgatgcccgcccttttcaaggaaaaccgaaacgacttagattag

SEQ ID NO: 181488 - DNA, 2112 bp, synthetic construct
  misc_feature 1..2112: note = Description of Artificial Sequence: Synthetic coding sequence
  source 1..2112: mol_type = other DNA
atggccgaccggcggcggcagcgggccagccaggacaccgaggacgaggagagtggagccagtggaagtgactcgggcggctcccccctccggggaggtggcagttgcagtggatcagcgggtggtgggggcagcggaagcctcccaagccagcgtggaggccggactggagccttgcatctccggcgcgtcgaatccggcggagcaaaaagtgctgaggagtctgaatgcgaatcagaggacgggatcgagggtgatgccgtgttatccgactacgaaagcgccgaagacagcgagggtgaggagggggaatatagtgaagaagagaacagcaaggtggaattaaaaagcgaagcaaacgacgccgtaaatagcagcaccaaggaggagaaaggagaggagaagcctgatacaaaatccaccgtgaccggagaacgacagtcaggcgacggccaggaatcaacagagcccgttgaaaataaggtcggcaaaaaaggccctaagcacctggacgatgacgaggacagaaaaaacccagcatacatcccgcggaaagggctgttcttcgagcacgatctgagaggtcaaacccaggaggaagaagtccggccgaaaggccgacagagaaagctctggaaagatgagggacgatgggagcacgataaatttcgtgaagacgagcaagcccccaaaagtcgacaggagctgatcgccctctacggctacgatattcgctcagctcacaatccagacgacatcaagccacgtagaatccgtaagccgcgctacggctcccccccacaacgggaccccaattggaatggagaaaggttgaataagtctcaccgccatcaggggctgggtgggacactgccaccccgtaccttcattaaccgtaatgctgccgggaccggccgcatgtcagctccaaggaactattcccggtcaggagggttcaaggaaggcagagcggggtttcgcccagttgaggcagggggccagcatgggggacgcagcggcgaaaccgttaaacacgagatcagctacagaagccgtaggttagagcagacgtccgtcagagatccatcgcccgaggcagacgctcccgtgttaggttcccccgaaaaagaggaagcggcctccgaaccacctgccgccgctccagatgccgcccctccacctcctgaccggcctatagaaaagaaaagttactctcgcgcccggcgcactaggaccaaggtcggtgacgccgttaagctggcagaggaagtgcccccccctcctgagggcttgatccctgcgcctccggtcccagagacaactccaaccccgcctaccaaaacaggtacttgggaggctcctgtcgattctagtacatccggactggagcaagatgtggcccagttgaatatcgctgagcagaactggtctcccggtcagcccagctttttacagcccagagagcttcgaggcatgccaaatcacattcacatgggggcgggcccacctccacagttcaaccgaatggaagagatgggggtgcagggtggcagagcgaagaggtacagctcgcagaggcaaaggccggtgcctgaaccccccgcgccccctgtccacatcagcattatggaaggacactattacgacccgctgcagtttcaggggccaatctacacgcatggtgactcccctgcccctctgcctccacaggggatgttggtgcagccagggatgaatctgccacacccggggctgcaccctcaccaaacaccagcccccctgcccaatccaggcttgtaccccccccccgtgagcatgagccctgggcagcccccaccccagcaactgctcgctcccacatatttctcagctcctggtgtcatgaacttcggaaatcccagttatccatatgctccaggagctctccccccgcccccccctccccatctctatcctaatacccaggctccttcccaggtgtacggcggggtaacttactataatcccgctcagcaacaggtacaaccgaagcccagcccacccaggcgtacaccccagcccgtcacaattaaacccccacctccagaggtcgtgtcgcgggggagttcctag

SEQ ID NO: 181489 - DNA, 2112 bp, synthetic construct
  misc_feature 1..2112: note = Description of Artificial Sequence: Synthetic coding sequence
  source 1..2112: mol_type = other DNA
atggccgaccggcggcggcagcgggccagccaggacaccgaggacgaagagagcggcgcctctggatcggatagcggagggtcccccctgcggggaggcggtagctgctctgggtcagccggcggaggtggttctgggagcttaccgtctcaaaggggcggccgaacaggcgccctccacttgaggcgtgttgaatccggaggcgctaagtccgccgaggaatcagaatgtgagtcagaagacggcatagagggtgacgccgtcctgagtgactacgagagcgcggaggatagcgaaggggaggagggcgaatactctgaggaagagaatagtaaggtggagctgaaatcggaagcgaacgacgctgtcaacagctccacaaaagaggagaagggagaggagaagcccgataccaagagcacagtgacaggagaacgacagagcggggacggacaagaatccacggagccggtggaaaataaggtcggcaagaagggacctaagcacctcgacgacgatgaggataggaaaaaccctgcctatatcccaagaaaagggttgtttttcgaacatgacctgcgaggacagacccaggaagaggaggtgcgtcccaagggaagacaaagaaagctctggaaggacgagggaaggtgggagcacgataagttccgggaagacgagcaggcgccaaagtctcgccaggagttaatcgcactgtacggatacgatatccggagcgcacacaacccggacgacatcaagcctagaagaatccgtaaaccacgctacgggtcccctccccagagggacccaaattggaacggcgagaggctgaacaagagccacaggcaccagggcctgggaggtactctaccccctcgcacgtttattaaccgaaacgcggcaggcaccggcagaatgtctgccccacgtaactactcccgaagtggtggctttaaagaggggcgcgctggctttcgccccgtagaagcaggcgggcaacacggcggaaggagtggcgaaacagttaagcacgagatttcctacaggtcacgccgactggagcagacctccgttcgggatccctcacctgaggccgatgcgcccgtgctgggcagccctgagaaagaggaggcagcctcagaaccccccgcagctgctccagacgccgccccgccccctccggacagaccaattgagaagaagagctactcaagagcgcgcagaacacggaccaaggtgggagacgctgttaaacttgcagaagaagtcccccctccacctgaaggcttaatcccggctcctcctgtacccgaaaccactcctacaccacctactaagaccgggacatgggaagcacctgtggattcttcaaccagtggtctcgagcaggatgtggcacagctaaatatcgccgaacagaactggtccccagggcaaccctcctttctgcagccgagagaactgcggggtatgccaaaccacatccatatgggggccgggccaccccctcaatttaaccgcatggaggagatgggtgttcagggcggacgtgccaagagatactcatcccagcgacagaggcctgtacctgaaccacctgcaccccccgtccatatctcaattatggaaggacattactacgatcctctccaattccagggcccaatttacacgcacggcgactcgcctgccccactaccgccacagggaatgctggtgcagcccgggatgaatctccctcaccccggtctccatccccaccagacgccagctccacttcctaacccaggcctgtaccctccaccagtaagcatgtcacccggccaaccaccacctcagcaactgctcgccccaacctacttcagtgcgccaggagtgatgaatttcgggaacccctcctatccgtacgcccccggggccttgccgcctccgccacctcctcacctgtacccaaacacacaggcacctagccaggtgtacggaggtgtgacgtactataaccccgcccagcagcaggtgcagcctaagccttcccccccccgacggacgccccagcctgtgacaattaagcccccaccacctgaagtggtgtcacggggctcctcctag

SEQ ID NO: 181490 - DNA, 1926 bp, synthetic construct
  misc_feature 1..1926: note = Description of Artificial Sequence: Synthetic coding sequence
  source 1..1926: mol_type = other DNA
atggccgaccggcggcggcagcgggccagccaggacaccgaggacgaagagagtggcgcgtctggcagcgatagtggaggatcccctctccgaggtggcgggtcttgttccggttcagctggaggcggcgggtctggaagcctgcctagccaacgaggagggaggaccggggccttacacctcagacgcgtggagtctgggggagccaagtcagcggaagaatctgagtgcgagtctgaagatgggatagagggcgacgcagtgttgagcgactatgagtcagccgaggacagcgagggcgaggaaggagagtatagtgaagaagaaaactccaaagttgagttgaaatctgaagctaacgacgctgtgaactccagcacaaaggaggagaaaggtgaagagaagccagacacgaagagcaccgtcacaggagaacggcagagcggggacgggcaggaatcaacagagcccgttgagaataaagtgggcaagaaagggcccaaacatttggacgatgacgaagataggaagaatcctgcatacattcctcgcaaggggttgttctttgagcacgatcttcgtggccagacgcaggaggaagaggtccgccccaagggacgtcaaaggaaactttggaaggatgaaggaagatgggaacatgataaattcagggaagacgaacaggcgccgaagagtcgccaggagctgatcgccttgtacggttacgacattaggtctgcacacaatcctgacgacatcaagcctagaaggatccgtaaaccaaggtacggatccccgccgcagagggacccaaattggaacggagagcggctgaataaaagccaccgccaccaagggctgggtggcaccttacctccccggacttttataaacagaaacgccgccgggactggtcgcatgtctgcccctagaaattacagtcgtagcggtggattcaaagagggccgagcagggttcagaccagtggaggcaggcggccagcacgggggacgctccggcgaaacagtcaagcacgaaatttcgtaccgctccaggagactggaacagaccagcgtcagagacccatccccagaggctgacgcacccgtacttggctcccctgaaaaggaagaggctgcctctgagcctccggctgccgccccggatgctgctccaccccctcctgatcgccccatagagaaaaagtcctacagtagggctcgccgtactcggaccaaggttggagacgcggtaaagttggctgaggaagtgcctcctcctcctgagggcctgattccagccccacctgttcccgaaaccactcctactccccctacaaagacaggcacgtgggaggctcctgtggattccagcacgagtggcctagaacaagatgtggcccaacttaacattgcagaacagaattggtctcccggccagcccagtttcctgcagccacgcgaattacggggcatgcccaaccacattcacatgggcgcagggccccctccccaattcaaccgcatggaagaaatgggggtccagggaggaagggcgaagaggtacagcagccagcggcaaagaccagtcccagagccccctgccccaccggtgcatatttctattatggagggccactactatgacccacttcaattccagggacccatttatactcacggagactctccagccccgctgccacctcaaggtatgttggtgcaacccggcatgaatctgccccaccccggcctacatccacaccagacacctgcgtgccccgacagccagactctccgtcattgcgagagttgcctttgctggtctacagtctttagttgcaaggacttcagcatgtgtgggggagtgttttgctactgcttcaaggggtgtcccttcgtcatatctatcgtcacctggcgatag

SEQ ID NO: 181491 - DNA, 543 bp, synthetic construct
  misc_feature 1..543: note = Description of Artificial Sequence: Synthetic coding sequence
  source 1..543: mol_type = other DNA
atgcaggccgagggccggggcaccggcggcagcaccggcgacgccgatggaccaggcgggcccgggatcccggacggccccggagggaacgccggcggccctggggaagccggcgccaccggggggagaggtcccaggggtgctggcgccgcaagagcctccggcccagggggaggagctccacgagggcctcatggcggagccgcatccggtttgaatggttgctgcagatgcggcgctcgaggacccgagtccagattgctggaattctatctagcgatgcccttcgccacacccatggaggctgaactcgcacgaaggtcgttggcccaggacgctcctcccctcccagtaccaggagttttgctcaaggaatttactgtgagcggaaatatccttaccattcgtctcacagccgcagatcacagacagttacagttgtcgattagcagctgcctccagcagctttctcttctcatgtggatcacacagtgcttccttcccgtttttttggcgcagccaccctctggccagcgaaggtag

SEQ ID NO: 181492 - DNA, 570 bp, synthetic construct
  misc_feature 1..570: note = Description of Artificial Sequence: Synthetic coding sequence
  source 1..570: mol_type = other DNA
atgaccgacaagaccgagaaggtggccgtggaccccgagaccgtgttcaagcgcccgcgcgagtgcgactcccccagctatcagaaacgccagagaatggctctgctggcccgaaagcaaggggccggagactctctgatcgcaggctcagccatgtcaaaagctaaaaaactcatgactggacacgcaattcccccttcccaactggacagtcagatagatgacttcacaggattctcaaaagataggatgatgcaaaaacccggatctaatgcgcctgtaggcggaaacgtgacctcaagctttagcggagatgatctcgagtgcagagaaactgcaagttcccctaaatcccagcgtgaaataaatgctgacatcaaacggaagctggtgaaagagcttagatgcgtgggacagaagtacgagaagattttcgagatgctagagggagtccagggccctaccgcggtgaggaaaaggttttttgagtccattataaaagaagctgcccgctgcatgcgaagggactttgtgaagcatctgaaaaagaaattgaaaagaatgatctag

SEQ ID NO: 181493 - DNA, 570 bp, synthetic construct
  misc_feature 1..570: note = Description of Artificial Sequence: Synthetic coding sequence
  source 1..570: mol_type = other DNA
atgaccgacaagaccgagaaggtggccgtggaccccgagaccgtgttcaaaaggccccgtgagtgcgactctccttcatatcagaaacgccagagaatggccctgctggccagaaagcagggcgcgggggatagccttattgcaggctctgccatgtctaaagagaaaaagctcatgaccggtcacgccatcccgccctcccaattagacagccaaatcgacgacttcaccggcttctctaaagaccggatgatgcagaagcccgggtcaaacgccccagtgggtggcaatgtgacaagctccttttcaggcgatgacttggaatgtagggaaaccgctagcagccccaagtctcaacaagagataaatgcagatatcaagagaaagctggtgaaggaactccgctgtgttggccaaaagtatgaaaagattttcgaaatgcttgagggggtccagggccccacagcagtccggaagcgcttttttgagtctatcatcaaggaagctgcacgttgtatgcggagagacttcgtgaaacacttgaagaaaaagctaaagaggatgatctag

SEQ ID NO: 181494 - DNA, 570 bp, synthetic construct
  misc_feature 1..570: note = Description of Artificial Sequence: Synthetic coding sequence
  source 1..570: mol_type = other DNA
atgaccgacaagaccgagaaggtggccgtggaccccgagaccgtgttcaagagacctcgggaatgcgacagtccgtcgtaccaaaaacggcagcgtatggctttgctggcacggaagcaaggggctggcgatagtctgattgcagggtccgccatgtccaaggaaaagaagttaatgacgggacacgccatcccaccctcacagctggactcccagattgacgacttcacaggttttagcaaggataggatgatgcaaaagcctggcagcaacgcaccggtggggggaaatgttacctcttctttctccggcgacgatttagaatgcagggaaaccgctagcagccccaaatctcaacaggagattaacgccgatataaagagaaagctcgtgaaggagctaaggtgcgtgggacagaaatacgaaaagatttttgaaatgcttgaaggagtgcagggccctacagccgtgcgcaaacggtttttcgagtcgataataaaggaagccgctcgatgtatgagaagagatttcgttaaacacctgaagaagaagctgaagagaatgatctag

SEQ ID NO: 181495 - DNA, 570 bp, synthetic construct
  misc_feature 1..570: note = Description of Artificial Sequence: Synthetic coding sequence
  source 1..570: mol_type = other DNA
atgaccgacaagaccgagaaggtggccgtggaccccgagaccgtgttcaagcgaccccgcgagtgtgactccccatcttatcagaagcgtcaaagaatggcccttctcgcacggaagcagggagcaggcgactcgctcatcgcaggctcagcaatgagcaaagagaagaaactgatgacgggacatgcgatccctccctcgcagctggacagccagattgatgacttcacaggttttagcaaagatcgcatgatgcagaaacccggctcaaatgcgcccgttggaggcaacgtgacgtcatccttttctggggacgatctggagtgcagagagacagcttcgagcccaaaatctcagagagagatcaatgccgacataaaacgaaagctggtgaaggagctccggtgtgtcggacagaaatacgaaaaaatctttgagatgctggagggcgtgcagggacctactgccgtccggaaaaggttttttgagtccatcattaaagaggctgcccgatgcatgagacgggactttgttaagcatcttaaaaaaaagctgaagaggatgatttag

SEQ ID NO: 181496 - DNA, 570 bp, synthetic construct
  misc_feature 1..570: note = Description of Artificial Sequence: Synthetic coding sequence
  source 1..570: mol_type = other DNA
atgaccgacaagaccgagaaggtggccgtggaccccgagaccgtgtttaaaagaccccgggagtgcgattcccctagctaccagaaaagacagcgtatggctctcctagcaagaaagcagggcgccggcgatagtctgattgccggcagcgccatgagtaaagagaaaaagcttatgaccggtcacgccattcctcccagccagctcgattctcagatcgatgactttactggattttctaaggatagaatgatgcaaaagcccggaagtaacgcccctgtgggcggcaacgttacttcttcgtttagtggcgacgaccttgagtgtcgggaaactgcctcgtctcctaaaagtcaacgggagataaacgctgacatcaaaaggaagctggttaaggagttgagatgtgttgggcaaaagtatgaaaagatcttcgaaatgctggaaggcgtgcaggggccaaccgctgtacggaagcggttcttcgagagtattatcaaagaggctgcgcgctgtatgcgtcgagactttgttaaacacctcaaaaagaaactgaagaggatgatctag

SEQ ID NO: 181497 - DNA, 570 bp, synthetic construct
  misc_feature 1..570: note = Description of Artificial Sequence: Synthetic coding sequence
  source 1..570: mol_type = other DNA
atgaccgacaagaccgagaaggtggccgtggaccccgagaccgtgttcaaaagaccaagagagtgcgactccccttcctatcaaaagcgccagcgaatggcattgctggcaagaaaacagggcgccggcgattccctcatagctggctcagccatgtcgaaggagaaaaagctgatgaccggacacgcaattccgccctcgcaactggatagccaaattgatgatttcactggcttctccaaggaccggatgatgcagaagccagggtctaatgcccctgtaggtggaaacgtgacaagcagcttcagtggagatgaccttgaatgccgagagactgcatcgagccccaagtctcagcaggaaataaatgctgacattaaacgaaagttggtcaaagagttgcggtgcgttgggcaaaaatacgagaagatcttcgagatgctggagggggtgcagggcccaaccgcggtccgcaaacggttttttgagagcataattaaggaggcggcaaggtgcatgcgccgagactttgtgaagcatctaaagaagaagttaaagcggatgatctag

SEQ ID NO: 181498 - DNA, 570 bp, synthetic construct
  misc_feature 1..570: note = Description of Artificial Sequence: Synthetic coding sequence
  source 1..570: mol_type = other DNA
atgaccgacaagaccgagaaggtggccgtggaccccgagaccgtgtttaagaggccgcgtgagtgtgacagtcctagctaccagaagagacagcgcatggccttgctggccagaaagcaaggggcgggcgactccctgatcgcgggcagcgctatgtccaaggcaaagaagctcatgactgggcacgcgattcccccaagtcaattggattcgcagattgatgacttcactggatttagcaaggataggatgatgcaaaagcccgggtcaaacgcccccgttggcggaaatgtcacttcctccttctcaggcgacgacctggaatgtcgagagaccgcgtccagcccaaagtcccagcaggaaattaacgctgacatcaagaggaagctggtgaaagaactccgctgtgtgggccagaagtatgagaagatattcgaaatgctggaaggcgtgcagggacccaccgctgtccgcaagaggtttttcgaatcaataataaaggaagcagcaagatgcatgcgccgggactttgttaagcacttgaaaaagaaactcaaacgcatgatctag

SEQ ID NO: 181499 - DNA, 570 bp, synthetic construct
  misc_feature 1..570: note = Description of Artificial Sequence: Synthetic coding sequence
  source 1..570: mol_type = other DNA
atgaccgacaagaccgagaaggtggccgtggaccccgagaccgtgtttaagcggcccagagagtgtgacagtcccagttaccaaaagcgccaacgcatggcactcttggcgaggaaacagggagccggtgattccttgatcgctgggtcggctatgtccaaggcaaagaagttgatgactggtcacgccatcccaccaagtcaactggactctcagatcgacgactttaccggtttttctaaggatcggatgatgcagaagcccggctccaatgctcctgttgggggcaatgtgacttcgtccttctcgggggatgacctggaatgccgggagacggctagctcacccaaatcacagcaagagataaatgcggatataaagaggaagctcgtgaaagaacttaggtgcgtcggccagaagtacgaaaagatcttcgagatgcttgaaggtgtacaagggccaacagcggtgagaaagcgcttctttgaatccatcatcaaagaggccgcaaggtgcatgcgtagagattttgtgaagcacctgaaaaagaaattgaagcgcatgatttag

SEQ ID NO: 181500 - DNA, 570 bp, synthetic construct
  misc_feature 1..570: note = Description of Artificial Sequence: Synthetic coding sequence
  source 1..570: mol_type = other DNA
atgaccgacaagaccgagaaggtggccgtggaccccgagaccgtgttcaaaagaccccgggaatgtgactctccctcttatcaaaagcgtcagagaatggctttactcgcgaggaagcagggtgccggcgattccctgatagcaggatcggctatgtcaaaagaaaaaaaactgatgaccggccacgccatccctcccagccaactcgatagccaaatcgatgacttcactggtttctcaaaggacggcatgatgcagaagccagggagtaatgccccggtgggcggcaatgtgaccagcaactttagcggggatgacctcgagtgccgggggatcgcctccagccctaaaagtcagcaggaaatcaacgcggacattaagtgtcaggtagttaaagagatcagatgcttggggagaaagtacgagaaaatctttgaaatgctcgaaggcgtccagggccccacagccgtacggaaacgattcttcgaaagcatcatcaaggaagccgctcggtgcatgaggcgagactttgttaaacatctgaagaaaaagctgaagcggatgatctag

SEQ ID NO: 181501 - DNA, 570 bp, synthetic construct
  misc_feature 1..570: note = Description of Artificial Sequence: Synthetic coding sequence
  source 1..570: mol_type = other DNA
atgaccgacaagaccgagaaggtggccgtggaccccgagaccgtgtttaaacggccacgggagtgcgactctcctagctatcagaagcgtcagaggatggcactgctggctcgtaaacagggggcgggcgactccctgatcgctgggtcagcgatgtccaaagagaagaagctgatgaccggccatgccattccccccagccagctggactcacagattgatgactttaccggcttctctaaggatgggatgatgcagaaaccaggtagtaatgctccagtcgggggaaatgtcacctccaatttctctggcgacgacctcgaatgtagagggatcgcgtctagtccgaaaagccaacaggaaatcaacgctgatatcaagtgtcaggtggtcaaagaaattagatgtctcgggcggaagtatgaaaaaatcttcgagatgctcgagggtgtgcaagggccaacagctgttagaaagcggttctttgagtctatcataaaggaagccgcgagatgcatgagaagagacttcgtcaagcatctgaagaagaaactgaaaagaatgatttag

SEQ ID NO: 181502 - DNA, 570 bp, synthetic construct
  misc_feature 1..570: note = Description of Artificial Sequence: Synthetic coding sequence
  source 1..570: mol_type = other DNA
atgaccgacaagaccgagaaggtggccgtggaccccgagaccgtgtttaaacgcccgagagagtgcgattcaccatcctaccagaagcgccagcgaatggctctcctcgcccgaaagcagggggccggtgatagcctgatcgctgggtcagctatgtccaaggcaaagaaactgatgacaggacatgctatcccaccatcccaactggacagtcagatagatgacttcactggctttagcaaagatcgcatgatgcagaaaccaggtagcaacgcaccggtgggggggaacgtaacgagctccttctcaggcgacgacctggagtgtcgagagaccgcatcctcacctaagtcccaacaggagatcaacgccgacattaagaggaaactggtgaaggagcttagatgtgtaggccagaagtatgaaaaaatcttcgagatgctcgaaggtgtccaggggcccacagccgttcgcaagagattcttcgaaagcatcattaaggaggccgccagatgcatgagacgcgattttgtcaaacacctcaaaaagaagctgaagcgcatgatctag

SEQ ID NO: 181503 - DNA, 570 bp, synthetic construct
  misc_feature 1..570: note = Description of Artificial Sequence: Synthetic coding sequence
  source 1..570: mol_type = other DNA
atgaccgacaagaccgagaaggtggccgtggaccccgagaccgtgttcaagcgccctcgcgaatgtgattcaccttcatatcaaaagcggcagcgcatggccctactggcccgaaaacaaggagccggagatagcctgatagctgggagtgccatgtcgaaagccaaaaaactcatgaccggccatgccattccgccaagccagctggactcccagatagacgactttacgggattttccaaggaccgcatgatgcaaaagcccggaagtaacgctcctgtgggcggcaatgtgactagctcgttttcaggagatgacctcgaatgcagagagactgcctcttcgcctaagtcgcagcaggagataaatgccgacattaagagaaaactcgtgaaagagctgagatgcgttggccagaaatatgaaaaaatcttcgaaatgttggagggagtacagggaccaaccgctgttagaaaaagattttttgaatccattattaaagaggctgctcggtgtatgcgccgcgacttcgtgaagcacctcaaaaagaagttaaaaaggatgatttag

SEQ ID NO: 181504 - DNA, 867 bp, synthetic construct
  misc_feature 1..867: note = Description of Artificial Sequence: Synthetic coding sequence
  source 1..867: mol_type = other DNA
atgagcgccaccggcgaccggcaccccacccagggcgaccaggaggcccctgtgagccaggaaggcgcccaggctgaagcagcgggtgcgggtaatcaggagggtggcgattccgggcctgactcctccgatgtggtcccagcggcagaagtagtaggcgtggccggaccagtcgagggcctcggggaagaagagggcgagcaggccgccggcctagccgcagttcctcgagggggatctgccgaggaggatagcgatattggaccagccacggaagaagaggaggaagaggagggcaacgaggcggccaatttcgacttagccgtggtggcccggcgctatcccgcctccggcatccattttgttttattggatatggttcattctctactccatcgcctgtcacataatgaccacattttgatcgagaacaggcagctgagtcggttgatggtcggacctcatgccgctgctcgtaacttatggggaaacctcccgcccctgcttctgcctcagcgattgggcgccggcgcagctgctcgcgccggcgagggcctgggcctcattcaagaggcggcctcagttcctgaacccgccgtaccagcggacctcgctgaaatggctcgcgaaccagctgaggaagcagctgaagagaagctttcagaggaagctaccgaggaaccagacgccgaagagcctgcaacagaagagcccactgcccaggaggcaaccgccccagaggaggtcaccaaatctcagcctgaaaaatgggatgaagaagcccaggacgcggctggtgaggaggagaaagaacaggagaaagaaaaggatgccgagaataaggtgaagaattctaagggaacttag

SEQ ID NO: 181505 - DNA, 867 bp, synthetic construct
  misc_feature 1..867: note = Description of Artificial Sequence: Synthetic coding sequence
  source 1..867: mol_type = other DNA
atgagcgccaccggcgaccggcaccccacccagggcgaccaggaggcccccgtgtcacaggaaggggcccaggccgaggccgctggcgccggaaaccaggaagggggtgattccggacctgattcatcagacgttgtgccagccgccgaagttgttggcgtcgccggacctgtagaggggctcggcgaagaagagggagagcaggcagccgggttggctgccgtgcccagaggtggttcagccgaggaagattcggacatcggtccagccacagaagaggaagaggaggaagagggaaatgaggcagccaattttgatctggccgtggtagctcgcaggtacccagcaagcggcatccactttgtactgctggatatggtacattccctgctgcaccggttatcccacaatgatcacattttgatagagaatcgccagctaagccgattaatggtggggcctcatgccgcggcacgtaacctttggggtaacctaccccccctgttgctcccccagagacttggggctggggcggctgcaagagcaggcgagggtcttggccttatacaagaggccgccagcgttcctgagcccgccgtaccggccgacttagccgagatggcccgcgagcctgcggaggaggcagccgaggaaaagttaagtgaagaagcgacagaagagccagatgcagaggagccagccaccgaggaaccgacggcccaggaagctaccgctcccgaggaggtcacaaagtctcagccagagaagtgggacgaagaggctcaggatgctgctggagaggaggagaaggaacaagaaaaagagaaagacgccgaaaataaagtgaaaaacagcaaaggaacttag

SEQ ID NO: 181506 - DNA, 867 bp, synthetic construct
  misc_feature 1..867: note = Description of Artificial Sequence: Synthetic coding sequence
  source 1..867: mol_type = other DNA
atgagcgccaccggcgaccggcaccccacccagggcgaccaggaggctcccgtctcccaggagggcgcccaggccgaggctgcgggagcgggtaatcaggagggtggagacagcggacccgatagctcagatgtagttccagcagccgaagtggtgggggtcgctggtccggtcgaaggacttggcgaagaggaaggagagcaggcggctggtctggccgctgttccacgtggtggtagcgccgaggaagacagtgacatcgggcctgctaccgaggaggaagaagaagaagagggaaatgaggcagcaaatttcgatttagccgtggtggcccggcgctaccctgcttcaggaatccactttgtgctgctggatatggttcacagcctgcttcaccgcttatctcacaatgaccacattctgattgagaataggcagttgagtagactgatggtggggcctcatgcggccgcaagaaacctctggggcaatcttcccccactgttgctgcctcaacgactaggagccggggcagccgcacgcgctggggaggggctaggtcttattcaggaagccgctagtgtccctgagcccgctgtgccagcagacctcgccgagatggcccgggagcctgccgaagaggccgcagaggagaaactgagcgaagaggccaccgaggaaccagacgcagaagaacccgctactgaagaacccactgcccaggaagccaccgctcctgaggaggtgactaagtctcagccagagaagtgggatgaagaagctcaggacgcagctggcgaggaagagaaggagcaggagaaggagaaagatgccgagaataaagtaaagaattcgaaaggcacatag

SEQ ID NO: 181507 - DNA, 867 bp, synthetic construct
  misc_feature 1..867: note = Description of Artificial Sequence: Synthetic coding sequence
  source 1..867: mol_type = other DNA
atgagcgccaccggcgaccggcaccccacccagggcgaccaggaggctcctgtgagccaggagggagcacaggctgaggcagctggagccggcaaccaggaggggggggattctggaccggactctagcgacgttgttccggccgcagaggtagtcggcgttgccggtcctgtcgaggggctgggagaggaagagggggaacaggcggctggcctggcggccgtgcctagaggtggctccgcggaagaggacagcgatattggccccgctacagaggaagaggaggaggaggaggggaatgaagccgctaatttcgacctcgccgtggtggcccggcgctaccctgcttcggggattcattttgtactcttggatatggtgcattctctactccaccgcttatctcacaatgaccatatcctgatcgaaaacaggcaactgtctcggttgatggttggtccccatgcagctgcacgcaacttgtgggggaatctgccacccctgctcctgcctcagagactgggcgctggcgcggccgccagagccggagaaggactagggttgattcaggaggccgcctctgttcccgagcctgccgtccccgctgatctagctgaaatggcccgagagccagccgaggaggctgcagaggagaagctttctgaggaggcaacggaggaaccagatgctgaagaacccgccacagaggagccgaccgcacaggaggctacagcccctgaggaggtcaccaagtcacaaccggagaagtgggatgaagaggcccaagatgccgcaggcgaagaggagaaggaacaagagaaggagaaggacgctgagaacaaggtcaaaaatagcaaagggacctag

SEQ ID NO: 181508 - DNA, 867 bp, synthetic construct
  misc_feature 1..867: note = Description of Artificial Sequence: Synthetic coding sequence
  source 1..867: mol_type = other DNA
atgagcgccaccggcgaccggcaccccacccagggcgaccaggaggccccggtcagccaggagggggcacaggctgaagccgccggagccggtaatcaagaaggtggagacagcgggcccgactcttcagatgtagtgcctgccgctgaggtcgttggggtggccgggcctgttgagggcctcggagaagaagagggagagcaggcggccggcttagccgcagtgcctcgaggtggcagtgccgaagaggacagcgacatcgggcctgctaccgaagaagaggaggaagaggagggaaacgaggccgcaaattttgacctcgctgttgttgctcggcggtatcccgctagtgggattcacttcgtactgttagatatggtgcactcccttctgcacaggctgagccacaatgaccacatcctcattgagaatcgccagctcagccgactcatggtaggcccccacgctgcggctcgaaacctgtggggaaatctaccgcctctgttgctgccacagagactcggagctggggcagcggccagagcgggcgagggcttgggccttattcaagaggccgccagcgttcccgagccagctgtcccagccgatctggctgagatggcaagggagccagctgaggaagcggccgaggagaaactttcagaagaagctaccgaggaacccgatgccgaagagccagctaccgaagagcctactgcccaggaggccacggcacctgaggaagtcactaagtcccagcctgagaagtgggacgaagaagcccaggacgctgccggcgaagaagaaaaggaacaagaaaaggagaaagatgccgagaataaagttaagaactcaaaagggacctag

SEQ ID NO: 181509 - DNA, 867 bp, synthetic construct
  misc_feature 1..867: note = Description of Artificial Sequence: Synthetic coding sequence
  source 1..867: mol_type = other DNA
atgagcgccaccggcgaccggcaccccacccagggcgaccaggaggcacccgtgagccaggaaggcgcacaagcagaggcagccggcgcaggaaaccaggagggaggtgactcaggtcctgactcaagtgatgtagtgcctgccgcagaggtggtgggtgttgccgggcctgtggagggactcggggaagaggagggggaacaagccgccggactggccgcggtgccacgagggggttctgctgaggaagacagcgatatcgggcccgccaccgaagaagaagaggaagaggaaggtaacgaagcagctaatttcgatttggccgtggttgcgcggcgatatccagcctccggtattcactttgttcttttggacatggttcattcactgttgcataggctgtctcataacgatcacattctgattgaaaatagacagctgtcccggctaatggtggggcctcatgctgccgctcggaatctgtggggtaaccttcctccattgctgcttccacaacgcctcggagcaggagccgcagcccgggcgggggaaggactggggctaatacaagaggccgcatccgtgcctgagccagcagtacctgctgaccttgccgaaatggcaagggagccggccgaggaggctgcagaagaaaagcttagcgaggaagctacagaggaacctgatgctgaagaacccgccacggaggaacccacagcccaggaagccactgctccagaagaggtgaccaagagccagccagaaaaatgggatgaggaggcgcaggacgccgccggagaggaagagaaagagcaggaaaaggaaaaagatgccgaaaacaaagtgaagaattctaagggcacatag

SEQ ID NO: 181510 - DNA, 867 bp, synthetic construct
  misc_feature 1..867: note = Description of Artificial Sequence: Synthetic coding sequence
  source 1..867: mol_type = other DNA
atgagcgccaccggcgaccggcaccccacccagggcgaccaggaggctcccgtgagccaggagggcgcccaggctgaggcggcaggggcgggcaatcaggaagggggtgactccgggcccgactctagtgacgtggtccccgccgctgaagttgtcggcgtcgccggacccgtggaaggcctgggggaggaagaaggagaacaagccgcggggctggccgccgtgcccagaggagggtctgccgaagaggactcagatatcggccccgctacagaggaagaggaagaagaagagggtaacgaagccgccaactttgatcttgctgtggtcgcgcgtcgctatccagctagcgggatccattttgtgctgctggatatggtgcactcactgctgcaccgcctcagtcataatgaccatatactcatagaaaacagacagctctctagattgatggttggtccccatgctgcagctcggaacctctggggcaacctccccccccttcttttgccacagcgtctgggcgccggcgccgccgcaagggcaggtgagggattggggctgattcaggaagctgcgtcagtccctgagcccgctgtaccggcagatctggcagaaatggctagagaacctgcagaggaagctgccgaggagaaactcagcgaagaggccacagaagaacccgatgccgaagaacctgccacagaggagccaactgctcaggaggcaacagccccagaagaagtgacaaaatcacagcctgagaagtgggacgaagaagcccaagacgccgcaggtgaggaagagaaggagcaggagaaagaaaaggacgccgagaacaaagtcaaaaattctaaagggacttag

SEQ ID NO: 181511 - DNA, 867 bp, synthetic construct
  misc_feature 1..867: note = Description of Artificial Sequence: Synthetic coding sequence
  source 1..867: mol_type = other DNA
atgagcgccaccggcgaccggcaccccacccagggcgaccaggaggcaccagtctcccaggaaggtgcccaagccgaagccgccggcgcaggaaatcaggaaggtggagatagtgggccggattccagcgacgtggtaccggcggccgaggtggtgggtgtggccggaccagtcgagggcctcggagaagaagaaggcgagcaggccgctggactggctgcagtgccccgcggcgggagcgctgaagaagacagcgacatcggccccgccaccgaagaggaggaagaggaggaaggcaatgaggcagcgaactttgatctcgccgttgttgcacgccgctatcccgcctccggcattcattttgtgctgctggatatggtccactccctccttcacagactctcgcataatgatcatatcctcattgagaatagacagctctcacgattgatggtcgggccacatgctgcagcccggaacctctggggaaacttgccaccgttgctcctcccccaacggctaggcgccggcgcagccgctagggccggcgaggggctcgggctcatccaggaggccgcgagcgtccctgaacctgcagtgccagctgatctagcggagatggctagagaacccgctgaagaagccgccgaagagaagctgtccgaggaagccactgaagagcctgatgccgaggagcccgcaactgaggagccaaccgcacaagaggccacggcgcctgaagaggtaacaaagtctcagccagagaagtgggatgaggaggcacaggacgccgctggggaggaagaaaaggagcaggagaaggaaaaagatgcggagaataaagtgaagaactcaaaaggcacttag

SEQ ID NO: 181512 - DNA, 867 bp, synthetic construct
  misc_feature 1..867: note = Description of Artificial Sequence: Synthetic coding sequence
  source 1..867: mol_type = other DNA
atgagcgccaccggcgaccggcaccccacccagggcgaccaggaggcacctgtatcccaggagggcgctcaggcggaggcggccggcgcaggcaaccaagaaggcggcgattccgggcccgactctagtgacgtcgtacctgcagcagaggtagtgggagtggcagggccagttgaaggactaggagaggaggagggcgaacaggcggctggtttagctgccgttccaagaggcggctccgccgaagaggattcagatatcggccctgctactgaagaggaggaggaagaggagggcaatgaggcagctaattttgatctggccgtggtcgccagacgctacccagcatccgggattcactttgttttgctggatatggttcacagtctccttcatagactgagccacaacgatcatatcctgatcgagaataggcagctgtctcgcctgatggtgggaccacacgctgctgcacgcaacctgtgggggaacctcccgcctctgcttctgccccagcggttgggcgcgggcgcggctgctcgggccggagagggcttgggcctaattcaggaggcggcctcagtcccagagcctgccgtgcctgccgatctggctgagatggcccgggaacctgcagaggaggcggcagaagagaaactatccgaagaagcaactgaggaaccagacgccgaagagccagcaactgaggaacccaccgcacaagaagcaacggcccccgaggaggtgacaaagagtcagccagagaagtgggacgaggaagctcaggatgccgctggcgaagaagagaaggagcaggagaaggaaaaggatgcagaaaataaggtaaagaactctaaagggacttag

SEQ ID NO: 181513 - DNA, 867 bp, synthetic construct
  misc_feature 1..867: note = Description of Artificial Sequence: Synthetic coding sequence
  source 1..867: mol_type = other DNA
atgagcgccaccggcgaccggcaccccacccagggcgaccaggaggcccccgttagtcaggaaggcgcccaggctgaggcagctggggcgggaaaccaggaaggcggggattctgggcccgactcatctgatgtggtacccgcagccgaggttgttggagttgccgggcctgtcgaaggtttgggcgaggaggagggggaacaagccgcaggactggctgccgttcctagaggcggcagcgccgaagaagatagtgatatcggcccggcaaccgaggaggaagaggaggaagaggggaacgaggccgccaattttgatctggctgtcgtcgctaggcgataccccgcgagtggtatacactttgtccttctagacatggtccacagcttactgcatagactctctcacaatgatcacattctcatcgagaacaggcaactcagtagactgatggtcggaccccatgccgctgcccgaaatctgtggggaaatctgcctcccctgcttctccctcagagactcggtgctggagctgccgccagagcgggagagggcctggggctcatccaggaggctgcgtccgtccccgaacctgctgtaccagccgatcttgccgaaatggccagagaacccgccgaggaggctgccgaggaaaagctttctgaggaggccaccgaggaacctgatgcagaagagccagctactgaagagccaacagctcaagaggctaccgcccctgaggaggtaactaagtcacagcccgaaaagtgggatgaagaagctcaggatgctgcgggggaggaagaaaaggagcaggagaaggagaaagacgcggagaataaggttaaaaactccaaaggcacatag

SEQ ID NO: 181514 - DNA, 867 bp, synthetic construct
  misc_feature 1..867: note = Description of Artificial Sequence: Synthetic coding sequence
  source 1..867: mol_type = other DNA
atgagcgccaccggcgaccggcaccccacccagggcgaccaggaggcgcccgtgagccaggagggtgcccaagcagaagcagctggggctggcaaccaagaaggaggtgattccggccccgatagctcggacgtggtgccggccgccgaagtggttggagttgccgggcccgtggaaggactcggcgaggaggagggcgaacaggcggccgggttggccgccgtgcctcgcggcggctctgccgaagaggactccgacattggccctgcaaccgaagaagaagaagaggaagaaggtaacgaagcagccaattttgacctagccgtcgtggcccggaggtatcctgccagcggaattcattttgttctgctggacatggtccacagcctcctgcaccggctgtctcataatgatcatatcctcatcgagaatcgacaactctccagacttatggtcggtccacatgccgctgcgagaaacctgtggggaaatttgcctccactcctgctgcctcagaggctcggtgctggggccgctgctagagcaggcgaaggcttaggtttgatacaggaggccgcaagtgttcccgaaccagcagtgcccgcagatttggcagagatggcccgggaacctgccgaagaggccgccgaggagaagctctctgaggaagcaactgaggagccagacgcagaagaacctgctaccgaagaacccactgctcaggaggccaccgcccctgaagaggtcaccaaatcacaaccggagaagtgggacgaagaagcgcaagatgcagccggcgaagaggagaaggaacaggagaaggagaaggatgcagaaaacaaagtcaagaattccaaagggacctag

SEQ ID NO: 181515 - DNA, 867 bp, synthetic construct
  misc_feature 1..867: note = Description of Artificial Sequence: Synthetic coding sequence
  source 1..867: mol_type = other DNA
atgagcgccaccggcgaccggcaccccacccagggcgaccaggaggcacctgtttcacaggagggtgctcaagcggaagccgccggggcaggtaatcaggaggggggagactctgggcccgactcatccgacgtggttcctgccgccgaggttgtgggggtggctggacccgtggaaggcctgggagaggaggaaggggagcaagccgccggcctggccgcagtgccccgcgggggctcggctgaggaagatagcgatatcggtcccgcaacggaggaggaggaggaggaagaagggaatgaagccgccaactttgatctcgcggtcgttgcccggcggtatcccgcctcaggaattcacttcgtgcttctggatatggtccactccctgctgcatcgcttgagtcacaatgatcacatcctgattgagaatcggcagctgagccgcttaatggtgggccctcatgctgcagctagaaatctgtgggggaacctccctccactgctgctgcctcaacggctgggtgctggagcagcagcccgcgccggagaaggactgggattaatccaagaagccgcctcagtgcccgaacctgctgttcccgcagatctcgctgaaatggcaagggagccagccgaggaggctgcagaggaaaagctctccgaggaggcaactgaggagcctgatgctgaggaacccgcgacagaggaacccaccgcgcaggaagcgaccgcacccgaggaggtgaccaaatcccaacctgaaaagtgggacgaggaagcccaggatgctgcaggcgaagaggaaaaagagcaggagaaggagaaggatgcagaaaataaggtgaagaactccaagggaacatag

SEQ ID NO: 181516 - DNA, 867 bp, synthetic construct
  misc_feature 1..867: note = Description of Artificial Sequence: Synthetic coding sequence
  source 1..867: mol_type = other DNA
atgagcgccaccggcgaccggcaccccacccagggcgaccaggaggcccctgtctcacaggagggagcgcaggccgaagcggcaggcgctgggaatcaggaagggggtgatagcggccctgatagcagtgatgttgtgccagccgccgaggtggtgggcgttgctgggccggtcgagggactgggcgaggaggagggcgaacaggcagctggtctagccgccgttcctagggggggttctgctgaggaggattcagacatcgggcccgctaccgaagaggaagaagaggaggaaggcaacgaggcagcaaacttcgacctggccgtggttgcccgacggtaccccgcttccggcatacacttcgttcttttggatatggtgcactccctcctgcacagactcagccacaacgatcacattcttattgagaacaggcagctaagccgtctgatggttggaccgcacgccgccgcacggaacctttggggcaaccttcctcccctgctgctgcctcaacgacttggcgcaggggctgctgctagagctggagaagggctaggcctcattcaggaggctgcatctgtgccagaacctgctgtgccagccgacttggccgagatggctcgggaaccagcggaagaggctgccgaagagaagcttagcgaagaggccacggaagaacctgacgccgaggagccggccaccgaggagcccacagcccaggaggctacagctcccgaggaggtgaccaaatcacaaccagagaaatgggatgaagaagcccaggacgccgccggtgaagaagaaaaggagcaggaaaaggagaaggacgctgaaaataaagtgaagaattccaaaggcacgtag

SEQ ID NO: 181517 - DNA, 867 bp, synthetic construct
  misc_feature 1..867: note = Description of Artificial Sequence: Synthetic coding sequence
  source 1..867: mol_type = other DNA
atgagcgccaccggcgaccggcaccccacccagggcgaccaggaggccccagtctcccaagaaggggcccaggccgaggccgccggagctggcaaccaggaaggaggagattccggccctgatagtagtgacgtagtgcctgcggcagaggtggtgggcgtggcagggcctgtagaaggcctaggcgaggaagaaggggagcaggccgcggggctcgctgccgtaccaaggggggggtctgctgaggaagattctgatatagggcctgccaccgaggaagaagaagaagaggaagggaacgaggcagctaacttcgatctggcagtggtcgctagaaggtatccagctagtggcattcattttgtgctgttggatatggtacactctctgctgcaccgtctgagccacaatgatcacattctgatcgagaatcggcaactgtcccgcctcatggtgggaccccatgctgccgcaagaaatctttggggaaatctgccacctctgctcttgccgcaacggttaggggccggagctgcagcccgggctggcgagggcttagggctgatccaagaagccgccagcgttcctgaaccagccgttcccgcagatctggctgagatggcacgcgagcccgcagaagaggcggcagaagagaaactgtcggaggaggccacggaagagcccgatgcggaggaaccggctaccgaggaaccaaccgcacaggaggcaaccgctccggaggaagttaccaagagccagccagagaagtgggacgaagaggcccaggacgctgcaggagaggaggagaaggaacaagagaaggagaaagacgctgaaaataaagtcaagaactcaaagggcacgtag

SEQ ID NO: 181518 - DNA, 900 bp, synthetic construct
  misc_feature 1..900: note = Description of Artificial Sequence: Synthetic coding sequence
  source 1..900: mol_type = other DNA
atgagcgccaccggcgaccggcaccccacccagggcgaccaggaggcaccagtttctcaagagggcgcacaggcggaggccgcaggtgccggcaaccaagagggaggggactcaggccccgatagctcggatatggtccccgccgctgaagtggtgggtgtggccggacctgttgaaggccttggggaggaggagggagaacaggcggccggtctggctgctgttcctcaaggcggctccgccgaggaagattccgatatcggacctgctacagaagaagaagaagaggaagaggaagggaatgaggctgctaattttgatcttgccgtcgccacacgccgatatccagcggccggaatcggtttcgtgttcctgtatcttgtgcattctctgctgcggagactctaccacaatgaccacatccaaattgccaaccggcacctgagccgcctgatggtcggacctcacgccgccgtccccaacctgtgggataacccccccctgctgctcttgtctcagcgattaggcgctggtgccgccgctccggagggcgaaggtttaggactcattcaagaggctgcttccgttcaagaggctgcttctgtgccggagcctgctgtcccggccgacttggcagaaatggcccgcgaacccgcagaggaggccgccgatgaaaaaccgcctgaggaggctgctgaggagaaattgaccgaggaagccacggaggagcccgccgccgaagaacctacatctgaggaagccgttgccccggaagaggttacaaaaagccagcctgaaaagtgggacgaagaggcacaggatgctgccggcgaggaagagaaagaacaagagaaagagaaggatgtcgaaaacaaagtcaagaacagtaaaggaacttag

SEQ ID NO: 181519 - DNA, 1419 bp, synthetic construct
  misc_feature 1..1419: note = Description of Artificial Sequence: Synthetic coding sequence
  source 1..1419: mol_type = other DNA
atgaagagcatcctggacggcctggccgacaccaccttccggaccattactactgatctgttgtatgttggtagtaacgacattcagtatgaagatataaagggagacatggcctctaagcttggctactttccacagaaattccccttaaccagttttcgcggaagccccttccaggagaagatgaccgccggcgacaaccctcagctggtgcccgcagaccaggtcaacatcaccgagttctataacaagagcctgtcatctttcaaggagaatgaggaaaacattcagtgcggagagaactttatggacatagagtgtttcatggtactaaatcccagccagcagctggccatcgccgtattgtcactcaccttgggaaccttcaccgtgctggaaaacttactagtgctctgtgtcatcctgcactccaggtctctgcgctgtagaccctcgtatcatttcatcggctcactggccgtagccgacctgcttggaagtgtgatttttgtatattccttcattgacttccatgtcttccacagaaaagactcacggaacgtgtttttgttcaaattagggggcgtcaccgcaagctttactgcaagtgtggggtctctgttccttactgctatcgaccggtatataagcatacaccgccctttggcctataagcgtatcgtgacccgacctaaagctgttgtggctttctgcctcatgtggactatcgccattgttatcgccgtattacccctcctgggatggaattgtgaaaagttgcagtctgtgtgctccgacatctttccccacatagatgaaacctacctcatgttctggattggtgttacaagtgtgctcctgctgttcatcgtctacgcctacatgtacatattatggaaggctcactctcacgccgtccggatgatccaaagaggtacacagaaatccatcattattcatacgagcgaagacggaaaggtacaagtcaccagaccggatcaggcccggatggatatccgcctcgccaagaccttggtgcttatattagtcgttctgattatctgctggggccccttgctggctatcatggtatacgatgtctttggaaagatgaataaactgattaagaccgtttttgccttctgctccatgctgtgcctgttgaactctacggtgaatccaataatctacgctttgcgctccaaggatctcaggcacgcgttcaggagtatgtttccttcatgcgagggaaccgcacaacctctcgataattcaatgggcgattccgactgtttgcataaacacgccaacaatgcggctagcgtgcaccgcgccgctgaaagctgtatcaagagcactgtgaagatcgccaaagtcaccatgtctgtttccaccgacacatccgcggaagctctttag

SEQ ID NO: 181520 - DNA, 1419 bp, synthetic construct
  misc_feature 1..1419: note = Description of Artificial Sequence: Synthetic coding sequence
  source 1..1419: mol_type = other DNA
atgaagagcatcctggacggcctggccgacaccaccttccggaccattactaccgatctgctgtatgtgggcagcaacgatatccagtatgaggatattaagggagacatggcctccaaactggggtacttcccacaaaagttcccactgaccagcttccgaggcagtccatttcaggagaaaatgactgccggagataatcctcaactggtgccagcagatcaggtcaacatcaccgaattctacaacaagtcactgtctagttttaaggaaaacgaagagaatatccagtgtggtgagaatttcatggacatagaatgttttatggttctcaatccgagccagcagctggcaattgccgtactttcacttactctgggcacttttaccgtcctcgagaatctcctggtgctgtgcgtgattctccactcacggtccctgaggtgcagaccttcataccatttcattggcagcctggccgtagccgacctactcggtagtgtcatctttgtgtattcttttattgacttccatgtgttccacaggaaagactctagaaatgtgtttctgtttaaactggggggagttacagcctcgttcactgcctccgtgggaagcctcttcctgactgccattgataggtacatcagcatccacaggccccttgcgtataaaaggatcgtgactcgacctaaagccgtggtcgctttctgtcttatgtggacgatcgccatcgttattgccgtcctccctctgttggggtggaattgtgagaaattgcagtccgtttgctccgacatctttccccacatcgacgagacttacctcatgttctggataggcgtcacctctgtcctgcttttgttcattgtttatgcctatatgtatatcctatggaaggcacacagccacgccgttaggatgattcagcggggaacacagaagtccattattatacacacctccgaggatggaaaagtacaggtgactcgaccggatcaggctcggatggatatcagattggccaagactctcgtgctgatcttagtcgtgcttattatctgttggggccctctgcttgcaattatggtgtatgacgtcttcggcaaaatgaataagctcatcaaaacagtattcgctttctgttctatgctttgtctcctgaactccaccgtaaatccgatcatctacgccttacggagcaaagacctcagacatgcctttcgatctatgtttcccagttgcgaggggaccgctcaacctctggataacagtatgggcgattctgattgcttgcacaagcacgctaataatgctgccagcgtacaccgcgccgccgaatcatgtataaaatctacagtgaaaattgcaaaggtcactatgtctgtctcgactgatacctccgctgaagctttatag

SEQ ID NO: 181521 - DNA, 1419 bp, synthetic construct
  misc_feature 1..1419: note = Description of Artificial Sequence: Synthetic coding sequence
  source 1..1419: mol_type = other DNA
atgaagagcatcctggacggcctggccgacaccaccttccggaccatcaccaccgatcttttatatgtggggtccaatgacatccagtatgaagatatcaaaggcgacatggcaagcaaattggggtacttcccgcagaagtttcctcttaccagcttccggggaagtccctttcaggagaaaatgaccgcaggcgacaacccacagctggtacccgccgaccaggtcaacataactgaattttataacaaaagcttgtcttccttcaaagagaatgaggagaacattcaatgtggagaaaatttcatggatattgagtgctttatggtcctcaacccttcccagcagcttgcgatagctgtgctgtccttgactctcgggacctttacggtattagaaaatctgttggtcctctgtgtgatcctgcattcccgttcacttcgctgcagaccaagctatcacttcataggttctcttgccgtcgcggaccttttgggctctgtaatatttgtctattcattcatcgattttcatgttttccaccgtaaggattcccgaaacgtgttcctgttcaagctgggtggcgttactgcttcatttactgctagcgttggtagcttatttctcacggcaatcgacaggtatatttcaatacaccgtcctctggcctataaaaggatcgtgacgcggccgaaggcagtggtggctttctgtttaatgtggacgatcgcaatcgtcatagcagttctgcccctgctcggctggaattgcgagaagcttcagtccgtttgttctgatatctttccacatatcgatgagacttatctcatgttttggatcggagtaacctccgtcctgttactgttcattgtctacgcctacatgtacattttgtggaaggcgcacagccatgctgtccggatgatccaaagaggaacacagaaatcaattatcatccacactagcgaagatggcaaagtgcaggtgactagaccagatcaggccagaatggacattaggcttgctaagaccctcgttctgatcctggttgttctgataatatgctggggaccgctcctggcaatcatggtctatgatgtcttcgggaagatgaataagctgatcaaaactgtttttgcgttctgctccatgctatgcttgttgaacagtacagtgaatcccatcatctacgccctccgcagcaaggacctgcgccacgcttttcggtctatgttcccaagttgcgaaggaacggcccaacctctggacaacagcatgggcgactctgactgcttgcacaaacacgcaaataacgctgcgtctgttcatcgtgctgccgagagctgcatcaaatcaactgtcaaaattgcaaaggtgacaatgtccgtgagtaccgacaccagcgctgaggctctgtag

SEQ ID NO: 181522 - DNA, 1320 bp, synthetic construct
  misc_feature 1..1320: note = Description of Artificial Sequence: Synthetic coding sequence
  source 1..1320: mol_type = other DNA
atgaagagcatcctggacggcctggccgacaccaccttccggaccatcacaacagacctgctgggttccccctttcaggagaaaatgactgccggggataaccctcagttggttccagctgaccaggtcaacattactgaattctacaataagtcactctctagttttaaggagaacgaagaaaacatacagtgtggcgaaaattttatggacattgaatgtttcatggtgctcaaccctagtcaacaactggctattgcagttctttccctcacactgggaacattcaccgtgcttgaaaatctgctagtcctgtgtgtgatactgcacagtagaagcctgcgatgccggccctcatatcattttattggatctcttgctgtggccgacctcctgggaagcgtgattttcgtatacagcttcattgactttcacgtcttccatagaaaggactcacgaaatgtcttccttttcaagctcggcggggtgacagcctcatttaccgcatcggtcggaagtctgttcctgacagcaattgacaggtatatctcgatccaccgccccctcgcctataaacggatcgtcacccgccccaaggcagtggtggccttctgtcttatgtggaccattgctatcgtaatcgccgtcctcccgttgctggggtggaactgtgagaaactgcagagcgtgtgcagtgacatttttccacatatagatgaaacctatctgatgttctggataggtgtgacctccgtgcttttgctcttcatcgtttatgcatatatgtatatattgtggaaagctcacagccatgcggtgcgcatgatccagcgtggcacccagaagtctattattatccatacaagtgaggacgggaaagtgcaggtgacccggccggatcaggcacgcatggacatcaggctggcaaagacccttgtcttgatcctcgtagtcctgatcatttgctggggtcccttactggctatcatggtgtatgacgtttttgggaagatgaacaaactaatcaagactgtgtttgctttctgcagcatgctctgcctcttaaatagcaccgtgaaccctatcatatacgccctgcgctcaaaggacttgcggcacgctttcagatctatgtttccaagctgcgaggggacagctcagccgctcgacaattctatgggcgacagtgattgcctccacaagcacgccaacaacgccgccagcgtgcaccgcgccgccgagtcctgtatcaagtccactgtcaagatcgccaaagtcacaatgtccgtgtcaaccgacacgtctgcagaggctctgtag

SEQ ID NO: 181523 - DNA, 1419 bp, synthetic construct
  misc_feature 1..1419: note = Description of Artificial Sequence: Synthetic coding sequence
  source 1..1419: mol_type = other DNA
atgaagagcatcctggacggcctggccgacaccaccttccggaccatcaccacagatctgctgtatgttgggtccaatgatattcaatacgaagacattaagggtgacatggcttcaaaacttggatactttccccagaaatttcctctgacttccttcagaggaagcccatttcaggaaaagatgacagccggcgacaatcctcagctggtacctgccgaccaggtcaacattaccgaattttacaataaatccttgagttctttcaaggaaaatgaagagaatattcagtgcggcgaaaattttatggatattgaatgctttatggtcttaaaccccagccagcagctggcgattgctgtgctaagcctgaccctcggtacatttactgtgttagagaatcttctggtgctgtgtgttatcctccactcacgatcactgagatgccggccttcctatcattttatcggaagtctagccgtcgctgacctcttgggcagcgtaatattcgtttacagttttatcgatttccatgtgtttcatcgcaaagattcaagaaacgttttcctatttaagctggggggagttactgcatcctttacggcctctgtcggaagcttattcctgacagcgatcgatagatacatctccatccaccgccctctcgcctacaagcggattgttactagaccgaaagccgttgtggccttttgtctcatgtggacaatagcaattgtcatcgcagttttgccactgctcggatggaactgtgaaaagctgcagtctgtgtgttctgatattttcccccacatagatgaaacatacctgatgttctggataggagtgacgagcgtgctactcctttttatcgtgtacgcttacatgtacatactatggaaggcccacagccatgctgttcgtatgattcagagaggaactcagaagtccatcattattcacacttccgaagatggaaaggtgcaagtgacccggccggatcaggcaaggatggacatccgtctcgctaaaaccctggttctgattttggtggtgctgatcatctgctggggccctctgctggcaattatggtttatgacgtattcgggaaaatgaacaagttgattaaaaccgtatttgctttttgctccatgctgtgcctacttaattccacggtcaacccaattatttatgccttgcgtagcaaagacctccgtcacgcgttccggtcaatgtttccgagctgtgagggaacagcccaacccctggacaacagtatgggtgatagtgactgcctgcacaagcacgccaataatgcagcgtccgtgcaccgtgcggctgaatcttgtattaagtcaacagtcaagatcgccaaggtgactatgtctgttagcactgacacatccgccgaagctctgtag

SEQ ID NO: 181524 - DNA, 1419 bp, synthetic construct
  misc_feature 1..1419: note = Description of Artificial Sequence: Synthetic coding sequence
  source 1..1419: mol_type = other DNA
atgaagagcatcctggacggcctggccgacaccaccttccggaccattaccactgatctactgtatgtgggaagcaatgatattcaatacgaggacataaaaggcgacatggcttccaagcttggctactttccccagaagttccccctgaccagtttcaggggatccccttttcaagaaaagatgacagccggagacaatcctcagttggtgcccgctgaccaggttaacattactgaattttacaacaaatcactcagtagcttcaaggagaacgaagagaacatacaatgcggggagaacttcatggatattgaatgcttcatggtgctcaatccatctcaacaactggctatcgcagtgctttccctgacactgggtacattcaccgtgttggagaacctgctggtgctgtgcgtgattttgcatagtagaagcttaagatgccgcccatcctaccacttcattggctctctggccgtcgctgacctcctagggtccgttatttttgtttactcattcatcgattttcacgtattccaccggaaagatagccgcaatgtgttccttttcaagctgggaggggtgactgcatcgttcaccgcatccgtgggttccctctttttgacagcaattgatagatatatctccattcatagacccttggcatataaaaggattgtgacaagacctaaagctgtcgtggccttctgcctgatgtggactattgctattgttatagccgtgcttcctctgttgggatggaactgtgaaaagcttcagtccgtttgctcagacatcttcccacatattgacgaaacatatctaatgttctggattggagttacaagcgtgctgctgctgttcattgtttacgcctacatgtatattctctggaaagcccacagccacgccgtgaggatgattcagcgcggtacccagaagagtatcataattcatacaagcgaggacggaaaagtgcaagtcactaggccagaccaggcaagaatggacatccgcttagcaaagactctagtcctgattttggtagtgttgatcatctgctgggggccactgcttgcaatcatggtgtatgacgtattcggaaaaatgaacaaactgatcaaaactgttttcgccttttgctcgatgctgtgcctcctgaatagcacggtcaaccctattatttacgctcttagatcaaaagatctgagacacgccttcagatctatgttcccatcttgcgaaggtactgcccagcctctggacaatagcatgggagacagcgattgtttgcataagcacgctaacaatgcggccagtgtccatagggcagccgagtcatgtatcaagtccaccgtgaaaattgctaaggtcacaatgtcagtaagcacagacacgtcagccgaggccctatag

SEQ ID NO: 181525 - DNA, 1236 bp, synthetic construct
  misc_feature 1..1236: note = Description of Artificial Sequence: Synthetic coding sequence
  source 1..1236: mol_type = other DNA
atggccctgcagatcccccccagcgcccccagccccctgaccagctgtacctgggcacaaatgaccttcagcacaaagacctctaaggagaatgaggaaaacatccagtgcggggaaaatttcatggatattgagtgcttcatggtcctgaacccatcgcaacagttggccattgctgtcctgtctctgaccctcggtacctttactgtgctcgagaatctgctggtgctgtgcgtcatcttgcatagtcggagtctccgctgtaggccatcctaccacttcattgggtccctcgcagtggcggatcttcttgggagtgtgatctttgtgtattcattcatagatttccacgtttttcacagaaaagactcaaggaacgtcttcttattcaaactggggggagtgaccgcaagcttcacagcctccgtcggatcgttatttctgaccgcgatcgacagatacatctcgatccaccggccgctagcctacaagcgcatcgtcacccgccccaaagccgtcgttgccttttgcctgatgtggaccatagctattgttatcgcagtgttacccttgctcggatggaactgcgaaaaactccaatcagtttgctcagacatctttccccacatcgacgaaacctacctgatgttttggattggagtcacatcagtcctcctgttattcatcgtgtacgcatatatgtacatcctctggaaagcccactcccacgccgtcaggatgattcagagaggcacccagaagtccatcataatccacaccagtgaagatggcaaggtccaagttacacgcccagaccaggccagaatggacatccgcctggcaaaaacactcgtgctgatactggtggtgctgattatctgctggggcccccttctggccatcatggtgtacgacgtattcggaaaaatgaacaaattgattaaaactgtgttcgcgttttgttcaatgctatgtctacttaactcaactgtgaatcccatcatatatgcgttgaggtcaaaggacctacggcatgcattcagatctatgttcccatcttgtgaaggaactgcccagcctctggacaacagcatgggtgactcggattgcctacacaaacatgcgaacaatgcagcctctgtccacagagcagccgagtcctgcataaagtccaccgtaaaaattgcaaaagtgaccatgtccgtctccactgacacctctgcagaagctctgtag

SEQ ID NO: 181526 - DNA, 1419 bp, synthetic construct
  misc_feature 1..1419: note = Description of Artificial Sequence: Synthetic coding sequence
  source 1..1419: mol_type = other DNA
atgaagagcatcctggacggcctggccgacaccaccttccggaccatcactacggatctcctgtacgttgggagcaatgacatccagtatgaagatatcaagggggatatggcaagtaaactcgggtattttccacagaagtttccattaactagcttcagaggaagccccttccaggagaaaatgaccgcaggcgacaacccccagctggtgcccgctgatcaggttaacattaccgaattctacaataagtcactctccagttttaaggaaaacgaagaaaacatccagtgcggagagaactttatggacattgaatgttttatggtcttaaatcccagccagcagctagccatcgctgtgttgagccttaccctgggcaccttcacggtgcttgagaacctacttgtcttgtgtgttattctacacagcaggagcctgcggtgtagaccctcttaccactttatcgggtctttagcggtggctgatttgctgggatctgttattttcgtgtatagctttattgatttccacgtctttcaccgcaaagacagtcgcaacgtcttcttgttcaagctgggtggcgtgactgcctcattcactgcctccgttggttccctattcctcaccgccatcgatagatatattagcattcatagacccctggcctacaagcggatcgtgacccgcccaaaagcagtcgtggcattctgcctgatgtggacaattgcgattgtcatagcggtgctgcccctgctgggatggaactgtgagaaactccagtcagtctgttctgacatttttccccacatagacgaaacatatctcatgttctggattggtgttaccagcgtcctgttgttgttcatcgtgtatgcatacatgtatatactgtggaaggctcactcccatgccgtcagaatgattcagcggggcacacagaagtcaattatcatacacacctccgaggatggcaaagtgcaggtcacaaggcccgaccaggccagaatggatatcagactcgcaaagactctcgtgttgatcttggtcgtcctaatcatttgctggggccctcttcttgccattatggtttatgacgtcttcggaaaaatgaacaagttgataaagaccgtttttgctttttgtagcatgctctgcctcctaaacagcactgtcaatcctataatatacgcgctccggagcaaggacttgcggcacgcgtttaggagcatgtttccttcatgtgaggggaccgcccaaccactggataacagtatgggagactctgattgcctgcacaagcatgctaacaacgctgctagcgtgcaccgcgctgcagagagctgcattaaaagtacagtcaagatcgccaaggtgaccatgtccgtgagcactgacacatccgccgaagcgctctag

SEQ ID NO: 181527 - DNA, 237 bp, synthetic construct
  misc_feature 1..237: note = Description of Artificial Sequence: Synthetic coding sequence
  source 1..237: mol_type = other DNA
atgaagagcatcctggacggcctggccgacaccaccttccggaccatcactacagaccttctctacgtcggttcaaacgatatccagtacgaagatataaagggtgacatggcaagtaagcttggatacttccctcagaagttccctttaacttcttttcgggggtctccttttcaggagaaaatgaccgccggcgacaatcctcaactcgtgccagctgaccaggtcaatatctag

SEQ ID NO: 181528 - DNA, 1083 bp, synthetic construct
  misc_feature 1..1083: note = Description of Artificial Sequence: Synthetic coding sequence
  source 1..1083: mol_type = other DNA
atggaggagtgctgggtgaccgagatcgccaacggcagcaaggacgggcttgacagtaaccctatgaaagactatatgatcctgtcgggcccccaaaagacagctgtggcggtcttgtgtacactgttagggctgttgagcgcactggagaacgtcgctgtcttatacctgatcctgagcagtcaccaactgagacggaagccatcatacctgttcattggttctctcgctggagcagacttcctggcctccgtagtcttcgcttgttcgtttgtgaacttccacgtcttccatggggtggacagcaaagcagtgttcttgctgaagatcggaagcgtcactatgacattcacagcctctgtgggatcactgttactgactgcaatcgatcgttatctgtgcctgcggtatccgccttcttataaagccctcctcacgcggggaagagcactggtcacactggggataatgtgggtgctgtcggcgctggtatcctatctcccactgatgggttggacgtgttgtccccgaccttgcagcgagttgttcccactgattcctaacgactacctgctatcatggcttctgtttatcgcatttcttttcagcggaatcatttacacctatggccatgttctgtggaaagcacaccaacatgtggcttctctgtcaggacatcaggaccggcaagtccccggcatggcccggatgcgtttggacgttcgcctggcgaagaccctagggttagtgctggccgtcttgcttatctgctggttcccagtgttggccttaatggctcactcactggccacaactctgagtgaccaggtgaaaaaggccttcgctttctgtagcatgctttgtctgataaatagcatggtgaatccggttatctatgcacttcggtccggagagattcggtcatctgcccaccactgcctggcacactggaaaaaatgtgtgcggggtcttggatctgaggcaaaagaagaggctccccgatccagcgtcactgagaccgaagcagacgggaaaattaccccgtggccagactcaagggaccttgacctgagtgattgctag

SEQ ID NO: 181529 - DNA, 1083 bp, synthetic construct
  misc_feature 1..1083: note = Description of Artificial Sequence: Synthetic coding sequence
  source 1..1083: mol_type = other DNA
atggaggagtgctgggtgaccgagatcgccaacggcagcaaggacggcctggactctaatcccatgaaggactacatgatacttagtggccctcagaaaactgccgtggctgtgctctgcactctcctgggtctgctgagcgccctggagaacgtcgccgtgctgtacctcatcctatcctcacaccagcttcgacggaaacctagttatctgttcatcgggagcctggcaggggccgatttcttagcaagtgtcgtctttgcgtgtagctttgttaatttccacgtattccacggggtcgacagcaaggcggtgtttctactgaagatagggtcggtgaccatgacattcacggcctctgtgggttcgctcctgcttaccgcgatcgacagatacctgtgtttgcgctatcctccatcctacaaagccctcttgacccgcggtagggccctggtcacccttggcatcatgtgggtacttagcgccctcgtaagttacctaccactgatgggctggacttgctgcccacgtccatgcagcgaactattccccctcatccccaatgactatttgctttcatggctcctcttcatcgcttttttgttttcaggcatcatttacacctatggccacgtgttgtggaaagcgcaccagcatgtggcctccctgagcggccaccaggacagacaggtgcccggaatggcccgcatgcgcctggacgtgaggctcgcaaagacccttggactcgtcctggcagttctgctaatttgttggtttcccgttttagccctcatggcgcacagtctggcgaccacactttcggaccaggtcaaaaaagccttcgctttctgcagtatgttgtgtctgattaattccatggtcaatcctgtgatatacgcattgcgctctggagaaatccggagctctgcccatcattgtctcgcccattggaaaaaatgcgtgcgaggcttgggatcagaggctaaagaagaagcccctcgctcatccgtaactgagacggaagccgacgggaaaatcactccttggccggattccagagatctcgatctgtcagactgctag

SEQ ID NO: 181530 - DNA, 837 bp, synthetic construct
  misc_feature 1..837: note = Description of Artificial Sequence: Synthetic coding sequence
  source 1..837: mol_type = other DNA
atggacagcatgcccgagcccgccagccggtgcctgctgctgctgccactcttgctcttgctcctgctgctgctcccggcccctgagctcggcccaagtcaggctggggccgaggaaaatgactgggtacgcctcccctccaagtgcgaggtgtgcaagtacgtcgccgtggaactgaagtctgccttcgaggaaacaggcaaaactaaagaggtaatcggtactggctacggaatcctcgatcagaaggcatcaggcgtgaagtacacgaaaagcgaccttagactcatcgaagtgaccgagactatatgcaaacgactgctggattattcgctgcataaagagcggacaggttccaaccgttttgcaaaagggatgtcggagacattcgaaacattgcacaatctggtgcacaaaggagtaaaggtggttatggatatcccatatgaactgtggaacgagacgtcagcagaagttgcagacctgaagaaacagtgcgacgtccttgttgaggaatttgaggaggtcatagaggattggtatcggaaccatcaggaagaagacctgactgagtttctgtgcgccaaccacgtgttgaagggcaaagacacaagctgtctggccgaacaatggagcggcaaaaaaggggacaccgcagctctcggaggtaagaagagtaaaaaaaagagcagcagagccaaggccgccggaggcagaagttcatcatctaaacagagaaaagaactcggcggtctggagggagatccctctcccgaagaagatgagggaattcagaaagcatcccctctgacccatagtccaccagatgagctgtag

SEQ ID NO: 181531 - DNA, 165 bp, synthetic construct
  misc_feature 1..165: note = Description of Artificial Sequence: Synthetic coding sequence
  source 1..165: mol_type = other DNA
atggacagcatgcccgagcccgccagccggtgcctgctgctgctgcccctgctgctgttgcttctactgctactaccggccccagaactggggcccagccaggccggtgccgaagaaaacgactgggtgagactgccctctaagtgcgagggaacctgtggatag

SEQ ID NO: 181532 - DNA, 747 bp, synthetic construct
  misc_feature 1..747: note = Description of Artificial Sequence: Synthetic coding sequence
  source 1..747: mol_type = other DNA
atgggccccgtgcggctgggcatcctgctgttcctgttcctggccgtgcacgaggcatgggccggcatgctgaaagaagaggatgatgataccgaaaggttgccttcaaaatgtgaagtgtgcaaactattgtccaccgaactccaggccgaactctctagaaccggcaggtcgcgggaggtcctggagttagggcaggtactggacacaggcaagcgcaaaaggcacgtgccttacagcgtgagcgagacgcgacttgaagaagctcttgagaacctatgcgaaaggatccttgattacagcgtgcatgctgagagaaaagggagcctacgctatgccaagggccagagtcaaaccatggccacgctcaagggactggttcagaagggcgtaaaggtcgatctagggatcccactggaactctgggatgagccctcagttgaggttacttacctaaagaagcagtgcgagacaatgttggaagagtttgaggatattgtcggagattggtactttcaccaccaggaacagccccttcagaatttcctgtgcgagggccacgtgttacctgcagctgagaccgcgtgcctgcaggagacctggaccggcaaagagattaccgatggtgaagaaaagacagagggggaagaagaacaggaggaggaagaagaagaggaggaagaagaaggcggcgacaaaatgaccaagacaggctcccaccccaagctggatagagaggacctgtag

SEQ ID NO: 181533 - DNA, 798 bp, synthetic construct
  misc_feature 1..798: note = Description of Artificial Sequence: Synthetic coding sequence
  source 1..798: mol_type = other DNA
atgcgggaggagatgagcctgggctgccaggaggccttcgagatctttaagcgcgaccacgcagacagcgtaacaatagacgataataaacagatccttaagcagaggttctccgaagcaaaagccctgggcgaatcaataaatgaggcaaggagtaaaatcggtcacctgaaggaggagattactcagcgccatatccaacaggtagccctaggcatatccgaaaatatggccgtgcctctgatgcctgatcagcaggaggagaagttgcgaagccagctggaggaagaaaaacgtcgatacaagaccatgtttactcgactaaaagctttgaaagtcgaaatcgagcacctacaactcctgatggacaaggcaaaggtcaagctgcagaaagagtttgaagtatggtgggctgaagaagcgacgaacctccaagtgaattctcctgccgtgaattcattagaccacacaaagccttttcttcagaccagcgattcacagcacgaatggtcccaactgctgagtaataagagctctggaggttgggaagtgcaagaccaaggcaccgggcgcttcgacgtgtgcgatgttaacgctaggaagattctgccttccccctgtccgagcccccattcccaaaagcagtcgtccactagtacacccttagaggactctatccctaagcgacccgtttcctccatcccactaaccggggactctcagacggattcggatatcattgcctttattaaagcccgacagagtattctccagaaacagtgtctagggagcaactag

SEQ ID NO: 181534 - DNA, 1185 bp, synthetic construct
  misc_feature 1..1185: note = Description of Artificial Sequence: Synthetic coding sequence
  source 1..1185: mol_type = other DNA
atggccaacatgcagggcctggtggagcggctggagcgggccgtgtccaggctcgagagtctgtctgctgagagccaccgcccaccaggaaattgtggcgaggtgaatggcgttattgctggagtggctccctcggtggaagccttcgacaagctcatggactccatggtggctgagtttttgaaaaatagtaggattctggctggcgacgtggagacacacgcagaaatggtgcactcagcttttcaggcccagcgcgcatttctcctgatggcctcacagtatcagcagccgcacgagaatgacgtcgctgctctgcttaaaccaatttctgaaaagatccaggaaattcagactttccgcgagcggaacaggggatcaaatatgtttaaccacctgagtgctgtcagtgagagcattcccgccttgggctggatcgccgttagtcccaagcctccgcccttgcctccaccaggcccccccccgctgttcgaaaacgaggggaaaaaagaggaatccagcccctctcggagcgctctgtttgcacagttaaatcaaggagaggccatcactaagggcctcaggcatgtaacagacgatcagaaaacatataagaatccttcactccgagcccaaggcggacagacccagtcacctacaaaatcccacacgcccagtcccacgtctccaaaaagctatccgtcccaaaagcacgctcctgtgctggaactggaggggaaaaagtggcgtgtggaataccaggaggacagaaatgatcttgtgattagcgagactgaactgaaacaggtagcctatatttttaagtgcgaaaaaagtaccattcagatcaaaggaaaagttaatagcattatcatcgataattgcaaaaagctgggtctggtgtttgacaacgtggtcgggattgtcgaagtgattaactcccaagacattcagatccaggtcatgggccgtgtgccgacaattagtatcaacaagactgaaggctgtcacatctatctcagcgaggatgccttggattgcgagatagtctctgccaagtcatcagaaatgaatatactgatacctcaagacggggactatcgggaatttccaatccctgaacagttcaagaccgcatgggacggcagcaagctaattactgagcccgccgaaattatggcctag

SEQ ID NO: 181535 - DNA, 597 bp, synthetic construct
  misc_feature 1..597: note = Description of Artificial Sequence: Synthetic coding sequence
  source 1..597: mol_type = other DNA
atgaagctgtacagcctgagcgtgctgtacaagggcgaggccaaggtcgtccttcttaaggcggcttacgatgtttctagttttagtttcttccagcgtagcagcgtgcaggagtttatgaccttcactagccagctcatagtagagaggagttcaaagggaacaagagcaagtgtgaaagagcaggattacctgtgtcacgtgtatgtgaggaacgacagtctggctggcgtggtcatcgccgataacgagtaccccagtagagtagcctttaccctgttggagaaggtactggatgagttctctaagcaagtcgatcgaatcgattggcccgtgggatcgccagcaacgatacattacccggcccttgatggacacctgtcaaggtaccagaaccctcgcgaggcagacccaatgaccaaagtccaggccgagctggacgagacaaaaatcattctgcacaacacaatggagtctctccttgagaggggtgaaaagctggacgacttagtgtccaaatccgaggtgctgggaacacagtcgaaagccttttacaagactgcaagaaaacagaatagttgttgtgcaatcatgtag

SEQ ID NO: 181536 - DNA, 3036 bp, synthetic construct
  misc_feature 1..3036: note = Description of Artificial Sequence: Synthetic coding sequence
  source 1..3036: mol_type = other DNA
atgcagaagcccagcggcctgaagccccccggccggggcggcaagcactccagcccaatgggtcgcacttccaccgggtctgcaagcagtagcgccgctgttgcggcttccagtaaagagggaagccccttgcacaagcaatcttctggcccctcctccagcccggcagccgctgcagctccagagaaacctggaccaaaagccgctgaggtgggcgatgatttcctgggagatttcgtggtgggggagagagtgtgggtaaacggagtcaagcccggtgtagtgcagtatctcggcgaaacacagttcgcccccggccagtgggccggtgtggtgctggatgaccctgttggaaagaatgacggagccgtgggtggtgtgagatatttcgaatgccccgcattgcagggaatctttactcgaccctcaaagttgacccgccaacctactgccgaggggtccggatcagacgcccactctgtcgaatcacttacagcccagaatctttccttgcacagtgggacagcaacacctcccctgacctctcgcgtgattcccctgcgagagagcgtgctcaattcctccgtcaaaacaggcaatgagtcaggatcaaatctcagcgactctggatccgtaaagagaggcgagaaggatctgcgccttggagaccgggtgctagtaggaggaaccaaaacaggcgtggtacggtatgtgggggaaacagatttcgccaagggggagtggtgcggtgtggagctcgacgagccgctcgggaagaacgatggcgccgtggccggaactcgctacttccagtgccccccaaaattcgggctgttcgcgccaatccataaggttatccggattgggttccccagtacatcgccggccaaagcaaaaaagaccaagcgtatggcaatgggagtgtccgcccttactcacagccccagtagcagctccatatcgagcgtgtcatcagttgctagctctgtgggcggaagacctagtaggagtggtctgcttacagagacttcttcacggtacgccaggaaaatttctggaacaaccgctttgcaggaagccttgaaggaaaagcagcagcatatcgagcaactcctggcagagcgtgacctcgagagagctgaggtggccaaggcgactagccacatttgcgaggtggaaaaggaaattgctctgctgaaggcccaacacgagcagtatgttgccgaggctgaagaaaaactccagcgtgctagactccttgtggaatccgtgcgcaaggaaaaggttgatctatcgaaccagctggaggaagagcggagaaaggtagaggatctgcagttccgagtggaggaagaatcaatcacaaagggcgacctcgagctgacgaccgtcgccgaaaagagccgggtactacagttggaagaagaactgaccctcagaagaggggaaatcgaagagcttcagcagtgcttactccactcgggcccaccgccaccggaccatcccgatgcggccgagatcctgcgtttaagagagcgactcttgagtgccagtaaagagcaccaaagggagtctggcgttctccgcgacaaatacgaaaaggccctgaaggcctaccaggcggaagtcgataaacttcgagctgccaacgagaaatatgcgcaagaagtcgccggcttgaaggacaaggttcaacaggcaaccagtgagaacatggggctcatggataattggaaatccaagctggactcactggcttctgaccatcagaaaagcctggaggatctcaaagccactttaaattctggacccggagcccagcaaaaagaaatcggagagcttaaggccgtcatggagggcattaaaatggagcatcaactggagctgggcaacctccaagcaaaacacgatctcgagaccgcaatgcacgtgaaagaaaaagaggcgctccgggagaagctgcaggaggctcaggaagaactggccggcctgcagcgacattggcgcgcccagctggaagtccaggcaagtcagcatcgtctcgagctccaggaggcacaggaccaacgaagagacgccgaactccgcgtgcacgagttagaaaaactagacgttgagtacagaggccaagctcaggctattgaattcctcaaggaacagataagcttggccgaaaaaaagatgctggactacgagcggctgcaaagagccgaggcccagggcaaacaagaagtggagtccctgcgggagaaattgcttgtcgcagaaaacagactgcaggccgtggaggctctgtgttccagccaacatacacatatgatcgagagtaacgacatctccgaggagaccatccggacgaaagaaacggtagaaggcctgcaggataaactaaataagcgagataaggaagtgacagcccttacttctcaaacagagatgctgagggcccaagtgagcgccctggagtccaagtgcaaatccggcgagaaaaaagtggatgccctgttgaaggagaaacgtcgcctcgaggctgagcttgagacagtctcccggaagacgcacgacgccagcgggcagctggtgctcatctctcaggaactgctgcgcaaggaacgaagtctcaatgagcttcgcgtgctgcttcttgaggccaacaggcattcacccggacctgaaagggatctgagtagggaggttcataaagccgagtggcgcattaaagaacagaaactgaaagatgacattcgcggactcagagaaaagctgactggcctggacaaggagaaaagtctcagcgaccaacgccggtattcacttatcgatcgcagttcagcacccgagttgctgcggttgcagcaccagttgatgtcgaccgaggatgccctccgtgatgccctggaccaggcccaacaagtggagaaactgatggaggccatgcgctcatgcccagacaaggcccaaactattgggaacagtggcagtgctaatgggatacaccagcaggacaaagcccagaaacaggaagataagcattag

SEQ ID NO: 181537 - DNA, 3141 bp, synthetic construct
  misc_feature 1..3141: note = Description of Artificial Sequence: Synthetic coding sequence
  source 1..3141: mol_type = other DNA
atgcagaagcccagcggcctgaagccccccggccggggcggcaagcactctagccctatgggaaggacaagtaccggctccgccagcagcagtgctgccgtggcagcgtctagcaaggagggttcccccctacacaaacaaagcagcggacccagcagtagtcctgctgccgccgccgcacctgaaaagcccggccccaaagcggctgaagtgggtgacgattttctgggtgattttgtagtgggcgagcgggtctgggttaacggggtcaaacccggggttgtgcagtatttaggtgagacacagtttgctcctggacagtgggccggtgttgtgcttgatgaccccgtggggaagaacgacggagcagtgggaggcgtcaggtatttcgagtgtcccgccttgcagggcatcttcactaggccgtcgaagcttacacgccagcctacggcagaggggagcggcagtgatgcacacagcgtagaaagtctaaccgcacagaacctcagcctgcacagcgggactgctactcctcctttgacgagcagagtgatccccctgagagaaagcgtgctcaactcttccgtgaaaacaggcaatgaatctggaagtaatctgtcagactctggatctgtgaagcggggggaaaaggacctcagactcggtgatcgcgtgctcgtggggggcactaaaacaggagtcgtgcgctatgtaggcgagacagactttgccaagggagagtggtgcggtgtcgagctggacgagcccttggggaagaacgacggtgccgtcgcgggcaccagatacttccagtgtccccctaaattcggactcttcgctcctatccataaggtcattcggattgggttcccttcgacatcccctgctaaggccaagaagaccaagaggatggcgatgggggtgagcgcattgactcactcaccctcttcttcctcgatttcttctgtcagcagtgtggcttcttctgttggcggacggccaagccggtcaggactgttgaccgaaacctcttctcgctacgcaaggaagatatccggtacaactgccctacaagaggcccttaaggagaagcagcagcatatcgagcagctgttggccgaacgggatcttgaacgggcagaggttgccaaggccacatcccatatctgtgaggtcgaaaaagagatcgcactgcttaaagcccaacacgagcagtacgtcgctgaagccgaggagaaactgcaacgcgcccgactgcttgttgaatcagtacgtaaggagaaggttgacctctctaaccagcttgaagaagagaggcgaaaagtcgaggatttacagttcagagtggaggaagagtccattaccaagggagatctggaaacccagacacagctggaacatgcgcgcataggcgaattggagcagagtttgctactggaaaaagctcaggctgagaggctgttgcgtgagctcgccgacaataggctgaccacagttgccgaaaagagcagggtgctgcagctggaggaagagctgactttgagaaggggggagatagaagaactacagcagtgtctcctgcacagcggccctccgccccctgatcatcctgatgccgccgaaatacttcggctgcgcgaacggctgctgagcgcgtctaaagagcatcagcgggagtctggtgtcctgcgagataaatacgagaaggctctgaaagcctaccaagccgaagtcgacaaactgcgcgcagcgaacgaaaaatacgcgcaggaagttgccggcctaaaggacaaagtgcaacaggccacatccgagaatatgggcctgatggacaactggaaatctaaactggattccctggccagcgaccaccagaagagtctggaggatctcaaagccacactgaactctggccctggtgcccagcaaaaggagatcggtgaactcaaggccgtcatggagggtataaaaatggagcaccagttggagctggggaatctgcaagccaagcacgatcttgaaacagcaatgcatgttaaggaaaaggaggccttgcgcgaaaagttgcaagaggcacaagaggaactggccggtctgcaacggcactggcgggcccaactggaagtgcaggctagtcaacaccggctggaactgcaggaggcccaggatcagcgcagggacgcagaactgagagtccatgagctggagaaacttgacgtggaatatcgtgggcaggctcaggcgattgagtttctgaaagagcagattagtctcgctgaaaagaagatgctggactacgaaaggttacagagagccgaagcacaaggtaagcaagaagtggagtcactcagggaaaagctcctggtggccgaaaatagactccaggcagtggaagccctatgtagctcacagcacacccacatgatcgagtccaacgacattagtgaggagacaatacgtaccaaagagaccgtggaggggctgcaagacaagctgaacaaaagggacaaggaagtgaccgcgctgacctcccagaccgagatgctgcgagcccaggtctccgccttagagtctaagtgcaagtccggcgaaaaaaaggtcgatgcactgcttaaagagaagcggaggcttgaagcggaattagagacagttagccgaaaaacgcacgatgcgagcgggcagctggtcctcattagccaggaactgctaagaaaggagcgctcactgaacgaattgagggtccttctgctggaagccaatcgacattctccaggccccgaacgcgatctttcccgtgaggtgcacaaggcggagtggcggataaaagaacagaagctgaaagacgacatacgcggcctgcgggaaaagctcacaggcctcgacaaagagaagtctcttagcgaccaaaggagatattctctcattgatcggagctctgctccagagctgctgcgcctccagcatcagctcatgagtactgaggatgccctgcgggacgctttagaccaagctcagcaagtagagaagctgatggaagctatgaggagctgtcccgataaggcccagacaataggcaatagcgggagtgctaacggaatacatcagcaagataaggctcaaaagcaggaagacaagcactag

SEQ ID NO: 181538 - DNA, 153 bp, synthetic construct
  misc_feature 1..153: note = Description of Artificial Sequence: Synthetic coding sequence
  source 1..153: mol_type = other DNA
ctggaggaggagcggcggaaggtggaggacctgcagttccgggtggaggaggagagcatcactaaaggcgacttggaggccgaagatcacctgagcccagaaccgtcaatgctcactaccgttgcagagaaaagcagggtgctgcaattgtag

SEQ ID NO: 181539 - DNA, 3141 bp, synthetic construct
  misc_feature 1..3141: note = Description of Artificial Sequence: Synthetic coding sequence
  source 1..3141: mol_type = other DNA
atgcagaagcccagcggcctgaagccccccggccggggcggcaagcactcctctccgatgggcagaacctctacaggatcagcttccagcagtgcagctgtagcagcgagctcgaaagaaggtagccccttgcacaaacagtcttccggaccctcctctagccctgcagcagctgccgccccagagaagccagggccaaaggcggccgaagttggcgacgatttcctcggcgactttgtggtcggtgagagggtctgggtcaatggtgtgaaacccggtgtggtgcagtacctcggcgagacacaatttgctccaggacagtgggccggcgtcgtattggacgatcctgtcggaaaaaacgacggggccgtgggcggtgttagatactttgagtgtcctgcgctgcagggtatctttacaaggccgtccaagctgacgcggcagcccacagctgaaggctctggaagtgacgcacatagtgtggagagtctcacggcccagaacctgagtttgcatagtgggaccgcaactcccccactgacttcaagagtaattcccctgcgggagtcagtcttgaactcatccgtaaagacagggaacgagtcagggtctaacctatctgattccggatctgtcaagcgcggcgagaaagatctgcgcctcggtgacagggtccttgtgggcggcaccaaaactggcgtggtaagatacgtgggcgagaccgactttgcgaaaggtgaatggtgtggggtggaactcgacgagcccctggggaagaacgatggagcggttgcggggacccgctattttcagtgtccccctaaattcggcttattcgcaccaatccacaaggtgattaggataggctttcctagtaccagcccagcaaaggctaagaaaaccaagcgcatggctatgggcgtgtccgctttgacgcatagcccatcctctagttccataagttctgtgtcatcagtagccagctccgtgggaggacgaccaagtcgctccggtctgcttactgaaacttcctctcgatacgccagaaaaataagcggcacaacagcactgcaggaggcattgaaagagaagcaacagcatattgagcagctcttagccgagagagatctagaacgggccgaggtggctaaagcaaccagccacatttgtgaagttgaaaaggaaattgctctcttaaaggcccagcacgagcaatatgtagctgaggccgaagagaaattgcagcgtgccaggctgctggtggaatctgtacgtaaggagaaagttgatttatccaaccagctcgaggaggaaagaaggaaggttgaagacctgcagtttcgcgtggaagaggaatccataacaaagggtgacctcgaaacccagacccagcttgagcacgcaaggatcggcgagcttgaacagagcctgttgttggagaaggcgcaggctgagcgcctgctgagggaactggcagataataggctaacgactgtagccgagaagtcaagagttctgcagctggaggaggagctgaccttgagacgaggagaaatcgaggagcttcagcagtgtctgttgcattccggtccccctccgcctgatcaccccgacgccgcagagatcctccgtttaagagaacggctgctctctgcttctaaagagcatcaacgagaatcgggtgtgcttcgggacaagtatgagaaggcgctcaaggcctatcaggctgaggtcgacaagctgagagcagctaacgagaaatatgctcaggaggtcgcagggttgaaggacaaggtgcaacaggctacttccgagaatatggggttaatggacaactggaagtctaaattagactcactagcaagcgaccatcagaaaagtctggaagatctgaaagcgacactcaactcaggcccaggggcacagcaaaaggagatcggggaattaaaagctgtgatggaggggatcaagatggaacaccagctggagctggggaacctgcaggcaaaacatgacctcgagacagctatgcacgtgaaagagaaggaggccctacgcgaaaagctgcaagaggcgcaggaggagctcgccggcctgcagcgccattggcgggctcagttagaagtgcaggcaagtcagcaccgacttgagctccaggaagcccaggaccaaaggcgcgacgctgaactacgtgtacacgaactcgaaaagttggacgtcgaatacaggggccaggctcaagctatcgagttcttgaaagaacagatctccctcgcggagaaaaagatgctggattacgaacgattgcagagggctgaagcccaagggaaacaggaagtggaaagcctaagggaaaaactgctggtggctgaaaacaggctgcaagcagtggaggcactctgtagctcccagcatactcatatgatagagagtaatgacatctcggaggagaccatcaggaccaaggagaccgtggaaggattgcaagataagctcaacaagagggacaaggaggtgactgcactgacctcccaaactgagatgctccgggcacaggtcagtgccctcgagtctaaatgtaagagcggagaaaaaaaagttgatgccctgctcaaggagaagagacgcctcgaggctgaactggagacagtgagtcgcaagacacacgacgcctccgggcagcttgttttaataagccaagaactcctgcgaaaggagaggtcactgaacgagctccgcgttttactgctagaggctaaccgacatagcccagggcccgaaagagacctgtcacgcgaggtgcacaaagctgaatggagaattaaggaacagaagttgaaggacgatatccgtggtctccgggagaaattgaccggcctcgacaaggagaagtcactgtccgatcagcgacgctactcactgatcgatcgctcttccgcgcctgagctgctccgactgcagcaccagttgatgtctacagaggatgccctgagagacgctttggatcaagctcagcaggttgaaaaacttatggaagctatgcgcagttgcccagacaaagcccaaacgatcgggaactcagggtcagctaatggaattcatcaacaggataaagctcagaagcaggagaacactcattag

SEQ ID NO: 181540 - DNA, 4827 bp, synthetic construct
  misc_feature 1..4827: note = Description of Artificial Sequence: Synthetic coding sequence
  source 1..4827: mol_type = other DNA
atgtacagcgcccaccggcccctgatgcccgccagcagcgccgccagccgggggctcgggatgtttgtctggaccaatgtggaacctcggagtgttgccgtatttccgtggcattccctggtgccgtttctcgcaccctcccagccagaccccagcgtccagcccagcgaagcccagcagccggcctcccaccctgtcgctagcaaccaatcaaaggaacctgcagaaagcgccgctgtggcacacgagcgcccgcctggagggactggatcggctgatccagagcgtcccccaggtgctacctgcccggagtcaccagggcctggtcctccacacccactgggcgtcgtagaatccgggaagggccctcctccgaccaccgaggaagaggcctcaggcccaccaggggaacctcgactagactctgaaacggagagtgatcatgacgacgcatttctgtctattatgagcccggagatacagctgccccttccacctggaaagaggcgcacccagagcctgtctgctttgcctaaagagcgagactcttcttccgaaaaagatggccgctcccctaataaacgagagaaggatcatatccgccggcctatgaatgcgtttatgatttttagcaagaggcatagggctctggtgcatcaacgccatcctaaccaagacaacagaacagtgtccaaaatcctgggggaatggtggtacgctttggggccaaaggaaaaacagaaataccacgacctagctttccaggttaaagaagcccattttaaggcgcaccctgattggaagtggtgtaacaaagatcgcaagaagagctcttcagaggcaaagccaacgtcccttggacttgctgggggtcacaaggagacgagagaacgctcaatgagtgaaactggcaccgctgctgcaccaggggtgtcctctgaactgctgtcagtggccgcgcagacgctcctctcatctgataccaaagctcctggatccagctcgtgtggggcagagcgcctgcacaccgttggcgggcctggcagcgcccgtccacgggcttttagccacagtggagtacattctctagacggcggagaggtcgacagccaggcgctacaggagctcacacagatggtctccggaccggcttcgtattccggtccaaaaccttcaacacagtatggagcccccgggccatttgccgccccaggggaggggggcgctttggcagccacgggacgccctccactgctcccgacacgagcaagtcggagccagagagcagctagcgaggacatgacttccgacgaggagcgcatggtgatctgcgaggaagaaggggatgacgacgtcattgccgatgacggattcggaaccactgacatcgacctaaaatgtaaagagcgggtgacagacagtgagtccggtgattctagtggtgaggatccggaaggcaataaggggtttggtaggaaagtgttcagccccgtgatcagatcgtcttttacccattgccgccctcctctcgaccccgaacctccaggacccccagatcccccagtggccttcggtaaagggtacggcagcgctccatcctcctcggcaagcagtcctgcaagtagctcagcaagcgctgccacatcgtttagcctcggttccgggacatttaaggcccaggaatcagggcagggttccaccgccggcccactgaggcctcctccccctggtgccggtggcccagccactccttctaaagccacgcgtttcctacctatggaccccgctacattccgccggaagagacctgaatccgtagggggattagaaccccctggcccttcagtgattgccgctccgccttccggcggagggaatattctgcagactctggtcctgcccccgaacaaggaggaacaggaaggaggcggggcaagggtcccctcagccccggccccatcccttgcatacggcgctcccgcggcgcctctgtcgagaccagccgctacgatggtaaccaatgtggttagaccagtctcctctactccagtacctattgcaagtaaaccctttcccactagcgggcgggcagaagcctccccaaacgatacagccggagctcgcacagagatgggcactgggagtcgggtgcccggtggctcccccttgggggtctccctggtgtactctgataagaagtctgcggctgcaacttctcccgccccccacttagtggctgggcctctattaggaactgtcgggaaggcacctgctaccgtgacaaacctcctggtgggcaccccagggtacggagccccagcccctccggcagtccagtttattgcccagggggctcccgggggcggtactacagcaggctcaggcgccggcgcagggagcgggccgaacggccccgtgccacttggtattctgcaacccggagcgcttggcaaagccggagggattacccaggtgcagtacatcctgcctaccttgccgcagcagcttcaggtcgctcccgcccccgcgcctgctccggggacaaaagccgcggccccgtccgggccagctcccacaacaagtatcagatttaccctccccccaggtacttcgactaacgggaaggtgttggctgcaactgcccctacccccggcatcccgatcttgcaatctgtgccatccgccccacctccaaaagcccagagtgtgtctccagtgcaggcgccgcctcctggtgggagcgctcaactgctgcccggtaaagtgcttgtgcccttggccgcccccagtatgtcagttcgcggcggtggcgctggacagcctctaccgctcgtgtcccctccgttttccgtcccggtgcaaaacggcgcccagcctccttcgaagatcattcagctgacacccgtcccagtgtcaacaccctcaggactggttccaccgctgagccctgctaccctgcccggcccaacatcacagccccaaaaggtgctgctgccttcctctacaagaatcacttatgtgcagagtgcaggaggacacgctttaccacttggcaccagccccgctagctcccaggccgggacagtgacctcatatggcccaacttcctccgttgcgctcgggttcacctcccttgggccctctggaccagctttcgtgcagcccctgctgagcgccggacaggctcccctgctcgcacccggccaagtcggagtgtcccccgtgccctccccccagctgccgcctgcctgcgccgctccaggtggcccggtaataaccgcattttattctggaagtccggcacccacctcatccgctcctctagcccagccgtctcaagccccaccgtccctggtctacacagtcgctacttccacaaccccacccgccgctaccattctgcccaaagggccaccagcccctgcaactgctactccagctccaaccagccccttcccctccgccactgccggatccatgacatatagccttgtggccccgaaggcccagcgaccttctccgaaagctccacagaaagtcaaggcagcaattgcaagcattcccgtcgggagcttcgaagccggcgcgtctggtcgccctggccctgctccacgtcagcctctggagcctgggcccgtgcgggaacccactgcccccgagtcagagttagaagggcagccaacccctcccgccccacctccacttcccgagacatggacgcccaccgcccgcagctctcctcccctgccaccaccagccgaggaacgcacgagcgcgaagggcccagaaacaatggcctcaaaattcccctccagctcctccgactggcgggtgcctggccagggactggagaacaggggggaacctccaacccctccgagtcccgcccccgctccggctgtggctccaggaggaagctctgaatccagctcaggcagggctgccggggacactcctgaaaggaaggaggctgctggcaccggcaaaaaagtgaaagtgcgtcctcctccccttaagaagacctttgattctgtagataacagggtgctgagcgaagtggattttgaggagaggtttgcagaattaccagagtttagacccgaagaagtcctaccctcccccacactacagtcactggctacgtctccccgagctattctgggctcatatagaaagaaacgcaaaaactcgacagatctggattccgcccccgaggatcctaccagccccaaacgtaaaatgaggcgccgctcctcctgcagctccgaacctaatacacccaagtctgctaaatgcgagggagatatttttacatttgacagaaccggaacggaagctgaggatgtcttgggagagctcgaatatgataaggttccatatagtagcttaaggaggaccctggatcagcgacgtgccctcgttatgcagctcttccaggaccacgggttttttccatcggcacaggccacagccgcttttcaggcccgatacgcagacatcttccccagcaaggtgtgcttacaactaaagatcagggaagtgcgtcaaaaaataatgcaggcagccactccgacagaacagcccccaggggctgaagcaccactccctgtgccaccacctactgggaccgccgctgcccccgcccctacaccaagccccgcgggtggccccgatcctacatcaccatcctccgactctggcacagcacaggccgcaccccctctccctcctccaccggagtcaggcccaggacagcccgggtgggagggagcccctcagcctagccccccccctccaggcccttctaccgcagccacaggcagatag

SEQ ID NO: 181541 - DNA, 1002 bp, synthetic construct
  misc_feature 1..1002: note = Description of Artificial Sequence: Synthetic coding sequence
  source 1..1002: mol_type = other DNA
atgtacaccgccatcccccagagcggcagccccttccccggcagcgtgcaggatcctggacttcacgtctggcgtgtggagaaactcaagccagtgcctgtagcacaggagaatcagggcgtgttcttttccggagactcctatctggtgcttcacaatggacccgaggaagtttctcatctgcacctttggattggccagcagtcgtcaagagatgaacagggagcttgcgccgttctggccgtccatctgaatactctgctgggggaaaggccggtacagcatcgtgaagtacagggcaatgaaagcgatctctttatgtcctacttcccacgtgggctgaaataccaggagggcggcgtagagagcgcctttcataaaacctcaaccggcgcacccgccgctatcaaaaagttgtaccaggtaaagggaaaaaaaaatatccgggccaccgaaagggccctgaattgggactcctttaacactggggactgttttattctcgacctgggacagaatatctttgcctggtgtggcggaaagagcaacattctggagcggaataaggcgcgcgacctggcattggccattcgtgattctgagcgccagggaaaggcccaagtcctcggtcctaaaccggcgctgaaagaagggaaccccgaagaggatctgaccgccgacaaagcaaatgcccaggccgcggccttatataaagtcagcgacgctaccggccagatgaacttgaccaaagtggccgattcatctcccttcgccctcgaactcttgattagcgacgactgctttgtgctggacaatggcttgtgtggtaaaatctacatttggaaagggcgaaaggctaacgaaaaagagcgccaggctgcattgcaggtggccgaggggtttattagcaggatgcagtacgcacctaacacccaggtggagattttgccgcagggacatgagtccccgattttcaagcagttcttcaaggactggaagtag

SEQ ID NO: 181542 - DNA, 861 bp, synthetic construct
  misc_feature 1..861: note = Description of Artificial Sequence: Synthetic coding sequence
  source 1..861: mol_type = other DNA
atggccgacttcgacgaccgggtgagcgacgaggagaaggtgcggatcgctgcaaaatttatcactcacgctcccccaggcgaattcaatgaagtgtttaacgacgtacgcttgttgttgaacaatgacaacttgttaagagagggagccgctcacgccttcgctcagtataacatggatcagttcactcccgtgaagatcgagggatatgaagaccaggttctgattaccgaacacggggacttaggaaatagccgatttcttgaccccaggaacaagattagcttcaagtttgatcaccttagaaaagaggcctccgacccccagccggaagaagcagatggaggcctgaagtcatggagggaatcctgcgacagcgctctgagggcctacgtgaaagatcattattcaaatggattttgtacagtatacgcaaagacaatcgacgggcagcagacgatcatcgcttgtatcgaatcccaccagtttcagccgaagaacttttggaacggacggtggcgctcagaatggaagtttactatcactcctccaaccgcccaggtggtaggagttctaaaaatccaagtgcactactacgaagacggtaatgtgcagctcgtgagccataaggatgtccaggatagtctcacagttagtaatgaagcacagactgcaaaagaattcataaagattatagaaaatgctgaaaatgaatatcaaaccgccataagcgagaactaccagacaatgagcgacacaacgtttaaagctctgaggagacagctgccagtgaccagaacgaagatagactggaacaaaatcctctcctacaaaatcgggaaggagatgcagaacgcctag

SEQ ID NO: 181543 - DNA, 861 bp, synthetic construct
  misc_feature 1..861: note = Description of Artificial Sequence: Synthetic coding sequence
  source 1..861: mol_type = other DNA
atggccgacctggaggagcagctgagcgacgaggagaaggtgcggatcgctgccaaattcattattcatgcccctccaggcgagttcaatgaggtgttcaatgacgtgcgcttgctgctaaacaacgataatctgctcagagagggcgccgcccatgcctttgcacagtacaatctagaccagtttacccctgtgaagatcgaagggtacgaggaccaggtgctgattactgaacatggcgacctgggcaatgggaagttcctggacccaaagaaccgtatctgttttaagtttgatcacctgcggaaggaagcgaccgatccaaggccctgtgaggtcgaaaacgctgtggagagctggcggacttcagtggagacggctctgcgcgcttatgtcaaagaacattacccgaatggcgtctgcacggtgtacgggaagaaaatcgacggacaacagacaataatagcgtgcattgagagtcaccagttccaggccaagaatttttggaatggccggtggcgcagtgaatggaaatttaccatcaccccgtcgactacccaagtggtgggaatcctgaagatacaggtgcactactatgaagatggtaacgtgcagctagtctcccacaaggacattcaggatagccttactgtcagcaacgaggtccagaccgcgaaggagtttatcaagattgttgaagcagcagaaaatgagtaccagaccgctatttcagaaaactaccagacgatgtccgatacaacttttaaggctctaagaaggcagctgccagtaacgaggacaaagattgactggaacaaaatcctttcttataaaatcggcaaagagatgcagaacgcgtag

SEQ ID NO: 181544 - DNA, 519 bp, synthetic construct
  misc_feature 1..519: note = Description of Artificial Sequence: Synthetic coding sequence
  source 1..519: mol_type = other DNA
atggccgacctggaggagcagctgagcgacgaggagaaggtgcggatcgcagccaagttcatcatccatgcaccaccgggcgaatttaatgaggtgttcaacgatgtgcgtttgttgctgaacaacgataacttgttgcgggagggcgccgcccatgcctttgcacaatataacctggatcagttcacccccgtgaaaatagagggatatgaggatcaagtgcttataacagagcacggcgatctcggcaacggcaagtttctggaccccaagaacagaatctgcttcaagtttgaccacctgcggaaagaagcaacggatccccgtccatgtgaagtagaaaatgctgtggaaagctggcggacctccgtggagactgcactgcgtgcttatgtcaaagagcactatcccaacggcgtgtgcaccgaatggtcccttgaagtgagaatggaggtgtataaccacagcttcaaccattcatccgggtggcacctcgaaaacagtgggtcactcctgtag

SEQ ID NO: 181545 - DNA, 900 bp, synthetic construct
  misc_feature 1..900: note = Description of Artificial Sequence: Synthetic coding sequence
  source 1..900: mol_type = other DNA
atgaccctgagcgtgctgagccggaaggacaaggagcgggtgatcaggcgactgctcctccaggctcctccgggggagttcgtgaacgcttttgatgacctctgtctcttgatacgagatgagaagctaatgcaccaccagggggaatgcgcaggccaccagcactgtcagaagtactctgttcctctgtgtatcgacggcaatccagtactgctgtctcatcataatgtaatgggtgactatagattctttgatcatcagagtaagctcagttttaaatacgatctcctgcaaaaccagctgaaagatattcagagtcacggaatcatccagaatgaggcagagtacctgcgggtcgtgctgctctgcgctctgaaactatacgttaatgatcactaccccaaaggcaattgcaacatgctccgcaagacagtaaaaagcaaagagtatctcatcgcctgtatcgaggatcataactatgagaccggcgaatgctggaacggcctgtggaagagcaaatggatcttccaagttaatcctttcctcacacaggttaccggccgcatcttcgtgcaggcccacttcttcagatgcgtgaacttgcacattgaaattagcaaagacttaaaagagtctctggagatcgtcaaccaagcacagctcgccctgtccttcgcaaggctggtggaggaacaagagaataaatttcaggccgcggtgctggaggagctgcaagagctttccaacgaggctctcagaaagattcttcggcgggatctcccagtgacacgaactttgattgattggcatcgcatactgagtgatctgaacttggttatgtatcccaaactgggctacgtgatctattcaaggagtgtactgtgtaactggatcatctag

SEQ ID NO: 181546 - DNA, 834 bp, synthetic construct
  misc_feature 1..834: note = Description of Artificial Sequence: Synthetic coding sequence
  source 1..834: mol_type = other DNA
atgagcgaccagcagctggactgcgccctggacctgatgcggcggctccctccacagcagattgagaaaaacttgtccgatcttattgatcttgtcccttccttgtgtgaggatctattgagttcagtggatcagcctttaaaaattgcacgcgacaaggtggtgggtaaggactacctgctttgcgactataatcgagatggcgatagctaccgctcaccgtggtccaacaagtatgatcctcctttggaggacggcgcgatgccctctgcgcgcctgagaaagctcgaagtggaggctaataatgccttcgaccaataccgcgacctgtattttgagggcggtgttagctccgtttatctctgggatctggaccatgggtttgctggggtaattcttattaagaaagccggtgatgggagcaagaagattaagggctgctgggatagcatacacgtcgtggaggtccaagagaagtcctccggcaggacagcccactataagctgacatccacagtaatgttatggctgcaaaccaacaaatcgggaagtgggaccatgaacctgggtgggtcactgaccagacagatggagaaggatgagaccgtgtccgactgttctcctcacattgctaacatagggcgtctggtggaggacatggaaaataagatcaggtcaacattgaacgagatctacttcggcaagacaaaggacattgtcaatgggctgcgcagcatcgacgccatccctgataatcagaagtttaagcagcttcagagagagctgagccaggtgctcacgcaacggcagatctatattcagccagataattag

SEQ ID NO: 181547 - DNA, 783 bp, synthetic construct
  misc_feature 1..783: note = Description of Artificial Sequence: Synthetic coding sequence
  source 1..783: mol_type = other DNA
atgccccggcagttccaggacaccggcttcagccggcccggcctggggcagccacgtcggtgcgacccagagccacggaaatctgatcagcagttggattgcgcattagacttgatgcgaaggctcccccctcagcagattgagaagaaccttagcgaccttatcgatttggtgccgagtctgtgtgaggatttactgtctagcgtagaccaacccctcaagattgctagggacaaagtggttggtaaggactatctgctatgtgattataatcgtgatggggattcctaccgtagcccatggagcaataaatatgacccccccctggaagacggcgccatgccatccgcgcggctgagaaaactggaagttgaagctaacaacgccttcgaccagtacagggatctgtatttcgagggaggcgtctcttctgtctacctctgggacttagatcacgggtttgccggggtgattctgatcaagaaggctggtgacggctcaaaaaaaattaagggatgctgggattccattcatgtggtcgaagtgcaggagaagagctcaggcagaactgcccattataagctgactagcaccgttatgttgtggctccagacaaataagtctggatcgggcacaatgaatcttggcggttcactgactaggcagatggaaaaggacgaaacagtatccgactgcagcccgcacattgccaacatcggaagattagtggaggtctgtgcggacttctgcagacagatcaaaaccagatcaagcgaggaatag

SEQ ID NO: 181548 - DNA, 834 bp, synthetic construct
  misc_feature 1..834: note = Description of Artificial Sequence: Synthetic coding sequence
  source 1..834: mol_type = other DNA
atgagcgaccagcagctggactgcgccctggacctgatgcggcggttgccccctcaacaaatcgagaagaatctgagtgacctgattgacctggtgcctagcttatgcgaggacctgttgtcttcagtcgatcagccgctcaagatcgccagggacaaggttgtgggcaaggattacctgctctgcgattacaacagggacggcgactcgtacagatcaccatggagcaacaagtatgacccaccattagaagatggagctatgccatccgctagactgcggaagctggaagtggaggccaataatgccttcgaccagtatcgggacctttattttgaaggcggtgtatcatccgtatatctctgggatttagaccacggatttgctggcgtcattctcattaagaaagctggagacggatcaaagaagattaaggggtgctgggatagcattcatgtggtggaggtccaggagaagagttcaggaaggacggcccattacaagctgacatccactgtcatgctgtggctgcaaacaaacaaatccgggagcgggacaatgaatcttggaggttctcttacaaggcagatggaaaaggacgaaaccgttagcgactgttctccacatattgcgaatattggccgcctcgtggaggacatggagaataagatccgctccactctcaatgagatatattttggtaaaactaaagatatcgtcaacgggctgagaagcatcgacgccatacccgataatcagaagttcaaacaactgcagcgagagctgagccaagtattgacacagcgccagatatatattcagccagacaattag

SEQ ID NO: 181549 - DNA, 783 bp, synthetic construct
  misc_feature 1..783: note = Description of Artificial Sequence: Synthetic coding sequence
  source 1..783: mol_type = other DNA
atgcggcggctgcccccccagcagatcgagaagaacctgagcgacctgatcgacctggtgccttctttgtgcgaggacctgttgtcttccgtggatcagcctctgaaaattgccagggataaagtggtgggaaaagattacctactctgtgattataatagggacggtgattcctaccgcagcccgtggtctaataaatacgatccacctctggaagatggcgctatgccatccgcacgactcagaaagctggaggtggaggccaacaacgcatttgaccagtatagagacctttacttcgagggcggagtgtcaagcgtgtacctatgggacctggaccacggcttcgcaggagtaattctgataaagaaggctggcgacgggagtaaaaaaatcaaggggtgctgggattctatccatgtggtggaggtccaggagaaatctagcgggcggaccgcccactacaagttaacttcgactgtcatgctgtggctacaaacaaacaaaagtggcagcggaaccatgaatctgggaggttccctgacacggcagatggagaaggacgagacggtgtccgattgtagtccccatatcgcgaatatcggaagactcgtagaagacatggagaataagattcgctccacgcttaacgaaatctacttcgggaaaacaaaggacattgtaaatggattgcgatctgtgcagacattcgccgacaagtccaaacaggaggccctgaaaaatgacctggtggaggctctcaagcgaaagcagcaatgttag

SEQ ID NO: 181550 - DNA, 1005 bp, synthetic construct
  misc_feature 1..1005: note = Description of Artificial Sequence: Synthetic coding sequence
  source 1..1005: mol_type = other DNA
atgggcggcccccaggacaaggacgagcggaccatcgccctggtgagaccttggccatgggggcaccaagccctcgatccggcctacggactggacacaatgcacccttctcggcgctctctgccctttccattaaactgccagctggcacgagtcgggaccgccgactacgggtcccctagtgatcagtctgatcagcaactggactgtgcactggatctgatgagacgcctgcccccacagcagatagagaagaacctgagcgacctaatcgacctcgtcccttccctgtgcgaggatctactgtcttccgtggatcagccactaaaaattgccagagataaagtcgtcggtaaggattatttactgtgtgattataaccgcgatggagattcttacagatctccgtggagcaacaagtacgatccgcctttggaggacggagctatgcctagtgcacgcctgagaaaattggaagtggaggccaataatgcatttgatcagtatcgggacctatacttcgagggaggtgtgtcgagcgtgtatctctgggatctggaccatggattcgcaggagtcatcctcatcaagaaggctggggatggctccaagaagattaaagggtgttgggatagcatccacgttgttgaagtacaggagaagagcagcggtagaaccgcccactataaactcacaagtacggtcatgctgtggttgcagacaaataaatcaggaagcggaacaatgaacttgggtggctctctgacaagacagatggaaaaggatgaaaccgtttcagactgctctccccatatagccaacattggaagactggttgaagatatggaaaataagattcgcagtacactcaatgagatttattttggaaaaaccaaagacatagtgaatggcctaagatctgtccagacatttgcggataagtcaaagcaggaggctctcaaaaatgatctggtggaagctctgaaacgaaaacagcagtgctag

SEQ ID NO: 181551 - DNA, 819 bp, synthetic construct
  misc_feature 1..819: note = Description of Artificial Sequence: Synthetic coding sequence
  source 1..819: mol_type = other DNA
atgagcgaccagcagctggactgcgccctggacctgatgcggcggttgccaccccaacagatcgagaaaaatctgtctgacctgattgacctggttccaagtctgtgtgaagatctcctcagctctgttgaccagccactgaagatagcgcgggacaaggtggtcggcaaggattacctcctgtgtgactataatcgcgatggagattcatatagatctccctggtcaaataagtatgatcccccactggaagatggcgccatgccgtcagctcgactgcgaaagctggaagtcgaggctaacaatgcatttgatcaatacagagacctctattttgaggggggtgtgtcttcagtctatttgtgggatcttgaccacgggtttgcaggcgtcatcttgatcaaaaaggccggcgacggctccaagaagatcaaaggctgttgggacagcatccacgtcgttgaagtgcaggagaagagttctggacgcacagctcactataagctgacctcaacagtcatgctttggctgcagacaaacaaaagtgggagcggcaccatgaacttgggcggttccttgacgcgccagatggaaaaggatgaaactgtcagcgattgcagcccgcacatcgccaatatcgggcgcctggtggaagacatggagaacaaaatccgcagcaccctgaacgaaatttacttcggaaagaccaaggatatagtcaatggactgcgcagcgttcagactttcgctgataagagcaagcaggaagccctcaaaaacgacctagtggaggctctgaaaagaaaacagcagtgctag

SEQ ID NO: 181552 - DNA, 621 bp, synthetic construct
  misc_feature 1..621: note = Description of Artificial Sequence: Synthetic coding sequence
  source 1..621: mol_type = other DNA
atgcggcggctgcccccccagcagatcgagaagaacctgagcgacctaatcgacctcgtgcccagtctgtgtgaagatctgctgagcagcgtcgaccaaccactgaagatcgctagggataaggtggttggcaaggactacctcttgtgcgattacaaccgggatggcgattcttaccggtcaccctggagtaataaatatgatcctcccctggaggacggcgcgatgccctcagcccggcttcggaaactcgaagtggaggccaacaacgccttcgatcagtacagggacctgtacttcgaggggggtgtgagttctgtttatctgtgggatttggaccatggttttgcgggcgttatcctaattaaaaaggcgggagacggatcaaaaaaaattaaaggatgttgggactccattcacgtcgtggaggtgcaagagaaaagttctggtcggactgcacattacaagcttacttctacagtaatgttatggctacagaccaacaaaagtggtagcggtaccatgaatcttgggggctccctgactcggcaaatggagaaggatgaaactgtaagcgattgctctccccatatcgctaacatcggccgactggtggagtag

SEQ ID NO: 181553 - DNA, 906 bp, synthetic construct
  misc_feature 1..906: note = Description of Artificial Sequence: Synthetic coding sequence
  source 1..906: mol_type = other DNA
atgcaccccagccggcggagcctgcccttccccctgaactgccagctggcacgcgtgggaacggccgactacgggtcaccgagcgatcagtctgaccaacaactggattgcgccttggatctgatgcggcgcttgcctccgcagcagatcgagaaaaacttatccgatcttatcgacctggtcccttccctgtgcgaagatttgctgagctccgtggaccaaccccttaaaatcgcgagagacaaggtggtcggaaaggactatctgctgtgcgattataaccgcgacggcgattcttaccggtcaccttggtctaataaatatgatccccctctagaggatggcgcaatgcctagcgcgaggctgcgaaaactggaagtggaagcaaacaatgcgttcgaccaataccgcgatctgtattttgagggtggtgtgagcagcgtgtacctttgggacctggatcacggttttgcaggcgtgattctgatcaagaaggcaggggatgggagcaaaaaaattaaggggtgttgggatagcatccatgtcgttgaggtccaggagaagtccagcggaaggacagcccactataaattgacatcaaccgtgatgctttggctccagacaaacaaaagcgggagtggcaccatgaacttgggaggctctcttaccagacagatggagaaggatgagactgtttctgactgttcgcctcatatagcaaacatcggccggctggtggaagacatggaaaacaagatccgcagtacattgaatgagatctacttcggaaagacgaaggatatcgtgaacggactgcgctctgtgcagacctttgccgacaagtctaaacaagaggctctgaagaatgacttggtcgaagccctgaaacgaaaacagcagtgctag

SEQ ID NO: 181554 - DNA, 366 bp, synthetic construct
  misc_feature 1..366: note = Description of Artificial Sequence: Synthetic coding sequence
  source 1..366: mol_type = other DNA
atgctgaaggtgcccagcctgtgcgaggacctgctgagcagcgtggatcagcccctaaagatcgctagggataaagtggtcggaaaggattacttattgtgtgactataaccgcgatggggattcgtaccgctcaccttggtccaacaaatacgacccccctctagaggatggtgctatgccgtccgctcggctgcgtaaactcgaggtggaggccaataacgccttcgaccaataccgagatctgtatttcgaggggggggtgagctccgtgtacctgtgggacctggatcacggattcgcaggggtgatcctgattaagaaggccggggatggttccaagaagattaaagggtgttgggattag

SEQ ID NO: 181555 - DNA, 1047 bp, synthetic construct
  misc_feature 1..1047: note = Description of Artificial Sequence: Synthetic coding sequence
  source 1..1047: mol_type = other DNA
atgtacaccgccatcccccagagcggcagccccttccccggcagcgtgcaggacccaggcctgcatgtgtggcgggtggagaaactgaaaccggtgccggtagcccaggaaaaccagggtgttttcttttcaggcgactcgtatctcgtgctacataacggtcctgaagaggtgtcccacctccacctctggataggccaacagagcagccgggatgaacagggggcttgcgctgtgcttgccgtccacctgaacactctgcttggcgaacgtcctgtgcaacaccgggaggtgcaggggaacgaatctgacctcttcatgtcttattttccccgcggcctgaagtatcaggaggggggcgttgaatccgccttccacaagacttcaaccggggctcccgcagcgatcaaaaaactatatcaggttaagggcaagaagaatatccgtgctactgaacgagctctaaactgggacagcttcaacacaggcgattgttttatcctcgacctgggccagaacattttcgcgtggtgtggtggcaagtccaacatattggaaagaaacaaggctcgcgaccttgcattggcaattagagattcggaaagacaagggaaggcccaggtagaaatcgtgactgacggcgaggagccagccgagatgatccaggtgctaggccccaagcccgctctaaaggaaggaaaccctgaagaagacctgactgccgataaagcaaacgctcaagccgcagccttatataaagtctccgatgccacaggccagatgaacctcacaaaagttgctgattcttctcccttcgccctggagctgctgattagcgacgactgttttgttcttgacaacggattatgcggtaagatatatatctggaaaggacggaaggcaaatgaaaaggaaagacaagccgcactgcaggtagccgagggttttatctccagaatgcagtacgctcctaatactcaggtggaaatcctgccccagggacacgagtcacctattttcaaacagtttttcaaagactggaagtag

SEQ ID NO: 181556 - DNA, 657 bp, synthetic construct
  misc_feature 1..657: note = Description of Artificial Sequence: Synthetic coding sequence
  source 1..657: mol_type = other DNA
atgtacaccgccatcccccagagcggcagccccttccccggcagcgtgcaggaccccgggctgcacgtctggagagtggagaagttaaagcctgtgcctgtggctcaagagaaccagggcgtgttctttagcggggattcctacctcgtcctgcacaatggccctgaagaagtctcccacctccacctctggattgggcagcagagttcgcgagacgaacagggagcctgcgccgtgttggcagtacacctgaacaccctcctgggagaaagaccggtgcaacacagggaagttcagggcaatgagtcagatctattcatgtcatactttcccagaggactcaagtatcaggagggcggggtggaatcggcattccacaagacctcaacaggcgcaccagcggctatcaagaagctgtaccaagttaaaggaaaaaagaacatacgggcgactgaacgggctctgaactgggactcctttaacactggagactgtttcatcctggacttggggcagaatatcttcgcctggtgcggaggcaagtctaatatcctggaaagaaacaaggcgcgagacctggcgctcgcgatccgggatagcgaaagacaggggaaggcccaggtggagattgtgaccgacggggaggagcccgcctag

SEQ ID NO: 181557 - DNA, 1047 bp, synthetic construct
  misc_feature 1..1047: note = Description of Artificial Sequence: Synthetic coding sequence
  source 1..1047: mol_type = other DNA
atgtacaccgccatcccccagagcggcagccccttccccggcagcgtgcaagacccaggcctccacgtgtggagggtggagaaattgaaacccgtgcccgtggcgcaagagaaccagggtgtatttttttcaggggacagctacctggttcttcataatggcccagaagaggtgtcacacttgcacttatggattggccaacagtcaagtcgtgacgagcaaggagcctgtgctgtcctggctgtgcacctgaatacacttcttggcgaaagacccgtgcagcaccgtgaggtgcagggcaatgagagtgatctgtttatgagctatttcccccgaggtctaaagtatcaagagggaggcgtcgagtctgcatttcacaagacaagcacgggcgcaccagcagctattaagaaactgtaccaagtcaagggcaagaagaatataagagcaaccgaaagagctctcaactgggactcgtttaataccggtgattgctttatcctggacctgggccaaaacatattcgcatggtgcgggggtaaatcaaatatattggagagaaataaggcccgagatttggctctcgccattcgagacagcgagaggcaagggaaggcacaggtagaaattgtcacggacggagaggagcccgcagagatgatccaggtactgggccctaaacctgccctgaaggaaggaaatccggaagaggacctgaccgctgataaggcaaatgcccaggctgccgcactttacaaagtcagcgacgcaacaggacagatgaacctaaccaaggtagccgactcatctccctttgccttggaacttctgatcagcgacgactgtttcgtgctcgacaatggactttgtggtaaaatctatatctggaaaggacgcaaggccaatgagaaggagcgccaggccgccctgcaggtggccgagggattcataagcaggatgcagtatgccccgaacacacaagtggaaattttgccacaggggcacgaatcccctattttcaaacagttcttcaaagactggaagtag

SEQ ID NO: 181558 - DNA, 1047 bp, synthetic construct
  misc_feature 1..1047: note = Description of Artificial Sequence: Synthetic coding sequence
  source 1..1047: mol_type = other DNA
atgtacaccgccatcccccagagcggcagccccttccccggcagcgtgcaggacccaggattgcacgtatggagagtggagaaactgaaaccggtcccagttgcccaagaaaaccagggagtgttctttagtggagattcatatttggtgttgcacaatggcccggaggaggtgtctcatctccacctgtggatcggccagcagagcagtagagatgagcagggagcttgtgctgtgcttgctgttcatcttaatacgcttctgggtgaaaggcctgtccaacatcgagaagtgcagggcaatgaatccgatcttttcatgtcctacttcccgagaggcctcaaatatcaagaaggcggggtagaatctgcattccacaagacatcgacaggtgcgcctgcggcaatcaagaaactttaccaggtcaaaggtaaaaaaaacattagagctacggagagggcactaaattgggacagcttcaatacgggcgattgttttattttagatctggggcaaaacatttttgcctggtgtggggggaagagtaacatattggagagaaacaaagcgcgggatcttgcactcgccataagggattccgaaagacaaggcaaggcccaagtagagatcgttacggacggtgaggagcctgcagagatgatccaggtgctgggacctaagccggcgctgaaagagggcaatcccgaagaagacttgaccgccgacaaggcgaatgctcaggccgccgctctatataaggtaagcgacgccaccggccaaatgaatctgacaaaagttgcagactctagtccgtttgcattagaactgctgataagcgacgattgttttgtattggataacggcctatgtggaaaaatctacatctggaaaggacggaaggccaacgaaaaggagcggcaagccgccctacaagtagccgaaggatttatctcacgtatgcagtacgcccctaatacccaggtagagattcttccccaggggcatgagagccccatttttaaacagtttttcaaagactggaagtag

SEQ ID NO: 181559 - DNA, 762 bp, synthetic construct
  misc_feature 1..762: note = Description of Artificial Sequence: Synthetic coding sequence
  source 1..762: mol_type = other DNA
atgtacaccgccatcccccagagcggcagccccttccccggcagcgtccaggaccccggattacacgtgtggcgcgttgaaaagctcaaacctgtaccagtggcccaggagaaccagggggtgttcttttccggggactcataccttgtgcttcacaatggaccggaagaagtgagccatttacatctgtggataggtcagcaatccagccgcgatgagcaaggggcatgtgcggttttggctgtgcacctcaacacgctcctcggggaacgccccgtgcagcaccgagaggttcagggtaacgaaagtgatctattcatgtcctatttcccacgcggacttaagtatcaagaggggggagttgagtccgcattccacaaaacttctacaggagctcctgccgcaattaagaagctctaccaggttaagggcaagaaaaacattagggcaaccgagcgggctctgaactgggactccttcaatacaggagactgctttattctggatcttgggcaaaacatatttgcgtggtgcggcggcaaaagtaacatattggaacggaacaaggcccgggaccttgccctggctattagggactccgagagacagggtaaggcacaagtggagatcgttaccgatggtgaagagcctgccgagatgattcaggtgcttggacccaagcccgctctgaaagagggtaatccggaagaagacttaactgcagacaaggcgaacgcacaggctgcggcactttacaaatag

SEQ ID NO: 181560 - DNA, 762 bp, synthetic construct
  misc_feature 1..762: note = Description of Artificial Sequence: Synthetic coding sequence
  source 1..762: mol_type = other DNA
atgtacaccgccatcccccagagcggcagccccttccccggcagcgtgcaggatcccggattacacgtctggcgcgtggaaaagttaaagccagtcccagttgcacaggagaaccagggcgtgtttttctccggggatagctatttggtgctccataacggccctgaggaagtgagtcatctgcatttgtggatagggcaacagtcgtcacgggacgaacagggcgcttgtgctgtgctggccgtccacctcaatactctgctgggagaaagacccgtacagcacagagaagtgcaaggaaatgaaagcgatttgttcatgtcctatttccctcggggactcaaataccaagagggaggagtggagagcgctttccacaagacatcaactggagctccggctgcgataaagaagttatatcaggtgaagggaaagaaaaacatcagggccaccgagcgggcgttgaattgggactctttcaacacaggagactgcttcattctcgatctgggacagaacattttcgcttggtgcgggggaaagagcaacattctcgaacggaataaagcacgagatcttgccctggctataagagattcagagaggcaggggaaagcccaggtggaaatagtgaccgatggcgaagagcctgccgagatgatccaggtcttggggccaaaacccgcacttaaggaggggaaccctgaggaggatctcaccgcggacaaagcaaacgctcaagccgcagccctgtataagtag

SEQ ID NO: 181561 - DNA, 762 bp, synthetic construct
  misc_feature 1..762: note = Description of Artificial Sequence: Synthetic coding sequence
  source 1..762: mol_type = other DNA
atgtacaccgccatcccccagagcggcagccccttccccggcagcgtgcaggacccaggtctacacgtctggcgtgttgagaagctcaagcctgtgccagtggcccaggagaaccagggcgtctttttttccggggactcctacctcgtcctgcacaatggaccagaggaggtaagccatttgcacttgtggatcggacagcaaagctctagggatgagcaaggagcatgcgccgttctcgcagtccacttaaacacactgttaggcgaaagacctgtccaacacagggaggtccagggcaatgagtcagacctctttatgagttacttcccccgcggactcaagtaccaagaaggcggcgtagaatcagcgttccacaagacatccacgggcgcaccagcggcaatcaaaaagctttaccaagtcaagggaaaaaaaaatattagagcaactgaaagggctctgaactgggattcatttaacacgggcgattgcttcatcttggacctcggtcagaatatttttgcttggtgtggtggcaaatctaacattcttgagcggaacaaagcccgggacctggcactcgccatacgcgactccgaacgtcaggggaaggcacaggtggagatcgtcacggacggagaggaacccgctgaaatgattcaggtgctgggccccaaacctgcgttgaaagagggcaaccctgaggaagacctgacggctgacaaagccaacgcacaggccgccgccctgtacaagtag

SEQ ID NO: 181562 - DNA, 984 bp, synthetic construct
  misc_feature 1..984: note = Description of Artificial Sequence: Synthetic coding sequence
  source 1..984: mol_type = other DNA
atgtacaccgccatcccccagagcggcagccccttccccggcagcgtgcaggacccaggcctgcacgtgtggcgggtggaaaaactcaagccggtgcctgtagcccaggaaaaccaaggtgtgttcttttctggcgattcctatctggtgctgcataacgggcctgaagaggtgtcccacctgcacctcaatacactgctgggcgagagacctgtccaacatcgcgaggttcagggcaatgagtcagaccttttcatgtcttattttcccagaggactaaaatatcaggagggcggcgttgagagtgcatttcataagaccagcacgggggcccccgcagccattaagaaactgtatcaggttaagggaaaaaaaaacattagagccacagaacgggctctgaactgggatagcttcaataccggggactgtttcatcctagacctaggccagaatattttcgcttggtgcggcggaaagtctaatatactggaacgcaataaggcgagggatttagccctcgccatccgtgacagtgagaggcaggggaaggcgcaggtcgaaatcgtgacagacggagaggagccggcggaaatgattcaagtgcttgggcctaagcctgctctgaaagagggaaatcccgaggaagatttgaccgctgataaggcaaacgcccaggcagccgctctgtacaaagtgtcagacgctacaggccaaatgaacttaaccaaggtggccgatagttctccgtttgcgctggaacttctgatttccgatgactgtttcgtgctagacaatggcctgtgcggtaaaatctatatttggaagggaaggaaggcgaacgagaaagaaaggcaggccgccctacaggtggctgagggcttcatatcacgtatgcagtacgctccaaacacccaggtggaaattcttcctcaggggcacgagtcacccatctttaagcagttcttcaaggactggaaatag

SEQ ID NO: 181563 - DNA, 654 bp, synthetic construct
  misc_feature 1..654: note = Description of Artificial Sequence: Synthetic coding sequence
  source 1..654: mol_type = other DNA
atggagggcagcttcagcgacggcggcgccctgcccgagggcctggcggaggaggccgagcctcagggtgctgcctggtctggcgattccggaaccgtttcccagagccactctagtgccagtgggccatgggaagatgaaggcgctgaggacggagctcctgggcgagacctgcctttacttcgccgtgctgctgcaggttacgcggcatgcctcctccccggtgctggcgcccgacctgaagtggaggcccttgatgctagccttgaggaccttctcacaagggtcgacgaattcgttggaatgcttgacatgctgagaggggacagctcacatgtcgtttctgagggcgtacctcgcatccacgcaaaggcagccgaaatgagaaggatctatagtaggatagaccgcctcgaagcgttcgtgagaatggttggtggacgggtggcaagaatggaggagcaggtcactaaggcggaggcggaactgggtacattcccgcgtgccttcaagaagcttttgcatacaatgaacgtccccagcctattttcgaaatcggccccatcacgtcctcagcaagccggctatgaggctccagtgctgttccgcacagaggattattttccatgctgctcagagaggcctcagctgtag

SEQ ID NO: 181564 - DNA, 6678 bp, synthetic construct
  misc_feature 1..6678: note = Description of Artificial Sequence: Synthetic coding sequence
  source 1..6678: mol_type = other DNA
atggccgccctggtgctggaggacggcagcgtgctgcggggccagcccttcggcgccgccgtctctactgcaggtgaggtcgtctttcaaacggggatggtgggctacccggaggcactgaccgatcccagctataaagctcaaatattagtgctgacatacccactgatcggaaactatgggattccccctgatgagatggacgagttcggtctctgcaagtggttcgaatcctctggcatccacgtggccgcacttgtggtgggagagtgctgtcccactccatcccactggtccgcaacaagaaccctccacgagtggcttcagcagcacggcatacccggcctgcagggggttgacactagggagctgaccaaaaaattgagagaacagggctctttgctgggtaagctcgtgcagaacggtacggagcccagtagtctccctttcctggacccaaacgcacgccccttggtgccagaagtgagcatcaaaacaccacgagtgtttaatactggcggtgcccctcgcatcttggctttggattgcggattgaagtacaaccaaatcaggtgtctatgccagcgcggcgccgaggtgacagtggtgccttgggatcatgctctggactcacaggagtatgagggacttttcctttccaacggccctggcgatcctgctagctaccccagtgttgtgtcaactctaagtagggttctgtccgagccgaaccctcgcccagtgtttggcatctgcctgggacaccagctgctggctctcgcaatcggcgcaaagacttacaaaatgcgctacggtaaccgaggccataaccagccttgtttgctcgtgggctctggaagatgttttctgaccagccagaaccatggatttgccgtggaaacagactctctgccggcggattgggcgcctctcttcaccaatgctaatgacggttccaacgagggtatcgtacataattccctgccgttcttttcggtgcaatttcacccagagcaccaggcgggtccgtccgatatggaactcctgttcgatatcttcctcgagacagttaaggaggctacagcaggcaacccgggtggtcagacggtgcgcgagaggctcacagaaagactttgtccacctgggatccctaccccaggttccggtttgcctccaccacgtaaggtcctgattctgggatctgggggccttagcatcggccaagcaggagagttcgactactctggctctcaggccatcaaggcgctgaaagaggagaatatccagactctactcattaatccgaacatcgcgacagtccagacatcccaaggtcttgccgataaagtgtatttcctccctatcactcctcactatgtgacacaagtgatccgcaatgaacgacccgatggagtcctgttgacattcggtggtcagactgccttgaattgtggggtggagttaacaaaagccggcgttttggctcgctatggagtaagagtactgggcacaccagtggagaccatcgagcttaccgaagatagacgagcctttgctgcgagaatggcagaaataggtgagcacgtcgctccgagtgaggctgcaaactcccttgagcaggctcaggccgcagctgaacggctgggttatccagtgctggtcagagcagccttcgcattgggcggtctggggagtggattcgcgagcaatcgggaggaactcagtgccctggtagctccagctttcgcacatacgagtcaagtgcttgtggacaaatcgctgaaggggtggaaggaaattgaatacgaggtggttcgcgacgcctatgggaactgtgtcacagtgtgcaacatggagaacctcgatccactcggcattcacacaggcgaaagcatcgtggttgcgccatcccaaaccctgaatgatcgagagtatcagctgctgcggcagacggctattaaggtcacacagcatcttggcattgtcggcgagtgcaacgtacagtacgcacttaacccagagagtgagcagtactacatcatcgaggtcaatgcgagactgtcccgatcatccgccctggccagcaaggccaccgggtaccccctggcatacgtcgccgccaagttggctctggggataccactaccagaactacggaactctgtgacgggcggaacagctgcctttgagccgtctgtcgactattgtgtggtgaagataccccgttgggaccttagtaagttcctgagagtgtcaacaaaaataggctcttgtatgaagtccgtcggagaagtgatggggatcggtaggagtttcgaagaagcctttcagaaggctcttagaatggtggatgagaactgtgtgggctttgatcacaccgtaaaacccgtgagtgacatggaactcgagacccccacagataaaagaatattcgttgtggccgccgcattatgggctggatacagtgtggaccggctctatgaactcacaagaatcgacagatggttcttgcaccgcatgaaaagaatcatcgcacatgcccagctgctggagcagcatcgaggtcaacctctaccacccgacttgctgcagcaagccaaatgcttagggttttccgacaaacagatcgcactcgccgtgttaagcacggagcttgccgtacggaaactgcgccaggaattgggaatttgtcccgcggtcaagcagattgacactgtcgctgctgaatggcccgcccagactaactatctttacctcacatattggggaaccacacatgatcttacatttagaacgccccacgtgctggtgttgggtagcggggtgtacagaatcggatccagcgtcgaattcgactggtgtgctgtggggtgcatccaacaactccgcaaaatgggatataaaaccatcatggtgaattataaccccgagactgtcagcacagattatgacatgtgtgaccgcctgtacttcgatgagatcagctttgaggtggtcatggacatctatgaactggaaaaccctgagggggtgatcctctctatgggcggtcagcttcctaataatatggccatggccctgcaccggcagcaatgccgagtcctcggaacttctcctgaggccattgactcagctgagaacaggttcaaattctcccgtttgctggatactatcggcatctcgcagccacagtggcgggagctgtcggacctggagtcagcacggcaattctgccaaacagtcggatatccctgcgttgtgcgccccagctatgtattgagcggagccgccatgaatgtcgcatacactgatggagatctggagagatttttatccagtgcagctgcggtatccaaggagcaccccgtggtaatctccaaattcattcaagaagctaaagagattgacgtcgatgcggttgcctctgatggggtggttgccgccatcgcaattagcgagcacgtggagaatgctggcgtgcacagcggcgacgcaacccttgtgacacctccacaggacatcaccgcaaagaccctggagagaataaaggccatagtgcacgctgtgggacaggagctgcaggtgacaggcccctttaacctgcaattgattgctaaggacgaccagctgaaggtcattgagtgtaatgttagagtttctagaagtttccctttcgtgtccaaaacattgggggtggatctcgtggcactggccacacgtgtgattatgggggaggaggttgagcctgtcggactgatgaccgggagcggggtcgtgggcgtgaaagtaccccagttcagcttttcacgcttggcaggggctgatgttgttctgggggtcgagatgacaagcactggagaggtcgccggcttcggcgaatcccggtgcgaagcctaccttaaggccatgctctccaccggcttcaagattccaaaaaaaaacattctgcttacaatcgggtcctacaaaaacaagagcgaactgctcccgactgtcagacttcttgagtctctcggctacagcctgtacgcaagtctgggaacagctgatttctacacggagcacggtgtgaaggtgacagctgtggactggcatttcgaagaagccgtggacggcgaatgccccccgcagcgatcgatactcgagcagttagccgaaaaaaacttcgagctagtgataaacttgtctatgcggggcgccggggggcgcaggctgtcctcctttgtgaccaagggctatagaacccgccggctcgctgcggacttctctgtgcctctgatcatcgacattaaatgtactaagttgttcgttgaagctctcggccagatcgggcccgcaccccctctgaaggtccatgtcgattgcatgaccagccagaagctggttcgtctgccgggcctcatagatgtccatgtccatctgcgggagcctggtggcacgcataaagaggacttcgcttccggtacagcggccgcacttgccggaggaatcactatggtctgtgctatgcccaacacacgaccacccatcattgacgcccccgctcttgctttagctcagaagctggcagaggcgggagcacgctgtgactttgccttgtttttaggcgcctcctccgagaatgccgggactctgggcacggtggctggcagtgctgcgggcctgaaattgtaccttaacgaaacattctcggagctccgcctggacagcgtagtacaatggatggagcatttcgagacttggccatctcatcttcccattgttgctcacgcagaacagcagacagtggccgcagtcctcatggtggcccagctgacccagcgcagtgtgcacatctgccacgtcgcacggaaagaggagattctgttgatcaaagccgctaaagcccggggactgccagtcacttgcgaggtggccccgcatcatctcttcctgtcccatgatgacttagaacgactcggtccggggaagggagaagtgcgtcccgaactgggaagtagacaagatgttgaggctctatgggaaaatatggctgtcatcgattgttttgcaagcgaccacgctccacacaccctcgaagagaagtgtggctcacgacccccccccggtttccccggactagaaacaatgctcccactgctgctgaccgcagtgtccgaaggccgtttgtccctagatgacctgctgcaaaggctccaccacaaccctcggagaatattccacctgcccccccaggaggacacgtatgtcgaggtggacctagagcacgagtggaccattcccagccacatgccattttccaaagcccattggacaccctttgagggccagaaagtgaaagggacagtacgtagggtggtcctgagaggggaggtggcttacatcgacgggcaggtcctggtccctcccgggtacggtcaggacgtccggaagtggcctcagggcgctgtgccacaactccccccttcagccccagctacgtccgaaatgactactacacccgagcgccccagacggggcatccctggacttccagacggaaggtttcacttgcctcccagaattcatagagcctccgaccccggcctgccagctgaggagccgaaagaaaagtcctcccgaaaggtggcagagccagagttgatgggtacacccgacggaacttgctatcctccgcccccagtcccacggcaagcaagcccccagaatctcggcacgccaggtcttctgcatccgcaaacgagtcctctgctgcactccctcgtaggacagcatattctgtctgtgcagcaatttactaaggatcagatgtctcacctcttcaacgtagcacacacgctgcgaatgatggttcagaaagagagatcattagacatcctgaaaggaaaagtgatggctagcatgttctatgaggtgagcactcggacatcctcatccttcgctgcagctatggcaagactgggtggagctgttttgtcgttctccgaggcgacatccagcgtccaaaaaggagagagccttgccgattccgtgcagaccatgtcctgttatgccgacgtcgtcgtgttgcgtcacccccagcctggagctgtggagctcgctgcaaaacactgcagacgccctgttatcaacgctggggacggcgtgggtgagcatccaactcaggccctgctggacatctttactatacgtgaagaactgggtaccgtgaacggtatgaccatcacaatggtcggcgatctgaaacacggcaggacagtgcattccttggcttgtttgctgacacagtatcgggtatctctcagatatgtcgcccctcctagcctgagaatgcctcccactgttcgcgccttcgttgcttccaggggcacaaagcaggaagagttcgaatccattgaagaagcactaccggacaccgacgtgttatacatgactcggattcagaaagagaggttcggttcaacacaggaatacgaggcgtgttttgggcagtttattttgacacctcatattatgactcgcgcaaagaagaagatggtcgtgatgcacccaatgccaagagtgaacgaaatcagtgtggaagtggatagtgatcctagggccgcttatttcaggcaggccgaaaatggcatgtatatccggatggctctgctcgccaccgtgcttggtagattttag

SEQ ID NO: 181565 - DNA, 1440 bp, synthetic construct
  misc_feature 1..1440: note = Description of Artificial Sequence: Synthetic coding sequence
  source 1..1440: mol_type = other DNA
atggagaagggcctgaccctgccccaggactgccgggacttcgtgcactccctaaaaatgagatcaaaatatgcactatttctcgtcttcgtagtcatcgttttcgtgtttatagagaaagaaaacaagatcatcagccgagtgagcgataaactcaagcagatcccccaagcccttgctgacgcaaactcaactgacccggccttaatcctcgccgagaatgccagcctcttgagcttgtccgagctggactctgccttcagccagttacaatctcgcctcaggaatctcagtcttcagcttggtgttgagcccgccatggaagccgcgggggaggaagaagaagagcagcggaaagaggaagagccgcccaggcccgcggtggcaggcccacggcggcatgtgctgctcatggcaacaacgaggaccggttcctccttcgttggcgagttctttaaccagcagggaaacattttctacttatttgaacctctgtggcatattgagaggaccgtgtccttcgagccaggcggtgcgaatgctgccggttccgccttagtgtacagagacgtcctcaagcaattgttcctgtgtgatctctatgtgctggagcactttattaccccactaccagaagatcacctgacacagttcatgttcaggagaggctctagccgatccctttgcgaggatccggtgtgtacaccctttgtaaaaaaagttttcgaaaagtatcattgtaagaatcgtcgctgtgggccgttgaacgtgaccctggctgccgaagcttgcaggcggaaagagcacatggcgctcaaagctgttcgaattagacaactcgagttcctgcagcccttagctgaagaccctagattggacctaagagtgatccagctcgtgagagatcccagagcggtgttagcttctaggatggtcgcatttgcaggcaagtacaagacatggaaaaagtggcttgatgatgaaggtcaggacggcttgcgcgaagaggaggtgcagcggctgaggggaaattgtgagagcatccgtctgagcgcagaactgggactgcggcagccagcttggcttaggggtagatacatgctcgtgcgctacgaggatgtagctcgtggcccacttcagaaagctagggagatgtatcggttcgccggaattcccttgactccgcaggtggaagactggatccagaagaatactcaagctgctcacgatggcagcgggatatactcaactcagaagaatagttcagagcagtttgagaaatggcgattctccatgccatttaagcttgctcaggtggtacaagcagcatgtggccctgccatgcgcttattcggatacaaactcgctcgggatgctgccgccctcacaaatcggagtgtttcactcttggaagaaagggggaccttctgggttacctag

SEQ ID NO: 181566 - DNA, 1236 bp, synthetic construct
  misc_feature 1..1236: note = Description of Artificial Sequence: Synthetic coding sequence
  source 1..1236: mol_type = other DNA
atgcagtgcagctggaaggccgtgctgctgctggccctggccagcatcgcaatacagtatacggccattaggacattcacagccaaatccttccacacctgtccaggacttgctgaagctgggctggctgagcgactctgtgaagagagcccgacctttgcatacaatctgtctcggaagacccatatccttatacttgcgactacccggagtgggtcctcttttgtcggccaactgttcaaccagcatctcgatgtattctacttgtttgagccactgtatcatgttcagaacacactaataccgcggtttacgcagggtaagtcacctgcagaccgccgcgttatgctgggcgcttcacgcgacttgcttcggtcattgtacgattgtgacctatactttctggagaattatataaagcccccccccgtgaatcacaccacggaccggatctttagaaggggggctagccgcgtcttatgctccagacccgtgtgtgaccctccaggaccggctgatttggtgttggaggaaggggattgtgtgaggaagtgcggtttgctgaatctgacggtcgccgccgaagcctgtagagaacgcagccatgttgccattaagacagttcgggtgcccgaggtcaacgacctgagggcgctggtggaagatccacgcttaaatctcaaagttattcagttagtgcgggaccccagaggaatcttagcgagtcgcagcgagacattccgcgacacttaccgtctgtggcgactgtggtatgggaccggacggaagccttataatttggatgtgacgcagctgacaactgtgtgtgaggatttctccaattccgtctcgacaggcctcatgcgaccgccttggcttaaggggaagtacatgcttgtcagatacgaagacctagctagaaatcctatgaagaaaaccgaggaaatttacggattccttggaatcccacttgattcccacgtcgcccggtggatacaaaacaacacaagaggggatcccactttaggcaagcacaagtatggtaccgtgcggaactcggccgcgactgcagaaaagtggcgtttccgactgtcctatgatatagtggccttcgcacagaacgcctgccaacaggtcttagctcagctgggatacaagattgcagcctctgaagaggagcttaagaacccgtcagtgagcctggtcgaagaaagagactttcgccctttctcttag

SEQ ID NO: 181567 - DNA, 1131 bp, synthetic construct
  misc_feature 1..1131: note = Description of Artificial Sequence: Synthetic coding sequence
  source 1..1131: mol_type = other DNA
atgttcccccggcccctgacccccctggccgcccccaacggcgccgaaccgctggggcgggccctacggagagcaccactcggccgcgccagagccggactcggcggacccccgcttctactcccttcaatgcttatgtttgcagttatcgtggctagctccggcttgctccttatgatcgagcggggtatccttgcagaaatgaaacctcttccactccatcctccaggtcgagaaggaacggcctggcgcggcaaggccccaaagccgggtggcctttcactgcgggccggcgatgcagacctccaggtgagacaggacgttagaaaccgcacactgagagcagtgtgcggccagccagggatgccacgggacccttgggatcttcccgtcggacagagaaggacactcctgcggcatatcttggtgtccgatcgctataggttcctatattgctacgtgcccaaggtggcttgttcaaattggaaacgagtcatgaaggtgctagctggagtgctagactcagtagatgttcggttgaagatggaccaccgcagtgatctggtatttctcgccgatttgagaccagaggaaatccggtaccgacttcagcattactttaagtttctcttcgtccgggagcctcttgaacggctgctctcagcgtacaggaacaaatttggtgaaatccgggagtaccagcaacgctatggggcagagatagtgcgccgttacagagctggagccggaccaagtccagcaggtgatgacgtcacatttccggaatttctgcgctacctagtggacgaggatccggaacgaatgaatgagcattggatgcccgtctaccatctgtgccagccatgtgcagtccactacgacttcgtcgggagctacgagcgattggaggccgacgcaaaccaggtactggagtgggttagggcacctccacacgtgcggttcccagccagacaggcgtggtaccggccagctagtcccgagagcctgcactaccatctatgttctgctcctagagctctccttcaggatgtcttgcccaagtatatcctagatttctctctgttcgcttacccactgccaaacgttaccaaggaagcttgccagcagtag

SEQ ID NO: 181568 - DNA, 1275 bp, synthetic construct
  misc_feature 1..1275: note = Description of Artificial Sequence: Synthetic coding sequence
  source 1..1275: mol_type = other DNA
atgaccctgcggcccggcaccatgcggctggcctgcatgttcagctctattctcctgttcggcgcagccgggcttctgcttttcatatctctgcaggacccaaccgaattggctcctcagcaggtcccgggtattaagtttaatatccggcccaggcagccccaccatgacctgccccctggcggtagtcaggacggcgatctgaaagaaccaaccgagcgcgtcacacgggacctgtcttccggagctccccgcggcagaaacctcccagcccccgatcagcctcagcccccactgcagagaggtacccgcttgcgcttgcgccagaggcgacggaggctactgatcaagaagatgcccgccgctgccaccatccctgctaacagcagcgacgctccattcatcaggcctggtccagggaccttggacggtcgatgggtgtcgctgcaccgctcacagcaggagcggaagcgggtaatgcaggaagcctgcgctaagtaccgggcttccagcagcagaagggctgttactcctcgccatgtaagccggatcttcgtcgaggaccggcatcgggttctgtactgcgaagtcccaaaagcaggttgctccaactggaagagagtgctcatggtccttgcggggttggcatccagtacggccgacatacagcataataccgtccactacggatctgctcttaaacgactggacaccttcgataggcagggcatcctccacaggctgtctacttacaccaagatgctgtttgtccgggagccctttgaacggttagtgtccgcattccgggataagtttgagcatcccaatagctattatcatccagtgttcgggaaggccattctggccaggtatagggctaacgcctcacgcgaagcccttcggaccggaagcggtgtgagattcccagaattcgtccagtatctgctcgatgtacaccggcctgtgggaatggatatccattgggaccacgtttcgagactgtgttccccctgccttatcgattatgacttcgtggggaagtttgaatctatggaggacgacgccaacttcttcctgtctctgattcgggctcccagaaatctaacctttccaagattcaaagatcgccactcccaggaggcgaggacaaccgcaagaatcgcacatcagtactttgcccaattatcagcactgcaacgccaaaggacatatgacttttattatatggattaccttatgttcaattactccaaaccctttgcggatctctactag

SEQ ID NO: 181569 - DNA, 1275 bp, synthetic construct
  misc_feature 1..1275: note = Description of Artificial Sequence: Synthetic coding sequence
  source 1..1275: mol_type = other DNA
atgaccctgcggcccggcaccatgcggctggcctgcatgttcagctcaatactgctgttcggcgccgcaggactcttgctgtttatatccctgcaagatcccaccgagctagcacctcagcaagtcccgggcatcaagtttaatatacgcccacggcagccccaccatgatctgccacctgggggttcacaggacggagacctaaaagaacctactgagagggttacccgggatctttcttccggagccccgcgcggtcgaaacctccccgctccagaccaaccccaaccgcccctgcagcgggggacgcgcctgcgcctaagacagcgacgccgccgtctgctgatcaaaaagatgccggccgctgcaaccattcctgcaaactccagcgacgctcccttcattcggccaggaccaggcactttggacgggagatgggtcagtctgcatagaagccagcaggagcgaaagcgcgtcatgcaggaagcatgcgcaaagtaccgcgcctctagcagccgaagagctgtgactccccggcacgtgagccgaatctttgttgaagatcggcatagagtactgtactgcgaagtccccaaggccggatgttccaactggaaaagagtcctgatggtcttggccggcttagcatcttccacagccgacatccagcataatactgtccattatggcagcgcactgaagaggctggacaccttcgatcgccaaggaattctgcacagacttagcacctacacgaagatgctgttcgtgcgcgaaccgttcgaacggttagttagcgctttccgggacaaattcgagcatccgaactcatactatcacccagttttcggaaaagctatactggccagataccgcgctaacgccagtagagaggcccttcgaacagggtctggagttcgcttcccagagttcgtccaatacctgttagatgttcaccgtcctgtgggaatggacattcattgggatcatgtatcgaggttgtgctccccatgccttatcgactatgacttcgtaggcaagttcgaatctatggaggacgacgctaatttcttcctttccctgatccgggccccgagaaatcttaccttccctagatttaaggataggcacagccaggaagcgaggaccactgctaggatcgcacaccagtactttgcccagctctctgccctgcagaggcagagaacatatgacttttactatatggattatctgatgtttaactacagcaagcctttcgctgatctgtattag

SEQ ID NO: 181570 - DNA, 1275 bp, synthetic construct
  misc_feature 1..1275: note = Description of Artificial Sequence: Synthetic coding sequence
  source 1..1275: mol_type = other DNA
atgaccctgcggcccggcaccatgcggctggcctgcatgttcagctcaatcctcctattcggtgctgccggactgctcctgtttattagtcttcaggacccaacggagcttgcaccccagcaggtccctggcatcaaatttaatattcgtccccgtcagcctcatcacgacctccccccaggcggttctcaggacggcgatttaaaggagcctacagaacgcgttacaagagacttgtcttccggcgccccccgcggaagaaaccttcccgcgcccgatcagccccagcccccgctgcaacgcgggaccaggttgcgcttgagacagaggcgaaggcggcttctgatcaaaaaaatgcctgcggcagccaccatccccgcaaactcatctgacgcacccttcatcaggccgggccctggaactctggacggacgctgggtgtccctgcaccgatcccagcaggagagaaagagagttatgcaggaggcctgcgccaagtatcgcgctagtagcagccgtcgggcagtgaccccgaggcacgtatcccggatatttgtggaagataggcacagggtgctttattgcgaagtgcctaaggcagggtgcagtaactggaagagggtactgatggtgttagctggccttgcgtcgtctacagccgacatccagcataacactgtccactatgggagcgctcttaaacgcttagatacatttgaccgccaggggatcctacatcgactgagtacttacacaaagatgctcttcgttcgggagcccttcgaaagattagtttctgcattccgtgacaagttcgagcaccctaacagttattatcatccagtgttcggaaaagcaatattagcccgctaccgtgccaacgccagtcgagaggctctcaggaccgggagcggggtcagattcccagagttcgtacagtacctcctcgacgtccatcgaccagttggcatggatatccactgggaccatgtgagtaggctctgcagcccgtgtctcatagattacgactttgtgggaaagttcgagtccatggaagatgacgccaacttctttctttctctcatcagggctccaaggaacctgacgtttccacgatttaaagaccgccacagtcaggaggccagaactaccgcccgcattgcacaccaatatttcgcccagctgtctgcccttcaacgacagagaacatacgacttctactacatggattaccttatgttcaattactcgaaaccctttgccgacctgtactag

SEQ ID NO: 181571 - DNA, 1686 bp, synthetic construct
  misc_feature 1..1686: note = Description of Artificial Sequence: Synthetic coding sequence
  source 1..1686: mol_type = other DNA
atgcggcactgcatcaactgctgcatccagctgctgcccgacggcgcccacaagcagcaggtgaattgccagggtggaccacaccatggacaccaggcctgtcccacctgtaagggggagaacaaaattctgtttagggtcgatagtaagcagatgaaccttcttgcagtactggaagtgcgtaccgaaggaaatgagaactgggggggcttcttgcggttcaagaaggggaagcggtgctcactggtcttcggtcttatcatcatgaccctcgtaatggcatcttatattctgagcggcgctcaccaagaactgctgatttcatcccctttccattacggaggctttccatctaatcccagccttatggactcggagaatccttcggacacgaaggaacaccaccaccagtccagtgtaaacaatatttcttacatgaaggattacccctccatcaaactaataattaattccatcacgacaaggatcgaatttaccacacgccagctgcccgatctggaagatctgaaaaaacaggaactgcacatgttcagtgtgatacccaacaagtttttgcccaattccaaaagcccgtgctggtatgaagagttcagtggacagaacaccacagatccatacctgacaaacagttatgtgctctactctaagcgatttcgttccacctttgacgccctgaggaaagcgttctggggccacttggctcacgcacacggaaagcacttccgtctgcgatgcctaccacacttctacataattggccagcccaagtgtgggactaccgatctgtatgatcgccttcggctgcatcctgaggttaaattcagtgccattaaagagcctcactggtggacgcggaagcggtttggcatcgtaaggttacgggatgggcttagagacagatatcccgtcgaagattacctggacctttttgacctcgcggcccatcagattcatcaggggctccaggcctccagtgccaaagagcaaagtaagatgaataccatcattattggcgaagcaagtgccagcacgatgtgggataataatgcctggaccttcttttatgacaactcaacggatggcgagccacctttccttacacaggactttatccacgcgtttcagccgaatgcacggttaatcgtcatgctgcgtgatccagtggagcggttgtattccgactacctgtatttcgcttctagcaataagagtgctgatgacttccacgaaaaggtcaccgaagcactgcagctatttgaaaattgcatgctagattacagcctgagagcttgcgtttataataacaccctaaacaatgctatgccagtgaggctccaggtgggcctctatgctgtctatcttctggactggctctcagtcttcgacaagcagcagttcctgatcctacggctggaggaccacgcatctaatgtgaaatacacaatgcacaaagtattccagtttctgaacctcggccccttatctgaaaagcaggaggccctgatgacaaagtcccccgcttccaatgcacgcagaccagaggaccgaaacctgggccccatgtggccaattacacaaaagattttgagagatttctatcgaccctttaatgcccgcttggcgcaagtcctggcagacgaggcttttgcctggaagactacatag

SEQ ID NO: 181572 - DNA, 1521 bp, synthetic construct
  misc_feature 1..1521: note = Description of Artificial Sequence: Synthetic coding sequence
  source 1..1521: mol_type = other DNA
atgcggcactgcatcaactgctgcatccagctgctgcccgacggcgcccacaaacagcaggtcaattgtcagggcggacctcaccatggccaccaagcctgccccacttgcaagggagagaataagatcctcttccgcgtagattcaaagcagatgaacctcctcgccgtgctggaggttaggaccgaagggaacgagaactgggggggtttcctccgatttaagaaggggaagcggtgctccctggtttttggtctcataattatgaccttggtgatggcatcttatattctcagtggagcccaccaggaactgctcatttcttccccatttcattatggcggttttccgagcaacccctcactgatggattcagaaaatccatccgacacgaaagaacaccaccatcagtcatctgtgaacaacatttcctatatgaaagattacccgagtattaaactgatcatcaatagtatcaccacacggattgagtttactaccaggcaactgcctgacttagaagatctgaagaaacaggaactccacatgttttctgtgatccctaataagttccttcctaattccaaatcgccctgttggtacgaggagtttagtggccagaatactaccgatccttatttgactaatagttacgtgctttatagtaagcgcttccggagcacatttgatgcgctgcgcaaagctttctggggccacttagcgcacgctcatggcaagcactttagacttagatgcctcccgcacttctacattatcggacagcccaagtgcggcacgacagacctttacgatcgcctcagattgcatcctgaggtgaagtttagtgctattaaggagccacattggtggactcgcaaaaggttcggaatagtgagactcagagatggtctccgcgaccgctaccccgtagaggattatttagatctgtttgaccttgcggctcatcagatccaccagggcctgcaggcctctagcgctaaagagcagagcaagatgaataccattatcatcggcgaagccagtgcctctacaatgtgggacaacaacgcctggaccttcttttatgacaattcaactgatggagaacctccgtttctgactcaggatttcattcatgcttttcaacccaacgctcgcctaatcgtaatgctgcgtgaccctgttgagcggctgtattcggattatctctacttcgcctcttcgaacaaatccgcagacgattttcatgaaaaggtgaccgaggccttgcagctcttcgaaaactgcatgttagactactctttacgcgcttgtgtgtataataacacactgaacaacgctatgcctgtgtgcactccacctccccggacacctagggccggtccttggcagaaagagctcgtgtgctgttattatgcttccggaattgtgggattgcggttttctattggtactgaaagatccgtgcttatgtgcaaatgctgcagtcctttatttatggatgtgaaggccgagaactag

SEQ ID NO: 181573 - DNA, 624 bp, synthetic construct
  misc_feature 1..624: note = Description of Artificial Sequence: Synthetic coding sequence
  source 1..624: mol_type = other DNA
atgcggcactgcatcaactgctgcatccagctgctgcccgacggcgcccataagcagcaggttaactgccagggcgggccccatcatggccaccaggcttgccccacatgcaagggggagaacaagatcctgtttcgggtagacagcaaacaaatgaacttgttggcggtcctggaagttcggacggaagggaatgaaaactgggggggcttcctgagattcaagaaggggaagagatgtagcctcgtgttcgggctaattattatgacgctggtgatggccagttatatcttgagtggggcccaccaggaactcttgatatcttcaccctttcactacggagggtttccttctaatcctagccttatggattcagaaaacccgagcgataccaaagaacatcatcatcagagcagcgtgaataacatctcttacatgaaggactacccatccataaagttaatcatcaattctatcacaacacgaatcgaattcaccacaagacagctaccagatctggaagacctgaagaagcaagaactccatatgttttcggtgatcccaaacaaattccttcctaagcacaacgcccaggccgagctaggtttgaacgtggcctgctag

SEQ ID NO: 181574 - DNA, 1686 bp, synthetic construct
  misc_feature 1..1686: note = Description of Artificial Sequence: Synthetic coding sequence
  source 1..1686: mol_type = other DNA
atgcggcactgcatcaactgctgcatccagctgctgcccgacggcgcccacaagcaacaggttaactgccagggcggcccacatcatgggcaccaggcctgcccaacctgtaaaggagaaaacaaaatcttgtttcgggtcgatagtaaacagatgaatttgttggctgtgttggaggtgaggaccgagggtaatgaaaattggggagggttcttacgattcaagaaaggaaaaagatgcagcttggtcttcggattgataattatgacactggtgatggccagctatattctcagcggggctcatcaggaattattgatttcatctccttttcactatggcggattcccctcaaatccttctctgatggatagcgagaatccatctgacaccaaggagcatcaccaccagagttcagtgaacaacatctcatacatgaaggactacccctccatcaagctgattattaactccattaccaccagaatagaattcactacaagacagttacctgacttagaagatcttaaaaagcaggagctgcacatgttttccgtaattccgaataaattcctgccaaattccaaatcaccctgttggtacgaggagttttcaggccagaacacaaccgatccgtatttgactaatagttacgtgttatactccaagaggtttcgatccacgttcgatgctctgagaaaggcattttggggtcatttggcccacgcgcatggcaagcacttcagactgcgctgcttaccgcacttttacatcatcggacagcccaaatgcgggaccaccgatctgtacgatagactgcgcttgcacccagaggtgaagttcagtgcgataaaagagccccactggtggacaaggaaacggttcggcatcgtgcgccttagggatgggctgagggacagataccccgtggaagattacttggacctgtttgacttagcagcccatcagattcaccaggggcttcaagcttcctccgccaaagaacagtctaagatgaatactatcatcatcggggaggctagcgcctctactatgtgggacaacaatgcctggacgttcttctacgacaacagcaccgacggggagccccctttcctgacccaagacttcatccacgcctttcagccaaatgctaggctgatcgtcatgctgagagatccagtcgaacgtctctacagcgattacctgtacttcgccagctcaaacaaaagcgccgacgacttccacgaaaaagtaaccgaagcactccagcttttcgaaaactgtatgttggattactctctgagggcctgcgtgtataataacaccctgaacaacgctatgcccgtgagactgcaggttgggttgtatgccgtgtatctccttgattggttgtcagtctttgacaaacagcagtttctgatcctgaggctcgaagatcatgcctcaaacgtgaagtatacaatgcacaaagtctttcaatttctgaacctggggcccctttctgagaagcaggaggctttgatgactaagtcacccgctagcaacgcccgccgccccgaagatagaaaccttggcccaatgtggccaattactcagaagattctgcgggacttctacagaccattcaatgcccgccttgctcaggtacttgccgacgaggctttcgcttggaaaacaacatag

SEQ ID NO: 181575 - DNA, 1449 bp, synthetic construct
  misc_feature 1..1449: note = Description of Artificial Sequence: Synthetic coding sequence
  source 1..1449: mol_type = other DNA
atgcggcactgcatcaactgctgcatccagctgctgcccgacggcgcccataaacagcaagttaattgccaaggcggcccgcatcacggtcaccaggcttgccccacatgtaaaggtgaaaataaaattctgtttcgtgtggatagcaagcagatgaatctgttggctgtgcttgaagtaagaactgagggcaacgagaattggggagggtttcttcggtttaagaagggcaaacggtgttccctggtgtttggacttatcattatgacactcgtcatggcctcgtacatactctcaggagcccaccaggagttgctcattagtagtcccttccactatggcggattccccagcaacccatcccttatggacagcgaaaatcccagcgacacaaaagagcatcatcaccagagctctgtcaataacatctcatatatgaaggactatcccagcattaaactcatcattaactccataacaacaaggatagaatttactacaaggcagctaccagacctagaggacttgaagaagcaagagctgcatatgttcagcgtgataccgaacaaatttctgcctaattcgaaatcaccttgttggtacgaagagtttagcggacagaatacaacagacccttacctcacaaatagctacgtactctactctaaaaggttccgaagtacgtttgacgccttgaggaaagctttttggggacacctcgcacatgcgcatgggaaacacttccgactccgatgcctcccacatttctatattatcggccagcctaagtgtggcaccaccgatttgtacgaccgcttaagacttcaccccgaggtgaaattcagcgcaatcaaagaacctcattggtggactcgcaaacgctttggcattgttaggctgcgagacggactcagagatagatatcccgttgaggactatctcgacttgtttgacctggctgctcatcagattcatcaggggcttcaggcatcgtccgctaaagagcagtcgaaaatgaatactatcataattggggaagcatctgcctcaaccatgtgggacaataatgcttggactttcttctatgataacagcaccgatggggaacccccatttctgacgcaggacttcattcacgcctttcaaccgaatgccaggctcattgtgatgctgagagatcccgtggagagactctatagcgattatctgtatttcgcctcatccaataaatctgctgatgatttccacgagaaagtgactgaggcactgcaactcttcgagaactgcatgctcgattactccctgagggcttgtgtctacaataatacattgaataatgcaatgccggtctgtactcccccccctgttcccccagagctggcacccggccggcgttcctggtttgtcgtgatcatgcaggccgccctgtgggtgtgtgtaagcgcatag

SEQ ID NO: 181576 - DNA, 1236 bp, synthetic construct
  misc_feature 1..1236: note = Description of Artificial Sequence: Synthetic coding sequence
  source 1..1236: mol_type = other DNA
atgggcatgcgggcccgggtgcccaaggtggcccacagcacccggcggccccctgctgcacgcatgtggcttccaagattttctagtaagactgtgacggttctcctcctggcccagaccacctgtctccttctcttcatcatttcgaggcccggtccatcctcaccggccggcggggaggatagagtgcatgtgttagtgttgtcctcctggcggtccggatccagcttcctgggccagctgttttcccaacatccggatgttttttacctgatggagcctgcttggcatgtatggactaccttgagccagggaagcgccgctacactgcatatggcagtgcgcgacctgatgcgcagtatcttcctgtgcgacatggacgtgtttgacgcctatatgccacaatctagaaacctgagtgcctttttcaactgggctacgtcccgcgccttgtgttcccccccggcctgtagcgcgtttccccgggggaccatctcgaagcaggacgtgtgtaaaactctgtgtactcgccagccattttccctggcacgtgaggcctgccgcagctattctcacgtcgtgcttaaggaagttcggtttttcaacctgcaagtactttatcctttgctctccgaccccgccctgaacttgaggatagtccatctggtgcgtgaccccagagcagtccttaggagcagggaggccgcaggacctattcttgctcgtgacaacggcatagtcctggggactaacggcaaatgggtcgaagccgatcctcaccttaggttaatcagagaggtctgccgcagccacgtccgtatcgcagaagcagccactctgaaacccccaccattccttcggggacggtatcgcctggttagattcgaagacctggcccgtgaacctcttgcagagatccgcgcactttacgcattcactggtttaacacttacccctcagctggaagcctggattcataatattactcacgggagcgggatcggaaagccaatcgaagccttccatacttcttcaaggaatgcgaggaatgttagccaggcatggaggcatgccctgcctttcactaagatactgcgggtgcaggaggtgtgcgcaggcgcactgcagttactgggttacaggcccgtgtatagcgcagatcagcagagagatctgaccctggatctcgtgttgccacggggtcctgatcacttcagctgggcaagccccgactag

SEQ ID NO: 181577 - DNA, 1254 bp, synthetic construct
  misc_feature 1..1254: note = Description of Artificial Sequence: Synthetic coding sequence
  source 1..1254: mol_type = other DNA
atgagccggcacctgccctggatctgcgaccagcggtgcagcagcccctccagcccaggccgctggcctccagctgcccggatgtggctgccccgcttctcttcgaagaccgtgacagtgcttttgctcgcgcaaacgacatgtctgctgttgttcattatatctcgcccagggcccagttcccccgctgggggcgaggatcgcgtacacgtgctcgttctgagttcatggcgctcaggttcttcttttctcggccagctattctctcagcaccccgacgtgttttacctcatggagcccgcatggcatgtttggactacccttagtcaaggaagtgctgcaacactccatatggcggttagggatctgatgagatccatttttctgtgtgatatggatgtgttcgatgcctacatgccccaatccagaaatctgtctgcctttttcaactgggcaaccagcagggcactgtgttcccctcccgcatgttctgcatttccccggggcacaatcagcaagcaggacgtttgcaagactctctgtactcggcagcccttttccctcgcccgcgaagcctgccgttcatacagtcacgtcgtgctgaaagaagttaggttttttaacctgcaggtcctgtaccctctgctatctgatcctgccctgaacctccgaattgtgcatcttgtgagggatcccagggcggtacttcgtagcagagaagctgccggacccattttggctagagacaacggtatcgtgctggggacgaatggaaaatgggtagaagctgatcctcaccttcggctgattcgcgaagtctgtcgtagccacgtacgaattgccgaggctgcaaccctcaaaccgccaccgtttttacggggccggtataggttggtccgattcgaggatttagcccgagaacccctcgctgagatcagagccctttacgccttcacgggcctaacgttaactccacaactggaggcctggatccacaacataacccacgggtccgggatcggcaagcccatcgaggctttccacacgtcatcccgcaacgccagaaatgtgtcgcaggcctggagacacgctctcccttttaccaaaattctgagggtccaggaagtctgcgcgggcgccctgcaactcctcggttatcggcccgtgtactctgccgatcagcagagggatctgaccctggatcttgtgctgccgaggggccccgatcatttttcctgggccagtcccgactag

SEQ ID NO: 181578 - DNA, 1188 bp, synthetic construct
  misc_feature 1..1188: note = Description of Artificial Sequence: Synthetic coding sequence
  source 1..1188: mol_type = other DNA
atgtggctgccccgggtgagcagcaccgccgtgaccgccctgctgctggcccagaccttcttgctcctgttcctggtgtctcgccctggaccatcctctccggccggaggcgaagctagagtgcacgttctcgtcctgtcatcatggcggagtggctccagctttgtgggtcagttgttcaatcagcaccccgacgtcttctacctgatggaacccgcttggcacgtgtggaccacgttgtcacaaggcagcgccgcaaccctgcacatggctgtccgggacctagttcgatctgttttcctgtgcgacatggacgtgtttgatgcatacttaccatggaggaggaacctgtcagaccttttccaatgggcagtgtccagagctctgtgttctcctccggcctgctcagctttcccccggggcgctattagctcggaagccgtgtgtaagccactttgcgctagacagtcatttaccctggcacgggaggcgtgccgcagctattcacatgtggtgctgaaggaggtgaggtttttcaatctccaggttttatatcctctgctgtcagatccagccttgaacctacgtatagtccaccttgttagagaccctagggccgttctgcgctcacgtgagcagacagccaaagccctcgccagggataacggaatagtgctgggaacgaacggcacctgggttgaggccgaccccgggctccgcgtggtccgcgaggtctgcagatctcatgttcgcatagcggaagctgcaaccttgaaacccccccctttcctgcgtggaaggtaccggcttgtacgattcgaggacctggcccgggaacccctggccgaaataagggcactgtacgcgttcaccggcctgtccctgaccccccaacttgaggcttggatccacaacattacacacggaagcggtccaggtgcccgcagagaagccttcaaaaccagcagcaggaacgccctaaatgtatcacaggcttggcgccacgcattgccctttgccaaaatccggagggtccaggaactatgtgctggtgctttgcaacttctaggatatcgacccgtgtacagtgaagacgagcaaagaaatttggcccttgatttagtgcttcctcgcggcctgaatgggttcacgtgggcctcgagcacggcctcacaccccagaaattag

SEQ ID NO: 181579 - DNA, 1188 bp, synthetic construct
  misc_feature 1..1188: note = Description of Artificial Sequence: Synthetic coding sequence
  source 1..1188: mol_type = other DNA
atgtggctgccccgggtgagcagcaccgccgtgaccgccctgctgttggcccagacatttcttctcttattcctcgtgagcagacccggcccatctagtcctgcaggcggtgaggcacgggttcacgttctagttttgtcatcttggcgatccgggtcttccttcgtcggacagctctttaaccagcacccagatgtgttctatttaatggagcctgcctggcacgtgtggaccactcttagtcagggaagcgcggcgactttgcatatggcagtgcgggatctggtgaggagtgtctttctttgcgacatggacgtgtttgatgcctacctcccctggcgtcggaatctcagcgatttgttccaatgggcggtgtcacgggctctgtgttcccccccggcgtgttcagctttcccaagaggcgccatcagctccgaagcagtttgtaagcccttatgtgccagacagtctttcaccttagcccgggaagcatgccggtcttactcccatgtggttttgaaggaagtgagattttttaacctgcaggtgttataccctctcctttccgacccagcactcaacctgcgaatcgtgcacctcgtccgggatcctagagcggtcctgcggtcccgggaacaaaccgccaaggcgctagcgagggacaatgggatcgtgctgggtactaatgggacctgggtagaggcagatcctgggctacgggtggtccgagaagtgtgtaggagccacgtccggatagccgaggccgcgacacttaaaccacctccatttcttcgaggaagataccggctcgtacggttcgaggacctggccagagaaccacttgccgagatcagagcactgtatgcctttaccggcctgtccctgacaccccaactggaagcttggattcataatattacacacggtagcgggccgggtgcccgccgagaggcattcaaaacatccagcagaaatgctttaaacgtgagccaggcttggcgtcatgccttgccttttgctaagatccggcgtgtccaggagctttgtgccggggccctgcagctgctgggctacaggcctgtttacagcgaggacgaacagaggaacttggcccttgatcttgtcctgcccagaggattgaacggtttcacctgggcctcaagcacagcgtctcaccccaggaactag

SEQ ID NO: 181580 - DNA, 1461 bp, synthetic construct
  misc_feature 1..1461: note = Description of Artificial Sequence: Synthetic coding sequence
  source 1..1461: mol_type = other DNA
atgaagggccggcggcggcggcggcgggagtactgcaagttcgccctcctgctcgtgttgtacactctggtcctgctgctcgttccgtctgtgctggacgggggtcgtgacggcgacaaaggagccgagcattgccctggtttacagcgtagcctgggggtctggagcctggaggctgccgccgcaggcgagcgggagcagggcgcggaagcacgggcagccgaagaaggtggagcaaatcagtcccctagattccccagcaatcttagcggggcagttggtgaggccgtttcacgagaaaaacagcacatttacgtgcacgcaacatggcgaaccgggtccagcttcctaggggagctatttaatcagcaccccgacgtattctacctctacgagcctatgtggcatctctggcaggccctatatcctggagacgctgaatctctgcaaggagccctgagagatatgctccgctcactgttccgctgcgatttcagcgtcttacgtttgtacgcaccacccggtgacccagctgccagggcacctgataccgccaacctgacaaccgccgcgctgtttcgctggcggactaataaagtaatttgctctccaccactgtgccctggggcaccccgcgccagggcggaggtgggactcgttgaagacaccgcttgcgagcgctcctgtccccccgtggccatccgggccctggaagcggaatgccggaaatatccagtggtggtgattaaagacgttagactgttggacctgggcgtactggtccctctacttcgtgaccccggactgaaccttaaagtggtccagctgttccgggacccccgcgcagttcacaattctagactgaaatcaaggcagggcctgctaagggaatccatacaggtgctgagaactaggcagcgcggcgatagatttcaccgagtgcttttggctcacggtgtgggtgcacgacccggcggccagtcgagagctctcccggcagcacctcgagctgattttttcctaacgggggcgcttgaggtgatttgtgaagcttggctaagggacctgctgtttgcaaggggcgcccccgcatggttgcgccggaggtatttaagactgaggtacgaagatctggtgcggcagccccgcgcgcagttgaggcgactactaaggtttagcggtcttagggccctggctgctttagacgcctttgctctgaatatgaccaggggagcggcctacggtgctgatcgccctttccacctgtctgcccgcgatgcaagggaagccgtgcacgcatggcgagaacgactgtctcgcgagcaggttcgccaggtggaggcagcatgtgctcctgctatgagactgttggcttaccctcgcagcggggaagagggggacgctgagcagcctagagaaggcgagacgcccttggaaatggacgctgatggcgccacttag

SEQ ID NO: 181581 - DNA, 1593 bp, synthetic construct
  misc_feature 1..1593: note = Description of Artificial Sequence: Synthetic coding sequence
  source 1..1593: mol_type = other DNA
atgagccggagcccccagcgggccctgccccccggcgccctgcccagactgcttcaggccgcccctgcagcagcccccagggccctcctcccgcagtggcccagacgtccaggccgtcgttggcccgcctctccattagggatgaaagtgtttcgacgcaaagctttagttctgtgcgctggctacgcgctgttactagtcctcacaatgctgaatctacttgactacaagtggcacaaggagcctctacagcaatgtaacccagatggaccactcggtgctgccgccggagccgctggagggagttgggggcgtcccggccctcccccagctgggccaccccgtgctcatgccaggcttgatctgaggacaccgtatcgtcccccagcagcagctgtcggcgccgcacctgctgccgctgccggcatggcaggcgtggctgcccctccaggcaacgggacaagaggaactggtggcgtcggagacaaacggcagttggtctacgtttttacaacttggcgaagcggctcctcctttttcggtgagctgtttaatcagaaccctgaagtgtttttcctctatgagcctgtgtggcacgtgtggcagaaactgtaccctggagatgccgtgtctttgcagggggcagcccgcgatatgctgtctgccctgtacagatgtgacctcagcgtgtttcaattgtactctccagcaggatccggcggtaggaacctgacaaccctgggtatcttcggcgctgcaactaacaaagtcgtttgttcctcccccctctgcccggcatatcgcaaagaagttgtgggtctggtggatgatcgtgtctgtaaaaagtgtcctccgcagaggctggcacgcttcgaagaagaatgtcgaaagtaccgaaccctagtcatcaaaggcgttcgtgtgtttgacgtcgccgtgctcgctcctctgctacgggatccagcgttggatctaaaggtgatccatctggtgcgagacccacgggccgtggcatcttctagaatccggtcacggcacgggctcatccgggagtcactccaggtggtaagatcccgggacccaagagcccatcgcatgcccttcctggaggctgctggccataagctgggcgccaagaaagagggcgtcggtggacctgctgactaccacgcgctcggcgcaatggaagtgatttgcaactctatggctaaaacacttcagactgcgcttcaacccccagattggttgcagggacactatctcgtggtcagatatgaagatcttgtcggcgacccagtcaagactcttcggcgcgtctatgatttcgtcggcctgttagtttcgccggaaatggagcaattcgcactcaatatgacatccggcagcggctcatccagtaaacccttcgtggtcagcgcacgcaacgcaacccaggccgcaaatgcatggcgaactgctctgacttttcaacagataaagcaggtagaagaattctgctatcagcccatggcggtgctgggctatgaaagagtgaactcaccggaagaggtcaaagatcttagtaaaacactcttaagaaaaccccgtttgtag

SEQ ID NO: 181582 - DNA, 1071 bp, synthetic construct
  misc_feature 1..1071: note = Description of Artificial Sequence: Synthetic coding sequence
  source 1..1071: mol_type = other DNA
atgcaccaccagtggctgctgctggccgcctgcttctgggtgatctttatgtttatggtcgcttcaaagtttatcacgctgactttcaaagacccggacgtttatagcgctaagcaggaatttctctttctgacaaccatgcctgaagtacggaagctgccagaagagaaacacattccggaagagctgaagcccacaggcaaggagcttcccgacagccagctcgtgcagccattagtgtacatggagcgcctggaactgataaggaacgtctgtcgagacgacgctctgaagaatttgtcacacacaccagtcagtaaatttgtgctggatcggattttcgtctgtgacaaacataagatattgttttgccagacccccaaagttggaaacacacaatggaagaaagtgctgattgtgctgaatggggctttctcatctatcgaagaaattcctgagaacgtcgtgcacgaccatgaaaagaacgggctccctcgattaagcagtttctccgatgctgaaattcagaaaaggctcaagacatactttaaattcttcatagtccgagaccccttcgagcgcctgatcagcgccttcaaggacaagtttgtgcataacccaaggttcgagccctggtatcgccacgaaatcgcaccaggcataatccgcaagtaccggcgcaataggaccgaaaccagagggatccaattcgaagatttcgtcaggtacctcggcgaccccaaccaccgttggctcgatctgcaattcggtgaccacattatccactgggtgacatatgtggagctttgtgctccctgtgaaatcatgtacagcgtaattggtcatcacgagacactggaagacgacgccccttatattcttaaggaagccggcatagatcatctcgtatcgtacccaaccattccacctggaatcactgtgtataacagaaccaaggtcgagcactatttcctgggtattagcaaaagggacattcgacgtctgtacgcccgatttgaaggcgactttaagctgttcggctaccaaaagcccgacttcttgctgaactag

SEQ ID NO: 181583 - DNA, 426 bp, synthetic construct
  misc_feature 1..426: note = Description of Artificial Sequence: Synthetic coding sequence
  source 1..426: mol_type = other DNA
atgcaccaccagtggctgctgctggccgcctgcttctgggtgatcttcatgtttatggtggcgagcaagttcattaccctaacctttaaggaccccgacgtgtattcagcaaagcaggagttcctgtttctcactacgatgcccgaggtgagaaaactgcctgaggaaaaacacatcccggaggaattaaaacccaccgggaaggagctgcccgatagccaactggtgcagccactcgtttacatggagcggttagaactcattcgcaatgtgtgtagagatgatgcactgaaaaatctgtctcatacccctgtgtccaagttcgtcctggaccggatcttcgtctgtgataaacataagatcctgttctgtcagacccccaaggtaggcaatacgcagtggaaaaaggtgctcatcgtcttatag

SEQ ID NO: 181584 - DNA, 1071 bp, synthetic construct
  misc_feature 1..1071: note = Description of Artificial Sequence: Synthetic coding sequence
  source 1..1071: mol_type = other DNA
atgcaccaccagtggctgctgctggccgcctgcttctgggtgatcttcatgtttatggtggcctccaagttcattactttgaccttcaaggatcctgatgtgtattccgcaaaacaggaattcctgttcttgactaccatgccggaagttcgcaagttgccggaggagaaacacattcctgaggaactgaaaccaaccgggaaagaattacccgatagccaactcgtccagccactggtttatatggaacggttggagctgatccggaacgtttgcagggatgatgcgctgaaaaatctgagccataccccggtaagcaagtttgtgctggacaggatctttgtgtgcgacaagcacaaaatcctgttttgccaaacccccaaggtggggaacacccagtggaaaaaagttctcatcgtattaaatggcgccttttcttcaattgaagagatcccagagaatgtagtgcacgatcatgaaaagaatggacttccacgtctgagctcattcagcgacgccgaaatccagaagagactgaaaacctacttcaagtttttcatcgtccgggatccttttgagcggcttatctctgccttcaaagataagttcgttcataaccctcgatttgagccttggtatagacatgagatcgcaccaggtattattcggaagtaccgacggaaccgcaccgaaactcgtggaatacagttcgaggacttcgttcgttatcttggtgatcccaaccaccgatggcttgacctgcaattcggcgaccacatcatccattgggtaacctacgtcgagctgtgtgctccctgcgagatcatgtacagcgttattgggcatcatgagactctagaggatgacgcaccttacatccttaaagaggctggcattgatcacctcgtctcatatccaacaataccaccaggaatcactgtctacaacaggaccaaagtcgagcactatttcctgggcatctccaaacgagatattcgtcgcctatacgccaggtttgagggggatttcaaactttttgggtatcagaaacctgattttctgctcaactag

SEQ ID NO: 181585 - DNA, 195 bp, synthetic construct
  misc_feature 1..195: note = Description of Artificial Sequence: Synthetic coding sequence
  source 1..195: mol_type = other DNA
atgcaccaccagtggctgctgctggccgcctgcttctgggtgatcttcatgtttatggtagctagtaaatttatcactctcacctttaaggatcccgatgtgtattccgcaaagcaggagttcctttttttgaccactatgcccgaggtgaggaaacttcctgaggaaaagcacatccccgaggagctgaagtag

SEQ ID NO: 181586 - DNA, 402 bp, synthetic construct
  misc_feature 1..402: note = Description of Artificial Sequence: Synthetic coding sequence
  source 1..402: mol_type = other DNA
atgcaccaccagtggctgctgctggccgcctgcttctgggtgatctttatgttcatggtggctagcaaattcattaccctcacatttaaggacccggatgtttacagtgccaaacaagagttcctgtttctgactacaatgccagaggtacgcaaactgcctgaggagaagcacatacccgaagaacttaagccgaccggaaaagaactaccggattcacagctggtgcaaccgttggtgtatatggagcggcttgaactcattagaaacgtgtgcagagacgatgccctgaagaatttgtcacatactcctgtgtccaagttcgttcttgaccgaatctttgtgtgtgacaaacacaaaattctgttctgccagacgccaaaagttgggaatacacagtag

SEQ ID NO: 181587 - DNA, 258 bp, synthetic construct
  misc_feature 1..258: note = Description of Artificial Sequence: Synthetic coding sequence
  source 1..258: mol_type = other DNA
atgcaccaccagtggctgctgctggccgcctgcttctgggtgatcttcatgtttatggtcgcatctaaattcattacgttaacatttaaggaccctgatgtgtatagcgctaagcaggagttcctgtttctgactacgatgcctgaagtgcgaaaactcccagaagaaaagcatatcccagaggaactgaaacctacgggcaaagaactgcccgacagtcagctcgtccagcccctggtgtatatggagcgtctatag

SEQ ID NO: 181588 - DNA, 102 bp, synthetic construct
  misc_feature 1..102: note = Description of Artificial Sequence: Synthetic coding sequence
  source 1..102: mol_type = other DNA
atgcaccaccagtggctgctgctggccgcctgcttctgggtgatctttatgttcatggtcgccagcaagttcatcaccctgacctttaaggatcccgactag

SEQ ID NO: 181589 - DNA, 1215 bp, synthetic construct
  misc_feature 1..1215: note = Description of Artificial Sequence: Synthetic coding sequence
  source 1..1215: mol_type = other DNA
atgcagcggaaggccggcaagaaggagcacgtgcagctgcgggacaagaggaatcaggagccacagtttagagggaatacagcaagaaaatgtgagccccaagcggccgaaggaagagttagtgaatggctacgctgtgacaatatgcaccatcaatggcttctattggccgcatgcttttgggtcatctttatgttcatggttgccagtaaattcataactctcactttcaaggacccagatgtttatagcgccaaacaggagtttctgtttcttacaaccatgccggaagtccggaaactgcctgaggagaaacacatcccggaagagcttaagcccaccggtaaagaactgccagactcacagctggttcagccccttgtgtacatggagcggctggaactcatcaggaacgtatgtcgtgatgacgctttgaagaatttgagtcatacacccgtctcaaagttcgtgctggatcgaatttttgtgtgcgacaagcataagatactattctgccagacaccgaaggtcggcaacacccagtggaagaaggtgctcatcgttctgaacggagccttttcgagtatagaagaaattcccgaaaacgtcgtgcatgatcatgagaaaaacggattgcctcggttatccagcttcagcgatgcggagattcagaaacgcctcaagacttactttaaattctttatcgtgcgtgacccgttcgaacgcctcataagcgcatttaaagacaagttcgtccacaaccccagattcgaaccctggtaccggcacgaaatcgctcccgggattattcgaaagtatagaaggaataggaccgaaaccaggggtatacagttcgaagactttgtcagatatttaggtgatcctaaccatcggtggctcgatctgcagtttggggatcatattattcactgggtgacttatgttgaattatgcgcaccttgtgaaattatgtacagcgtgattgggcatcacgagactttggaggacgatgctccatacatcctgaaggaggctggcattgaccacctcgtttcttaccctacaatcccccctggcatcacagtttacaatagaacaaaagtcgagcattacttcctgggaattagtaagagagacattaggcggttatatgcccggtttgagggagatttcaagctgtttggatatcagaaaccagactttctgctgaattag

SEQ ID NO: 181590 - DNA, 786 bp, synthetic construct
  misc_feature 1..786: note = Description of Artificial Sequence: Synthetic coding sequence
  source 1..786: mol_type = other DNA
atggccagccccgactggggctacgacgacaagaacggccccgagcagtggtctaagctttaccccatcgccaatggcaacaaccagtcacccgttgatattaaaacctcagagactaagcatgacacgagcctcaagcctatatctgtttcctacaaccccgctacagcaaaagaaataataaacgtcggccacagttttcatgtgaattttgaggataatgacaacaggagcgtgctcaagggtggcccattctccgactcctatagactgttccagttccacttccactgggggtcaacgaacgagcacggctctgagcacaccgtcgacggagttaagtactccgccgaactgcatgtggcccactggaacagtgctaaatacagttccctggcagaagccgcctcaaaggctgacggtctagccgttattggcgtcctgatgaaagttggggaagctaacccaaagctccagaaggtgctcgacgccctacaggctatcaaaaccaaagggaaacgggcccccttcaccaacttcgacccttccacccttcttcccagcagcctcgatttttggacctaccccggctctctgacacatcccccattgtacgaatcggtgacttggattatctgcaaagagtcaatcagcgtgtcctcagaacagctagcacagtttcgctccctcctgagtaacgtcgagggagacaacgcagtgcctatgcagcataacaaccgacccactcagcccctgaagggtcgaacagttagggcctccttttag

SEQ ID NO: 181591 - DNA, 786 bp, synthetic construct
  misc_feature 1..786: note = Description of Artificial Sequence: Synthetic coding sequence
  source 1..786: mol_type = other DNA
atggccagccccgactggggctacgacgacaagaacggccccgagcaatggtcaaagttataccccatcgccaatggcaataaccagtcaccagtggatatcaaaacctccgagaccaagcacgatacaagcctgaaacccatctccgtttcctacaacccagccaccgcgaaggaaattatcaatgtggggcacagctttcatgtcaatttcgaggacaacgacaatagatccgttctaaagggcggaccgttttccgactcatatcgtctgtttcagtttcattttcactgggggtctactaatgaacatggctcggaacataccgttgatggcgttaaatattcagccgaactgcacgttgctcactggaattctgccaaatattccagtctggctgaggccgcttcaaaagcggatggcctggcagtgattggcgtgctgatgaaagtgggggaggctaaccccaaactccaaaaagtgctagacgccttgcaggctattaaaactaaggggaagcgagcacccttcaccaattttgatccgtctaccctgctcccttcgtctcttgatttttggacataccccggcagtctgacacaccccccactgtatgagtctgttacctggattatctgtaaggagtcgataagcgtgagcagcgaacagcttgcgcagtttaggtcgctgctgtctaacgtcgagggcgacaacgccgtgcctatgcagcacaacaaccgcccaactcagcctctcaagggacggactgttcgcgcgtccttctag

SEQ ID NO: 181592 - DNA, 786 bp, synthetic construct
  misc_feature 1..786: note = Description of Artificial Sequence: Synthetic coding sequence
  source 1..786: mol_type = other DNA
atggccagccccgactggggctacgacgacaagaacggccccgagcaatggtctaaactgtaccccattgccaacggtaataatcagtcccctgttgacattaaaacgtcagaaacaaaacacgatacgtcattgaaaccaatctccgtctcctacaatccagctacagccaaagagataattaatgtaggtcactcgttccacgtgaactttgaggataatgacaaccgaagtgtgctgaaaggcggccctttctccgattcgtaccgcctgtttcaatttcactttcactggggtagtacaaacgagcacgggagcgagcacaccgtggacggagttaaatatagcgcggagcttcacgtcgcccactggaattccgcaaagtacagcagcctggctgaggccgcttcaaaggcggatgggcttgccgtgataggcgtcctgatgaaagtcggggaggcaaatcctaagctccagaaggttctcgatgctcttcaggctatcaagaccaagggtaaacgggccccctttaccaattttgatcccagcacattgcttccttccagtctcgatttttggacttaccccggaagcctcacccacccacccctgtatgagagtgtaacttggatcatctgcaaggaatctatctctgtatcctccgagcagctagcccagttcagatctctgttgagtaacgtagaaggggacaatgccgtcccgatgcagcataacaatcggccaacacaaccactgaaaggacgcactgtcagagcgtcattttag

SEQ ID NO: 181593 - DNA, 531 bp, synthetic construct
  misc_feature 1..531: note = Description of Artificial Sequence: Synthetic coding sequence
  source 1..531: mol_type = other DNA
atggccagccccgactggggctacgacgacaagaacggccccgagcagtggtcaaagctctatccgattgctaatggcaacaatcagtctccagtggacattaaaacctctgagactaagcacgacacaagcttgaaaccaatatccgtgagctacaatcctgctacggccaaggagatcataaatgtgggacactccttccatgtaaacttcgaagacaatgacaatcggtccgtgctcaagggcggccccttttctgattcctatcggctgttccaattccatttccattggggatcaaccaatgaacacggtagtgagcacacagtggacggagtgaaatattccgccgaactgcatgtagcccattggaacagcgctaaatacagcagtctggcagaagccgcaagcaaggcggacggcctcgcagtcatcggcgtgctgatgaaagtgggagaggccaacccgaagttgcaaaaagtgctcgatgcgctgcaggccatcaaaacaaagggcaaaagggccccctag

SEQ ID NO: 181594 - DNA, 756 bp, synthetic construct
  misc_feature 1..756: note = Description of Artificial Sequence: Synthetic coding sequence
  source 1..756: mol_type = other DNA
atggccagccccgactggggctacgacgacaagaacggccccgagcagtggagcaaactgtaccccattgcaaatggtaataaccagagcccagtggatatcaaaacttctgagacaaagcacgataccagtctgaagcctatctctgtctcttacaaccccgcaacagctaaggaaatcatcaacgtggggcactccttccatgttaattttgaggacaacgataacagaagcgtcctaaaagggggtccattctcagattcttacagacttttccagtttcattttcattggggatccactaacgagcatggtagcgagcacaccgttgacggcgtgaagtattctgctgagctgcacgtggcccactggaacagcgcaaagtacagctcccttgcagaggccgcgagcaaagccgatgggctggctgtcatcggcgtcttgatgaaggtgggggaggccaacccgaagctccaaaaggtccttgacgccctccaagccataaagaccaaaggcaaacgcgccccatttacaaacttcgacccatccactctcttaccttcatctctcgacttctggacataccctggtagtttgacccaccctcccctctacgagtcagtcacttggatcatctgtaaggaaagtatctctgtcagttccgagcaactggctcagttccgtagtcttctttctaatgtcgaaggagacaatgccgtgcccatgcagcacaataacaggccaacacagccatag

SEQ ID NO: 181595 - DNA, 69 bp, synthetic construct
  misc_feature 1..69: note = Description of Artificial Sequence: Synthetic coding sequence
  source 1..69: mol_type = other DNA
atggccagccccgactggggctacgacgacaagaacggccccgagcagtggagcaaactgtacccctag

SEQ ID NO: 181596 - DNA, 450 bp, synthetic construct
  misc_feature 1..450: note = Description of Artificial Sequence: Synthetic coding sequence
  source 1..450: mol_type = other DNA
atggccagccccgactggggctacgacgacaagaacggccccgagcaatggagtaagctgtatccgatagctaacgggaataaccagagcccggtggatatcaaaacatccgagaccaagcacgacaccagccttaagcccatttcggtctcctacaatcctgcaaccgcgaaggagattatcaacgttggccattcgttccatgtgaatttcgaggacaatgataaccggtccgtcttgaaaggcggccccttctctgattcatacagactctttcagtttcattttcactggggatctacaaatgaacatggcagtgaacataccgtggacggtgttaagtacagtgctgagctccatgtggcccattggaatagcgcaaaatactcgagcttagctgaggccgcttctaaggcagatggactggccgtgatcggtgtcctgatgtag

SEQ ID NO: 181597 - DNA, 450 bp, synthetic construct
  misc_feature 1..450: note = Description of Artificial Sequence: Synthetic coding sequence
  source 1..450: mol_type = other DNA
atggccagccccgactggggctacgacgacaagaacggccccgagcagtggtccaagctttaccccatcgccaatggaaataatcagtctcctgtagatatcaagacaagcgaaacgaaacacgacacgtccctgaagccgatttccgtctcttacaaccccgcaaccgccaaagagataatcaatgtggggcactcgttccatgtgaacttcgaggacaacgacaaccgctcagtactgaagggcggcccatttagcgactcatataggctgttccagttccattttcactggggttcaacgaacgagcatggcagcgagcacacagtggatggggtgaaatatagcgccgaattgcacgtagcccactggaacagtgctaagtacagcagcttggctgaagctgcctccaaagcagatggattagcggtcattggcgtcctgatgtag

SEQ ID NO: 181598 - DNA, 357 bp, synthetic construct
  misc_feature 1..357: note = Description of Artificial Sequence: Synthetic coding sequence
  source 1..357: mol_type = other DNA
atggccagccccgactggggctacgacgacaagaacggccccgagcagtggtccaaactctaccctatcgctaatgggaataatcaaagccctgtcgacattaagacttccgagacgaaacatgacacctctctcaagccaatttctgtttcttacaaccccgcaacagccaaggaaattattaacgtggggcactcctttcatgtgaactttgaggacaatgacaatcgctctgtcctgaaaggaggacctttttccgactcttataggctctttcaatttcactttcattggggtagtaccaacgaacacgggtcagaacataccgtagatggcgtgaagtactcagcggagtag

SEQ ID NO: 181599 - DNA, 447 bp, synthetic construct
  misc_feature 1..447: note = Description of Artificial Sequence: Synthetic coding sequence
  source 1..447: mol_type = other DNA
atggccagccccgactggggctacgacgacaagaacggccccgagcagtggtcaaagctttatccaattgctaatgggaataatcagtcgccagtcgacataaagacaagcgagacaaaacatgatacctctctgaagccaatttccgtctcctacaacccggcaaccgcaaaggagataatcaatgtgggccacagtttccacgtgaactttgaggacaacgataacagatcagtgttgaaaggaggtcccttttccgattcgtaccgacttttccagtttcacttccattggggaagtactaatgaacacggtagtgaacatactgtcgacggagttaagtattcagctgaacttcatgtggcacattggaactcagctaagtattcgagtctagctgaagctgcaagcaaggccgacggattagctgtcatcggcgtcctgtag

SEQ ID NO: 181600 - DNA, 786 bp, synthetic construct
  misc_feature 1..786: note = Description of Artificial Sequence: Synthetic coding sequence
  source 1..786: mol_type = other DNA
atggccagccccgactggggctacgacgacaagaacggccccgagcagtggagcaagttatacccaatcgcgaatggtaacaatcaaagtcctgtggacataaagacaagtgaaacaaagcacgacaccagcctcaagccaattagtgtctcttacaaccctgctaccgctaaagagattatcaacgtcggccattctttccacgttaactttgaggacaatgacaaccgctccgtactgaagggtggaccgttttccgattcctaccggctcttccagtttcattttcattggggatccactaatgaacacgggtccgaacacaccgtggacggcgtcaagtacagtgcagaacttcacgttgcacattggaatagcgccaaatactcctcacttgctgaggctgcctcgaaagccgacgggctcgctgttattggggtcttgatgaaagtgggagaggccaaccctaaactccagaaggtgttggacgccttacaagccattaagactaaaggtaagcgggccccttttaccaacttcgatccctcaactctactccctagcagtctcgacttttggacataccctggatctcttacccacccccctctttacgaatcagtaacctggattatctgcaaggaatccatctccgtcagcagtgagcaactcgcacagtttagatctctgttatcaaatgtcgaaggcgataatgccgtgccgatgcagcataataaccggcctactcagccgcttaagggacgcactgtgcgagccagcttttag

SEQ ID NO: 181601 - DNA, 300 bp, synthetic construct
  misc_feature 1..300: note = Description of Artificial Sequence: Synthetic coding sequence
  source 1..300: mol_type = other DNA
atggccagccccgactggggctacgacgacaagaacggccccgagcaatggtcaaagttgtaccccatcgctaatgggaataatcaaagccctgtggatataaaaacctctgagaccaagcacgacacatctctgaaacctatctccgtgagctataaccctgccacagccaaagaaatcataaacgtgggacattctttccatgtgaattttgaggacaatgacaatcgtagtgtgttgaaaggggggcccttcagtgacagttatcgtctgttccagtttcactttcactgggggtag

SEQ ID NO: 181602 - DNA, 786 bp, synthetic construct
  misc_feature 1..786: note = Description of Artificial Sequence: Synthetic coding sequence
  source 1..786: mol_type = other DNA
atggccagccccgactggggctacgacgacaagaacggccccgagcaatggtcaaagctttacccgatagctaacgggaacaaccaatcccctgtggatattaagacttccgagacaaaacacgacacgtcactaaaacctatctctgtgtcctacaatccagccacagcaaaggaaatcattaatgttgggcacagctttcacgtgaattttgaagacaacgacaatagaagcgtgctgaaaggaggacctttctctgacagctatcgacttttccaattccactttcactggggttccacaaatgagcacgggtcagagcatactgttgacggagtcaaatatagcgcggagctccacgtagcccattggaactccgccaagtacagtagtctggctgaagccgccagtaaggctgatgggctcgcggtaatcggagtcttgatgaaagttggcgaagccaatcctaaattacagaaggtgcttgatgccctgcaggctatcaagaccaaaggcaagagagccccttttacaaactttgatccctcaactctcctcccgagttccctcgatttttggacctacccgggctccctaactcatccaccactgtatgaatccgtgacttggattatctgcaaagaatccatttctgtgagctccgaacagttagctcagtttcgcagcctgttatctaatgtcgagggcgataacgccgtgcccatgcagcataataatcggcccacacagcctctcaagggccggactgtacgagcgtccttctag

SEQ ID NO: 181603 - DNA, 786 bp, synthetic construct
  misc_feature 1..786: note = Description of Artificial Sequence: Synthetic coding sequence
  source 1..786: mol_type = other DNA
atggccagccccgactggggctacgacgacaagaacggccccgagcagtggagtaagctgtacccgatcgctaacgggaacaaccagtcaccagtggacataaaaacttcagagactaagcatgacacgagtcttaaaccgatctcagtaagctacaatcccgccaccgccaaggagatcattaatgtaggtcactcatttcatgtaaacttcgaagataacgataaccggtctgtcctgaaaggtgggcccttttcagactcgtataggctttttcagtttcactttcactgggggagcacaaatgagcacggatctgagcatacagttgatggcgtcaaatatagcgctgagctgcatgtggcacattggaactccgcgaaatattcctcccttgccgaggcagcctcaaaagccgatggcctcgctgtcattggagtgttaatgaaggtaggtgaggccaacccaaagctgcaaaaggtccttgatgccctgcaggcgattaaaactaagggcaagagagcccctttcacaaattttgacccttcgacactgctgcccagctctctggacttttggacttaccccggttcacttacacacccgcctctttacgaaagcgtgacctggattatctgtaaagagtccatttctgtgagttcagaacagctcgctcagttccgctctctgctgtctaacgtggaaggagataacgctgtacctatgcagcacaacaataggcccacccagccgctgaaaggacgcactgtgcgtgcgagtttctag

SEQ ID NO: 181604 - DNA, 783 bp, synthetic construct
  misc_feature 1..783: note = Description of Artificial Sequence: Synthetic coding sequence
  source 1..783: mol_type = other DNA
atgagccaccactggggctacggcaagcacaacggccccgagcactggcacaaggacttccccatcgcgaagggagagcggcagtcccccgtcgacattgatacccacaccgccaaatacgacccgtcccttaaacctctaagtgtatcctacgaccaagcaacctcgctacgaatcctgaataacggccatgcgtttaacgtcgaattcgacgattcgcaggataaagccgtgttaaagggtggtcccttagatggaacttacaggttgatccagtttcattttcactgggggagcctagacggccaggggagcgagcatactgtggacaagaaaaagtacgcggctgagctgcacctcgttcactggaatactaagtatggcgatttcgggaaagcggtccagcagccagatgggctggctgtcctaggcatcttcttaaaagttggtagcgccaagccaggcctccaaaaggtggtggatgttttagactctattaagaccaaaggaaagagcgctgacttcaccaatttcgacccccggggcctgcttcctgaatctttggattactggacgtacccaggctcacttacaacaccccctcttctcgagtgtgtgacgtggatcgtcttaaaggaaccaatctcagtgtccagcgaacaggtgcttaaatttcggaagttgaactttaacggggagggcgaacctgaagagctaatggtggacaactggcgcccggcccaaccactgaaaaaccgacaaataaaagcctcctttaaatag

SEQ ID NO: 181605 - DNA, 783 bp, synthetic construct
  misc_feature 1..783: note = Description of Artificial Sequence: Synthetic coding sequence
  source 1..783: mol_type = other DNA
atggccaaggagtggggctacgccagccacaacggccccgaccactggcatgagctgttccctaacgccaagggggagaaccagtcacccgtagagctccacaccaaggatatacgacatgacccctcgctgcagccatggtccgtgtcctatgacggcggatctgctaaaactattctgaacaatgggaagacctgcagggtagtgttcgatgacacatatgaccggtcaatgctacgagggggaccactgccaggcccttatcggctgcggcagttccacctacactggggatcgagcgacgatcatgggagcgagcacaccgtggatggagtgaagtacgccgcagagctgcaccttgtgcattggaaccccaagtataacactttcaaggaagcactcaagcagcgggacggcatagctgttatcggcatcttcctcaaaatcgggcacgagaacggggagttccagatctttcttgatgcccttgataaaattaagacaaagggtaaagaagctcctttcaccaagttcgacccgtcctgcctttttccagcatgtagagattattggacttatcaaggctctttcaccaccccaccctgtgaggagtgcattgtttggttgctactgaaggagccaatgacagttagttctgaccaaatggctaaattacgttcacttctctcttcagccgagaacgaaccccctgtgcctctcgtatcaaactggcgccctcctcagcccatcaacaacagggtggtacgagcctctttcaaatag

SEQ ID NO: 181606 - DNA, 735 bp, synthetic construct
  misc_feature 1..735: note = Description of Artificial Sequence: Synthetic coding sequence
  source 1..735: mol_type = other DNA
atggccaaggagtggggctacgccagccacaacggccccgaccactggcacgagctgttccccaatgctaagggtgaaaaccagtcaccatggtccgttagctacgacggagggagcgcaaagaccattctcaacaatgggaaaacctgccgggtagtcttcgacgacacctacgaccgttccatgctgcgcggaggtccactccccgggccgtatcgcctgcgtcagttccaccttcactgggggagctctgatgatcatggctcagaacacactgttgatggcgtgaaatacgcagctgagcttcacctggtacattggaacccaaaatataacacctttaaggaggctctcaaacagcgtgatggcattgccgtcatcggaatcttcctcaagatcggccatgaaaacggagagttccagatctttctggacgccctggataaaatcaagacaaaaggaaaagaggctccgtttacgaaatttgacccctcctgtctctttccagcatgccgtgactactggacgtaccagggctcctttaccactcctccttgcgaagagtgtatcgtctggttgcttctgaaagagcctatgaccgtgagttccgatcagatggcgaaattaaggagtcttctaagcagtgccgaaaacgagcccccggtacctctggtttcaaattggagacccccccagcccattaacaacagggtggtccgagcttcttttaagtag

SEQ ID NO: 181607 - DNA, 954 bp, synthetic construct
  misc_feature 1..954: note = Description of Artificial Sequence: Synthetic coding sequence
  source 1..954: mol_type = other DNA
atggtggtgatgaacagcctgcgggtgatcctgcaggccagccccggtaagctcttgtggcgcaagtttcagattcccaggttcatgccagcaagaccttgttcattgtatacatgcacatacaagacccgaaaccgagccctgcacccactttgggaatccgtggacttagtccctggcggagaccgacaatccccaattaacatacgctggagagactcagtgtatgatccaggccttaaaccactgaccataagttatgacccagcaacatgtttgcacgtctggaataatgggtattccttcctggtggagtttgaggattctacagacaagagcgtgatcaagggcggccccctggaacataactataggttaaaacaatttcacttccactggggcgccatcgatgcttggggttcggagcatactgtggatagcaagtgcttccctgcagagctacacctcgtccactggaatgcggtccgtttcgagaactttgaggacgcagcactggaggaaaacggcctggccgtcattggtgtttttctgaagctgggcaaacatcacaaggaattgcaaaagcttgtcgatactctgccatcaatcaagcataaagatgcattagtggaattcggttcctttgatccatcgtgcttgatgccaacctgtcccgactattggacttactctggcagcttgactaccccgccactgtccgaaagtgtgacttggataatcaagaaacagccggtggaggtggaccacgaccaactggaacagtttaggaccctgctctttacctccgaaggcgagaaggagaaaagaatggtggataacttcagaccgctgcaacctctgatgaaccgtacagtgcgttcgtcattccggcacgattacgtcctaaacgtgcaagccaagcccaaacctgctactagccaggccaccccgtag

SEQ ID NO: 181608 - DNA, 954 bp, synthetic construct
  misc_feature 1..954: note = Description of Artificial Sequence: Synthetic coding sequence
  source 1..954: mol_type = other DNA
atggtggtgatgaacagcctgcgggtgatcctgcaggccagccccggaaagctgttatggcggaaattccagattcctcgctttatgccagcgaggccttgtagcttgtacacatgcacgtacaaaactaggaacagggctctgcatcctctgtgggaaagtgtggacctcgtgcctgggggggatagacaaagccctattaatatacgttggcgtgactcagtgtacgaccctgggctcaagcctttaactatatcttatgacccagctacatgcctacatgtgtggaacaacggatactccttcctcgtggagtttgaggactcgactgacaagtctgtaattaaaggtggacctctggaacacaactacagactgaaacagtttcatttccattggggagctatagacgcttgggggagcgagcataccgttgactctaaatgcttcccggccgagctgcatcttgtgcattggaacgccgtgaggttcgagaacttcgaggatgctgccctggaggagaacggcctcgcagtgatcggcgtgttcctcaaactaggcaagcaccacaaggaactgcaaaagctcgtggatacgttgccgtctataaagcataaagatgccttggtggaattcggttctttcgatccaagttgtctgatgcctacatgtccggattattggacttatagcgggtccctgaccacccccccccttagcgagtccgtcacatggatcattaaaaaacagcccgtagaagtggaccacgaccagctggagcaatttcgaaccttactctttactagtgagggtgaaaaggagaagcgaatggtcgacaatttcagacccctacagccattaatgaatagaaccgtgagatctagttttcgccacgactacgtgcttaatgtacaggctaaacccaagcctgccacttcccaagctactccatag

SEQ ID NO: 181609 - DNA, 411 bp, synthetic construct
  misc_feature 1..411: note = Description of Artificial Sequence: Synthetic coding sequence
  source 1..411: mol_type = other DNA
atggtggtgatgaacagcctgcgggtgatcctgcaggccagccccggcaagctcttgtggcgtaagtttcagattccccggtttatgcctgcaagaccttgctctctgtacacctgtacttataagacacgaaaccgagccctgcatccactctgggagagcgtcgacctggtacctggaggggacagacaatcaccaataaacataagatggagggactccgtctacgaccctgggctgaaaccactgactattagctatgatcctgctacgtgtctccacgtttggaacaacggatatagcttcctggtcgaatttgaggacagcacagacaaatctgtgatcaagggtggtcccctggaacacaattaccgtctgaaacagtttcatttccactggggggcaatctag

SEQ ID NO: 181610 - DNA, 231 bp, synthetic construct
  misc_feature 1..231: note = Description of Artificial Sequence: Synthetic coding sequence
  source 1..231: mol_type = other DNA
atggtggtgatgaacagcctgcgggtgatcctgcaggccagccccgggaagctcctctggaggaagttccagatcccacgttttatgcctgctaggccatgctcattgtatacatgcacctacaagacgcggaacagagcactgcaccccttgtgggagtcagtggatttggtgccgggtggcgatcggcagtccccgatcaacatacgctggcgggacagtgtttactag

SEQ ID NO: 181611 - DNA, 540 bp, synthetic construct
  misc_feature 1..540: note = Description of Artificial Sequence: Synthetic coding sequence
  source 1..540: mol_type = other DNA
atgcgggccctggtgctgctgctgagcctgttcctgctgggcggccaggcgcagcatgtctcagactggacctactctgagggagccctcgacgaagcgcactggcctcagcactatcccgcctgcggtggacaacgccagagtccaattaacctgcagaggaccaaggtgagatacaatccatcactgaagggactgaacatgacggggtacgaaacccaggcaggcgagttccccatggtgaacaacgggcacactgactggcaggctgagttgtttttgccatctttatcctcaccctgtggtgagggtgccaaacacaagggccaacgccagtggttatgcagcccgtcactagactcatggtgggaggccattattgacggcgggagcctctgggccactctcgccgagtgcgggctacgcgccgaaggtcccgaggagggacgacatatggaagagaaatcaccagccagccagggggcttgttccggaagtcgactgcctataagtagggggccctgtacattttttctatag

SEQ ID NO: 181612 - DNA, 942 bp, synthetic construct
  misc_feature 1..942: note = Description of Artificial Sequence: Synthetic coding sequence
  source 1..942: mol_type = other DNA
atgcgggccctggtgctgctgctgagcctgttcctgctgggcggccaggcacaacatgtcagtgattggacctactccgaaggggcgctggacgaagcccactggccgcaacactatccagcatgcggaggccagcgtcagagcccaataaatctgcagcgaaccaaggtccggtataatccctcactgaaggggcttaatatgaccgggtatgagactcaggcaggtgaattcccaatggtcaataatggacatactgttcaaatatccctgccctcaaccatgagaatgacagttgctgatggcactgtgtacattgcccagcaaatgcatttccattgggggggtgcgagctccgaaatctcaggatccgaacataccgtggacggaatccggcacgtaattgagatacatatcgtgcattataactcaaaatacaaaagttacgacatagctcaggatgcgcctgacggtcttgccgtgctggccgccttcgtagaagtcaagaactaccccgagaatacatactattccaattttattagccatctcgcaaatataaaataccctggccagagaactacactgactggactggacgtccaagatatgctgccacggaatctgcaacattattatacctaccacgggagcctcacaacccccccttgtaccgagaacgtacattggtttgtcctggccgactttgtgaagttatcacgcacccaagtctggaagctggagaactcattgttggaccaccgcaataaaaccattcataatgactaccgccgcacacagcccttgaatcatagagtagtggaatcgaattttcctaatcaaggcaagggacatggaggccatcgaggccggtcacagaaccccagggttcagcctacaagcaccagacaccccctcgccctcgggagtctggaggcctag

SEQ ID NO: 181613 - DNA, 927 bp, synthetic construct
  misc_feature 1..927: note = Description of Artificial Sequence: Synthetic coding sequence
  source 1..927: mol_type = other DNA
atgcgggccctggtgctgctgctgagcctgttcctgctgggcggccaagcccagcacgtgtctgactggacttacagcgagggggcattggacgaggcccattggccccagcattaccctgcatgcggaggccagcggcagtctccaattaacctgcagaggactaaagtgagatacaaccctagccttaaaggactgaacatgacaggctacgagactcaggccggcgagttcccgatggtcaacaacgggcacactgttcagatctccctgccctcaacgatgcgtatgactgttgccgacggtaccgtctatatcgctcagcagatgcattttcactggggcggcgcctcatccgaaatctctggcagcgagcacaccgtggatggcatacgccacgtaatcgagatccacatcgtgcactataacagtaaatacaagagttacgatatcgcacaggatgctcctgatggactagcggttctggcagccttcgtggaagtaaagaattatcccgagaacacctattatagcaacttcatctctcacctggcgaacattaagtaccctggacagaggaccactctcaccgggctggacgttcaggacatgctccccagaaacttgcagcactattatacctatcacgggtcccttacgacccctccatgcacagaaaacgtgcattggtttgtgctggcagatttcgtgaagttaagtagaacgcaagtctggaaactcgagaattcccttttggaccacagaaataagaccatacataatgactacagaagaactcagcccctgaaccatagagtcgttgaatcaaacttcccgaatcaggaatataccctcggttctgagttccagttttatcttcataaaatcgaggaaatcctggattaccttagacgggcgctgaattag

SEQ ID NO: 181614 - DNA, 795 bp, synthetic construct
  misc_feature 1..795: note = Description of Artificial Sequence: Synthetic coding sequence
  source 1..795: mol_type = other DNA
atgaccggccaccacggctggggctacggccaggacgacggccccagccattggcacaaactgtacccaatagctcagggcgatagacaatcaccgattaacatcatctcaagccaggcagtgtatagtcccagcttgcagccactggaactcagctacgaagcctgcatgtcactctctatcaccaataatggccattcagttcaggttgactttaacgactccgacgatcgcacagtggtgacaggaggacccctcgagggtccttaccggctgaaacagttccactttcactggggtaaaaagcatgacgtgggatccgaacacacagtggatggtaagagtttcccgagcgagctccatcttgtccattggaacgctaagaaatattccacttttggcgaggcagcttcggccccagacgggctagcggtggtgggagtgtttttagaaaccggcgacgaacatccaagcatgaacaggctcacagatgcactgtacatggtccgatttaaagggaccaaggcgcagtttagttgctttaatcccaagtgtctcctgccagcttcaagacattactggacataccccgggagtctgaccaccccacccctgagcgagtctgtcacatggattgtgctccgtgagcccatatgcatctcagaacgtcagatggggaagttccgctctctgctgtttaccagcgaggatgatgagaggattcacatggtgaacaactttcgcccccctcaacctttgaaaggccgcgtggttaaggcctctttccgagcctag

SEQ ID NO: 181615 - DNA, 627 bp, synthetic construct
  misc_feature 1..627: note = Description of Artificial Sequence: Synthetic coding sequence
  source 1..627: mol_type = other DNA
atgagcctgagcatcaccaacaacggccacagcgtgcaggtggactttaatgatagcgatgatagaaccgttgtgaccggtggaccattggagggaccctatcgactcaagcagtttcacttccactgggggaaaaaacacgacgtgggctctgagcacacagtggacggaaagagcttccccagtgaactccacctggtacactggaacgccaagaagtacagcacctttggggaggccgcttccgccccggatggcttagccgttgtgggtgtattcctagagacaggagacgagcacccgtccatgaacagattgactgacgccctttacatggtccgttttaagggcacgaaggcacaattctcctgcttcaatcccaagtgcctgctcccggcttcccggcattattggacctaccctgggagccttactacaccgcccctgtccgagtctgtcacctggatcgttctacgtgagccaatatgcatctccgagagacagatgggaaagtttcgctccctgttgtttacctcagaagatgatgagcgcatccacatggtgaacaattttcggccaccacagcctctgaaggggcgagtcgtgaaggctagctttcgggcctag

SEQ ID NO: 181616 - DNA, 873 bp, synthetic construct
  misc_feature 1..873: note = Description of Artificial Sequence: Synthetic coding sequence
  source 1..873: mol_type = other DNA
atggccgacctgagcttcatcgaggacaccgtggccttccccgagaaggaggaggacgaggaggaagaggaagaaggcgtggaatggggctacgaggagggcgtggaatgggggttagtcttccctgacgctaacggggagtatcagagccccatcaacctcaactccagagaagcgagatacgacccatccttgcttgacgtccggctgtcccccaattacgttgtttgccgggactgcgaagtcacgaatgatgggcacacaattcaggtcatcctgaagtccaaatctgtcctgtctggaggtcctctcccacagggacacgagttcgagttgtacgaagtgagatttcactggggtagagaaaaccagcggggcagcgaacacacagtcaatttcaaggcttttccaatggaattgcatctaattcactggaacagtactctattcgggagtattgatgaggccgtcggcaaaccccacggaattgccattatcgctctgttcgtgcagatcggcaaggaacacgtgggcttgaaagctgtgacggagatcctgcaagacattcagtacaagggaaagtcaaaaaccattccctgtttcaaccccaacacactgttgccggatcctctgctcagagactactgggtatacgaaggatccctgacaattcctccatgttcagaaggtgtgacttggattctcttccggtacccattgactattagccagcttcagatcgaagagtttcgccggcttcgcacacacgtgaagggcgcggaattagtggaaggttgtgacggtatactgggtgataatttcaggcctactcagccactctcggacagagtcataagagcggccttccagtag

SEQ ID NO: 181617 - DNA, 987 bp, synthetic construct
  misc_feature 1..987: note = Description of Artificial Sequence: Synthetic coding sequence
  source 1..987: mol_type = other DNA
atggagatcgtgtgggaggtgctgttcctgctgcaggccaacttcatcgtttgcatcagtgcacaacaaaacagtcctaaaatccatgaggggtggtgggcctacaaggaagtcgtgcaggggtcctttgtgcccgtgccgagtttttggggattggttaacagtgcctggaacctgtgttcagtaggtaagaggcagtcaccagtcaatattgaaacttcacacatgatattcgatcccttcctgacaccgctgagaattaatacgggtgggaggaaggtgagcggtacgatgtataacactggccggcatgtgtcattgagactcgacaaagaacatctggttaacatctcaggcggcccgatgacgtactcacataggctagaggagatccgcctccacttcggcagcgaggacagccagggctccgagcacttacttaacggtcaggccttttctggagaggtgcagctgatccattataatcacgaactatatacaaatgtgacagaggcagccaaaagccctaatggtctggtcgttgtttccatcttcattaaagtctctgatagttctaatccttttctcaatcgaatgcttaaccgggatacaatcacccggataacctataaaaatgatgcgtatctgctgcaaggactaaatattgaggagctgtatcctgaaacctcctctttcataacttacgacggaagcatgaccatcccaccatgctacgagaccgcgagctggatcatcatgaataaacccgtctatatcacgcggatgcaaatgcactcactcagactgcttagccagaatcagccttcacagatcttcctcagcatgtccgacaattttcggcccgtgcagccactgaataatcggtgcattcgaactaatatcaacttttctctgcagggcaaggactgtcctaataaccgcgcccagaaactacagtacagagtgaatgagtggttactcaagtag

SEQ ID NO: 181618 - DNA, 1005 bp, synthetic construct
  misc_feature 1..1005: note = Description of Artificial Sequence: Synthetic coding sequence
  source 1..1005: mol_type = other DNA
atggccagcatccggagccggagcggctgcggcttcaccgagcccgatgagttgtgcatggtgggcgtacgagagaatgcacaacagaattcacccaagattcatgagggatggtgggcatacaaggaggtcgtgcaggggagctttgtcccggtcccaagtttttggggactggtaaacagcgcctggaacctctgctcagtgggtaaacgacaaagcccggtgaatatcgagacgagccatatgatcttcgacccattcctcacaccgctgcggatcaataccggtggtcggaaggtcagcggaactatgtacaacactggccgccatgtctccctgcggctcgacaaggagcacctggtaaacatcagtggaggcccgatgacctactcccatagattggaggaaatcaggctccactttggcagcgaggatagccagggaagtgagcatctcctgaacggtcaggcctttagcggggaagtccaactcatccactataaccatgagttgtacactaatgtgactgaggctgctaagagcccaaatgggttagtggtcgtttcaatttttatcaaggtgagcgattcttccaatccttttctcaatcgtatgctaaacagggacacaattaccaggatcacatacaaaaatgacgcgtatctgctgcagggactgaacattgaggagctgtaccccgagacttcatcatttatcacttacgacggatccatgacgatacccccgtgttatgaaactgcttcttggatcattatgaataagcctgtctatattacccggatgcagatgcactccctgcgtcttctatcccagaatcaaccttcgcaaatttttctgagcatgtccgataatttccgaccggtgcaaccactgaataataggtgtatcaggaccaatatcaacttcagcttgcaggggaaggactgcccaaataaccgggcgcaaaaattgcaatatagggtcaacgaatggctgctgaagtag

SEQ ID NO: 181619 - DNA, 987 bp, synthetic construct
  misc_feature 1..987: note = Description of Artificial Sequence: Synthetic coding sequence
  source 1..987: mol_type = other DNA
atggagatcgtgtgggaggtgctgttcctgctgcaggccaacttcatcgtgtgtatatccgcgcagcaaaactcccccaagatccatgagggctggtgggcctacaaagaagttgttcagggctcttttgttcctgtaccaagcttctggggattagtgaacagcgcatggaacctttgctccgtgggaaagaggcagagtccggtaaatattgagacctcacatatgatctttgatccatttctcactccgctgcgcatcaatacaggaggaagaaaagtttccgggaccatgtataatactgggagacatgtgtcattgcgtctggacaaagaacacctcgttaacatctctggtgggcctatgacgtacagccacaggttggaggaaatcagactgcactttggcagcgaagattcacagggatctgagcatttgctcaacggacaagcgttctccggggaggtgcaactgattcattataatcatgagctgtacaccaatgtcacagaggccgcaaaatccccaaatggccttgtcgtcgtttccatttttattaaggtgagtgatagcagcaatccatttctcaatcgcatgttaaatagggacactattacacgtataacttataaaaacgatgcgtacctgttgcaggggctgaacatcgaagaattgtatccagagacatcaagctttatcacctatgacggtagcatgacaatccccccctgttatgaaactgcctcctggattatcatgaataaacctgtgtacattacccggatgcagatgcatagcttgcgactcctgagtcagaaccagccttcacagattttcctgtcgatgagtgacaacttcagacccgtgcagcctctgaataaccggtgcatcaggacaaatattaatttcagcttacaggggaaggattgtccaaataatcgtgcccagaaacttcagtacagggtgaacgaatggctgcttaagtag

SEQ ID NO: 181620 - DNA, 987 bp, synthetic construct
  misc_feature 1..987: note = Description of Artificial Sequence: Synthetic coding sequence
  source 1..987: mol_type = other DNA
atggagatcgtgtgggaggtgctgttcctgctgcaggccaacttcatcgtctgcatttctgcgcaacagaacagcccaaaaatccacgagggatggtgggcctacaaagaagtagtgcaagggtctttcgtgcccgtgccttctttctggggactggtgaatagcgcttggaatctgtgttccgtgggtaagcgccagagcccagttaatatagagacatctcatatgatcttcgatccctttctgaccccccttcgcattaacaccggtggaagaaaagttagcggcacgatgtacaacacagggagacacgtctccctaaggctggacaaggagcatctggtgaatatctctggcgggccaatgacatacagccaccgtcttgaggaaattcggctgcacttcgggtcagaagattcccaaggatccgagcatctgctgaacggtcaggctttcagcggcgaagtgcagttaatccattacaaccacgaattgtacactaatgtaaccgaggccgccaaaagcccaaatgggttggtggttgtgtcaatctttatcaaagtgtccgacagtagcaatccctttctgaaccggatgctcaatcgagacaccataacaagaatcacgtacaagaacgacgcctacctcttacagggcctaaatatcgaagagctttaccccgagacctcatctttcattacttacgatggctcgatgaccatccctccctgctacgaaacagcctcttggatcattatgaacaagccagtctatatcacccggatgcagatgcacagcttgagactgctgtcacaaaatcagccctcacagatattcctgtcaatgtccgacaactttcggccagtgcagcctctcaacaatcgatgtatcaggacaaacatcaatttttccctgcagggaaaggattgcccaaataatagggcccaaaagctgcagtaccgcgtcaacgagtggttgctgaagtag

SEQ ID NO: 181621 - DNA, 987 bp, synthetic construct
  misc_feature 1..987: note = Description of Artificial Sequence: Synthetic coding sequence
  source 1..987: mol_type = other DNA
atgggcgccgccgcccggctgagcgccccccgggccctggtgctgtgggctgctttaggagccgccgcgcatattggccctgcccccgatcccgaggattggtggtcgtacaaagacaatttgcagggcaacttcgtccccgggccacccttttggggtctggtgaacgctgcttggagcttgtgcgcagtgggtaaacgacaatctccagtagatgtggaactcaagagggtcctctatgatccctttcttccaccactacgactctccacagggggcgagaagctgcgcgggacactgtataataccggcaggcatgtttcatttcttccagctccgaggcctgtggtgaatgtgtctggggggcccctcctctattcccatagactcagtgagttgaggctgctatttggcgctagagacggcgcaggatccgagcatcagataaatcaccagggattctcagcagaggtacagctgatccactttaaccaggagctgtacgggaatttcagcgcagcttccaggggccccaatggactcgcgatcctgagtttgtttgttaacgtcgctagtaccagcaatccattcctgtcccggctgctgaatagagatactatcactaggattagttataagaacgacgcatacttcttgcaggatctgtctctggaactcctcttccctgagtccttcgggttcataacttaccaggggtccctgtctacccccccctgctcagagactgtcacatggatccttatcgatcgagccttgaacatcactagtctccaaatgcactcactgagactcttgagtcaaaaccccccatcccagatattccagtccttgagcggaaactctaggccactccagcccctcgctcaccgggcactcagaggcaatcgggaccctcggcacccggaacggaggtgtagaggcccaaactaccgacttcatgtggatggcgtcccccatggtcggtag

SEQ ID NO: 181622 - DNA, 1065 bp, synthetic construct
  misc_feature 1..1065: note = Description of Artificial Sequence: Synthetic coding sequence
  source 1..1065: mol_type = other DNA
atgccccggcggagcctgcacgccgccgccgtgctgctgctggtgatcctcaaagagcagccaagctctcccgcgccagttaatggatcaaagtggacatactttggtcctgacggcgaaaactcatggtcgaagaagtatccaagttgcggcggtctcctacagagccctatcgacctccacagcgatatcctgcagtacgatgcgagcctcactccactggagttccagggctacaacttgagcgctaacaaacagttcctcctcactaacaatgggcacagcgttaagctaaacctaccatccgacatgcacatccaaggcctccagagccgctatagcgctacccagttgcatctgcattggggaaacccaaacgacccccacggaagcgaacataccgttagcggccagcacttcgccgccgagctgcatatagtgcactataattcagatctgtatccggacgcctcaaccgcttccaataagagtgaaggcctcgcagttttggcagtgctgatcgagatgggtagcttcaacccttcatacgataagatcttttcccacttgcagcacgtgaaatataaagggcaggaggctttcgtgcccggcttcaacattgaggaactattaccagagagaacagccgaatactaccgctatagaggaagtttgaccacgcccccttgcaaccctactgtgctttggaccgtgttcagaaacccagtccagatctcacaggagcagcttctggctctcgagaccgcactgtactgtacacatatggatgatcccagtccccgggagatgataaacaatttccgtcaggtacaaaaatttgacgaacgcttggtatatacctctttttcccaggttcaggtctgtaccgccgcaggcctgtccctggggatcatcctgtctctggcgctggcggggatcctgggtatatgtatcgtcgtggtcgtctctatctggcttttccggagaaagagcataaaaaagggggacaataagggggtgatttataagcccgccacgaagatggaaactgaagctcatgcctag

SEQ ID NO: 181623 - DNA, 1032 bp, synthetic construct
  misc_feature 1..1032: note = Description of Artificial Sequence: Synthetic coding sequence
  source 1..1032: mol_type = other DNA
atgccccggcggagcctgcacgccgccgccgtgctgctgctggtgatccttaaggagcaaccgagttctcccgctcctgtgaacggaagcaagtggacctactttggtcctgacggtgagaacagctggagcaaaaagtacccttcatgtggaggactgctgcagtctcctattgacctgcactcggacatactgcagtatgacgcttccctgactccgctcgagttccaggggtacaacctgtcagccaacaagcagtttctccttaccaacaacgggcacagcgtgaagctgaatctcccaagcgatatgcatatccagggcctacagtctcggtacagcgcaacccagctgcacctccattggggtaatccaaacgacccacacggttctgagcacacggtaagtggccagcatttcgccgctgagctgcatatcgttcactacaactctgatttatatccagatgcgtccacagctagtaacaaatctgagggcttggccgtcttagccgttctgatagagatgggaagctttaacccaagttatgataaaatcttctcccatctccaacacgtcaaatataaagggcaggaagcctttgtgcccggattcaacatcgaggaactgttgcccgagcgtacagcagaatactatagatatcgggggtcattgacaacgccaccgtgcaatcccactgtgctgtggacagtgtttaggaatcctgttcagatttctcaggaacagctcctagcattggagacggccctttattgcacccacatggacgaccccagtccgcgtgaaatgatcaacaactttaggcaagtgcagaagtttgatgagcgcctcgtctatacctcgtttagccaggggatcatactgagcctcgctcttgcggggatccttggaatctgtattgtggtggttgtctctatttggctttttcgcaggaaatccatcaagaaaggcgacaacaagggagtgatctacaagccagcaaccaaaatggagaccgaagcacacgcgtag

SEQ ID NO: 181624 - DNA, 852 bp, synthetic construct
  misc_feature 1..852: note = Description of Artificial Sequence: Synthetic coding sequence
  source 1..852: mol_type = other DNA
atgccccggcggagcctgcacgccgccgccgtgctgctgctggtgatactcaaagagcagccctccagccccgctccagtcaatggctctaagtggacttacttcgtgaaactgaacctgccctccgatatgcatattcagggcctgcaatctaggtacagcgcgacccagctgcatctgcattggggtaatcctaatgacccccatgggtccgaacacaccgtgtctggacagcactttgcagccgaattgcatatagttcactataacagtgatctctaccctgacgctagcaccgcaagcaataagagcgaaggactagcagttcttgctgtactcatcgaaatggggtcattcaatccatcctacgacaagatcttctcccatctgcagcatgtaaaatacaagggtcaggaagcttttgtccctggctttaacatcgaagagctgttacctgaacgcactgccgagtactaccggtaccggggttcacttactacgcctccatgtaaccctaccgttttatggaccgtgtttcgtaaccccgtccaaatttctcaagagcagctgctcgctctggagacagctttgtattgtacccatatggacgacccgtcgccccgggagatgataaacaattttcgccaagtgcagaaatttgacgagcgcctggtctacacttccttttcacagggaataattctgtcactggctctggctggtatcttaggcatttgtattgttgtcgtggttagtatttggctttttagacgcaaaagcatcaagaagggcgacaacaagggagtgatctacaagcccgccacaaagatggagaccgaggctcacgcatag

SEQ ID NO: 181625 - DNA, 1014 bp, synthetic construct
  misc_feature 1..1014: note = Description of Artificial Sequence: Synthetic coding sequence
  source 1..1014: mol_type = other DNA
atgctgttcagcgccctgctgctggaggtgatctggatcctggccgccgatggagggcagcactggacctacgaagggccccacgggcaggaccattggccggcctcatatccggaatgcggaaacaatgctcagtcccccatcgatattcaaactgactctgtgacattcgaccccgacctgcccgccttgcagccccacggttacgaccaaccaggcactgagccacttgacctccataacaatggccacacggtgcagctcagtttacccagtacactgtacttgggggggctgccccggaagtacgtggccgcccagctgcacctgcactgggggcagaaaggaagccctggtggaagcgagcatcagatcaacagcgaggccaccttcgcagaactccacattgtccattatgattcagactcctatgactcccttagtgaagcggctgaacgcccgcagggactggcggttctgggcatcttgatcgaggtgggagagactaagaatatcgcctacgagcatattctgagccatctacatgaagtgaggcataaagaccagaagacttctgtgccacccttcaatttacgggaactgctacctaagcaactgggtcagtactttaggtacaacggttcactgaccacccctccttgctaccagtctgtcctgtggactgtattctacaggcggagccagatcagcatggagcagctggagaaacttcaaggaacactcttttcgaccgaagaggagccaagcaagcttctggtgcagaactacagggctctccagccactcaaccagcgtatggtgtttgcctcatttatccaagctggatcttcatacaccacaggcgagatgctttcactgggagttggtatcctagtgggttgtctatgtctactgctcgctgtatactttatcgcacgcaagattcgaaaaaaacggctggaaaatcgtaaaagtgtcgtgtttaccagcgcacaggccacaactgaggcgtag

SEQ ID NO: 181626 - DNA, 834 bp, synthetic construct
  misc_feature 1..834: note = Description of Artificial Sequence: Synthetic coding sequence
  source 1..834: mol_type = other DNA
atgagcagcggcatccacgtggccctggtgaccggcggcaacaagggcattgggctggccattgtcagggatctgtgccgcctcttcagcggcgatgttgtcctgaccgctcgcgatgtgaccagaggccaagccgcggtacagcaacttcaggccgaggggctcagcccacgttttcaccagcttgacatcgacgatctgcagagtatccgtgcattgagagattttttgagaaaagaatacggaggcctagacgtgcttgtcaataacgctgggatcgcttttaaggtggccgacccaaccccatttcacattcaagcagaagtcactatgaagacaaatttctttggtactagagacgtgtgcacagagttgttgcccctgatcaagccccaaggccgggtggtaaacgtgtcctcgatcatgagcgtgagggcactgaaatcctgctcgccggaactccagcagaagttccgatcggaaaccattaccgaggaggagttagtcgggctgatgaacaaattcgtggaggatacaaaaaagggtgtgcatcaaaaggaaggttggccgagcagcgcttatggagtgactaaaatcggagttactgtgctgtctcggatccacgccaggaaactgtccgaacaacgcaagggtgacaaaatattgcttaatgcctgctgccctggctgggtacgcacagatatggcgggacccaaggccacgaaaagcccggaggaaggcgcggaaacacctgtatacctcgccttactgcctcccgacgccgagggtccacatggacaattcgtaagtgaaaaacgtgttgagcagtggtag

SEQ ID NO: 181627 - DNA, 834 bp, synthetic construct
  misc_feature 1..834: note = Description of Artificial Sequence: Synthetic coding sequence
  source 1..834: mol_type = other DNA
atgagcagctgcagccgggtggccctggtgaccggcgccaaccggggaatcgggctggctattgctcgcgaattatgccggcagttcagtggagacgtcgtgctaacggccagggacgttgcacgtggtcaagccgctgttcagcaattgcaagcggaaggtcttagcccacgcttccaccagttagatattgatgatcttcagtcgattcgagctttaagggatttcctaagaaaggaatacggcgggctgaatgtactggtgaataacgcggcagtggcctttaaaagcgacgaccccatgccctttgacatcaaggcagagatgacactcaaaaccaactttttcgctacgaggaacatgtgcaatgagctgctgccaatcatgaaacctcacggtcgtgtcgtgaatattagttctcttcagtgtctgcgcgcctttgagaattgctctgaggacctccaggagaggttccactctgaaacactgactgagggagacctggtggaccttatgaaaaaattcgtggaggatacaaaaaatgaggttcacgaacgcgagggatggcccaacagcccctacggcgtgtctaagctcggagttactgtgctgtcccgaattctagcacggcgccttgacgagaaacggaaagccgacagaattctggtgaacgcctgctgccccggacctgtcaaaacggacatggacgggaaggatagcattcgtacagtagaggaaggggcggaaacccctgtttatctcgctctgcttccccccgacgctacagaaccccaaggtcagctcgtccatgacaaagtcgtgcagaattggtag

SEQ ID NO: 181628 - DNA, 2169 bp, synthetic construct
  misc_feature 1..2169: note = Description of Artificial Sequence: Synthetic coding sequence
  source 1..2169: mol_type = other DNA
atgctgaccatgggccggctgcagctggtggtgctgggcctgacctgctgttgggctgtggcctccgccgcaaagctgggggcagtgtacacagaaggcggctttgtggagggcgtcaacaagaagctggggttgctgggcgattccgtggatatttttaaggggattccgtttgctgcgccgaccaaggcactggaaaatccacaacctcaccccggctggcagggaaccctgaaggcgaaaaattttaagaaacgctgtctgcaggccacaatcacccaagatagcacctatggcgatgaggactgcctttatctgaacatctgggtcccccagggaaggaagcaggtgagtcgagatttgccagtgatgatttggatctacggtggggcctttctgatgggaagcgggcatggtgccaattttctaaataattacctgtatgatggggaagaaattgctactagagggaacgtcattgtggtaacctttaattatagggtgggtcccctgggctttctgtctactggagacgcgaacctgccggggaattatggcctgagggaccagcacatggccatagcgtgggtaaaacggaatattgccgcattcggaggagatcccaacaatattaccctatttggcgaaagcgccggtggagcttcggtttccttacagacccttagcccctataataaggggctgattcggagagccatctctcagtcaggagtcgctcttagtccgtgggttatacagaaaaaccctctgttttgggccaagaaagtggctgagaaggtgggctgcccagtcggagacgcggcgaggatggcccaatgcttaaaagttaccgacccaagagctctgacccttgcctataaagtgcccctggcgggccttgaatatccgatgctgcactacgtcgggtttgtccccgttatcgatggcgacttcatccccgcggacccaatcaacctctacgctaatgctgctgatatcgactatattgccgggactaataatatggacggtcatatctttgcctctatcgatatgcctgctattaataaaggcaataagaaggtcacagaggacttctacaagctggtttcggagtttaccatcactaagggcctccgcggtgccaaaacaacgttcgatgtgtatacagaatcatgggcacaggacccatcccaagagaataaaaagaaaactgttgttgactttgagaccgacgtattgttcttggttcctacagagatagcactggcccagcatcgggccaacgcaaagagtgcaaaaacttatgcttacctgttctctcatccttcccggatgccagtgtatcctaagtgggtgggagccgaccatgccgacgatattcagtatgtcttcgggaagcccttcgcgacccccactgggtacagaccccaggaccgcactgtgtccaaggctatgatcgcctattggactaacttcgccaaaaccggggatcccaacatgggcgactctgccgtgccaactcactgggaaccttataccacggagaactctgggtatctggaaattactaagaagatggggtcttcttcgatgaaaagaagcctgcggactaatttccttagatactggaccctcacatatcttgccctgcccacagtcactgatcaggaggccactcccgtgccacctacgggagacagcgaggccacccccgtgcctccaacaggcgatagtgagacagctccggtgcctcccactggagatagtggcgcaccacctgtacctccaactggggactccggagccccacctgtgccgcctacgggggacagcggcgccccaccagttcctccaaccggagactctggagccccccccgtgccccccaccggggacagcggtgcgccgcctgtcccgcccaccggtgacgccggtcctccaccggtcccgccaaccggtgactccggggcaccccctgtgcctccgaccggagattccggagcccctcccgttacaccgacaggggatagcgagactgctcccgttccacccacaggggatagcggagccccaccagtgcccccgacaggagattctgaggccgctccagtaccacccacggatgattcaaaagaagctcagatgcccgcagtcataagattctag

SEQ ID NO: 181629 - DNA, 2064 bp, synthetic construct
  misc_feature 1..2064: note = Description of Artificial Sequence: Synthetic coding sequence
  source 1..2064: mol_type = other DNA
atgggccggctgcagctggtggtgctgggcctgacctgctgctgggccgtcgcaagcgctgctaagctcggagctgtttacaccgaaggcggcttcgtggaaggcgtcaataaaaagttggggctgcttggagacagtgtcgacatttttaagggaatacccttcgccgctcctactaaggccctcgagaaccctcagccccacccaggctggcagggcacactgaaggctaaaaattttaagaagcggtgtctccaagcaaccataacccaggattccacgtacggggacgaggattgtctatatctgaatatctgggtgccacaaggtcgcaagcaggtgtcacgggacctgccagtcatgatttggatctatggaggtgcattcctcatggggagtggtcacggcgccaatttcctaaataattatctgtatgatggagaagaaatcgcaactagaggtaatgtaatcgttgtcacttttaactatagagtgggtcccttgggattcctcagcacaggcgacgcaaatttgcctggcaattatggtctgcgcgaccagcacatggctatcgcctgggttaagaggaacattgcagcgttcgggggggatcccaacaacattacgctattcggcgaaagcgcaggaggtgcctcggtcagtcttcagacattaagtccatacaacaagggcttgatcaggcgtgccatttcccagtctggagtagcgctgagcccttgggtgatccaaaaaaatccactgttctgggcaaagaaggtagcagaaaaagtgggttgccccgtgggggatgccgcgcgaatggcccagtgtctcaaggtgaccgacccacgtgctttaaccctcgcctataaggttccactggctgggttagagtaccccatgttgcactacgtaggattcgtgcccgttattgacggcgattttataccggccgaccctattaacttgtatgcgaatgccgcagacatcgactatatcgcaggcaccaacaacatggacggtcatatttttgctagcatcgacatgcctgccattaataaaggaaacaagaaagtgaccgaagaggacttttacaagctggttagcgagtttacaattaccaaaggcctgcgcggagccaaaaccacgttcgatgtctacactgagagctgggcccaggacccctctcaggagaacaagaagaagaccgtcgttgactttgagaccgacgtgctgttcttggtccctactgaaattgctctggcacaacacagggcaaatgccaaggatcccaatatgggcgactccgccgtgcccacccactgggaaccttacacaaccgaaaactctggatacctggagattactaaaaaaatgggtagtagtagtatgaaacgctctctgagaactaactttctcaggtattggaccctgacttatctcgcccttcctaccgtcactgatcaagaggcgacacccgtcccacctactggcgattcagaggcaacccctgtcccgcccaccggagacagcgaaaccgccccagtgccaccaaccggcgactccggagccccccccgtcccaccaacgggagacagcggagctccgcccgtaccaccaacaggagactctggagccccaccagtccctcccaccggcgacagtggcgcacctccggttcctcccactggcgatagcggagcacctcccgtccctcctactggggacagcggagcccctccggttcctccaacgggagactcaggcgcacctccagtacccccaacaggagactcaggagcacctcccgtgccccctactggcgacgcaggcccaccacccgtgccccccaccggcgacagtggtgctcccccggtgccccccaccggtgacagcggtgctccccctgtgacaccaacgggagattcagaaacagcccccgtgccaccaacgggcgacagtggggcccccccagttccacccaccggcgacagcgaggccgcccccgttcctcctaccgatgattctaaggaagcacagatgcctgcagtaatccgcttctag

SEQ ID NO: 181630 - DNA, 2271 bp, synthetic construct
  misc_feature 1..2271: note = Description of Artificial Sequence: Synthetic coding sequence
  source 1..2271: mol_type = other DNA
atgctgaccatgggccggctgcagctggtggtgctgggcctgacctgctgttgggcagtcgcatccgcagctaagttaggagcagtatacacagagggaggatttgtggagggagtcaataaaaagttagggttactgggggattcggttgacatcttcaagggcataccctttgcggctcctacaaaggcattggaaaacccccagcctcatcccgggtggcaaggcacacttaaggcaaaaaacttcaaaaagcgctgtctccaggctactattacccaagattctacctacggagacgaagactgcttgtacctcaacatctgggtgccgcagggacgcaagcaagtgtcccgcgacctccctgtgatgatctggatatacggtggtgcctttttaatgggcagcggtcacggggctaacttcctaaacaattatctgtacgacggagaggaaatagcaacgcgcgggaatgtcatcgtggttacttttaattacagggtcggacccctgggttttctttctactggtgacgccaacctccccggtaactatggactccgggaccagcacatggcgattgcctgggtgaaacggaatatagcagctttcgggggcgatcctaataatatcacgctcttcggtgagtcagcaggcggggcatcagtgtctctccaaaccctatccccttacaacaaaggcctgatccgcagagctatctcccagtcaggggtagcactcagtccatgggtcattcaaaaaaacccattgttctgggctaagaaggtggctgagaaggtggggtgcccggttggagatgcggcaaggatggcacaatgcttgaaggtgacagacccgagagctctcaccctggcgtacaaggtgccactggcagggctggaatatcctatgctacattacgtcgggtttgtccctgtgatcgatggcgactttatccctgctgatcctataaacttatatgcaaacgctgcggatattgattacattgccggcactaataatatggatgggcacatctttgccagcatcgacatgccggctattaataagggaaataagaaggttacggaagaggacttctataagcttgtgtcagagttcactatcacaaaaggactgagaggggcgaagacgacatttgatgtttatacagaaagctgggcccaggacccttctcaggaaaacaaaaagaagacagtagtggatttcgagaccgacgtcctattcctggtgcccactgaaatcgccctggctcaacatcgagctaacgccaaatccgcaaaaacctacgcgtacctgtttagtcatcctagtcgaatgccagtgtaccctaagtgggtcggcgcggaccacgccgacgacattcagtacgtgtttggcaaacccttcgcgactcccacgggctatagacctcaggaccgcacagtaagcaaggcaatgattgcttactggacaaacttcgctaagaccggggatcccaacatgggcgattccgctgtgcccacccactgggagccctatactaccgaaaattccggttacttggaaatcactaagaaaatgggttcttcgtcaatgaaacggagtttgaggactaatttcctccgctactggacactgacatatctggcgcttcctacagtgacagaccaggaggccacccctgtgccccccacgggtgactccgaggccacgccagttcctcctacaggggatagcgagaccgcacccgttccccccacaggagacagcggggcgccccctgttcccccgactggggattctggagcaccaccagtaccacccacgggggattcaggcgctcccccagtgcccccaaccggagacagcggcgccccccctgtgcctccaacaggcgacagtggcgcaccgcccgtgccccccaccggagactctggcgccccgcccgttccacccacaggggatagtggagccccccctgtcccaccaacaggagatagcggggcacccccagtgcctccaaccggggatgccggcccgcctccagtccccccaacgggggacagcggcgctccacccgtcccgccgacaggtgacagtggagccccccctgtgacaccaactggtgatagtgagaccgcccccgtgcctcccacaggcgactctggtgcccccccagtgccaccaaccggcgacagcgaagccgcccccgtgccacctaccgacgactctaaggaggcacagatgcctgccgtaataagattctag

SEQ ID NO: 181631 - DNA, 1707 bp, synthetic construct
  misc_feature 1..1707: note = Description of Artificial Sequence: Synthetic coding sequence
  source 1..1707: mol_type = other DNA
atgtggctgcgggccttcatcctggccaccctgagcgccagcgccgcgtgggcagggcaccctagttctcctcctgttgttgataccgtccatggaaaggtcctgggaaaattcgtatcactggaaggattcgctcagcccgtcgcaatcttcctggggataccttttgctaagcccccccttggccctttgaggtttacgccaccccaacccgctgagccatggagtttcgtgaagaacgctacatcgtaccccccaatgtgtacccaagatcctaaagccgggcagctcctctctgagctttttaccaaccgaaaggaaaacatcccattgaaactaagcgaggactgcctgtacctgaacatctatacccccgctgacctgaccaagaagaacagactgcccgtaatggtatggattcacggcggggggctcatggtgggtgctgcatctacttatgatgggctggccctggccgcccatgaaaatgttgtcgtggttactatacagtatcggctcggcatatggggcttcttcagcacgggggatgagcactccagaggaaactgggggcatctggaccaggtagcagcgctgcgctgggttcaggacaacattgcaagttttggcggtaatcccgggtctgtgacaatttttggcgaatccgctggtggtgaaagtgtgagcgtacttgttctgtcaccactggcgaagaacttgtttcatcgggccattagtgaatctggcgtggctctgacgtccgtgctcgtcaagaagggggacgtcaagcctcttgcagaacagatcgctatcaccgccgggtgtaagaccaccacttccgccgtaatggtccattgcttgcgccagaaaacagaggaagaattactggaaaccacgctgaagatgaaattcttatcactagacctgcagggagatccaagggaatcccagcccttactaggtacagtcatcgacggaatgttgctgctgaagacccctgaggagttgcaggccgaaagaaactttcacaccgtgccttacatggtggggattaataagcaagagtttggatggcttatccctatgcagttgatgagttaccctctgagcgaaggacagctggaccagaagaccgcgatgtccctcctgtggaaaagctatccccttgtatgcattgccaaggagctaatcccagaagccaccgagaaataccttggggggacagatgacactgtcaaaaagaaagacctgttccttgacctcattgccgacgtcatgttcggagttcccagtgtaattgtcgccagaaaccatagagacgcaggagcccctacttacatgtacgagtttcagtacaggccatctttctcctcagacatgaaacccaagacggtgattggtgaccacggcgatgaactgttttcagtgtttggggcaccgttcctcaaggagggggctagcgaggaagagatccgattgtctaagatggtcatgaaattttgggccaatttcgctcggaacgggaaccccaatggagaagggctcccccattggccagagtacaaccagaaagagggttatctgcaaatcggagctaacacccaagccgcccagaaactcaaggataaggaggtggcattctggaccaatctatttgccaagaaggcagtggaaaagcctccacaaactgagcacatcgaattatag

SEQ ID NO: 181632 - DNA, 1704 bp, synthetic construct
  misc_feature 1..1704: note = Description of Artificial Sequence: Synthetic coding sequence
  source 1..1704: mol_type = other DNA
atgtggctgcgggccttcatcctggccaccctgagcgccagcgccgcgtgggggcacccttcctcaccccctgtcgttgacacagtgcatggtaaggtcctgggcaaatttgttagtttagagggattcgcccagccagtcgccatcttcttgggtattcccttcgcaaaacctccactcggccctctgcgatttacccccccccagcccgcagagccctggtccttcgtgaagaatgccactagttatcctcctatgtgtacccaagatcccaaggccggccaactgttatccgagctcttcaccaataggaaagagaatattcctctgaagcttagtgaagactgcctgtacctcaatatttacacgccagcagatttaacaaagaagaaccgccttcccgtgatggtttggatccatgggggtggccttatggtaggggccgcaagtacttacgacggcctggctctggccgcccatgagaacgtcgttgtggtcaccatccagtatcggttgggcatctggggcttcttttcaaccggcgatgagcattccagaggcaattggggccatctcgatcaagtagctgccctgcggtgggtacaagacaatattgcaagctttgggggaaatcccggttcggtcacaattttcggtgagtcagccgggggagagtctgtctcagttctggtcctttccccgttagctaagaacctgttccatcgggccattagcgagtctggggtggctctgacaagcgtgctcgtcaagaagggggatgttaagcccctggctgaacagattgctattacagccggttgcaagaccacaacctctgccgtgatggtccactgtctccgccagaagaccgaggaagagcttcttgagacaactctcaagatgaaatttttatcattggatttgcagggcgatcctagagagtctcaaccgctattggggaccgtgatcgacgggatgctgttgctaaaaacgcccgaggaactccaggctgagagaaactttcatacagtgccatatatggtggggattaacaaacaggaattcggttggctgatccccatgcaattgatgagctaccccctgtctgagggccagcttgaccagaagaccgctatgtccctgctctggaaatcttaccctctggtttgtattgctaaggagctgatccccgaggctaccgaaaagtacttgggcggtaccgacgatacggtgaaaaagaaagatctgttcctggacctgattgctgatgtgatgtttggcgttccgtcggttatcgtggcaaggaatcatagggacgccggggccccaacatacatgtacgagtttcagtatcgcccgagcttttcgagcgacatgaaaccaaagacagttatcggagatcatggggacgaactcttttctgtctttggggcccctttcctgaaggaaggcgcttctgaagaggagataagattgtcaaaaatggtgatgaaattttgggcaaatttcgccaggaacggcaatcccaacggagaaggtctgccccactggcccgagtataaccagaaggaggggtatctgcagattggagctaatacacaggccgcccagaaactcaaggataaggaagttgccttctggaccaacttgttcgctaagaaggctgtcgagaaacctcctcagacagagcacatagaattgtag

SEQ ID NO: 181633 - DNA, 1701 bp, synthetic construct
  misc_feature 1..1701: note = Description of Artificial Sequence: Synthetic coding sequence
  source 1..1701: mol_type = other DNA
atgtggctgcgggccttcatcctggccaccctgagcgccagcgccgcgtgggggcatccttcaagcccgccagtggtggataccgtccatgggaaggtgcttggcaaattcgtctctctcgaaggcttcgcacaacccgtggcgatcttcctgggaatacctttcgcaaaacccccacttggtccactgaggttcacgcctccccagcctgcagaaccctggtcatttgttaagaacgccacttcatacccaccaatgtgcacacaggaccccaaagccggacaattgcttagcgaactattcacgaatcgcaaggagaatattcctctgaaactttctgaagactgcctgtatttgaatatctataccccagccgatcttacaaagaagaaccgtcttcctgtcatggtgtggatacacggcggcggcctgatggtaggtgcagcctcaacatacgatggtctagccctggccgcgcacgagaatgtcgtggtggtcactattcaataccgcctgggtatctggggctttttcagcactggggatgaacatagccgcggtaactgggggcacctcgatcaggtggccgccctccgttgggttcaggacaatatagcttcgttcggcgggaatcccggcagcgtgacaatcttcggggaaagcgctgggggagagtcggtgtcggtcctagtcctatcaccactggctaagaacctatttcatcgggccatttccgaatcaggtgtcgccttaacatcagtgttagtcaaaaaaggagacgtcaaaccacttgccgagcagatcgccatcactgccggatgcaaaaccactacatcagcggtgatggtgcactgtcttcggcaaaaaacagaagaggaactcctggagaccacacttaaaatgaaattcctgtctcttgatttgcagggagacccgcgagagagtcagcccttgcttggcaccgtaattgacggtatgttattgctgaagacccccgaagagctgcaggctgaaagaaactttcatactgtgccatacatggttgggatcaataagcaagagttcgggtggctcatccctatgctgatgtcctaccctctgtcagaaggacagctagatcagaagaccgctatgagcttgctctggaagtcatatcccctggtctgtatagccaaagagctgataccggaggccacagaaaaatacctcggaggaacagacgatacagttaagaaaaaagatttattcctggacttaattgccgacgtgatgtttggggtccctagtgtgatcgttgcccggaaccaccgggacgccggagccccaacctatatgtacgagttccagtaccggcctagctttagttctgacatgaaaccaaaaacggtgattggcgatcatggcgatgaactattctccgtgtttggagcacctttcctgaaggaaggagctagtgaggaagagattcgcctgagtaaaatggtcatgaagttttgggctaacttcgccagaaatggtaaccctaacggagagggcctgccgcactggcctgagtataatcaaaaagagggatacttgcaaataggcgctaacacgcaagcagcccaaaagcttaaagataaagaagtggcattttggaccaatctgttcgccaaaaaagctgtcgagaagccacctcaaaccgagcatattgagctgtag

SEQ ID NO: 181634 - DNA, 1299 bp, synthetic construct
  misc_feature 1..1299: note = Description of Artificial Sequence: Synthetic coding sequence
  source 1..1299: mol_type = other DNA
atggtgtggatccacggcggcggcctgatggtgggcgccgccagcacctatgatggcctcgcactcgccgcccacgagaacgtcgtcgtggtgacaattcaataccgactgggtatttggggatttttttccacgggtgacgagcattcgcgcgggaactggggccaccttgatcaggtggctgcccttcggtgggtgcaggataatatagcaagttttggcgggaatcctgggagcgtgacaatttttggcgagtccgccggcggtgagtccgtgtcagtgttggtgctgtctcctcttgcaaaaaatttgtttcatagagctatctcagaatcaggcgttgccctgaccagtgtgctcgtgaagaaaggcgacgtaaagccactagcggagcagatcgccatcaccgctggatgcaagacaactacaagcgccgtcatggtgcattgcctgcgccagaaaaccgaggaagagctgctcgagacgaccttgaaaatgaaatttctatcactggacctccagggtgatccccgggagtcacaacctcttttgggtacggtgatcgacggaatgctactgttaaaaacaccagaggaactgcaagcggagcggaattttcatacagtaccatacatggtggggattaataaacaggaattcggctggctgatccccatgcagttaatgtcctatccccttagcgagggccaactcgaccagaaaacagcgatgtctttgttgtggaagagctacccccttgtgtgcatcgcaaaagagctaatacccgaggctaccgagaaatatctcggcggcactgacgacacggtgaagaaaaaggatctcttcctcgacttgattgccgatgtgatgttcggcgtaccctccgtgatagtggcgcggaaccatagagatgctggcgcccctacttacatgtatgagtttcagtaccggcctagtttcagttccgacatgaagccaaagaccgtcattggtgatcatggcgacgagctgttttccgtgtttggagccccatttctgaaggagggcgcatcagaagaagagattcgcttatcaaaaatggtgatgaaattctgggccaatttcgcccggaacggcaatcctaatggcgagggtctcccccactggcccgagtacaaccagaaggagggctacttgcagatcggggccaacactcaggctgcacaaaagcttaaagataaggaggtggccttttggacaaatctgtttgccaagaaggccgttgaaaaacctccccagaccgaacatatagaactgtag

SEQ ID NO: 181635 - DNA, 1716 bp, synthetic construct
  misc_feature 1..1716: note = Description of Artificial Sequence: Synthetic coding sequence
  source 1..1716: mol_type = other DNA
atggagcgggccgtgcgggtggagagcggcgtgctggtgggcgtggtttgtctgctacttgcctgtcctgccaccgccacgggacctgaggtggcacagcctgaggtggacaccacccttggacgtgttcgggggagacaggtgggggtgaagggtacggatagacttgtaaacgtgttcctggggatcccgtttgcccagccccccctcggtccagaccgcttttctgctccccatccagcccagccctgggagggcgtccgggatgcctccaccgccccccccatgtgccttcaggatgttgagtccatgaatagtagtaggtttgtcctcaacggaaaacagcaaattttttccgtatccgaagattgtttggttttaaacgtttatagccctgctgaggtacccgcaggctctggcagacctgtgatggtctgggtgcacgggggtgccttgatcacaggggctgccacctcctacgacggcagtgcgttggctgcatacggcgacgtggttgtcgtgaccgtccaatatagactgggtgtgcttggattctttagtacgggggatgaacatgcaccgggtaaccagggctttctggatgtcgttgccgcacttcggtgggtacaggagaacattgctcccttcggcggggacctgaattgcgtaaccgtgttcggagggtctgctggcgggtccatcataagtgggctcgtgctgagccctgtggctgccggcctcttccaccgcgccatcactcagagcggcgtgatcactacacctggcattatcgactcacatccttggcccctggcccagaaaattgctaacactctagcctgtagtagtagttccccggcggagatggttcagtgcctacagcagaaggagggagaggagctcgtcctttctaaaaagcttaaaaacacaatctacccactgactgtggacggaaccgtttttcccaaaagccccaaagaactcttaaaggagaagcccttccacagcgttccctttttgatgggagttaataaccacgaatttagctggcttattccccggggatggggactactagatacgatggagcagatgtccagggaagatatgctggcaatttcaacccccgtcctgacttcactcgatgtgccacctgaaatgatgccaacggttatagacgagtatctgggaagcaactccgatgcacaggcaaagtgtcaggcttttcaggagttcatgggagacgtgttcattaacgtgccaaccgtgtctttcagcagatatctgagggattctggcagccccgtcttcttttacgagttccaacaccgacccagcagcttcgccaagattaagcccgcttgggtgaaggccgatcacggggcagagggtgcttttgtgttcggtggtccattcttaatggatgagagtagtaggctcgcctttcctgaagccacagaggaggaaaagcaactttccctgacaatgatggctcagtggacccattttgctcgcacaggagatccaaattctaaagcactacctccttggccccaattcaatcaagcggaacagtaccttgaaatcaatcctgttcccagagcgggacagaagtttcgagaagcctggatgcagttctggagcgagaccctgcccagcaaaattcagcaatggcatcagaagcagaagaacagaaaggcccaggaggatctgtag

SEQ ID NO: 181636 - DNA, 633 bp, synthetic construct
  misc_feature 1..633: note = Description of Artificial Sequence: Synthetic coding sequence
  source 1..633: mol_type = other DNA
atggagcagatgagccgggaggacatgctggccatcagcacccccgtcctgacgagcttagacgtgccacccgagatgatgcctacagtcatcgatgagtacctgggcagcaatagtgacgcacaggcaaaatgtcaagcttttcaagagtttatgggagatgtcttcattaacgtgcccaccgttagcttttctcggtatctcagggattcagggtcaccagtgtttttctacgagtttcaacatcggccaagtagtttcgctaagataaagccagcatgggtcaaggctgatcacggcgcagaaggggcgttcgtctttggcgggcctttcttaatggacgagagcagcagactcgcttttcccgaggcgacagaagaagagaaacagttatcactcacgatgatggcgcaatggacccacttcgcgcggacaggagatcccaactctaaggccctacccccatggccacaatttaaccaggccgaacagtatctggaaatcaaccccgtaccacgggccggccagaaatttcgggaggcctggatgcagttttggtcggaaaccctcccctccaagatccaacaatggcaccagaagcagaaaaatcggaaagcccaggaggacctgtag

SEQ ID NO: 181637 - DNA, 1707 bp, synthetic construct
  misc_feature 1..1707: note = Description of Artificial Sequence: Synthetic coding sequence
  source 1..1707: mol_type = other DNA
atggagcgggccgtgcgggtggagagcggcgtgctggtgggcgtggtttgtttattactggcatgccccgcgaccgcaaccggtcccgaagtggcacagcccgaagttgacactacgctgggcagagttcgtggtagacaggtcggggttaaggggacagaccgcctggtgaatgtttttctcgggatccctttcgctcagcccccactgggacctgatagattctctgctccacaccccgcgcaaccctgggaaggggtaagagatgccagcacagcccctcccatgtgtctacaggatgtagagtcaatgaattccagtcggtttgtactcaacgggaaacaacagatcttctctgtgagcgaggactgtcttgtgctgaatgtgtatagcccagctgaggtgcctgccggtagcggccgtcccgtaatggtctgggtgcacggaggtgcacttatcacaggagccgcaacttcatacgatggcagcgcccttgccgcttatggggatgttgtagtggtgacagtgcagtaccgactcggggtgttgggatttttttctaccggagatgagcatgcgccaggcaaccaaggctttctcgatgtcgtggccgccttgagatgggtgcaggaaaatattgcgcctttcggcggggacttgaactgcgtgacagtatttgggggcagcgctgggggcagcatcatttctggcctggtgttgagccctgttgccgctggcctcttccacagagcaatcactcagtcaggcgtgattacgactcccggtatcatcgattcacacccctggcctctggctcagaagattgcgaacacattggcttgttcctccagtagtccagccgaaatggttcaatgcctccagcagaaggaaggtgaagagctggtcctcagcaaaaagctgaagaataccatatacccactgacagtggacgggacagtatttccgaagagccctaaggagctcctaaaggagaagccctttcatagtgtgcctttcctcatgggcgttaacaatcacgaattctcctggctgatccccaggggttggggactgttagatactatggaacaaatgtctagggaggatatgctggctatctctacccctgttctgacctccctcgatgtgccacccgaaatgatgcctacagtgatcgacgaataccttggctcgaacagcgacgcgcaggccaaatgccaagcttttcaggagtttatgggggatgttttcattaatgtgcctacagtctcattttctaggtacctcagggactccggttctccagttttcttttacgagtttcagcaccggccatcttccttcgcaaagataaagccagcttgggtcaaggcagatcacggggcagagggtgcctttgtgttcggcggtccctttcttatggatgagtcctcccgcctggaagccaccgaggaggaaaaacagctgtccttaacaatgatggcccaatggacccattttgctcgcactggagatccaaacagcaaggccctgccaccatggccacagttcaaccaggctgagcagtatcttgaaattaatcctgtccccagggccggccagaagttcagagaagcctggatgcaattttggtccgaaacccttccgagtaagatccagcagtggcaccaaaagcagaaaaacagaaaagcacaagaggacctctag

SEQ ID NO: 181638 - DNA, 738 bp, synthetic construct
  misc_feature 1..738: note = Description of Artificial Sequence: Synthetic coding sequence
  source 1..738: mol_type = other DNA
atggccaacgaggcctacccctgcccctgcgacatcggccaccggttggaatacggaggattgggccgggaggtgcaggtggagcacatcaaggcttatgtcaccaaaagccccgtcgacgctggcaaagcagtgatcgtgatccaggatatatttggttggcagttaccaaacactcgttacatcgcagacatgatctcaggcaacggatatactacaatcgtcccagatttcttcgttggccaggaaccctgggatccttccggcgactggtcgatattcccggagtggctcaagaccagaaacgcgcaaaaaatcgatcgggaaatcagcgccattctcaagtacttaaagcagcagtgccatgcccagaagattggtattgtgggattttgttggggcggcacagccgtgcaccacttgatgatgaagtactccgagttcagggccggcgtgtccgtgtacggtatcgtgaaggattctgaggatatatacaaccttaaaaatcccaccctgttcatattcgctgagaatgacgtggttatacctcttaaggacgtatcattgctaacccagaaactgaaggagcactgtaaagtggaatatcaaatcaaaacttttagtggccagacacacggtttcgtgcataggaagagagaggactgttcacccgccgataagccatatattgatgaagccaggcgcaacctgatcgaatggctgaataagtacatgtag

SEQ ID NO: 181639 - DNA, 1260 bp, synthetic construct
  misc_feature 1..1260: note = Description of Artificial Sequence: Synthetic coding sequence
  source 1..1260: mol_type = other DNA
atgcggggcctgctggtgctgagcgtgctgctgggcgccgtgttcggcaaggaagacttcgtgggccatcaggttctgagaatttcggtggccgatgaggctcaggtccaaaaggtaaaagagcttgaggatctcgaacacttgcaactcgatttttggagaggccccgcacaccccgggtcacctatcgacgtgagagtcccatttcccagcattcaggcggtgaaaatcttcctcgaatctcatggaataagctacgaaaccatgattgaagatgtccaaagtttactggatgaggagcaggaacagatgttcgcctttcgctctcgagcccggagcaccgatacattcaactacgccacatatcacactctggaagagatttatgatttcctcgacttgctggtggcggaaaatcctcaccttgtctccaaaatacagataggcaacacctacgaaggacgccccatatacgtgctgaagttctcaaccggaggcagcaagagaccggctatttggatcgataccggaatccattcgagggagtgggtcactcaggcctctggcgtctggtttgccaaaaaaattacacaggactacgggcaggacgccgctttcacagccattctggataccctcgatatcttcctggaaattgtgacaaatccggatggctttgcattcacccacagcaccaataggatgtggcgaaaaacgaggagtcacaccgctggcagcctctgtattggcgtggaccctaatagaaattgggacgctgggttcgggctgtcgggtgcttcctctaacccctgctcagagacctaccatggaaaattcgccaacagcgaagtggaggtcaagtcaatcgtggattttgtcaaagatcacggcaacattaaagcgtttatatcaattcactcgtactcccagctcctcatgtacccatatggctataaaacagagcctgtgccagatcaagacgagctggaccagcttagtaaagccgccgttaccgcccttgccagcctgtacggcacaaagtttaactacgggtcaattataaaggccatctatcaagcatccggctcaaccatcgattggacttattctcaaggtatcaagtattcattcactttcgaattgcgtgacacaggacggtacggcttcctattgcccgccagccaaatcatacctaccgccaaggagacatggttagcactgcttactattatggagcataccctgaaccacccgtattag

SEQ ID NO: 181640 - DNA, 1098 bp, synthetic construct
  misc_feature 1..1098: note = Description of Artificial Sequence: Synthetic coding sequence
  source 1..1098: mol_type = other DNA
atggaccgggccgccctgctgggcctggcccggctgtgcgccctgtgggccgctcttttagtgctctttccttacggggcccaggggaactggatgtggctcggaatcgcttcgtttggtgtacccgaaaagttgggctgtgcaaacttgccgctcaacagccgtcaaaaagagctgtgcaaacgaaaaccctatctgctaccatctattagggaaggagcccgactggggatccaggagtgtggaagtcagttccgccacgagcgttggaattgcatgattaccgccgccgcgaccaccgcccccatgggcgcatctcccctgttcggatacgaattgtcaagtgggacaaaggagactgcatttatctatgctgtgatggcagccggtttagtgcactccgtgaccaggagttgctccgccgggaatatgaccgaatgttcgtgcgacaccacacttcagaatgggggttccgctagtgagggatggcattggggtggctgttcagatgacgtgcaatacggtatgtggttctctcgcaagtttctcgattttcctataggaaacaccactgggaaggagaacaaggtccttctggcgatgaatcttcacaataatgaggccggcaggcaagccgtggccaagttgatgtctgtggactgccggtgtcacggagtcagtggctcgtgtgctgttaaaacatgctggaagactatgtcatctttcgagaagatcggtcatttgctcaaagacaagtacgaaaattctatccagatttccgacaagaccaagcgcaaaatgaggcgcagagaaaaggaccaaaggaagatcccaattcataaggatgatctactgtatgtcaacaaatccccaaactattgcgttgaagataagaagcttggaattcccggcacccaagggcgcgagtgcaatcgcacttccgaaggcgccgacggttgtaatctcctgtgctgtgggcggggatacaatacgcacgtggttcggcatgttgagagatgtgagtgtaaatttatatggtgttgttatgtaaggtgcaggcggtgtgagtcaatgacagatgttcatacttgcaagtag

SEQ ID NO: 181641 - DNA, 1254 bp, synthetic construct
  misc_feature 1..1254: note = Description of Artificial Sequence: Synthetic coding sequence
  source 1..1254: mol_type = other DNA
atgcggctgatcctgcccgtgggcctgatcgccaccaccctggccattgcccccgtgcgctttgacagagaaaaggtctttagggtgaagccgcaggatgagaagcaggcagacataataaaagatctggcaaagactaacgagcttgacttttggtaccctggcgcaacccatcacgtggcggcaaatatgatggtggattttcgcgtgtctgaaaaggagagccaagccatccagagtgctttggatcaaaacaagatgcactacgagatcttgatccatgatctgcaggaagagatagagaagcagtttgacgtaaaagaggacatcccaggacgccattcttacgctaagtataacaattgggagaagatagtggcatggactgaaaaaatgatggacaaatacccagaaatggtcagccgaatcaagatcggctctacagttgaagataacccgctctatgttctgaagattggcgagaagaacgagaggcgaaaggctatcttcaccgactgcggaatccatgcccgggaatgggtgtcccctgccttttgtcagtggttcgtataccaagccaccaaaacttacggccggaataagatcatgaccaagttgttggacagaatgaacttctacatcctcccagtgtttaacgtggatggatatatctggagttggacgaagaaccgcatgtggcggaaaaataggtccaagaaccagaattcgaaatgcatcggcaccgaccttaatagaaacttcaatgcttcatggaactcgatccctaacactaacgatccctgtgctgacaattatcgagggtctgctccagagtccgagaaggagacaaaggcagtgacaaacttcatccgatctcacttaaatgagatcaaagtgtatattacatttcactcatattcacagatgcttttgtttccatatggctacacaagcaagcttccacccaaccatgaagaccttgctaaagttgcgaagatcggcacagacgtcttatcaacacgctacgagactcgctacatttacggtccaattgagtctacaatctatcctatttcaggatcctcgttagactgggcctatgacttaggaatcaagcacacgttcgcttttgaactgagagacaaagggaaattcggatttctactaccagaatcccgaatcaaaccaacttgcagggaaaccatgctcgcggtcaagtttatcgctaagtacatactgaagcacacatcctag

SEQ ID NO: 181642 - DNA, 1260 bp, synthetic construct
  misc_feature 1..1260: note = Description of Artificial Sequence: Synthetic coding sequence
  source 1..1260: mol_type = other DNA
atggccatgcggctgatcctgttcttcggcgccctgttcggccacatatactgtctcgagacgttcgtgggcgatcaggtactcgaaatagtcccttctaatgaggaacagatcaagaatctgctgcaattagaagctcaggaacatctgcagctggatttttggaagtcccccacaactcccggggagacagcgcacgtgcgtgttccattcgtcaacgtgcaggccgtgaaggtgtttctggagagtcaaggaatagcctacagcatcatgatcgaggacgtgcaggtcctgctggacaaggagaacgaagagatgctgttcaacaggcgccgcgaaagatcaggaaacttcaattttggcgcctaccatactcttgaagagatcagtcaagaaatggataatctagttgcagaacaccctggtctcgtgtctaaggtgaacattggctcttcctttgagaatcgtcctatgaacgtcctcaaattctccaccggaggggacaagcccgccatctggctggatgccggtatccatgcacgagagtgggtgacacaagctaccgcgttgtggactgcaaataagatcgtgagcgattatggcaaggacccctctattaccagcattctggacgctctggacattttcctgctgccagtcactaatcccgatgggtacgtgttttcacagaccaaaaaccggatgtggagaaaaacccgctctaaagtttcaggctcattatgcgttggtgttgatcccaacagaaactgggatgctgggtttggcggccccggcgctagcagcaacccatgcagcgactcttaccacggcccttccgccaacagtgaggtggaggtcaagtcaattgttgactttattaagtcgcacggcaaggtaaaggcctttataacattgcactcttactcgcaactgctgatgttcccctatggctacaagtgcactaagcttgacgatttcgacgagctgtctgaggttgcccagaaggccgctcagagtctgaggagcctgcacggaacaaagtacaaggtcggacccatttgctctgtcatatatcaggcttcagggggtagcatagactggtcatacgattatggcatcaagtacagttttgccttcgaattgcgcgatacggggaggtacggtttcctgctccctgccaggcagattttacctaccgcagaggagacctggctgggcctgaaggcgatcatggaacacgtaagggaccatccttattag

SEQ ID NO: 181643 - DNA, 1167 bp, synthetic construct
  misc_feature 1..1167: note = Description of Artificial Sequence: Synthetic coding sequence
  source 1..1167: mol_type = other DNA
atgcggtggatcctgttcatcggcgccctgatcggcagcagcatctgcggtcaggagaaattttttggtgaccaagtgttaaggattaacgttcggaatggagacgagatcagtaaactgagccaactagtaaactctaataacttgaaactaaacttctggaagtccccttcttcatttaacagacctgtggatgttcttgttccttccgtgagtctgcaagccttcaaatccttcttgcgatcccaagggcttgagtatgccgtaacaatcgaagatctccaaatttatcacgaaatggataacattgctgccgacttcccagatctcgcacgtagagtgaagattggacactcctttgaaaaccgtccaatgtacgtgctgaagttctctaccggcaaaggggtcagacggcctgccgtgtggctcaatgccgggattcattctagggaatggatttctcaggcaacagcaatctggacggctcgcaaaatcgtatcggattaccaaagggaccccgctatcacgagtatcctcgagaagatggatattttccttctgcctgtcgctaatccggatggatacgtctacactcagactcaaaatagactgtggcgtaaaacacgcagtcgaaatcctggctcatcatgtatcggggcagaccccaatcgcaactggaatgcctcttttgccgggaaaggggcctctgacaatccgtgctcagaggtttaccacgggccgcacgcaaattcagaggtggaagtgaagtcagtagtcgacttcatccagaaacacggtaacttcaaaggcttcattgacttgcattcctactctcagctgctgatgtatccctacgggtacagtgtgaaaaaggcccccgacgcagaggagctggataaagtggctcggctggcagcgaaagctcttgcatcagtgtcagggactgagtatcaggtgggacccacctgcacaacagtctaccccgccagtggcagcagcattgactgggcctatgacaacggcataaaatttgctttcacgttcgaattgagggatacaggcacgtatggcttcctccttccagctaaccagataatccctaccgccgaggaaacctggctgggcctcaagaccatcatggaacatgtgagggacaatctgtattag

SEQ ID NO: 181644 - DNA, 681 bp, synthetic construct
  misc_feature 1..681: note = Description of Artificial Sequence: Synthetic coding sequence
  source 1..681: mol_type = other DNA
atgaagatcgtgagcgactaccagcgggaccccgccatcaccagcatcctcgagaagatggatatcttccttctccccgttgccaatcctgatggctacgtctatacgcagacacagaaccgtctttggcgaaaaacaagaagccgcaatccagggagctcttgtattggggcggaccctaacaggaactggaatgctagttttgcagggaagggggctagtgacaatccctgctcagaggtctaccacggcccacacgccaactccgaagttgaagttaagtcggtggtggactttatccaaaagcacgggaactttaaggggtttattgatctgcacagctatagtcagttgttaatgtacccatatgggtacagcgttaaaaaagcgcctgatgcagaggaactggacaaggtcgcccgactggcagctaaagctttggcttccgtgtccggcaccgaataccaggttggcccaacctgcacaaccgtctaccccgcttctggatcttccatcgattgggcatacgataatggcataaagtttgcattcaccttcgaattaagagatacgggtacatatggtttcctcctgcccgcaaatcagatcattccgacagccgaagagacttggctgggcctgaaaaccatcatggaacacgtgagagacaacctgtactag

SEQ ID NO: 181645 - DNA, 582 bp, synthetic construct
  misc_feature 1..582: note = Description of Artificial Sequence: Synthetic coding sequence
  source 1..582: mol_type = other DNA
atgcaccacctgaacaagacccacagcggcctgatccacatgttctccatcggccgtagctacgaaggcaggagcctgttcatactcaagctgggccgccgctcccggctgaaacgtgctgtgtggatcgattgtggaatacacgcacgggaatggatcggcccggccttttgccagtggttcgtcaaggaggccctactgacctacaagtccgaccctgccatgcgcaaaatgctgaatcacttgtacttctatataatgcccgtattcaacgtggatggctatcatttctcatggacaaatgaccgattttggagaaaaacacgatccaggaatagtcgttttcggtgcaggggggtcgacgcgaatcgcaattggaaggttaagtggtgtgacgtgagtagcggatcgagcatggactgggcttataagaatggtattccttatgcattcgcgtttgaattaagagatacagggtatttcgggttcctcctccctgagatgctgattaaaccgacatgtactgaaaccatgcttgcggttaaaaacatcaccatgcacctactgaagaaatgcccatag

SEQ ID NO: 181646 - DNA, 1314 bp, synthetic construct
  misc_feature 1..1314: note = Description of Artificial Sequence: Synthetic coding sequence
  source 1..1314: mol_type = other DNA
atgaagtgcctgggcaagcggcggggccaggccgccgccttcctgccactgtgctggctctttctgaagatattacaaccgggccacagccacctctacaacaatcgctatgctggtgataaggtcatacgcttcatacctaagactgaagaagaggcctatgccctaaaaaaaatttcttatcagctgaaagtggatttgtggcagcccagttccatttcctacgtgtccgagggaaccgtgacagacgtgcacatcccgcaaaacggcagtagggctcttttggccttcttacaggaggctaatatccaatacaaagtgctgatcgaagatcttcaaaagactctagaaaaaggcagctctctccatactcaacgaaatcgaagatctctgtctggctataactatgaggtgtaccattcactggaagagatccagaattggatgcaccatcttaacaagacccactctggtctgattcacatgttttccatcgggcgatcctacgagggacggtccctgttcatcctgaagctgggtcggaggtcaagattaaagagggccgtatggatagactgcggcatccatgcgagagagtggatcggtccagcattttgccagtggttcgttaaagaggccttgctgacttacaaatccgatccagcgatgagaaaaatgctgaaccacctctatttctatatcatgcccgtcttcaatgtggatggctatcacttctcatggacgaatgataggttttggaggaagacaagaagccgcaactctcggttcagatgccggggcgtggatgctaaccggaattggaaagtcaagtggtgtgacgagggggcaagcatgcatccgtgtgatgatacttactgtggtccctttccagaatcagaaccagaggtaaaagccgtggccaatttcctccggaagcatcggaagcatatccgcgcttacttgtcatttcacgcctacgcacagatgctgctctatccttatagctacaaatacgctacaattcctaatttcaggtgtgttgaatcagctgcatataaagctgttaacgctttgcaatctgtatacggcgtgcggtaccggtacggccccgctagcaccaccctctatgttagctcaggaagttccatggattgggcttacaaaaacggtatcccctatgccttcgccttcgaattaagggataccggttactttggttttcttctccctgagatgctgataaagcctacgtgtaccgagacaatgttggcagtcaaaaacataactatgcacctgcttaaaaagtgcccgtag

SEQ ID NO: 181647 - DNA, 948 bp, synthetic construct
  misc_feature 1..948: note = Description of Artificial Sequence: Synthetic coding sequence
  source 1..948: mol_type = other DNA
atgaagtgcctgggcaagcggcggggccaggccgccgccttcctgcctctgtgctggctgtttctgaagatactacagcccggccactcccacctctacaacaatagatatgccggagacaaagttattagatttattcccaaaactgaggaagaggcatacgctttgaagaaaatttcttatcagctaaaggtggatctctggcagcctagttcaatctcctatgtgtccgaaggtactgtgaccgacgtgcacattcctcagaacggatcccgagcccttctggcttttctccaggaggccaatattcagtataaggttctcatcgaggatttacagaaaacgctggagaagggcagcagtctccacacgcagaggaatcgtaggtcattgagcgggtacaactatgaagtataccatagcttagaggagattcaaaattggatgcatcacctgaataaaacccactcgggcctgatccacatgttctcgatcggccgtagctatgagggaagatccttattcattttaaagctgggcaggaggtctagattgaagcgagctgtttggattgattgtggcatacatgcaagagagtggatcgggcccgccttttgccagtggttcgtcaaggaggctctgttgacgtacaagtccgaccccgcaatgagaaaaatgttgaaccacctctacttctacatcatgccagtgtttaatgtcgacggatatcacttctcctggaccaatgatcgtttttggcgcaaaacccgatctagaaattcacgttttaggtgtcggggcgtggatgctaatcgaaactggaaagtgaaatggtgtgggaaatttggtaccaattgggaccccgatccaaaggtgtccgccgggtttacactgcagaatatgtcgcctgaggattcccatggcagactcatgtttttctgcatgtag

SEQ ID NO: 181648 - DNA, 1272 bp, synthetic construct
  misc_feature 1..1272: note = Description of Artificial Sequence: Synthetic coding sequence
  source 1..1272: mol_type = other DNA
atgaagctgtgcagcctggccgtgctggtgcccatcgtgctgttctgtgagcagcacgtcttcgccttccaaagcgggcaggtccttgcagcgctgccccgcacctcgcggcaggtgcaagtgctgcagaacctaacaaccacctacgagatcgtcctttggcagcctgtaacagcagatctgatcgtaaagaaaaagcaagttcatttcttcgttaacgcatctgacgtcgataacgttaaggcccatctgaatgtgtcaggaatcccctgctccgtccttttggcagatgtggaagacctcatccagcaacagatatcaaatgacacggtgagcccccgcgcaagcgcttcctactacgagcagtatcatagcctaaatgagatttatagttggatagagttcatcaccgagcgtcatccagacatgctgaccaaaatacatatcggctcttcattcgagaagtaccctctgtatgttttaaaggtttcaggaaaggaacaggctgcaaagaacgcgatatggatcgattgcggtattcatgctagggagtggatttcaccagccttttgtctgtggtttattggacacattactcagttctatggaatcataggtcagtacaccaatcttctgaggctcgtggacttctatgtgatgcccgtggtgaacgtcgatgggtacgactattcttggaagaagaaccgcatgtggcggaagaataggagtttctacgcaaacaaccattgtatcggaaccgatttaaataggaattttgcctctaaacactggtgcgaggagggggcttctagctccagctgttcagaaacctactgcggactctatcctgagtcggagccagaggtgaaagcagtagcaagtttcctgcggcggaacatcaaccaaatcaaagcctacatttctatgcattcctactctcagcatatcgtattcccctattcttacacgaggtctaaatcaaaggatcacgaggaattgagccttgttgccagcgaagcagtgcgggctattgaaaagatttctaaaaacacgcgctatactcatggacacgggtcagagaccctctatctggccccaggtgggggggatgattggatctatgacctgggaatcaagtattcctttacaattgaactacgggatacaggcacgtatggcttcttgctccctgaacgctatattaaaccaacgtgtagggaagcattcgcagcagtcagcaaaatcgcgtggcacgtcattcgcaatgtatag

SEQ ID NO: 181649 - DNA, 1083 bp, synthetic construct
  misc_feature 1..1083: note = Description of Artificial Sequence: Synthetic coding sequence
  source 1..1083: mol_type = other DNA
atgaagctgtgcagcctggccgtgctggtgcccatcgtgctgttctgtgagcagcacgtgttcgcctttcagagcgggcaagtgctggcagccttgcccaggacctcaaggcaagtgcaggtgcttcaaaatctgacaacaacatatgagattgtcttgtggcagcccgtaaccgcagacctgatcgtcaagaaaaagcaggtgcacttcttcgtaaacgcctcagacgtcgacaacgtgaaagcacacctaaacgtgtcaggcatcccatgttctgttctgctagctgacgtggaagacctgattcaacaacagatctctaatgataccgtttctccccgtgcctcagcgagctactacgaacagtaccactctctaaatgagatatactcatggatcgaatttattactgaacggcaccccgacatgctcacgaaaattcacattggtagtagctttgagaaatacccactgtacgtgctgaaagtaagcggaaaggaacaagccgcaaagaacgcaatctggatcgattgtggcatccatgctcgggagtggatcagccccgcattttgcctctggttcatcgggcacaacagaatgtggcgtaagaatcggagcttttacgccaataatcactgcatcggcacagatctaaatcggaacttcgctagtaagcattggtgcgaggagggcgcctcttcctcttcctgcagcgagacgtattgtggcctgtaccctgagtctgagccagaagtgaaggccgttgctagttttcttcgtcgcaacatcaaccaaatcaaggcttacattagcatgcacagctacagccagcacattgtcttcccatatagttacacacgaagtaaatccaaggaccatgaggagttgtcactggtggcatctgaggcagtacgcgctatcgaaaaaatctcaaagaacacccgctatacgcacggccatggctctgagacactttacctggcacctggtggcggcgacgactggatctatgacctaggaattaaatactctgttacatctaaccccccagtggagaagctgctgccattgtcactgaagtag

SEQ ID NO: 181650 - DNA, 849 bp, synthetic construct
  misc_feature 1..849: note = Description of Artificial Sequence: Synthetic coding sequence
  source 1..849: mol_type = other DNA
atgctgcccctgctgcggtgcgtgccccgggtgctgggcagcagcgtggccggcctgcgggccgctgcacctgcaagccctttcagacagctgttacagcctgcacctcggctctgcactagaccattcggcttgctgtcagtgagggctggaagtgagaggaggcctggactcttgcgccctagaggcccatgtgcttgcgggtgcggctgtggatctctccacaccgatggggacaaggcctttgtggattttctgtccgacgaaattaaggaagaaaggaagatccagaagcacaagaccttgcccaagatgtccggaggatgggagcttgagttgaacggaactgaggcgaaactcgtgcggaaggtggcaggtgaaaaaataaccgttacattcaatatcaataactcaattccccccacgtttgatggcgaggaggagccgtcacaaggtcagaaggtagaagaacaggaaccggaattaaccagcacgccaaatttcgtggtggaagtgattaaaaacgacgatggtaagaaggcgctcgtcctggattgccattacccagaagacgaggtcgggcaggaggacgaagccgaaagtgacatcttctccatcagggaagtgtcttttcagagtaccggtgagtcagaatggaaggacactaattacactctgaacacagactcgttagactgggccctctacgatcatcttatggatttcttggccgaccgaggagttgataacacatttgccgacgagctggtggagttatccaccgccctggaacaccaggagtacataaccttcctcgaggatctaaagagcttcgtcaagtcacaatag

SEQ ID NO: 181651 - DNA, 3402 bp, synthetic construct
  misc_feature 1..3402: note = Description of Artificial Sequence: Synthetic coding sequence
  source 1..3402: mol_type = other DNA
atgcggttcgtgctgagcggcaacctgcacggcggcagcgtggtggcatcgtatccctttgacgactctcctgagcataaggccacgggaatctatagcaagacaagtgatgacgaagtatttaagtatctggctaaggcttacgcatctaaccatcccattatgaagactggggaaccccactgtcccggtgacgaagacgagacattcaaggatggcatcaccaatggggcccactggtatgatgtagaaggtggaatgcaggactataattacgtgtgggcgaactgtttcgaaattacgctggagctgagctgttgcaaataccccccagcttctcagttgcgacaggagtgggagaataacagggaaagtctgattactctcattgagaaggtacatattggcgtgaagggctttgtcaaggacagtattaccggctccggcttggaaaatgctacaatttcagtagccggcatcaaccacaatatcaccacagggaggttcggtgatttctacaggctgctggtgcccggcacctacaatctcaccgtagtattgacgggctacatgccccttaccgttacaaacgtggtcgtcaaagaagggcctgcaactgaggtggatttcagcctcaggcctaccgtcacgagcgtaatcccggatactacggaggccgtgagcaccgcatccaccgtggccatccctaatatactgtccgggacctcgagttcctatcagcccattcagccaaaagacttccaccaccatcacttcccagatatggagatctttctgagacggttcgctaacgaatatcctaatattaccaggctgtattcgctcgggaagtcggtagaaagtcgcgaactctacgttatggagataagtgacaatcctggtgtgcatgaacctggagaaccggagttcaagtatatcggaaacatgcacggcaatgaagttgtcgggcgcgaactgctgctgaatctcatcgaatacctgtgcaagaacttcggtacggacccagaggtcacagacttggtgcataatactagaatacacctgatgccttcgatgaaccctgatggctacgagaaaagtcaggagggcgacagcatctccgtcatcggaaggaacaattctaacaactttgacctcaaccgtaattttccagaccagttcgtccagattacggatccgacgcagcctgagacaatagcagttatgagttggatgaaaagctaccccttcgtattgtctgcaaatctgcatggcggctcgctcgtagtgaactacccctttgacgatgatgaacagggcctggctacctacagtaaaagcccggacgacgcagtgtttcagcagatcgcactgtcctacagcaaggagaacagccagatgttccagggcaggccatgtaagaatatgtaccctaatgagtactttccacatggaattacaaatggcgcttcctggtataacgtgcctggaggtatgcaggactggaactatttgcaaaccaactgtttcgaagttacaattgagctgggatgcgtaaaataccctctggaaaaggaattgcctaatttctgggagcagaatagacgcagcttaattcagttcatgaaacaagtgcaccagggcgttagaggatttgtgctggacgcgacggatggacgcgggatcctgaacgccacaataagcgtcgctgagattaatcaccccgtcacaacctataagaccggagactattggagattgctggtgcctggcacatacaagattaccgcatctgcccgagggtacaaccccgtgacaaagaacgtgactgttaagagtgaaggcgcaatccaggtcaactttactctagtcagatcctcgactgattcaaacaacgaatccaaaaaggggaaaggagcctcctcctccacgaacgacgcatcagatcccaccacaaaagagttcgagacacttataaaggatctgtccgcagagaacgggctggaaagcctgatgctgagatcaagtagcaacctggctctggccttgtaccgttaccactcatacaaggatttaagcgaatttctgcgcggactcgtgatgaattatcctcatatcactaacctgactaatctgggccagtccactgaataccgacatatatggtcactggaaatcagcaataagcctaacgtctcagagccagaggagcctaaaattaggttcgttgccgggatccacggcaacgctccagttggcacagagctgttgctcgcactcgctgaattcctctgtctgaactacaagaagaacccggctgtaacacagcttgtcgaccgcacccggatcgtaattgtgccatccctgaaccctgacggccgggagcgcgcccaggaaaaggattgcacgagtaagattggacaaacaaacgctagaggcaaggatctcgacactgactttacaaacaatgcaagtcagcccgagactaaggctattatcgaaaatcttatccaaaagcaggactttagcctgagcgtggctctcgatggcgggagtatgctcgtaacttacccctatgacaagccagtgcagacagtggaaaataaggagacactgaagcatctcgcgagtctgtacgctaacaaccatccatccatgcacatgggccaacctagctgtccaaataagagtgacgaaaatatcccgggtggcgttatgcgtggcgccgaatggcactcacatctgggatccatgaaggattacagtgtaacctatggtcattgtcccgagatcacagtgtatacgtcatgctgttatttcccttcagcagccagactcccatccctgtgggccgacaataagcgtagccttctgagcatgctggtcgaagtgcacaagggtgtccacggctttgtgaaggataaaacaggaaagccaatcagtaaagcggttattgtgctcaacgaaggaataaaggtgcagactaaagaaggcggttacttccatgtcttattggcgcccggtgtgcacaatatcattgctatcgcggacggttatcaacaacagcatagccaggttttcgtgcatcacgacgcagcttcctccgtggtgatcgtctttgatacagacaataggattttcgggctccccagagagctagttgttaccgtctctggagctaccatgtcggcactgatcttgaccgcctgcattatctggtgtatttgctctatcaagtcaaacaggcacaaggacggctttcaccggctcaggcaacatcacgatgagtacgaggacgaaattaggatgatgtcaaccggatccaaaaagtccctgctgagtcatgagtttcaggacgagacagacaccgaagaggagaccttgtacagtagcaaacactag

SEQ ID NO: 181652 - DNA, 1149 bp, synthetic construct
  misc_feature 1..1149: note = Description of Artificial Sequence: Synthetic coding sequence
  source 1..1149: mol_type = other DNA
atgcggcggcggcggcggctgcagcaggaggacggcatcagcttcgaatatcaccgataccctgagttgcgggaggcattggtttccgtctggttgcagtgcaccgctatctcaagaatctacactgtgggccgcagctttgaggggcgcgagctgcttgtaatcgaactgtccgacaatcccggcgtgcacgagcctggcgaacctgagtttaagtacatcggcaacatgcatggaaatgaagccgtgggtcgtgagttactgatttttcttgcccagtatctctgtaatgagtaccaaaaaggaaacgaaaccatcgtgaacctgatacattccactagaatacacattatgccctccctgaaccccgacggattcgagaaggccgcttctcagcccggcgagttgaaggattggtttgtggggaggtcaaatgcccaggggattgatttgaacagaaatttccccgatctcgaccggatagtatatgtcaatgagaaggaaggggggccgaataatcatctgctgaaaaatatgaagaaaatcgtggaccagaacactaaactggcgcccgaaacaaaggcggttattcattggataatggatatcccttttgtgctgagtgcgaacctgcacgggggagacctcgtggctaactacccatacgacgagactcgtagcggatccgctcacgaatattcctcatctcctgacgacgctatcttccaatcactagctagagcctacagttcgtttaaccctgccatgtcagacccaaataggcccccctgcagaaagaatgacgacgactcaagctttgtagacggcaccaccaacgggggcgcctggtacagcgtccctggaggcatgcaggattttaattatctgtcctctaattgtttcgagattaccgtagaactgagctgtgaaaagttcccccctgaagaaacactgaaaacgtactgggaggacaacaaaaactctctcatatcttacctcgaacagatccatagaggggtgaaagggtttgtaagggaccttcaggggaaccccatcgctaatgcgactatttcagtcgaaggtatcgaccatgatgtaacatctgccaaggacggtgactattggcggctgcttacctggaagctttag

SEQ ID NO: 181653 - DNA, 1431 bp, synthetic construct
  misc_feature 1..1431: note = Description of Artificial Sequence: Synthetic coding sequence
  source 1..1431: mol_type = other DNA
atggccggccggggcggcagcgccctgctggccctgtgcggcgcccttgccgcatgcggatggttgttgggggccgaagcccaggagccaggagcccctgctgctggtatgagaaggcggcggcgtttacagcaagaggatggaattagttttgaataccaccgatatccagaactacgtgaagctttggtctccgtatggctgcaatgtacggccattagtcgaatatacacagtcggtcggtctttcgaggggcgggagcttttagtgatcgagctgagcgacaatccaggtgtgcacgagcccggggagccagaatttaagtacatcgggaatatgcacggcaatgaggccgtcggtagagagctgctgatttttctggcccagtacctttgcaatgagtatcagaaaggcaatgaaaccattgtcaatctcattcactccacccggatacacatcatgccaagcctgaaccctgacggtttcgaaaaggccgcctctcaaccaggcgaactgaaagattggtttgtggggcggtccaatgcacaagggatcgatctgaatcgcaatttccctgatctggacagaatcgtatatgtgaatgagaaggagggtggaccaaataatcatttactgaaaaatatgaaaaagatcgtcgaccagaacaccaaactggcacccgagactaaagcagtcatacactggatcatggatatccctttcgtgctgagcgccaacctccatggaggcgatctcgtggcaaactacccatacgatgagacgagatctggatccgctcatgagtacagcagctcaccagatgacgccatatttcaaagtctggctcgggcctattcctccttcaaccctgcaatgagcgaccccaataggccgccttgcaggaagaacgacgatgactcaagctttgtcgacgggaccaccaacggcggcgcctggtacagcgtgcctggcggcatgcaggattttaattatttgtcctccaattgctttgagatcacagtggagctctcatgcgagaagtttccccccgaagagaccctgaagacctactgggaggataacaagaatagcctgatcagttatctggaacagatccaccgaggagtcaagggtttcgtacgcgacctccagggcaaccccatagccaacgccaccatcagcgttgaaggcattgaccatgatgtcactagtgccaaggacggtgactattggaggctactgattccaggtaactacaaattgacagctagcgcaccagggtatctggcaataactaaaaaggtagccgtcccttacagcccggccgccggtgtcgactttgaattagagagcttctccgagagaaaggaggaggaaaaagaggagctgatggaatggtggaagatgatgagtgagactttgaatttttag

SEQ ID NO: 181654 - DNA, 1332 bp, synthetic construct
  misc_feature 1..1332: note = Description of Artificial Sequence: Synthetic coding sequence
  source 1..1332: mol_type = other DNA
atggacttcccctgcctgtggctgggcctgctgctgcccctggtggcggctctggatttcaattatcatagacaggaagggatggaggccttcctgaaaactgttgcacaaaattattcatccgtgactcacctgcatagcatcggcaagtccgtcaaaggccgtaatctgtgggtgttggttgtgggtcggtttccaaaagaacatcggattgggatcccagagtttaagtacgtcgcgaacatgcatggcgatgagaccgtgggaagagaactcttattgcacctaattgattaccttgtcacatcagatggcaaggaccctgaaatcacaaacctcattaactccacccgcatacatatcatgccgtccatgaatcccgacggcttcgaagctgtcaaaaaaccagattgctactactctatcgggagagaaaattacaaccagtatgacctcaaccgtaacttccccgacgccttcgagtacaataatgtcagtaggcagcctgagacagtagccgtaatgaaatggcttaaaacagaaaccttcgtgctatcagccaacctacacggcggggcgctggtcgcttcctacccattcgacaatggcgtgcaagccactggagccctctattccaggtctttaacacccgacgacgatgtctttcagtacctggcccatacatacgccagcagaaaccctaatatgaagaagggcgatgaatgtaagaacaaaatgaactttcctaatggcgtaaccaacgggtactcatggtaccctctgcagggtggaatgcaggactataattacatttgggcccagtgttttgagattactctcgaactctcctgttgcaagtatccgcgcgaagaaaaactgccctcgttttggaacaataataaggcttcactcatcgagtatataaagcaggtgcatcttggtgtcaagggccaggtattcgaccagaatggcaatccactcccaaacgttatcgtggaggtgcaggatcgcaagcacatttgcccataccgcacaaacaagtatggtgaatactacctgctgctgttacccggttcatacataattaacgtaactgtcccgggacacgatcctcacattaccaaagttatcattcccgagaaaagccagaacttctcagccctgaagaaagatatcctgttgccattccaaggccagttggactccatcccagtgtccaacccctcgtgcccgatgatccctctgtatcgcaatttacccgatcacagtgccgcaacaaagccttcccttttcctgttcctggtgagcctcttgcatatattttttaaatag

SEQ ID NO: 181655 - DNA, 1332 bp, synthetic construct
  misc_feature 1..1332: note = Description of Artificial Sequence: Synthetic coding sequence
  source 1..1332: mol_type = other DNA
atggacttcccctgcctgtggctgggcctgctgctgcccctggtggcggctctggattttaactatcacagacaagaaggcatggaagcctttttgaaaactgttgcccagaactattccagcgtgacacatctgcacagtatcggtaaaagcgtcaagggcaggaacctctgggtgctggtcgttggccgcttcccaaaggaacatcggatcggcatcccagagttcaaatacgttgcaaacatgcatggtgacgaaacggtcggccgcgaattactgctccacctcatcgactacctggttacctcagacggcaaggatccagaaataactaacctaatcaactctacccggatccatatcatgccaagcatgaatccagacggcttcgaggctgtgaaaaagcccgattgttactactcaattgggcgtgagaattataaccagtacgacttaaaccgcaactttccggatgccttcgagtacaacaatgtttctcgccagcccgaaacagtagccgtcatgaaatggctcaagaccgagacatttgttctgagtgctaatttgcatggtggcgccttggtcgcctcttatccattcgacaacggggtgcaggccactggggcactttacagccgctcactgaccccagacgacgatgtgttccagtaccttgctcacacatacgccagtcgtaacccgaatatgaaaaaaggagatgagtgtaaaaacaagatgaacttccccaatggcgtgacaaacgggtactcttggtacccactgcagggcggaatgcaggattacaattacatctgggcgcagtgctttgagattacactggagctaagttgttgcaaatatccacgcgaggaaaagctaccctccttctggaacaataataaggcctctctcatcgagtatataaagcaggtgcacctgggtgtcaagggccaagtgtttgatcagaacggcaatccgctccccaacgtgatcgtggaagtgcaggatagaaaacatatttgcccatatcggacaaacaaatatggagaatactaccttctgttgctgcctgggtcctacattattaatgtgacggtgcctggtcatgacccacacattaccaaggtcatcatccctgaaaagtcgcagaatttcagtgcactgaagaaggacattctcctacccttccaggggcagctggacagtattccagtaagtaaccctagctgcccaatgatacccctgtaccgcaatcttccagaccattccgcggccacaaaaccatctctgtttctgtttctagtcagtttactacatatcttctttaaatag

SEQ ID NO: 181656 - DNA, 1332 bp, synthetic construct
  misc_feature 1..1332: note = Description of Artificial Sequence: Synthetic coding sequence
  source 1..1332: mol_type = other DNA
atggacttcccctgcctgtggctgggcctgctgctgcccctggtggccgctctggactttaattaccacagacaggaagggatggaagcgtttctcaagacggtagcacagaattactccagcgtgacccacctccattccataggcaaatccgttaagggaagaaatctatgggttctggtggttggcagattcccgaaggaacatagaataggaattcccgaattcaagtatgtggctaacatgcatggagacgaaactgtgggtagggaattactactgcatctgatcgactatctggtaaccagtgacgggaaagatccggagatcactaacctcataaatagcacaaggatccacatcatgccatccatgaacccagacggattcgaagctgtgaagaagcccgactgctactactccatcggtcgcgaaaactataaccagtacgacctcaatcgaaacttccctgatgccttcgagtataacaacgtgtcacggcagccggagaccgtagccgttatgaaatggctgaagactgaaacgtttgtcctgagcgccaatcttcacggcggtgctctcgtggcttcctacccctttgacaacggcgtgcaagcaacgggcgccctctatagcagatcactcacacctgatgatgatgtttttcagtatttggctcacacatatgcttcaagaaatccaaatatgaaaaagggcgacgaatgcaagaacaaaatgaactttccaaacggggtcacaaacgggtactcatggtatcctttacaggggggcatgcaggattataattacatatgggcgcagtgctttgaaatcactctggaactttcctgctgcaagtaccctagagaggaaaaactgccctccttctggaacaacaataaagcctcccttattgagtatatcaagcaggttcatctcggagttaagggccaggtgtttgatcagaacgggaatcctcttccgaatgtgatcgtagaagttcaggatcggaagcacatctgtccctatagaacaaacaaatacggagagtattatctcctactcctccccggatcctatattataaatgttaccgtgccgggacacgatccacatatcaccaaagttatcatcccggagaaatcacagaatttttccgctctcaagaaagacattctgctcccttttcaggggcagctggatagtatcccggtgtccaatccctcttgtcctatgattcctctctatcggaatctgcccgatcacagtgccgctacaaaaccctcactgtttttattcctggtgtctctcctgcatattttcttcaaatag

SEQ ID NO: 181657 - DNA, 411 bp, synthetic construct
  misc_feature 1..411: note = Description of Artificial Sequence: Synthetic coding sequence
  source 1..411: mol_type = other DNA
atggacttcccctgcctgtggctgggcctgctgctgcccctggtggccgccctcgattttaattaccatagacaagagggaatggaggctttcctgaaaaccgtggcgcagaactatagcagcgtgacccatctgcattccatcgggaagagtgtgaagggaagaaacttatgggtccttgtcgtggggagattccccaaagagcaccgcattgggattccggagtttaagtatgttgccaacatgcacggtgacgagactgtgggtagggagttactgctgcacttgatagattatctggtcactagcgatggtaaagatccagagatcacaaatctgattaatagcaccagaatccacatcatgccaagtatgaatccagacggattcgaggccgtcaaaaagccctag

SEQ ID NO: 181658 - DNA, 750 bp, synthetic construct
  misc_feature 1..750: note = Description of Artificial Sequence: Synthetic coding sequence
  source 1..750: mol_type = other DNA
atggacttcccctgcctgtggctgggcctgctgctgcccctggtggccgccctggacttcaattaccaccggcaggagggtatggaggcatttctaaagacggtagcccagaattattcctccgtgactcacctgcattctattggaaagtccgtcaaaggccgcaacttgtgggtcctagtggtgggcaggttcccaaaggaacaccgaattggcatccctgaatttaagtatgtagctaacatgcacggcgatgaaaccgtggggagggaattgctgctgcatttgatagactacctggttacgtctgacggcaaggatcccgagattacaaatctgatcaacagcacccgcattcacattatgccatcaatgaaccctgacggcttcgaagctgtgaaaaagcccgattgctactattcaatcgggcgcgagaactataatcaatacgaccttaaccgtaacttccccgatgcttttgaatacaacaacgtttctcgccagccggaaacggttgccgttatgaaatggcttaaaacagagaccttcgtactgagtgccaatcttcacggaggcgcgctagtggcctcctaccccttcgacaatggggtgcaggctactggtgctttatactctcggagcttgacccccgatgacgacgtgtttcagtacttggcccatacttacgcaagtaggaatcccaacatgaagaagggcgacgagtgtaagaacaaaatgaatttcccatag

SEQ ID NO: 181659 - DNA, 1332 bp, synthetic construct
  misc_feature 1..1332: note = Description of Artificial Sequence: Synthetic coding sequence
  source 1..1332: mol_type = other DNA
atggacttcccctgcctgtggctgggcctgctgctgcccctggtggccgccttagactttaactatcaccgccaggaaggaatggaggcttttctcaagaccgtggcccagaactactcgtctgtaacacatcttcatagtataggaaagtctgtgaaaggccgtaacctttgggtgctcgtggttggaaggttccccaaagaacatcgaattggcatcccagaattcaagtacgtggccaacatgcacggcgatgaaacagttgggcgtgaactgctccttcacttaatcgattatctggtgacttccgacgggaaggacccagagatcaccaacctgatcaattccacgcgcatccacatcatgcctagcatgaaccctgacggttttgaggctgtgaagaagccagattgttactacagtatcggacgggagaactacaaccaatatgatctgaatcgcaattttcctgatgcgttcgaatataataacgtgtccagacaacctgaaactgtggctgtcatgaagtggctgaaaaccgagacctttgtgctttcggcaaatctgcacggaggagccctcgtggcaagctacccctttgataacggagtgcaggccacaggcgccctttacagcagatcccttacaccagacgatgatgttttccagtacctggcccacacatacgcatcccggaacccaaatatgaaaaagggggacgaatgtaaaaacaagatgaacttcccaaacggggtgacaaatgggtatagctggtatccactccagggcggcatgcaggactacaattatatctgggcgcagtgcttcgaaatcacacttgagttatcttgctgtaagtacccgagggaggagaagcttcccagcttctggaataacaacaaggcgtccctgatcgagtatattaagcaagtgcacctgggggttaagggtcaggtctttgatcaaaatgggaatcctctgccaaacgtcatcgtggaagtgcaagatcggaaacacatttgcccttacagaaccaataagtacggcgagtattatctgctcctgctgccggggagctatatcatcaacgtgacagtaccaggacatgaccctcacatcactaaggtcatcatccctgaaaaatctcagaacttctcagccctcaaaaaggatatcctgctgccctttcaggggcagctagattctataccagtgtccaacccttcctgtcccatgattccactgtaccgaaacctacctgaccactctgcagccactaagccatcgttgttcttgtttctggtcagtctacttcatattttttttaaatag

SEQ ID NO: 181660 - DNA, 1377 bp, synthetic construct
  misc_feature 1..1377: note = Description of Artificial Sequence: Synthetic coding sequence
  source 1..1377: mol_type = other DNA
atgagcgacctgctgagcgtgttcctgcacctgctgctgctgttcaagttagtggccccggtaacattcagacatcacaggtacgatgacttagtacgtacactgtataaagtgcagaacgaatgtcctggcataacacgggtctatagcatcggtagatctgtggagggccgccacctctatgtattggagttttccgatcacccaggtatacacgagccccttgaacctgaggtaaagtatgtcgggaacatgcatggcaacgaggcgctaggacgggagctgatgctgcagcttagcgagttcttgtgcgaagagttcagaaaccgaaaccagcgcatcgtgcaactgatccaggacactcgaatccacatcctgcccagcatgaatccagacggttacgaggtggctgccgctcagggccccaataagccaggatacctagtgggtaggaacaacgcaaatggcgtcgatctgaatcgcaatttcccagatttgaatacttacatatactataacgaaaagtatgggggcccaaatcaccacctgccacttccggacaactggaagtctcaggtagagcccgaaacccgcgctgtcattcgctggatgcactcctttaatttcgtgctgtccgcgaaccttcacggcggcgcagttgtggcaaattacccctatgataaaagtttcgagcacagggtacgaggagtacgtcggacggccagcacacccactccggacgataagcttttccagaagctggctaaagtgtacagctacgcccatggctggatgttccaaggttggaactgtggtgactattttcctgatggaatcactaatggggcctcctggtactctctgtccaagggcatgcaggacttcaactacctgcacaccaattgcttcgagatcactcttgagctgagctgtgacaaatttccaccagaagaagagctgcagcgggaatggttaggtaacagagaggccctcattcagttcctggagcaggtgcaccaggggatcaaaggtatggttctggacgaaaactacaacaacctcgctaatgccgtcattagtgtgagcggaatcaaccacgatgtcactagcggggatcacggggactacttccggctgttgctccccggaatatacaccgtgtccgccacagcgcccggctacgatccagaaactgtgaccgtaacagtcggacccgctgagcccaccctggtgaatttccacctcaaacggagtatacctcaggtgagccctgtgagacgggccccttcccggcgtcacggagtcagggccaaagttcagccacaggcccggaagaaagagatggagatgcgtcagctgcagcgcggccctgcttag

SEQ ID NO: 181661 - DNA, 615 bp, synthetic construct
  misc_feature 1..615: note = Description of Artificial Sequence: Synthetic coding sequence
  source 1..615: mol_type = other DNA
atgcacagcttcaacttcgtgctgagcgccaacctgcacggcggcgccgtggtcgccaattacccttacgataaatcctttgaacatcgtgttagaggggtgaggcgcacagcctccacgcctacccctgacgataaactgtttcaaaagctggccaaagtgtactcctatgctcatggatggatgttccaaggatggaactgcggtgattactttcctgatggtatcaccaatggcgcatcctggtattcccttagtaaaggtatgcaggacttcaattacctgcataccaactgttttgagataaccctggagctatcttgcgataagtttccccccgaggaggaacttcagagagaatggcttggcaaccgtgaggcattgatccagtttctggaacaggtgcatcagggtataaagggcatggttctagacgaaaactacaacaatctggccaatgctgttatatcagtgtccggcatcaatcacgatgtcaccagtggcgatcacggagattatttccgcttactgctcccaggcatttataccgtaagtgccaccgctcccggttacgaccccgagacagtaactgtgaccgtgggacctgccgaatag

SEQ ID NO: 181662 - DNA, 1638 bp, synthetic construct
  misc_feature 1..1638: note = Description of Artificial Sequence: Synthetic coding sequence
  source 1..1638: mol_type = other DNA
atgctgcccggcgcctggctgctgtggaccagcctgctgctgctggcccgtcccgctcagccgtgccccatgggatgtgattgctttgtgcaggaagtcttctgttctgatgaagagcttgcgactgtgcccttggacatcccgccgtatacaaaaaacatcatcttcgtcgagacttcctttaccaccctcgaaaccagagctttcggctctaatcccaacctgaccaaggtggtgttcctgaatacacagctctgtcagttcagaccagatgcctttggtggcctgccaagacttgaggacctagaggtgacagggagttccttcctcaacttgtccacaaacatctttagcaacctcacgtcattgggtaagctgaccttgaattttaatatgctcgaggcgctacccgagggtctcttccagcatctcgccgctctggagagcctgcacctacaagggaatcagttgcaggccctgcctagacgcctctttcagcctctaacacatctgaagacattgaacctagctcagaacctcttggcccagctccctgaggaattattccacccattaacatccctacaaaccctgaaactgtccaataacgctttgtcggggctgccccagggtgtgttcgggaagttgggttcactgcaagaactgtttctggatagcaataacatcagcgagttgcccccccaggtcttctctcagcttttttgcttagagcgcctgtggctacagagaaacgccatcactcacttaccactgagcattttcgcaagcctcggaaatctgacattcttgagcctgcagtggaatatgctgcgagttctccccgctggattattcgctcataccccttgtcttgtgggactctccctcacccacaatcaattagaaactgttgccgaaggcacatttgcccatttgtccaacctgcgatccctgatgctgtcttacaacgccatcacacatcttccagccggcatttttagggatctggaggaattagtgaagttgtatctgggctcaaataacctcaccgcactccatccggccctcttccagaatctgagcaagttggagctgctgtctctcagcaagaatcagctgacaacgttacccgaaggcatatttgatactaactacaatttgtttaatctcgccttgcatgggaacccttggcagtgcgattgccacctggcgtatctgttcaactggttgcaacagtacaccgacagactgctgaacattcagacctattgcgcaggtccagcgtatttaaagggtcaagttgtaccagcattgaacgagaagcaactagtgtgtcctgtgaccagggatcatctcggattccaggtgacctggcctgacgagagcaaagccggtggctcttgggatttggccgtgcaagaacgcgcagcccggtcacagtgcacgtatagcaaccccgaggggacggtcgtgcttgcctgcgaccaggcacaatgtagatggctgaacgtgcagttgtccccacaacagggaagtctgggactgcagtacaatgccagccaggagtgggatctccgttccagttgcgggagcctgcggttaacggtttcaattgaggcccgagccgcaggcccctag

SEQ ID NO: 181663 - DNA, 1638 bp, synthetic construct
  misc_feature 1..1638: note = Description of Artificial Sequence: Synthetic coding sequence
  source 1..1638: mol_type = other DNA
atgctgcccggcgcctggctgctgtggaccagcctgctgctgctggctcgccccgctcaaccatgcccaatggggtgtgactgtttcgtgcaggaggtgttttgttccgacgaggaattggccaccgttccactggacattcccccctatacgaagaatatcatcttcgtggagaccagttttaccaccctcgagactagagcttttggctctaatcccaatctgaccaaggtagtgttcctaaatacgcaactgtgccaattccggccagatgctttcggcggattacctaggttagaagatctggaagttaccggatcctcgttcttaaatctctctaccaatattttcagcaatctgacctctctggggaagctgactctgaactttaacatgctcgaagctttgccggaaggcctgtttcagcacctagctgctcttgagtccttgcacctccaggggaatcaactgcaggccctgcccagacgtctgttccaaccgctcacccatcttaagaccctgaaccttgctcagaatctgctggcccagttgcctgaagaactgtttcatcctctgaccagtctccagaccctgaagttgagtaataatgccctgtccggactgcctcagggcgttttcggtaagctaggctcacttcaagagctgtttctggattcaaataatatctctgaacttcccccgcaggtttttagtcaactgttctgcttagagcgcttgtggctgcaacgaaacgctattacacacctgccactttcgatctttgctagcctcggcaacttgacctttcttagcttgcagtggaatatgctgcgcgtgctgcccgcaggattgttcgcccatactccttgcttagtcggtctgtctctgacgcacaatcaattggaaacagtagcagagggcaccttcgcacacctgagtaacttaagaagtttgatgttgagttacaacgctatcacacaccttcctgcagggatctttagagatttggaagagctggtcaagctgtatttgggctcaaataatctcacagctctccacccagctctgtttcagaatttaagtaaactcgagctcctgtctctgtccaagaaccagctgacgactttacccgaaggcatctttgatactaactacaacctgttcaatttagcactgcacggtaatccatggcagtgcgattgtcatttggcctacctgtttaattggttgcagcagtacacagaccgactgttgaatattcaaacgtattgcgcaggccctgcatatctgaaaggacaggtggtacctgccttgaacgaaaagcagctggtgtgtccggtaacgcgcgatcacctgggttttcaggttacgtggcccgacgagagtaaagctggtgggtcttgggatctcgcagtgcaagaaagagcagccaggtcccagtgcacgtatagcaatcctgaaggaactgtggtcctggcatgcgatcaggcccagtgcagatggctgaacgtgcagctcagtccccagcagggcagccttggcctgcaatataacgcctcacaagagtgggatctgcgatcctcctgcgggtcccttaggctaacggtctcaattgaagcccgagccgctggtccttag

SEQ ID NO: 181664 - DNA, 1431 bp, synthetic construct
  misc_feature 1..1431: note = Description of Artificial Sequence: Synthetic coding sequence
  source 1..1431: mol_type = other DNA
atggtgggcgccatgtggaaggtgatcgtgagcctggtgctgctgatgcccgggccatgtgatggcctgtttaggagtctataccgctcagtgtccatgcctccaaaaggcgactccggccaaccccttttcttgactccctacattgaggcaggcaaaatacagaaaggtcgggagctctcattggtggggccattccccggccttaatatgaaatcatatgcagggttcttaactgtgaataaaacctacaatagcaatctctttttctggttcttccctgcccagattcagccagaggacgcccccgtcgtgctctggttacaggggggccccgggggttcttccatgtttggtttgtttgtggagcacggcccctatgtcgttactagtaacatgacactgagggatcgcgattttccttggactaccaccctttccatgctgtacattgacaacccggtgggcacaggatttagttttactgacgatacacatggctatgcagtgaacgaggatgacgtggccagggacttgtattctgcactcattcagttctttcagatatttcctgaatacaagaataacgatttctatgttaccggcgagagctacgcagggaaatacgttcctgccattgcacacctgattcattctctcaaccctgtccgcgaggtgaagattaacttgaatgggatagccatcggcgacggttactccgacccagaatcaatcataggaggatatgcggaattcctttaccagattgggctgttggacgagaagcagaaaaagtacttccagaaacagtgtcatgaatgtattgaacacatcaggaagcaaaattggttcgaggcttttgagatattagacaagttgctcgacggggatctgacttcagaccccagctactttcagaacgtaactgggtgcagtaattattacaattttttgcgatgtaccgagccagaagaccagctgtattacgtgaaatttctctcattacctgaagtcaggcaagctattcacgtggggaaccaaacattcaatgacggaactatagtcgagaagtacctacgtgaggataccgtgcagtcagtgaagccctggttgacagaaattatgaacaactacaaagtgctcatatacaacggtcagttagatatcatagtggccgccgcactgacagagaggtccctgatggggatggattggaagggcagccaggagtataagaaggccgagaaaaaggtgtggaaaatcttcaaaagcgattctgaggtggctggctatattcggcaggcaggagacttccaccaggtgatcatccgcgggggagggcatatccttccttatgatcagcctctacgggcttttgacatgatcaaccgcttcatctacggtaaagggtgggatccctacgttgggtag

SEQ ID NO: 181665 - DNA, 1431 bp, synthetic construct
  misc_feature 1..1431: note = Description of Artificial Sequence: Synthetic coding sequence
  source 1..1431: mol_type = other DNA
atggtgggcgccatgtggaaggtgatcgtgagcctggtgctgctgatgcctggcccatgcgacgggctgttccgctctctgtaccgaagcgtgtccatgcctcccaagggggacagtggccagcccctgttcctcacgccatacattgaggccggtaaaatccagaaggggagagagctgtcgctcgtaggccctttccccggattgaatatgaagagctacgcggggttcctaaccgtgaacaaaacctataactccaatctcttcttctggtttttcccggcccagattcagcctgaggacgctccagtggtgctctggctgcagggtgggcccggcggttcatcaatgttcggattgttcgtagaacatggaccatatgtcgtgaccagtaacatgaccctgcgcgatcgggactttccctggacgacgacactctctatgctgtacatcgacaaccctgtggggacaggatttagtttcaccgatgatactcatggatatgcggtcaatgaagatgatgttgcgcgggacctgtacagtgcactcattcagttttttcagattttcccagagtataaaaataacgacttctatgtcacaggagaatcttacgccggtaagtacgtgcccgccatagcacaccttatccactcactgaatccagtgcgcgaggttaaaatcaacctgaatggaatcgctataggggacggatacagcgatcccgaatctattatcgggggctatgctgaattcctctatcagattggcctcctagatgaaaaacagaagaagtactttcagaagcagtgtcatgaatgtatcgaacacattcggaaacagaactggtttgaggcttttgaaatacttgacaaactcttagatggtgacctgacctctgatcctagttacttccagaacgtgaccggttgctccaattattacaacttcttgagatgcacagaacctgaggaccaattatattacgttaagttcctcagcctgcccgaagtcaggcaggcaatccacgttgggaaccaaacttttaatgacggaacaattgtggagaagtatttgagagaggacaccgtgcagtccgtaaagccttggctgactgaaattatgaataattataaagtactgatctacaatggtcagctggacatcattgttgctgcggctctgaccgagcggagcctgatggggatggattggaaaggtagccaggagtacaaaaaggccgaaaaaaaagtctggaagatctttaagtcagactcggaagtcgccggctacatccgacaggcgggggacttccatcaagtcataatccgtggtggggggcatatcctcccatacgaccagcctttgagagcgttcgatatgattaatagatttatctatggcaagggttgggatccctacgttggatag

SEQ ID NO: 181666 - DNA, 1431 bp, synthetic construct
  misc_feature 1..1431: note = Description of Artificial Sequence: Synthetic coding sequence
  source 1..1431: mol_type = other DNA
atggtgggcgccatgtggaaggtgatcgtgagcctggtgctgctgatgcccggtccctgcgatggcctcttccggtctctttatagaagtgtctcgatgccacccaaaggagacagcgggcagccactgtttcttactccatatattgaggccggtaagatccagaagggacgggagctttctctggtgggacctttccccggcctcaatatgaagagctacgcaggtttcctgacggtcaataagacttataactccaatctgtttttttggtttttccctgcgcaaatccagcctgaagatgccccagtagtactatggttgcaaggaggtccagggggttcgtcgatgtttggcctgtttgtggaacacggtccctatgttgttacctcaaatatgactctgagagatagggacttcccatggactaccaccctttctatgctttacatagacaacccagtgggtactggatttagctttacggacgatacgcatggctacgcagtcaacgaggatgacgtggcacgagatctgtattccgccctcattcagttctttcaaattttcccagaatataagaataatgatttctacgtgaccggcgagagctacgctggcaaatacgtacccgctatagcacatcttatacactccctgaacccggtgcgcgaggtcaaaataaacctcaatgggatcgcaattggagatggctacagcgacccagagtccataatcgggggatatgccgagttcctctaccagatcggcttgttagatgagaaacaaaagaagtacttccagaagcagtgccatgagtgcatagagcacattcgtaaacagaactggtttgaagctttcgagatactggacaaactgctggatggcgacctgacctctgatcctagctattttcaaaatgtgaccgggtgctcgaattactacaattttctgagatgtaccgagcccgaagaccagctgtattacgtaaagtttctgagtctgcccgaggtgagacaggctatacatgtgggaaatcagactttcaatgatggcacaatcgtcgagaagtatcttcgcgaagacactgtgcagagtgtaaaaccttggctaactgagatcatgaacaactacaaagtgctgatttataatggccagctggatatcatcgtggcggccgccttgactgagaggtccctcatgggcatggactggaagggttcccaagagtataaaaaagcagaaaaaaaggtctggaaaatctttaaatctgattcagaggtggcggggtacatccgacaggcgggcgattttcatcaggtcataattagaggaggggggcatattctgccctacgatcagcctctcagagcatttgatatgatcaacaggttcatctatggcaaaggatgggacccctatgtgggctag

SEQ ID NO: 181667 - DNA, 21 bp, synthetic construct
  misc_feature 1..21: note = Description of Artificial Sequence: Synthetic coding sequence
  source 1..21: mol_type = other DNA
atggtgggcgccatgtggtag

SEQ ID NO: 181668 - DNA, 159 bp, synthetic construct
  misc_feature 1..159: note = Description of Artificial Sequence: Synthetic coding sequence
  source 1..159: mol_type = other DNA
atggtgggcgccatgtggaaggtgatcgtgagcctggtgctgctgatgcccgggccctgcgacgggctctttagatctctataccgaagcgtatccatgccccccaaaggcgacagtggccagcccctgtttctgaccccttatatcgaagctggatag

SEQ ID NO: 181669 - DNA, 132 bp, synthetic construct
  misc_feature 1..132: note = Description of Artificial Sequence: Synthetic coding sequence
  source 1..132: mol_type = other DNA
atggtgggcgccatgtggaaggtgatcgtgagcctggtgctgctgatgcccggcccctgtgacgggttattccgctcgctctacagatccgtgtccatgccccccaaaggagactcaggacagcctctctag

SEQ ID NO: 181670 - DNA, 699 bp, synthetic construct
  misc_feature 1..699: note = Description of Artificial Sequence: Synthetic coding sequence
  source 1..699: mol_type = other DNA
atgttcggcctgttcgtggagcacggcccctacgtggtgaccagcaacatgacattgagggatagggacttcccatggactaccaccctgagcatgctgtacatcgacaatccagtgggtacaggcttctcctttacggatgacacacacggctacgctgtgaacgaggacgatgtagctagggatttgtacagtgcgctcatacagttttttcagattttccctgaatataagaataatgatttttacgtgactggcgaatcatatgcaggcaaatacgtgcctgcaatcgctcacttgatacatagcttaaaccctgtccgtgaggttaagataaacttgaacggaatcgccattggggacggttactcagacccagagagtattataggagggtatgcagagtttctgtaccaaatcggcctgttggacgagaaacaaaaaaagtactttcagaaacaatgccacgaatgcattgagcacattaggaagcagaattggttcgaggccttcgagatactcgacaaactgttagatggagatctcaccagtgacccctcctactttcagaatgtgactggctgcagtaattattacaactttctgcggtgtactgagccagaagatcagttgtattatgtgaagttcctaagcttgccagaagtcagacaggcacccaggggagagtctgacttttag

SEQ ID NO: 181671 - DNA, 1581 bp, synthetic construct
  misc_feature 1..1581: note = Description of Artificial Sequence: Synthetic coding sequence
  source 1..1581: mol_type = other DNA
atgggccacctgagcgcccccctgcaccgggtgcgggtgccctggcagggactgctccttacggcgagcctgttgacattctggaatccacccactactgctcagcttaccaccgagagtatgcccttcaatgtcgccgagggcaaggaggtcctgcttctggtgcacaacctgcctcagcagctcttcggatactcttggtataaaggcgagcgcgtggatggaaataggcaaattgttggctacgcgattggaacccagcaggccacccccggccctgccaactctggccgcgaaaccatctatccaaacgccagcctcctgatccagaatgtaacacaaaacgatactgggttttataccctccaggtgatcaaatccgacttggtcaacgaggaggcaaccgggcagttccacgtgtatccagaactacctaaaccttcaataagctccaataactcaaaccccgtcgaggataaagatgccgttgccttcacatgtgagcctgagacccaggatactacttatctgtggtggatcaacaaccagtccctgcctgtgtccccccggctgcagctgagcaacggcaatcggactctgactctgctgtcagtgacccggaatgatacaggcccctacgagtgtgagattcagaatccggtgagcgctaaccgctccgaccctgtgacgctaaatgtgacatatggcccagatactccgaccatctcaccaagtgatacctactatcgtccgggcgcaaatctcagtttgagttgctacgccgcatcgaacccccctgcacagtattcttggctgattaatggtacattccagcagagtacacaagagctgttcattcctaatattactgtcaacaactcaggatcatacacatgccatgcaaacaatagcgtcacaggatgcaaccgtacgaccgttaaaacaattatcgtaactgagctcagccccgtggtagctaagccccagattaaggcctctaaaaccaccgtcaccggagataaggattctgtgaatctgacatgcagtaccaacgacaccggtatctccataaggtggttctttaaaaatcagagtcttccgagttcagagaggatgaaactgagtcagggtaacaccaccctgagtataaatccggtcaagcgggaggatgctggaacctactggtgtgaagtatttaaccccatcagcaagaaccagtcggacccaatcatgctgaacgtaaactataatgctctgccacaggagaatggactctctcccggcgctattgcaggtattgtgattggagttgtcgctctggtggctcttatagctgtagccctcgcatgcttcctgcacttcgggaagactgggcgggcatctgaccaacgggacctaacagaacacaaaccttctgtgtcaaatcatactcaggatcactcaaatgacccacccaacaagatgaacgaagtcacttactctacactgaacttcgaggcccagcagcccacgcagcctacaagcgcttctccatcattgactgccactgagatcatctactccgaggtgaagaaacagtag

SEQ ID NO: 181672 - DNA, 1080 bp, synthetic construct
  misc_feature 1..1080: note = Description of Artificial Sequence: Synthetic coding sequence
  source 1..1080: mol_type = other DNA
atgcccttcaacgtggccgagggcaaggaggtgctgctgctggtgcataatctgccccagcaactcttcggttacagttggtataagggagagcgagtggacggcaacagacagattgttgggtatgcaatcggaacccagcaagctacccccggaccagccaactccggtcgcgagacgatctaccctaatgcttccctgctcatccaaaatgttactcagaacgatacgggattctatacacttcaggtgatcaaatctgatctagtgaacgaggaggccaccggccaattccacgtatatcctgagctgccaaaaccttctataagcagcaataatagcaaccccgtggaggataaagacgcagttgcgttcacctgcgagcccgaaacgcaggatacaacatacctatggtggattaacaatcagtccctccctgtgtccccgaggcttcaactgtctaatgggaaccgaaccctaaccctgctatccgtgacaagaaatgatacaggcccgtatgaatgcgagatacagaaccctgttagtgcaaatagaagtgacccagtgaccctgaacgtaacgtatggtccggacacgcccactatttccccctctgatacatattatcggcccggcgctaacctgtctctaagctgttacgccgcctctaacccccccgctcagtactcttggctgattaatgggacattccagcagagtacccaggagctcttcattccaaacatcaccgtaaacaactctgggtcctacacctgccacgccaataattccgtcacaggttgcaaccggactaccgtgaaaactattatcgtgaccgagatggctttccaccatgtggctaaggctggcttgaagttgctatcatcatcaaaccccccggccagcacctcacagagcgctaagattaccgataatgcactgcctcaggaaaacggtctttcccccggcgcaattgcggggattgtaattggggtcgtggcactcgtggcgcttatcgcagtggccttggcttgtttcctgcacttcgggaagactggatcctcaggccccctccagtag

SEQ ID NO: 181673 - DNA, 1056 bp, synthetic construct
  misc_feature 1..1056: note = Description of Artificial Sequence: Synthetic coding sequence
  source 1..1056: mol_type = other DNA
atgggccacctgagcgcccccctgcaccgggtgcgggtgccctggcagggactgttgctgaccgcatcactcttgactttttggaatccaccaaccactgcccagctgaccactgagtcgatgcctttcaatgtcgctgaggggaaggaggtccttctgctggtgcacaacttacctcagcaacttttcggctacagctggtataagggagagagggtcgatggcaaccgccagatcgtaggatacgctatcgggacacaacaggccacaccgggtcccgctaactctggacgcgaaactatttacccaaacgcttctctcctcatccagaatgtaactcaaaacgacaccgggttttataccctccaggtaattaagtcggatctcgtaaacgaggaggctaccggacagttccatgtttacccagaactcccaaaaccctccatttcttcaaacaactctaatcccgttgaggataaagacgccgtggcatttacttgtgagccggaaactcaagacactacgtacctgtggtggatcaacaaccaatccctcccagtctcgccaaggttacagctttctaatggaaataggacactcaccctgctgtccgttacaagaaatgataccgggccttatgaatgtgagatacagaaccccgtcagcgccaacaggtcagacccagtgacgttgaacgtcacctatggaccagatacaccaaccattagccccagtgatacttactacaggcccggtgcaaacctgtctttgagttgttacgctgccagcaatccacccgctcagtacagctggttaatcaatggaaccttccagcagtccacccaggagttatttatccctaacattacagtaaataattctgggtcatacacctgccacgccaataatagtgtgaccggatgcaaccggacaacagtcaagaccattattgtcacggagagccctgtgctgggcgaagatgaggccgtcccgggtcagcaccacccccagcacaagccatgtcaggaaggcgggtgttgggacgtgctagtgtag

SEQ ID NO: 181674 - DNA, 759 bp, synthetic construct
  misc_feature 1..759: note = Description of Artificial Sequence: Synthetic coding sequence
  source 1..759: mol_type = other DNA
atgggccacctgagcgcccccctgcaccgggtgcgggtgccctggcagggattgcttctgacggccagtcttctgacattctggaaccctcccactacagcacaactgaccacagagtctatgcctttcaacgtcgctgaaggaaaagaagtgctgttactcgtccataacctgccacagcagctgtttgggtactcttggtacaagggggagagagttgacggcaatagacagattgtgggttatgctatcggcacgcagcaggcgacacccggacccgctaactcaggccgcgagacaatttaccctaacgccagcctgctcatccagaatgtcacccaaaatgataccggcttctacaccctccaggtaattaagtctgacttagtgaacgaggaagcaaccggacaattccatgtctaccataacgccttgcctcaagagaacggcttaagccctggcgctatagccggaatcgtgattggggtggttgcactggtggcccttatagccgtggcactggcttgctttcttcactttgggaagacggggagagcaagcgaccaaagagatctgacagagcataagccatccgtctcaaatcacacacaggaccactccaacgacccccctaacaagatgaatgaagttacatacagcaccctcaacttcgaggcacagcagccaacccagccaacgtcagcttcaccatccttgacagcaactgaaatcatatacagcgaggttaagaaacaatag

SEQ ID NO: 181675 - DNA, 1293 bp, synthetic construct
  misc_feature 1..1293: note = Description of Artificial Sequence: Synthetic coding sequence
  source 1..1293: mol_type = other DNA
atgggccacctgagcgcccccctgcaccgggtgcgggtgccctggcagggtctgctgttaactgccagcctgcttactttctggaatccgcctactaccgctcagctgaccactgagtccatgccgttcaacgtcgccgagggaaaagaggtgttactgctggtccacaacttgccgcaacagctgtttggatatagctggtacaagggagagcgcgtggacggaaaccgtcagatagtggggtatgcgattggaacccagcaggccacaccgggcccagccaactctggcagagagactatttatcctaacgcctctctgttaattcaaaatgtcacccagaatgacactggattttatacgctgcaggtaatcaagtccgacttggtcaatgaagaagccaccgggcagttccatgtttatcccgagctcccaaagccaagtatatcatcaaataatagcaacccagttgaagacaaagatgcagtcgcttttacttgcgaaccagagacccaagataccacatacttatggtggattaacaatcagtcccttccagtgtcaccgcgcctgcagttaagcaacggaaataggacgttgactctgttaagtgttactaggaacgacaccgggccttacgagtgcgagatccagaatcccgtgagtgctaatcgatctgacccagtcaccttaaatgttacttacggcccagacacacctaccatatcgccctcagacacctattaccgcccaggcgccaatctcagtcttagctgctatgccgcaagcaatccaccagcgcaatactcctggcttataaacggtacattccagcagagcacccaggaactgttcatcccgaatattacagttaacaacagcggatcatatacttgtcatgccaacaactcggttaccggctgcaaccgaactacagttaagactatcatcgtaactgacaacgctctgccccaagaaaatggtctcagtcccggtgccatcgcgggcatcgtcatcggcgttgtggcactagttgctcttatcgcggtggcacttgcctgcttcctccactttgggaaaactggcagggccagcgatcagcgagacctcacagaacataaaccttctgtgagcaaccatacccaggatcattcaaacgatcccccaaacaaaatgaatgaggtgacttactcaacactcaatttcgaggcacagcagcccacccagcctacgtcagcctcaccctcactcacagccaccgaaattatctattcagaagtaaaaaagcagtag

SEQ ID NO: 181676 - DNA, 1386 bp, synthetic construct
  misc_feature 1..1386: note = Description of Artificial Sequence: Synthetic coding sequence
  source 1..1386: mol_type = other DNA
atgggccacctgagcgcccccctgcaccgggtgcgggtgccctggcaggggctgttgctcaccgcgtcactccttaccttttggaacccccctacaactgcccagctaacaacagaatccatgccatttaatgtcgcagagggcaaggaagttctccttctagtgcacaatttgccccaacagctgttcggctacagctggtacaaaggggagcgcgttgacggcaacagacagatagtgggttatgccatcggaacccaacaggccacccctgggccagccaattctggcagagaaaccatctaccctaatgcgagtctgctgattcagaatgtgacccagaacgacacaggattctacaccctgcaagtgattaagagcgacttagttaacgaggaagccactggccagtttcacgtttatcctgagctgcctaaaccctccattagctccaacaacagtaacccggtcgaagataaagatgctgtggcttttacatgcgaaccagagacacaggacaccacatatctatggtggatcaacaatcagtcgctgcctgtaagtccaagactccagctgtccaacggaaacaggactctgaccctactcagtgtgacaaggaatgacacaggtccttacgaatgcgagatacagaatcctgtctctgcaaaccgctctgaccccgtgaccctcaacgtaacttatggccctgatacaccaactataagtccatcagatacttactacagacccggagcaaacctttccttaagctgttacgccgctagtaacccgcccgctcagtactcctggctgataaacggtacattccaacagtctacacaggaactttttatcccaaatattacagtaaataattccggcagttatacttgtcatgcaaataatagcgttacgggctgtaaccgaactaccgttaagaccatcattgtgacggagcgccagaatctgaccatgctgccacgcttagacagcaattcgtgggcacaggcaatattaccaagcgtcagccagtcagctgagatcactgataacgccctgcctcaggaaaatgggctttctccgggggcaattgcagggatagtcataggcgttgtagcccttgtcgccctcatagccgttgccctggcatgctttttgcactttggcaaaacaggcagagcctctgatcagagagacctcacagagcacaagccaagcgtgtctaatcacacgcaggaccattccaatgatccccctaataaaatgaacgaggtgacctattcgactctcaatttcgaagctcagcagcccacacagcctacgagtgctagcccgagcctgacagctactgaaataatctactcagaagtgaagaaacagtag

SEQ ID NO: 181677 - DNA, 1254 bp, synthetic construct
  misc_feature 1..1254: note = Description of Artificial Sequence: Synthetic coding sequence
  source 1..1254: mol_type = other DNA
atgggccacctgagcgcccccctgcaccgggtgcgggtgccctggcaagggctactgctaacggcgtcattgcttaccttttggaaccctcccacgacagcccagttaactactgagtccatgccatttaacgtggccgagggcaaagaagtactgttactagtacacaacctgcctcagcaactttttggatactcatggtacaaaggtgaaagggttgatggcaaccgtcagatcgtcggctacgccataggtacacaacaggcaacccccgggcccgctaattctgggagagaaaccatttatcctaatgcttctttacttatccagaacgttacacagaacgacacgggcttttatacgctgcaagtgatcaagtctgaccttgtcaacgaagaggccacagggcagtttcatgtttaccccgagttgcccaagccttctatttccagcaacaacagtaaccctgtagaggacaaagacgctgtggcctttacttgtgagccagaaacacaggacacgacctatctgtggtggattaacaaccagagccttccggtatctccccggctgcagctatcaaatgggaatcgcacacttactttattgagtgtcactcgaaatgacacagggccatacgaatgcgaaatccaaaatcctgtgagcgctaataggtcagatccagtaaccctgaacgtcacctatggtccagatactcctaccatcagtccatctgatacttattacagaccgggcgccaatctgagtctgagttgttatgccgcgtccaacccccccgcccaatattcttggttgattaacggaacatttcaacaatccacgcaggaactgttcatcccaaacattacagttaataacagtggtagttatacatgtcacgccaataactccgtcactggatgcaataggacaacggttaagaccataattgtcaccgaattatctcccgtcgttgcgaagccacaaataaaggcatccaaaactactgttacgggagacaaagattcggtgaatcttacatgtagcaccaacgataccggaatctccatacgatggttctttaaaaaccagtcacttccaagctctgaacggatgaagctgagccaaggtaacacgaccttgtcgatcaacccagtgaagcgcgaggacgccggaacttattggtgcgaagtgttcaatcccataagtaagaaccagagcgaccctattatgttaaatgtgaattgcaagtag

SEQ ID NO: 181678 - DNA, 1437 bp, synthetic construct
  misc_feature 1..1437: note = Description of Artificial Sequence: Synthetic coding sequence
  source 1..1437: mol_type = other DNA
atgcccttcaacgtggccgagggcaaggaggtgctgctgctggtgcacaacctgccacaacagctttttgggtatagttggtacaagggagagcgcgttgacggcaaccgtcagatcgtggggtacgcaatcggaacgcaacaggcaactccgggcccagccaacagcggccgggaaaccatctaccctaacgcaagcctccttatccagaacgtgacccaaaatgacacggggttttataccctgcaagtgattaagtctgacctagtaaatgaagaggccactgggcaatttcacgtatacccagaactgccaaagccgtcaatctctagcaacaactctaatcccgtcgaagacaaagacgcagtcgcgttcacttgtgagccagaaacacaggatacaacgtacctgtggtggattaataaccagagcttgcctgtgagcccacgcttacagctaagcaatggaaaccggaccttgactctgctgagtgttacgagaaacgacaccgggccatatgagtgtgagatccaaaaccccgtgtctgcaaaccggtcagacccggttaccctcaacgtgacatatggaccggacacccccacgatcagtccatccgacacatactaccgcccgggtgccaatctttccctgagttgctatgccgccagcaacccccctgctcagtatagctggctgattaatgggacgtttcagcagtcaacccaggagctttttattccaaacattaccgtgaacaacagcggcagctacacatgccatgcaaataattcagtcaccggctgcaatcgaactacagtcaagacaattattgtcaccgagctctccccagtggtcgccaagccccaaatcaaagcctccaagactactgtaacaggtgataaggatagcgtgaatttgacgtgttctactaatgatacaggaatttcaattcgctggttctttaagaatcagtcgctgccgagtagtgaacgaatgaaattgtcacagggtaatacaacattgtctatcaatcccgttaaacgcgaggatgctggcacatactggtgcgaggtctttaacccgatctctaagaatcaatccgaccccattatgctgaacgagatggcctttcaccatgtagcaaaagcggggttgaaattgctgtcgagctccaaccctcctgcatctacctcccagagcgccaaaataacagaacgacagaatttaactatgctgcccaggctggattcaaattcatgggcccaggcgatcttgccatccgtaagccagagcgcagagataaccgacaatgcattaccccaagaaaatggcttgtcccccggcgcaatcgcggggatcgtaatcggagtcgtggcacttgttgcccttatcgctgtagctctcgcatgcttcctgcactttggtaagaccgggtag

SEQ ID NO: 181679 - DNA, 966 bp, synthetic construct
  misc_feature 1..966: note = Description of Artificial Sequence: Synthetic coding sequence
  source 1..966: mol_type = other DNA
atgggccacctgagcgcccccctgcaccgggtgcgggtgccctggcaaggcttgctccttacagccagcctcctcaccttctggaacccccctacgaccgcccagctcacaaccgaatccatgccgttcaatgtcgcagaaggcaaggaagtattgctcctggtgcacaacttgccccaacaattgtttggatactcatggtacaagggcgagcgggtggacgggaatcggcagatcgttggatatgccatcggaacacagcaagccacgccaggcccagctaattctggaagagagaccatttaccctaacgcctccctcttgatacagaacgtgacccaaaacgacactggattttataccttgcaggttattaagtctgacctggtcaatgaagaggctacgggacagttccacgtttacccggagttgcctaaaccatccatcagctctaataattccaatcccgttgaggacaaggatgccgtagcattcacttgcgaaccagagacacaggataccacatacctctggtggatcaacaaccagagtctgccagtttcaccgcgtttgcagctgagcaacggaaataggacgctaacacttttgagcgtaactaggaatgatacaggtccctatgagtgcgagatccagaatccagtatccgctaatcgcagcgatccggttacattgaatgtgacctatggaccagataccccaacgatctcaccctcagacacatactaccgccccggggccaatctctcactctcttgttatgccgcttccaatcccccggcgcaatatagctggcttattaacggcacgtttcagcaaagtacgcaggagctgtttattcccaacatcacggtgaataactccggcagttacacttgtcatgcaaataactccgtgaccgggtgtaaccgcacaaccgtgaaaacaatcattgtgaccggcaaatag

SEQ ID NO: 181680 - DNA, 1458 bp, synthetic construct
  misc_feature 1..1458: note = Description of Artificial Sequence: Synthetic coding sequence
  source 1..1458: mol_type = other DNA
cggggcgaccgggccgccgtgctggaggccttcctggagcccaagctgtcgtcaaccggagaagaccgggcctcacggagacaccacggcgcgccactgtccccaacttctcaatccgcttgtaccctcggactgcttcttacggcttccctgctcactttttggaatcctccaactacagctcagctgacgacagaaagtatgcctttcaacgtcgctgagggaaaggaggtgcttttgctggtgcacaacctgccacagcagctcttcggctatagctggtataagggggaaagagtagatggcaacagacagatcgtggggtatgcaataggtacccagcaggccacgcctggccctgctaatagcggccgcgagactatctatcctaatgcttcactcctgatccagaacgttacccagaacgacactgggttctatacgctccaggtcattaaatcagacctcgtaaatgaggaggccaccggacagttccacgtttatcccgaactgcctaagccaagtattagttccaacaactcgaaccctgtcgaggacaaggacgctgtagcatttacctgcgagcctgaaacccaagataccacctacctttggtggattaataatcagagcctgcccgtctctcccagactgcaattatcaaacggcaatcgtaccctgactctactgtcggttacccgcaacgacacagggccttacgagtgtgaaatccagaaccccgtgagcgccaataggagcgatccagtcacattgaatgtgacatacggaccggacacccccacaatctccccatccgatacatactaccggcctggcgccaacttatcactgtcatgctacgctgctagtaaccctccggcacagtatagttggttgattaacgggaccttccagcaaagcactcaggagctgttcatccccaatatcacggttaataattccggtagctatacctgtcacgcaaataacagcgtcaccggctgtaaccggacaaccgtcaagactatcatagtgacggaactctcaccggtggttgcgaaacctcagatcaaagcaagcaaaacaacggtcacaggtgacaaggattctgtcaacctaacatgctcgacaaatgatactggaattagcatacgctggtttttcaaaaaccaatcgctgccctcctccgagagaatgaagctgagccagggtaacacaacactgtccattaatccagtgaagcgcgaagacgccggcacctactggtgtgaggtgttcaacccaattagcaaaaatcagagcgatcccatcatgctcaacgttaactacaatgcactgccccaggagaacggactcagccccggagccatcgccggtatcgtgatcggggtagtcgccttagtggccctcattgccgtggccctcgcatgcttccttcatttcgggaagacaggctag

SEQ ID NO: 181681 - DNA, 1395 bp, synthetic construct
  misc_feature 1..1395: note = Description of Artificial Sequence: Synthetic coding sequence
  source 1..1395: mol_type = other DNA
atgggccacctgagcgcccccctgcaccgggtgcgggtgccctggcagggcctgcttctcacagcctcactcttaacgttctggaacccccctaccaccgcgcagctgaccactgagtcaatgccttttaacgttgcagaggggaaggaagtccttctgttggtgcataacctgcctcaacaactattcggttattcctggtataaaggcgagcgcgtggatggcaaccgccagatcgtcggatatgcgatcgggactcagcaggccacccccggtccagccaattccgggcgcgaaaccatttaccccaacgcatctctgctgattcagaacgttacacaaaacgacactggcttctacacccttcaagttatcaagagtgatctagtcaatgaagaagcgactggacaattccatgtttatccggagctgccgaagcccagtatttcctcaaataactccaatcccgtggaagataaggatgcagttgccttcacatgtgaacctgaaacgcaggacactacatacctgtggtggataaacaatcagagtttgccagtcagccctagattgcagctgagcaatgggaaccgaaccttgacgcttctgagtgttacaagaaacgatacaggtccttacgagtgcgagatccagaacccagtctcggctaaccggagtgatcccgttaccctgaacgtcacatacgggcctgataccccaactatatctccatccgatacctactacagaccaggagctaatttgtccctgtcttgttacgcggccagcaatcctccagctcagtattcctggctcatcaacggaacctttcaacagtctacccaagagctattcatcccaaacattactgtgaataactcaggatcttatacctgtcatgctaacaactcagttacgggatgtaacagaacaaccgtgaaaactatcatcgtaactgaactgtcacccgtggttgcaaaacctcagatcaaagcgtctaaaacgaccgtaacaggcgataaagactctgtcaatctgacttgttcgacgaacgatactgggattagcattaggtggtttttcaaaaaccagagcctccctagctctgagcggatgaaactgtctcaaggcaatacaactttaagtatcaaccctgtaaaacgggaggacgcgggcacttactggtgcgaggtgttcaatcccatatcaaaaaatcaaagcgaccctattatgctgaacgttaactataacgctctgccacaggagaacggcctttcccccggagctatagccggcattgtaatcggtgtcgtagcattagtcgctctgatcgcagtcgccctggcatgcttcttacacttcggcaagaccggtagctctggtccattgcagtag

SEQ ID NO: 181682 - DNA, 1107 bp, synthetic construct
  misc_feature 1..1107: note = Description of Artificial Sequence: Synthetic coding sequence
  source 1..1107: mol_type = other DNA
atgggccacctgagcgcccccctgcaccgggtgcgggtgccctggcaaggactgctactgaccgcgtctctcctaacattttggaaccccccaactactgcccagctgaccaccgagagcatgccttttaatgtggctgagggcaaggaggtcctcctgctcgttcacaacttgcctcaacagctcttcgggtacagctggtataagggggagagagtagacggcaacaggcagattgtgggttatgctatcggtacccagcaggccacacctggtccagctaactctgggcgcgagactatttatcccaatgcttcccttcttatccagaacgtgacccagaacgacacgggcttctatacactacaggtcataaagtctgacctggtgaacgaagaagccactggtcagttccatgtttacccggaactcccaaaacccagtatatcatcaaacaatagtaaccccgttgaagacaaggacgccgtggcttttacctgcgagccagaaactcaggacaccacatacctgtggtggattaacaaccagtctttgcccgtctcgcctcgcctacagctttccaatggcaatcggaccctaacactactttctgtcacaagaaatgacaccggcccctatgaatgtgagattcaaaaccctgtgtctgccaatcggtctgatcccgtcactttgaacgtgacgtatggtccggacaccccaacaatttcaccttcggacacatattacaggccaggcgccaatctgtctctttcctgctatgctgcgagcaacccccccgcccagtactcctggctgattaacggtactttccagcagtcaacacaggaactgttcatcccgaacatcacggttaacaattccggctcttacacatgccatgccaacaacagtgtcaccgggtgcaatcggaccacagtcaagacaatcatagtcacagataacgcattacctcaggaaaacggcttgtcacccggcgctattgcagggatcgtgatcggcgtcgtcgctctcgtagctctcattgctgtggcactcgcatgttttctacatttcggcaagactggcagctctgggccattgcagtag

SEQ ID NO: 181683 - DNA, 906 bp, synthetic construct
  misc_feature 1..906: note = Description of Artificial Sequence: Synthetic coding sequence
  source 1..906: mol_type = other DNA
atgctggccctgcgggtggcccggggcagctggggcgccctgcggggcgcggcatgggctcccggcacaaggccgtccaaaagaagagcctgttgggctctgctgcctcccgtgccatgttgtctgggctgtctcgccgagagatggagactgaggcctgctgcactcggcctgcgcctaccgggaattggccaaaggaaccactgcagcggtgctggtaaggctgcacctcggccagcagctggtgctggcgctgcagccgaagcaccaggcgggcagtggggtcctgcttccacacctagcctgtatgaaaatccatggaccatacctaatatgttatctatgacgagaattggcctagccccagtactgggttacctcataattgaggaggacttcaacatcgccctcggcgtgttcgcattggctggtctcacggaccttttggacggttttatagcgagaaattgggcaaaccagcgcagtgctctgggatcagcattggaccctctcgccgacaagatcctcattagcattctttacgtgtcattgacctacgctgacctgatcccggtgcccttaacttacatgattatcagccgggatgtcatgcttattgcagcagtgttctatgttagatatagaacattgcccacccccaggaccctagctaagtattttaacccatgctacgccacagccagactgaaaccaaccttcataagtaaagtgaacacggctgtacagttgattctggtggcagcgagcttggcagcaccagttttcaattatgcagactctatttatttgcagattctatggtgctttacagcgtttacaactgccgcaagtgcttattcttattaccattacggacgcaagacagtgcaggttattaaagactag

SEQ ID NO: 181684 - DNA, 609 bp, synthetic construct
  misc_feature 1..609: note = Description of Artificial Sequence: Synthetic coding sequence
  source 1..609: mol_type = other DNA
atgccccagtacgagaacccctggaccatccccaacatgctgagcatgacacgcataggtcttgccccagtgctagggtacctcattatcgaggaggacttcaatatcgccctaggcgtgtttgctctagctggtctcactgacctgctggatggcttcattgctcggaactgggccaatcagagaagcgccctgggctccgccctcgacccgctggctgataaaattctgattagtattctctatgtgtccctcacctatgccgatttgatccccgtgccgctgacttatatgattattagcagagacgttatgcttatcgcagctgtcttctacgtgcgctaccggaccttgccaacgccccgaacattagcgaaatactttaatccttgttatgccaccgcccgtttaaagccgacctttatttcaaaggtgaacactgccgtgcaattaattctagtcgctgccagcttagctgccccagtgtttaactacgccgactctatctacctacagatcctgtggtgttttaccgccttcaccactgcggctagtgcttattcctactatcactatggaaggaagaccgttcaggtgatcaaggattag

SEQ ID NO: 181685 - DNA, 618 bp, synthetic construct
  misc_feature 1..618: note = Description of Artificial Sequence: Synthetic coding sequence
  source 1..618: mol_type = other DNA
atgctggccctgcgggtggcccggggcagctggggcgccctgcggggggctgcatgggcacccgggactagaccctccaagcggagagcttgctgggccttgctcccccccgtgccctgttgtctgggttgcttggccgagcgctggaggctgcggccagctgcccttggcctcaggctgcctggcattgggcagagaaaccattgttccggcgcgggaaaggcggccccaagacccgctgctggcgccggcgcggcagccgaggcgccaggtggacagtggggccctgcctcaacaccatcgctctacgaaaatccatggacaatcccaaacatgctatcaatgaccaggatagggctggcacccgtcctcgggtacctgatcatagaagaagatttcaacatagctctgggcgtatttgccttggctgggttaacagacttgctcgacggctttattgcacgaaactgggctaaccagcgtagcgcccttggctcagctcttgatcccttagctgataaaattctgatcagcattctgtatgtctctttaacttacgcagatttgattcctgccaacacatgtcaggtcttccaatcactgctgtgtcactgctag

SEQ ID NO: 181686 - DNA, 12210 bp, synthetic construct
  misc_feature 1..12210: note = Description of Artificial Sequence: Synthetic coding sequence
  source 1..12210: mol_type = other DNA
atggccagccgggacagcaaccacgccggcgagagcttcctgggctctgacggtgacgaagaggcaactcgggaacttgagactgaggaagaatccgaaggcgaggaagacgaaactgccgccgagtctgaggaagagcctgatagtaggctgagcgaccaggacgaggaagggaaaatcaagcaggagtacatcattagtgaccctagtttctccatggtgaccgtgcagcgcgaagatagtgggatcacatgggagacaaacagctccaggtcctctacaccttgggcctccgaagaatcacagacatccggggtctgctcccgcgaaggatctacggtaaactccccccctggtaatgtttcatttattgtggatgaagtcaaaaaagtgcgcaaacgaacgcataagtccaaacacggttcaccaagtttgaggcgaaaaggaaaccgaaagcgaaattcattcgaatctcaagatgtgcctacaaacaagaaaggatccccccttaccagcgcctctcaggtgctgaccactgaaaaggaaaaatcctatacggggatttacgataaagcgagaaagaagaaaacaacttcaaatacacctccgataacaggagccatttacaaagagcataagccactggtcttgcgtcctgtttatatcggcacagtgcagtacaagatcaagatgttcaattcagtgaaggaggaactgattcccctccagttttacggaacattgcctaaaggatatgtgattaaggagattcattatagaaaagggaaggacgcatcaatcagcctggaacccgacctggataatagcggctccaacaccgtatcaaaaacgcgcaagctggtcgcacagtctattgaggataaagtcaaggaggtgtttccaccctggcggggggccctctccaagggaagcgagagcttgacattaatgttttctcatgaagaccagaaaaaaatctatgccgactctccactgaatgcaacctccgcactggagcatacggtgccttcctattcatcctcaggaagggccgaacaggggattcaattgcggcacagccaatctgtgccacagcagccggaagacgaagcgaaaccacacgaagtggaacctccttccgttacgccagataccccagctactatgttcctgcggaccacaaaggaagaatgtgagctggcaagtcccgggaccgccgcatcggagaacgattcttccgtgtctccgagctttgccaacgaggttaagaaagaggatgtctactcagcccatcacagcatctctcttgaggctgccagccctggtttggcagcctccacacaggatggcctggaccctgaccaggagcagcctgatctgacctctatagaaagagccgagcccgtgtctgccaaattaacacccacacaccctagcgtcaagggcgagaaagaggagaatatgctcgagccaagcatttctctttcagaacctctgatgctggaggaacctgaaaaggaggagattgagacaagccttcccattgcaattactcctgagccagaggacagcaatctggtggaagaggagatagtcgaactggattatcccgagtcaccactggtgtcagagaagccctttcccccccacatgagtcctgaggtcgagcacaaggaagaggaattaatccttcccctcttagccgcatcctcgccagagcacgtggccctgagtgaggaagagagagaggagatcgcctcagtgtccaccggctctgccttcgtgagcgagtacagcgtgcctcaggatctgaatcacgagctccaggagcaggagggcgaacccgtcccaccttcaaacgtggaagcgatcgccgaacatgccgtcctttctgaggaggagaacgaggaatttgaggcttactcgcctgccgcagcacctacctctgagtccagcttatcaccctccaccacagagaagacctctgaaaaccagagtcccctcttcagcacagtgacacctgaatatatggtgctttccggagacgaggcaagtgagagcggatgctacactcctgattctacctcagcctctgaatatagcgtgccatcacttgcaactaaagagagtctgaaaaagaccattgataggaaaagtcccttgattctcaagggcgtgtccgaatatatgatcccctcggaagagaaggaggataccggctcattcacaccagcagtagcgcccgccagcgagccatctctgtctccgagcacaaccgagaaaactagtgagtgccagtccccacttccctcgacagcaaccagcgagcacgtggtgccgtcagagggcgaagacctcggctccgaacggtttactccagatagtaagttgatcagtaaatacgccgctcctttgaacgcaacacaagagtcccagaaaaaaattattaatgaggcctcacaatttaaaccaaagggaatttcagagcataccgtcctctctgtggatgggaaggaggttatcggaccctcctctcccgatctggtcgtagcatccgaacactcctttcctccccatactacagagatgacgagcgagtgccaagcccccccgttgagtgctacccccagcgaatatgtggtactgtcagatgaagaggccgtggagcttgaacggtataccccctcctctacctccgcttcagaatttagcgtcccaccctatgccaccccagaagcacaagaggaagagatcgtacaccgctctttgaacttgaagggagcatcgtcccctatgaatctgtccgaggaagatcaagaggacatcggcccattcagcccagacagcgcttttgttagcgagttctcatttcccccttatgccacccaggaagctgagaagcgggagttcgaatgtgattcccccatttgtctgacttccccctccgaacataccatccttagtgatgaggacacggaagaagccgaactgtttagccccgacagcgcaagccaggtgtctattccaccatttcggatttccgagacagaaaaaaatgaactggaaccagacagcttacttacggcagtaagcgcgtctggatattcatgcttctccgaggccgatgaagaggacattggcagcaccgcggcgacgccagtttctgagcagttttcctccagtcagaaacagaaagccgagaccttcccactgatgtccccactggaagaccttagtttacctccaagcacagacaagagcgaaaaagctgagatcaagcccgagattccaactaccagcacctcagttagcgagtaccttattctggcacagaaacaaaaaacccaggcatatctcgagccggagagtgaagacctcattccaagtcaccttacaagcgaggtggagaaaggcgaacgggaggcctcctcctccgtcgcagcgataccagcggcactgcctgcgcagtccagcatagtcaaagaggaaacaaaaccagcttccccacattcagtgctcccagattctgttccagcaatcaaaaaggaacaggagccaaccgccgcccttactcttaaagcggcagatgaacagatggcactgagcaaagtccggaaggaagaaatcgttccggatagtcaggaagcaactgcacacgttagccaggatcagaaaatggagccacagccacccaacgtacctgagagcgaaatgaagtattctgttctgcctgacatggtcgacgagccaaagaagggcgtcaagcctaagctggtgttgaacgttacttctgaactggaacaacgcaaactgtctaaaaatgaaccggaggtgatcaagccctactcaccattaaaggagacctctctcagcggtcctgaagcgctatcagccgtcaagatggaaatgaaacatgactccaagataactactactcctattgtgctacatagtgcttcaagcggcgtagaaaagcaggtagagcacggccctcccgcactggcgtttagtgcattatcagaggagattaaaaaggagattgagcccagctcatcaacaacaactgcctctgtgactaagctcgactctaatctcaccagggccgtgaaagaagaaattccaacagattcgtctctgataactcctgtggatcggcccgttctaaccaaggtgggcaaaggggagctggggtccgggctgccgccattggtgacatctgcagacgagcattcagtgctggccgaagaggacaaggtggctattaagggcgcctcgcccattgagacatctagcaaacatctcgcctggagcgaagctgagaaggagataaaattcgactccttgccatccgtaagcagcatcgccgagcattccgtgttgtcagaagtggaggcaaaggaagtgaaggcagggctgcccgtcattaagacaagctctagtcagcatagtgacaagtccgaggaggcgcgagttgaggataagcaagacctgctcttttccacggtgtgtgactctgagaggttggtgtcatcccagaaaaagagcctgatgtcaacaagcgaggtgctcgaacccgagcacgaactcccactgtccctgtggggagaaattaaaaagaaagaaaccgagcttccgtcctctcagaatgtgtcgcccgcttctaagcacattattccaaagggtaaagatgaggagactgcctcctcctctcccgaactcgagaatttagcctctggtttagctcccactttactgcttctatcagatgataaaaacaaacccgccgtggaagtgagctctacagcccagggagacttcccaagcgagaagcaggatgtcgcactggcagagctcagcctggaaccagagaaaaaagacaagcctcatcagccacttgagctgcccaatgccggttccgaattttcgtccgatttggggaggcagtccggcagcatcggtactaaacaggcgaaaagccccatcaccgaaactgaagatagcgtgctggaaaagggtcctgccgagttaagatctcgcgaagggaaggaggagaatagggaactgtgcgcctcttcaaccatgccagccatcagtgaacttagcagtctgctgcgggaggaatcccagaatgaggagataaagcctttcagccccaagatcatcagccttgagagcaaggagccaccggcatctgtagcagagggagggaatccggaagaattccaaccctttacattttccctcaagggtttatcagaggaggtgagccatcctgcggactttaagaagggcggaaaccaggaaatcggccctctgccacccactggcaacctcaaagcacaggtcatgggcgacatcctggataaattgtcggaggagaccgggcacccaaactcttcccaagtacttcaatccattactgaaccaagtaaaatcgcaccttctgatctgcttgtggaacagaagaaaaccgagaaggctctgcatagtgatcagaccgtgaaacttcctgatgtgagtacttccagcgaagataagcaagatctaggcattaagcagttctctctgatgcgagaaaatctgcctcttgagcaatccaagagcttcatgactactaaaccagccgatgttaaggaaaccaaaatggaggagttcttcatcagtccaaaggacgaaaactggatgctcggtaaaccagagaatgtggcctcacagcatgagcaaaggattgcagggtccgtccagctggactctagcagttccaatgaattgaggccggggcagctgaaagcggcggtgtcttctaaggaccatacttgcgaagtgagaaagcaggtgctgcctcactccgccgaggaaagccatctgagtagccaagaagctgtgagtgccctcgacaccagcagcggtaatactgagactctgagctcaaagagttactcatcagaagaagtaaaactcgcagaagagccgaaaagcttagtgctggctggcaatgtcgagaggaacatagccgagggaaaggaaattcattcactcatggaatcggaatccctgctactagagaaggcgaacacagaactgagttggcctagtaaggaggactcacaggagaaaattaagctgcctcctgagcgcttcttccagaagcctgtcagtggtctgtcagttgagcaggttaagagcgaaacaatctcatcctctgtcaagacagcccactttccagcggaaggcgtggaaccagcacttgggaacgagaaggaggctcatcggtcaacacccccctttccggaggaaaagcctttagaggaatctaagatggtgcagagcaaggtcattgacgacgcagacgaaggcaagaaaccttcccctgaagtcaaaatccccacccagaggaagccaatcagttccatacatgcacgagagcctcagtctcctgaatctcccgaagtgactcagaatccccccacccaaccaaaggtcgctaaaccagatttaccagaagaaaagggcaaaaagggaatatccagctttaaaagctggatgtcgtcactgtttttcggcagctccacccccgacaacaaggtggccgagcaagaagacctcgagacacagcctagtcctagcgtggaaaaagcagtcacagtaattgaccccgagggaaccatacccacaaactttaatgttgccgaaaagcccgctgatcattccctgtccgaggtcaagctaaagaccgccgacgagcctaggggaactctagtgaaatctggcgacgggcagaacgtaaaagagaagtctatgatcctgtcaaatgtggaggaccttcagcagcccaagttcatctcagaggtctcaagggaggattacgggaaaaaggagatttcgggggacagcgaagagatgaacataaattctgtcgtgacaagtgccgatggcgaaaacctggagattcagagttattccctgatcggcgagaaactggttatggaggaagcaaagaccattgtgccgccccacgtgaccgacagcaaacgggtgcagaagcccgcaatagctcccccctctaaatggaacatcagcatctttaaggaagagcctcgtagcgaccagaaacagaagtcattactctccttcgacgtggtggacaaggttcctcagcagccaaagtcagcctcatccaatttcgcctccaagaacattactaaagaaagtgaaaaacccgaatccattattcttccagtggaggaaagcaagggcagcctcattgatttttcagaggaccgtctcaagaaggagatgcaaaatcccacatcgctgaaaatctcagaggaggaaaccaagcttagatcagtctctccaacggaaaaaaaggataacctggagaatcgatcctacaccttggcggaaaaaaaggtcttggctgagaaacagaactccgtggcacctctggagctgcgagatagcaacgaaattggaaaaacccagataacgctcggctctcgcagcaccgagctgaaagaatcgaaagccgatgccatgccccagcacttttaccagaacgaggactacaacgagaggcccaaaatcatagtgggatcggagaaagagaaaggcgaggagaaggagaatcaggtgtacgttttgagcgagggaaagaaacagcaggagcaccagccttattcagttaatgtggccgaatctatgtcaagggagtccgacatctccctgggtcattcgttaggcgagacacagagctttagccttgttaaagccacctctgtgacagaaaagagtgaggccatgctcgccgaagctcatccagaaatcagggaggcaaaggcagtaggcacacagcctcaccccctcgaagagtccaaagtgctggtcgaaaaaaccaagacctttctccccgtggcactgagctgtcgggatgaaatcgaaaaccactcactgtctcaggagggtaatttagtgcttgagaaatcctccagggatatgcccgatcacagcgaggaaaaggaacagttccgcgagtccgagttaagcaagggcggttccgttgacatcactaaggagactgtaaaacaaggctttcaagagaaggctgtgggcacgcagcctagaccactagaggagtcaaaggtgctggtggaaaagaccaaaacattcctccccgtcgtgttaagttgccatgatgaaatagaaaaccacagtctgtctcaagagggcaatttggttctggagaagagcagcagggatatgcccgatcacagtgaggagaaggagcagtttaaggagtccgagttatggaaaggcggttccgtggacataactaaggaatccatgaaggagggcttccccagcaaggagtctgaacgaactctggcccggccattcgacgagacaaagagttctgaaactccgccttatttgctgtcccccgttaaacctcagactctggcttctggggcatccccagagattaatgccgtgaagaagaaagagatgccaaggtccgagctgacaccagagcgccacaccgttcacactattcagactagcaaggacgatacttcagatgtgccaaaacagtccgtcctcgttagcaagcaccatctggaggctgctgaagatactcgagtgaaagagcccttaagttccgcgaagtccaactacgcccagttcatatctaacaccagcgcatctaatgcagataaaatggtatcaaataaggagatgcctaaagagccagaggatacctacgccaagggtgaggactttaccgtcacatccaagcctgctggtctcagtgaggaccagaagaccgcgttcagcatcatatccgaggggtgtgaaatccttaacatccatgcaccagcctttatttctagcatcgaccaagaggagtctgaacagatgcaagataagctggagtatttagaggaaaaagcttcgttcaagaccatccccctgcccgatgattccgaaactgttgcgtgccacaagaccttaaaaagcaggctggaggatgagaaggtgacccctcttaaagagaataagcagaaagagacgcataagacaaaggaggagatctctacagactcagaaaccgacttgagctttattcagcccacaattccatccgaagaggattacttcgaaaagtataccctcatcgactacaacatcagccccgatccagagaaacaaaaggcaccccagaagctgaatgtggaggagaaactctctaaggaggtgactgaagagaccatttccttccctgtgtcaagtgtcgaatccgccctcgagcatgagtacgacttagtgaagctggacgagtctttttacggtccggagaaggggcataatatcctgtcccacccagaaactcagtctcagaattcggctgaccggaacgtgtcaaaagacaccaaacgggacgtggattccaaatctcctggcatgcccctttttgaagcagaagagggtgtgctaagtagaacccagatctttcctacaacaatcaaggtaatcgaccccgaatttcttgaggagccaccagctctggctttcctttataaagacctgtatgaagaagcagtgggcgagaagaagaaggaggaggaaacggcctccgagggcgactcagtgaactccgaggcttccttcccaagccgcaattctgatacagacgacggaactggaatttatttcgagaaatacatcttaaaagacgatattcttcacgacacttcactgacgcaaaaagaccagggccaggggctggaagaaaagagagtcggtaaagatgatagttaccagcctatagctgcagaaggtgaaatctggggcaaatttggtacgatttgccgggaaaaatcccttgaggaacagaagggggtttatggtgaaggtgaatcagtggatcacgtcgaaactgtgggcaacgtggccatgcagaaaaaggcaccgatcacggaggatgtgcgggtggctactcagaaaatttcttatgctgtgccatttgaagatacgcatcacgtgttagagcgggccgacgaagccggctcacatgggaacgaagtgggaaatgcatctccagaggtgaatctgaacgttcccgtccaggtcagctttcctgaagaggagtttgcttcaggggcaacgcatgtacaagagaccagcctggaggagccaaagatcttagtaccaccggagccctctgaagagagactgagaaattcacccgtgcaagacgagtacgaatttaccgagtctctccataacgaagtcgtaccacaagatatcctgtccgaagagctttcatccgaaagcactccagaggatgttctaagccagggcaaggaatcttttgagcatattagtgaaaatgagttcgcaagtgaagctgagcagtccaccccagcagaacagaaggaactgggctcagagagaaaagaggaggatcaattgtcttctgaggtggtaactgaaaaggcccagaaggaactcaagaagtctcagatcgacacatattgctatacttgtaagtgccctatctcagcgaccgataaggtgttcggaactcacaaagaccacgaggtctccaccctggataccgccatttctgccgtgaaagtacagctcgctgagttccttgaaaatctccaggagaaatcactgcgaatcgaggccttcgtgtcagagattgagagcttcttcaatacaatcgaagaaaactgtagtaagaacgagaaaaggctggaagagcagaacgaggagatgatgaagaaagtgctggcccagtacgatgaaaaagctcagtcctttgaggaagttaagaagaagaagatggagtttttgcatgaacagatggtgcattttctgcagtctatggacaccgccaaggacacactggaaactattgtgagggaggcagaggagctggatgaagccgttttcttgacatcatttgaagagatcaatgaacgcttactgtccgcaatggagagtaccgcctctcttgaaaaaatgcctgctgcattctctctgtttgaacattacgatgactctagtgctagatcagaccagatgttgaaacaagttgcagttccccagccccctcgactggagcctcaggaaccaaactccgcaacaagcactaccatcgccgtttactggagcatgaataaagaggatgtgattgacagtttccaggtctactgcatggaggagccgcaggatgaccaggaggtgaacgagctggtggaagagtacagactcaccgtgaaggagtcttactgcattttcgaagacctggagcccgatagatgttaccaggtgtgggtgatggctgtgaactttactggctgttcactgccatcagagcgtgccatctttagaacagcacccagcacccctgtgatccgagccgaggactgcaccgtatgctggaatactgcaaccatacggtggaggcccaccacacctgaggcaacagagacctataccttagaatattgcagacaacacagcccggagggcgaaggtttaagatccttttctggcatcaaaggtcttcagctgaaagttaacctacagcccaacgataactacttcttctacgtgcgcgccattaacgcattcggcacgagtgagcagtctgaggcagctcttatttccacgcgtggcacaagatttctgctgctgagagagaccgcgcatcctgccctgcatatatcatccagtggcacagtgattagcttcggcgagcggcgtaggctcaccgagatacccagcgttttgggtgaggagctcccttcttgtggtcagcactattgggagaccactgtgacggattgtcccgcctatcggctgggtatttgctcgtctagtgccgtgcaggccggcgccctggggcagggtgagacaagctggtacatgcactgctcagagccccagaggtatactttcttctatagtggtatcgtgtccgacgtgcacgtcaccgaacgacccgcacgggttggcattctcttggattataacaaccaacgcctcatcttcatcaacgcggagagcgagcaactgcttttcatcatccggcacaggttcaatgagggggtccatcctgctttcgctctggaaaagccaggcaaatgcacgttgcatctcggcatcgagccacctgatagcgtgcggcacaagtag

SEQ ID NO: 181687 - DNA, 678 bp, synthetic construct
  misc_feature 1..678: note = Description of Artificial Sequence: Synthetic coding sequence
  source 1..678: mol_type = other DNA
atggacctgcgggccggcgacagctggggcatgctggcctgcctgtgtactgtactgtggcatctcccagccgttccagctctaaataggacaggagatcccgggccaggtccgtccatccagaaaacctacgatctgacaaggtatctcgaacatcagctaaggtctctggctggaacataccttaattacttgggccctcctttcaatgagcctgacttcaatcccccaagactgggtgcggagaccttgcccagagcgaccgtggatctcgaagtctggaggtcgttgaacgacaagctgcgactgacacagaattatgaagcatatagccacctcctgtgctacctgcgcggactaaataggcaggcagctaccgcagagctgcgaagatccctggcgcacttctgtacaagcttgcagggcctgctgggttcaatcgccggagtcatggccgctctagggtacccgcttccacagcctttgcctggaactgaacctacttggacacctggcccggcccattctgacttcctgcagaaaatggacgacttctggctcttaaaggagctccagacttggctctggcggtccgcgaaggatttcaaccgcctgaaaaagaaaatgcagcctccagctgcggctgtgaccctgcacctgggggcccacggcttctag

SEQ ID NO: 181688 - DNA, 648 bp, synthetic construct
  misc_feature 1..648: note = Description of Artificial Sequence: Synthetic coding sequence
  source 1..648: mol_type = other DNA
atgctggcctgcctgtgcaccgtgctgtggcacctgcccgccgtgcctgctttgaacagaaccggtgacccgggaccaggcccatcaatccaaaaaacctatgatctgaccagatacctggagcaccagctaagatctctggcagggacatatctgaattacttggggcccccttttaacgaaccggatttcaaccctccaagactgggcgctgagactctgcctagggcaacagttgacctcgaggtctggcgcagcctgaatgacaagctgcgcctcacgcaaaattacgaagcttacagccaccttctttgctacctgcgtgggctgaaccggcaggcagccaccgccgaactgcgacggagcttagcacatttctgtacatcactccagggtcttctgggatctattgccggggtgatggccgctctgggctatccgttacctcagcctcttcccgggacagagcccacttggaccccaggtcccgctcattccgacttcctacagaaaatggacgacttttggctgctgaaggagctccagacgtggctgtggagatccgcaaaggacttcaaccgcctcaagaaaaaaatgcagccccccgctgctgctgtcaccctacacctcggggcacatggcttttag

SEQ ID NO: 181689 - DNA, 648 bp, synthetic construct
  misc_feature 1..648: note = Description of Artificial Sequence: Synthetic coding sequence
  source 1..648: mol_type = other DNA
atgctggcctgcctgtgcaccgtgctgtggcacctgcccgccgtgcctgctttgaacaggaccggagatcctgggccaggcccaagcatacagaagacatacgacctgacgaggtatttggagcatcagctgcgttccctggcggggacttatcttaattacctgggtcctcctttcaacgagcccgacttcaatccccccaggttgggggccgagaccttacctcgagccacagttgacttagaagtgtggagaagtctcaatgataaactgcgcctcacacagaactacgaagcctacagccatctcctatgttaccttcgtggcctcaaccgacaggccgctacagccgagctccggagaagcctcgcgcacttctgcacctctctgcagggtttactgggttcgatagcgggcgtcatggccgcgctgggttatcccttaccacagccattacctgggactgaacctacatggacaccaggtcctgcacattccgattttctgcagaagatggacgacttttggctgctgaaggaactccaaacatggctctggcggtctgctaaagatttcaacagactcaagaaaaagatgcaaccccccgctgccgccgtcaccctgcacctcggggcccacggcttctag

SEQ ID NO: 181690 - DNA, 1881 bp, synthetic construct
  misc_feature 1..1881: note = Description of Artificial Sequence: Synthetic coding sequence
  source 1..1881: mol_type = other DNA
atgctggccttcgccgcccggaccgtggtgaagcccctgggcttcctcaaacctttttcgctcatgaaggcctccagtcggtttaaggctcatcaggatgctcttccccgcttgcctgtgccaccactccagcagtctttggatcactatctgaaggccttacagcctatagtgagcgaggaggagtgggcgcataccaagcagcttgtagacgagttccaagccagtggtggcgttggcgaacgcctgcagaaagggctcgagcggagagccagaaaaaccgagaattggttgtccgagtggtggcttaagacagcttacctgcagtacagacaacccgtcgtgatttactccagcccaggggtgatgctccccaaacaggacttcgtcgatctccagggtcagctccgttttgcagctaaactgatcgagggagtccttgacttcaaagtgatgatcgataatgaaactctgcccgtcgagtacttaggaggcaagcctctgtgcatgaaccaatattaccagatcctgtccagttgcagagtgcccggtcccaaacaggacaccgttagcaattttagcaaaaccaagaagccacccacacacattacagttgtgcataattatcagttcttcgagctggacgtgtaccacagtgacgggaccccattgaccgccgaccagatttttgtgcagttagaaaagatctggaatagctcgcttcaaactaataaagagccggtgggtatcctgacgtctaatcaccgaaattcgtgggctaaagcatacaatactctgataaaagataaggtgaatcgtgactctgtgcgttctatccagaagtcgattttcactgtctgcctggatgcaacaatgccccgggtgtccgaggacgtgtacaggtctcatgtagcaggccagatgctccatggcggcgggagcagactcaacagtggcaataggtggtttgataagactcttcagttcattgtggcggaagatggtagttgtggtttggtttatgagcacgcagctgctgagggaccccccatcgtgactctgctggactacgtcattgagtatactaagaagcctgaactggttaggtctcccctggtgcctctgcccatgcccaagaaactgagattcaacatcacaccagaaatcaaaagcgatatcgaaaaggcaaaacaaaacctgtccatcatgattcaggacctggatatcacagtgatggtgtttcaccactttgggaaagacttcccaaagtccgagaagttgtccccagatgcatttatacagatggctcttcagctcgcttactacagaatatatggccaggcctgcgctacctatgagtccgcttctctgaggatgttccaccttggaagaaccgataccatcaggtcagcgtctatggactccctaacctttgtgaaagcaatggacgatagttccgtcaccgaacatcagaaggtggaactgctgaggaaggccgtccaggctcaccgtgggtacactgatagagcaataaggggcgaagcgtttgatcggcacctattaggacttaaacttcaggcaatcgaagacctcgtttctatgccggatatcttcatggatacgtcttatgccattgcgatgcattttcatctcagcacttctcaagtgcctgccaaaactgattgcgtcatgttttttggtcccgtggtcccggatggttacggagtctgctacaatccaatggaggctcacatcaacttcagcctctcagcgtacaattcttgtgcagaaactaacgcggctagactggcacactacctggagaaagccctcctagatatgagggcccttttacagtcccacccacgagcaaaactctag

SEQ ID NO: 181691 - DNA, 1638 bp, synthetic construct
  misc_feature 1..1638: note = Description of Artificial Sequence: Synthetic coding sequence
  source 1..1638: mol_type = other DNA
atgctggccttcgccgcccggaccgtggtgaagcccctgggcttcttgaaacccttcagcctcatgaaagccagtagccgtttcaaggcccatcaggatgccctgccaaggttgcccgttccaccattgcaacagtccttagaccattacctgaaagccctgcagcccattgtgtccgaggaggagtgggcccacaccaaacaactcgtggacgaattccaggcctccggcggcgtcggagaaaggctccagaagggcctcgaacggcgcgcccgcaagacagagaattggttgtccgagtggtggctgaagaccgcatacttacagtatcgtcagcccgtggtcatatactctagtcccggggtgatgctgcccaagcaagacttcgtggacctgcaagggcaactgaggttcgccgctaaactcatcgaaggcgtacttgattttaaggtgatgatcgataatgagaccctccccgtggagtaccttggtggcaagcccctatgtatgaaccaatattatcagatcctgtcctcatgcagagtccctggtccgaagcaggacaccgtttctaactttagtaaaactaaaaagccccctacgcatattaccgtggtccacaactaccaatttttcgaactcgatgtatatcactcagacggtactcctcttactgcggaccagattttcgtgcagttagaaaagatttggaactccagcctccagaccaacaaggagcccgtcggcatactgacctctaatcaccgtaatagctgggcaaaagcatacaacactctcattaaggacaaggttaacagggatagcgtccgttcgatccaaaaaaagaaacctgaacttgtcagatctccccttgtgcctttgcctatgccaaagaagttgaggtttaacattacccccgagatcaagtccgatatagagaaggcaaaacagaacctcagcatcatgatccaggatctagacatcactgtcatggtgtttcatcacttcgggaaggacttcccaaagtccgagaagctaagccccgatgctttcatccagatggccctacagctagcttactaccggatctacggccaggcctgtgcaacttacgaatccgctagcctacgtatgttccacctgggcagaaccgacaccataagatcagcatcaatggactctctgacattcgtaaaggccatggacgacagcagcgtgacggagcatcagaaagtggaactgctgcggaaggccgtgcaggcccatcggggctacaccgaccgggccatccggggggaggccttcgacagacacttgctgggattgaagctgcaggctattgaggatctggtgtctatgccggacatctttatggatacctcctatgccatcgctatgcatttccatctcagcaccagtcaagtgccagcaaagacagattgtgtcatgttcttcggccctgtagtccccgatggctatggagtgtgctacaatcccatggaggcccacatcaactttagtctgagcgcttataacagttgcgccgagactaacgctgccagactggcccattatttagaaaaagccctgttagacatgcgcgctctgctgcagtcccatccaagagccaagctgtag

SEQ ID NO: 181692 - DNA, 2322 bp, synthetic construct
  misc_feature 1..2322: note = Description of Artificial Sequence: Synthetic coding sequence
  source 1..2322: mol_type = other DNA
atggccgaggcccaccaggccgtggccttccagttcaccgtgaccccggacggaatcgacttgagactcagccacgaggcgctgcggcagatctacttgtccggccttcacagctggaaaaaaaaatttatccggtttaagaacgggattattactggcgtttaccccgcaagcccgtctagctggctaatcgtcgttgtcggtgtgatgacaacaatgtatgctaaaattgacccttctcttggaatcattgccaaaattaataggactctcgaaacggcaaactgcatgagctcacaaacaaaaaatgtggtctctggcgttctcttcggtaccgggctgtgggtggcactgatcgtaacaatgcgatactcccttaaggtcctcctcagctaccacgggtggatgttcacggagcacgggaagatgtcccgagctaccaagatctggatgggcatggttaagatcttctccggtcggaagccaatgctatacagcttccagacctcgctgcccaggctgcctgtccctgccgttaaagatacggtgaacagatacctgcagtccgttcgcccactgatgaaggaggaggactttaagcgcatgaccgccctcgcacaagattttgcagttgggctggggcctcggctccagtggtaccttaaattaaagtcttggtgggcaacaaactacgtgtcggactggtgggaggaatatatttaccttcgggggagagggccattgatggtgaacagtaattattacgcgatggacctgctgtacatactccccacacatatacaggcggcgagagcaggcaatgctatccatgcaatattactgtatcgaaggaaactggacagagaggaaatcaaacccatacgccttctgggctccacaatcccactatgtagtgcgcaatgggagcgcatgttcaatacttcacgaattcctggcgaggaaacagataccatacagcacatgcgcgattcaaagcatatcgttgtttatcaccgcggccgttacttcaaagtgtggctgtaccacgatggccgactactgaagcctagggaaatggagcagcaaatgcaacggatactggacaataccagcgagcctcagccgggcgaagccagactggctgctctgactgctggggatagagtaccttgggcacgctgtagacaggcttatttcggccgcggtaagaacaagcaatctttggacgctgtagagaaagctgccttcttcgtgacactggatgagaccgaagaggggtaccgatctgaggaccccgacacgtccatggactcttatgcaaaatccctgcttcacggaaggtgttacgaccgatggtttgacaaatccttcacatttgttgttttcaagaacggcaagatgggattaaacgccgaacattcttgggctgatgctcccatagttgcccatttgtgggagtacgttatgtcaatcgacagcctccagctggggtacgctgaagatggccactgtaaaggggatatcaatcctaacatcccctaccccaccagactgcaatgggatatccctggcgaatgtcaggaggtcatcgaaactagtctcaataccgccaatctgctggcgaacgatgtggactttcattccttccccttcgtggctttcggtaagggtattattaaaaaatgcaggacctcaccagatgctttcgtgcaactcgccctgcagctggcccactacaaggatatgggtaaattttgcttgacctacgaggcatcaatgacacgcttatttagggagggccgtacagaaacggtgcgctcctgcacgacagagtcctgcgattttgtgagagctatggttgacccagctcaaactgtcgagcaaagacttaagctgttcaagctggctagcgagaagcaccagcatatgtaccggcttgctatgactgggagcggcatcgataggcatctcttctgcctgtacgtagtgtctaaataccttgccgtggagtcccccttcctgaaggaggtgttgagcgagccatggcggctgagtacaagtcagaccccccagcagcaggtggagctgttcgaccttgagaacaatcctgagtatgtgagcagtggcgggggattcggccctgtcgctgatgatgggtatggggtatcatacattttggtgggggaaaacttgataaactttcacatatccagcaagttcagctgcccagagacggactctcaccgattcggacgtcacttgaaggaggccatgacagacatcattaccctgtttggcttaagctccaattcaaagaaatag

SEQ ID NO: 181693 - DNA, 2271 bp, synthetic construct
  misc_feature 1..2271: note = Description of Artificial Sequence: Synthetic coding sequence
  source 1..2271: mol_type = other DNA
atggccgaggcccaccaggccgtggccttccagttcaccgtgacccccgacggcatcgaccttcgcctaagccacgaggctctccgacagatttatctgtcagggctgcactcctggaaaaaaaagtttattcggtttaagaatggaattatcactggagtgtaccctgcttctccttcctcttggcttatcgttgtcgttggagttatgacaactatgtacgctaaaatcgatccctcactggggatcattgcgaagatcaatagaacactcgagaccgctaattgtatgtcctcccaaaccaagaatgtagttagcggcgtcctgttcggtaccgggctgtgggtggcacttatcgtgacaatgcggtattctttgaaggtgttattgagctatcacggctggatgtttaccgagcacgggaaaatgtcccgcgccacaaaaatatggatgggcatggtcaagatctttagtggccgcaagcctatgttgtacagcttccagacaagcctcccccgtctgcccgtgcctgctgtaaaagacacagtgaaccgatatctgcagagcgtacggcctctgatgaaggaagaggattttaagcggatgacagccctggctcaagacttcgcagtggggttgggacccagactacagtggtaccttaaactgaagagttggtgggccactaattatgtgagcgactggtgggaagagtacatttatttgcggggaagaggtccactaatggttaattccaactactacgccatggatctattatacatattacctacacatatccaagccgcccgggcgggaaacgcaatacatgctatattgttgtaccgtcggaagttggacagggaggaaattaaaccgatcaggctgctcggatctaccatccctttatgctctgcacaatgggagcgaatgttcaacacatccagaataccaggcgaggaaaccgacaccattcaacacatgagagattctaagcatatcgtagtctaccaccgggggagatacttcaaagtgtggctctaccacgatggtcggcttctgaaacctcgggagatggagcagcagatgcagcggattctcgacaatacaagcgagccgcagcccggcgaagctcgactcgccgctcttaccgcgggggaccgggtcccctgggctcgatgccggcaggcatacttcggccgcggtaaaaataagcagtccctcgacgctgtggaaaaggcagccttctttgttaccctggacgaaaccgaggaaggctataggtcagaagatcctgacacctcgatggatagctacgcaaagtcacttctccacggtcgatgctatgacaggtggttcgataagtcatttactttcgtcgtatttaagaatggcaagatgggcctgaacgccgaacactcttgggccgacgctcccattgtggctcacctgtgggaatacgtgatgtctatcgattccttacagctcggctatgctgaggatggtcattgcaagggtgacattaacccgaacatcccctatccgactcggctgcagtgggacatacccggagagtgtcaagaagtaatcgagacctccttgaacacagccaacctgctggcaaatgatgtggatttccactctttcccatttgtcgcatttggcaaagggattatcaaaaaatgtaggacatcaccagacgcgttcgtgcagctggccctccagctggcacattataaagacatggggaaattttgcctgacgtacgaagctagcatgacccggctgttccgcgagggtcgtacagaaaccgtccgttcttgcaccaccgagagctgtgattttgtccgagccatggtcgaccctgcccagaccgttgaacagcggcttaagttgttcaaactcgccagcgagaagcaccaacacatgtaccgcctggccatgacaggctccggcatcgacaggcaccttttctgcctttacgttgtaagcaaatatctcgcagtggaatcccccttcctgaaagaagtcctgtccgagccatggcgactctcgacatcacagacccctcagcagcaagttgaactgttcgatttagagaataatcccgagtacgtgagcagtggcggtgggtttgggcctgtggcagacgacggctacggtgtaagttatatattggttggagaaaatctgatcaacttccatatcagcagcaaattttcctgtcccgaaactggcataatttctcagggtcctagcagcgacacctag

SEQ ID NO: 181694 - DNA, 2322 bp, synthetic construct
  misc_feature 1..2322: note = Description of Artificial Sequence: Synthetic coding sequence
  source 1..2322: mol_type = other DNA
atggccgaggcccaccaggccgtggccttccagttcaccgtgacccctgatggtatagacctacgactgtcccatgaggcattgaggcagatctacctgtccggacttcattcatggaagaaaaagtttatacggtttaaaaacggaatcattactggggtgtacccggcttccccaagcagctggttaatcgtggtggttggcgtaatgaccactatgtatgccaagatcgaccctagcctgggcatcattgccaaaataaataggacactcgaaaccgcaaactgtatgtcgtcccagacaaaaaatgtggtaagcggagtgctgttcgggactggcctctgggtggcactgatcgtgactatgaggtactctctgaaagttttactgagctatcatggttggatgtttacagaacatggcaagatgagcagggcaactaaaatttggatgggcatggtcaagatattctcgggtcgtaaacctatgttgtacagctttcagacaagcctgccgagacttccagttcccgctgtgaaggacactgtgaacagatatctgcaatctgtgcgacccctgatgaaggaggaagattttaagcgtatgactgccctcgctcaggactttgctgttggactcggaccacggttacagtggtacctgaagcttaagtcttggtgggctaccaactacgtgtccgattggtgggaagagtatatttatctgcgagggagaggcccccttatggtcaactcaaattattatgccatggatctcctgtatatcctgccaacacacatccaggccgcccgcgcaggcaacgcaattcatgccatacttctttacaggcggaagctggacagggaggagattaagcccattcgactgctcgggtcgacaatccctctgtgtagcgcgcagtgggagcggatgtttaatacaagccgaattcctggggaggagaccgataccatacagcacatgcgagactctaagcacatcgtggtctatcaccggggacgctatttcaaggtgtggctctaccatgatggccgcctgctgaaaccacgagagatggagcagcaaatgcagagaatcctagacaacactagtgagccacagcccggcgaggcacggctggccgccctgaccgctggcgacagagtgccgtgggcccgttgcagacaggcatattttggccgggggaaaaataagcagagtcttgatgctgtggaaaaggccgcctttttcgtgacgttggatgagaccgaagaggggtacagaagcgaggatccagataccagcatggactcttatgccaaatccttattacacgggcggtgctacgatcgctggttcgataagagtttcacattcgttgtttttaaaaacggcaaaatgggtctgaacgccgaacacagctgggcagatgcacccatagtggctcatctgtgggaatatgttatgtcaatcgatagcctgcagcttggctacgctgaagacggacactgcaagggggacattaacccaaacataccgtaccccacaagactgcagtgggatattccaggcgagtgtcaagaggtaatcgaaacaagcctgaacaccgctaatctgttagcaaacgatgttgacttccactcttttcctttcgtcgccttcggaaagggaattataaaaaagtgccggacctccccggacgccttcgtgcaactcgccctgcagctggcccactacaaggacatggggaagttttgtctcacttatgaagcttctatgactagactgtttagggaaggccgtacagaaactgtgcgatcatgtacaaccgaaagttgtgactttgtcagagccatggtggatcctgcacagactgtggagcagaggctcaagctgttcaagctcgcctcagagaaacaccagcatatgtatcgcctggccatgaccggatccggaatcgaccggcacctgttctgcctttacgtagtgagtaaatacctggccgtggagtccccgtttttgaaggaggtgctgtccgagccatggaggctttctacaagtcagactcctcaacagcaggtggaactgtttgaccttgaaaataatccggagtatgttagctctggtggcggatttggacccgttgcagacgacggatatggcgtctcctacatactggtgggcgaaaacctcatcaattttcacatttccagtaaattcagctgtcctgagacagatagccaccggttcggacggcacctgaaagaagcaatgacagacattatcactctcttcggtttatcgagcaactctaagaaatag

SEQ ID NO: 181695 - DNA, 2322 bp, synthetic construct
  misc_feature 1..2322: note = Description of Artificial Sequence: Synthetic coding sequence
  source 1..2322: mol_type = other DNA
atggccgaggcccaccaggccgtggccttccagttcaccgtgaccccagacgggatagacctgagattgagccacgaagctttgcggcaaatttacctttctggactgcactcctggaaaaagaaatttatacggttcaagaatgggatcataactggtgtatatcccgcttccccaagctcctggctgattgtagtggtgggtgtgatgaccaccatgtacgctaaaatagacccgagtctcggcataatcgccaagatcaacaggactctagagacagcgaattgcatgtcatctcagacgaaaaacgtggtgagcggcgtgttattcgggacggggttatgggtggctctcatcgtgacaatgaggtactcacttaaggtactcttatcttatcacggttggatgttcaccgagcatggcaagatgtcccgcgctactaagatttggatgggaatggtgaagatctttagtggcaggaaacccatgctgtactcttttcagacttctttgcctcgcctgccagtccctgcagtgaaagatactgtaaaccgctatctgcagagcgtgagacctctcatgaaagaggaagatttcaagcggatgaccgcgttggcccaagacttcgctgtaggcctggggcctagactccagtggtaccttaaactgaaatcgtggtgggcaacaaactacgtgtccgactggtgggaagagtacatctacctgaggggacgcggtccccttatggtgaacagtaactactacgcgatggacctcttgtacatcctccccacacatatccaagccgcacgcgctggcaatgccatccatgccatacttttatatcgtcgcaagcttgatagggaggaaatcaagccaattcgcttgttggggtcaacaatacccctatgcagtgcccaatgggagcggatgtttaataccagcagaattcccggagaggaaactgacacgattcaacacatgagggactctaagcacattgtcgtgtaccatcgcgggcggtatttcaaggtctggctatatcacgacggacggttgctgaagccacgagaaatggaacaacaaatgcagcgaattctggataatacctcagaaccccagcccggcgaggccagattggctgccctgacagcaggggatagggttccatgggcccgctgcaggcaggcttattttgggaggggtaaaaataagcagtctctggacgccgtcgagaaggcagccttttttgtgaccttggacgaaaccgaggagggctataggtctgaggatccagataccagcatggatagctatgcgaagagcttactgcatgggcgttgttatgacaggtggttcgataaaagcttcaccttcgtggtttttaaaaacggaaaaatgggcttgaatgctgaacacagctgggcggatgctccgatagttgcgcacctatgggagtacgtcatgagcattgattcactgcagcttgggtacgctgaggatggacactgtaagggggatatcaatcccaacatcccatacccaacaaggctccagtgggacatccccggagaatgccaggaagtgattgagacaagcttgaatacagcaaatcttcttgctaacgatgttgactttcattccttcccctttgtggcatttgggaagggcattataaaaaagtgtcggacatcacccgatgcgtttgtccagctggccttacaacttgcccactataaggatatggggaagttttgcctcacttacgaagctagcatgacgcgcctgttccgcgaaggccggaccgagacggtacgctcctgtactacagagagttgcgacttcgtccgcgccatggttgatcctgcacaaaccgtggaacagcgcctaaaactcttcaaattagcatccgagaaacaccaacacatgtatagactagccatgactggcagcggtatcgatcgccacctcttctgcctgtatgttgtgtcaaaatatctggcggtggagtctccattcctaaaggaagtgctgtccgagccatggagactctcaacatcccagacaccacagcaacaagtcgagctgtttgatcttgagaataaccctgagtatgtttcttctggcggaggattcgggccggtggcagacgacggttacggagtatcctacattcttgtgggcgaaaatctcattaatttccatatctccagcaagttcagttgcccggaaaccgactcgcaccggtttggcagacacctgaaggaagccatgaccgatatcatcactctgtttggattgagctctaacagcaaaaaatag

SEQ ID NO: 181696 - DNA, 2271 bp, synthetic construct
  misc_feature 1..2271: note = Description of Artificial Sequence: Synthetic coding sequence
  source 1..2271: mol_type = other DNA
atggccgaggcccaccaggccgtggccttccagttcaccgtgacccctgatggtatcgatcttaggttgagccacgaggccctccggcagatctacctgtctggcctacactcctggaaaaagaaatttatacggttcaagaatgggattataactggcgtgtatccggccagtccatcctcttggctgatagtcgtagttggtgtgatgacaaccatgtatgctaagattgaccccagcctgggcatcatcgcgaagatcaatagaactttggagacagccaactgcatgtcctcacagactaagaatgtggtcagtggcgtcttgttcggtactggactatgggtagcactgattgttaccatgcggtacagcctcaaggtcttattgtcgtaccacgggtggatgtttaccgaacacggtaaaatgtcacgggccactaaaatctggatggggatggttaagattttttcgggccggaagcccatgttgtatagctttcagacaagtctgcctagactcccagtgcctgctgtgaaggatactgtgaatcggtatctccagagtgtgagacctctcatgaaagaagaggattttaagaggatgaccgctcttgctcaggattttgccgttgggcttggccctcggctgcagtggtacctgaaactcaagagctggtgggcaactaattacgtcagtgattggtgggaggaatacatctatttaaggggccggggcccgctaatggtgaattccaattattatgcaatggacctgctgtatatcttacctacgcatatacaggccgccagggcaggcaatgctatacacgccatcctgctttatcgacgcaagctagatcgcgaggaaatcaaaccaatccgactgcttggatctacaatcccactttgttccgcccagtgggagagaatgtttaacacatctaggatccccggggaggaaactgatacgattcagcacatgagggacagtaagcacattgttgtctatcacagaggaaggtacttcaaggtatggctataccacgacgggcggctcctcaagcctcgggagatggagcagcagatgcagaggatcctggacaacacctcggaacctcagcctggcgaagcacggctcgccgctctgacggctggcgatagagttccttgggcccggtgccgccaggcctattttggacggggcaagaataaacagtcactcgacgctgttgagaaggccgccttcttcgtaactctggacgagacagaagaaggttataggtccgaggaccccgacacctccatggatagctatgccaagtccctactgcacggccggtgctatgataggtggttcgataagagcttcacctttgtagtgtttaaaaatgggaagatgggactcaatgccgagcatagctgggccgacgcccctatcgtcgcccatctttgggaatatgtcatgtcaattgacagcctgcagcttgggtacgcggaggatggccactgcaagggggacatcaaccctaatatcccatacccaactcgcctgcagtgggatattcccggagagtgtcaggaggtgattgaaaccagtctgaacaccgctaatctgctggctaacgacgtcgatttccacagcttccctttcgtcgccttcggcaaggggatcatcaaaaaatgtaggacttcccccgatgcctttgttcaactcgctctccagttagcccactataaggacatgggcaagttttgtctgacctatgaagccagcatgacaaggctgtttagagaaggccggactgaaactgtcagaagctgtactactgaatcatgcgactttgtaagagcaatggtggaccccgctcagacagttgaacagcgcctcaagcttttcaaactcgcctctgagaaacatcagcacatgtatcgcctggcaatgaccggctctgggatcgataggcatctgttctgcctttacgtggtgagtaagtaccttgccgtggagtcacccttcctgaaggaggttctgtctgaaccttggcgcctgtcgacttcccagaccccccagcagcaggtcgagcttttcgacttggaaaacaacccagagtacgtgtcatccggtggggggtttggacctgtggcagatgacggatatggtgttagctatattctggtcggtgagaacctgattaactttcatatctccagtaagtttagttgtccagaaactgggataattagccagggtcccagctccgatacctag

SEQ ID NO: 181697 - DNA, 2319 bp, synthetic construct
  misc_feature 1..2319: note = Description of Artificial Sequence: Synthetic coding sequence
  source 1..2319: mol_type = other DNA
atggccgaggcccaccaggccgtggccttccagttcaccgtgaccccagacggggtggactttagattgtcaagagaggcactgaagcacgtctatctgtcaggcattaactcctggaagaagcgacttattaggatcaagaatggaatcttgcgtggcgtttacccaggcagccctactagctggctcgtcgtgataatggcaacggtcgggtcctctttttgcaatgttgacatctccctgggccttgtgagttgcatccagagatgcttaccacaggggtgcggtccttaccagacaccacagacgcgggcactgctttcaatggcaattttttcgaccggcgtgtgggtgaccggaatcttcttttttagacagacattgaagctcctgttatgttaccacggctggatgttcgagatgcacggcaaaacctccaatctgactagaatctgggctatgtgtatccgcctgctgagttctcgccatcctatgctctatagctttcagacatcgctaccaaaactgccagtaccccgtgtcagcgccacaatccagcgctacctggagagcgtgcggcctctactggatgatgaagagtactatcgtatggagctgctcgccaaagaattccaggacaaaacagcgcccaggctgcagaaatacctcgtgctgaagagctggtgggccagcaactacgtttcagactggtgggaagagtatatatatctccgcgggaggtctcccctcatggtcaattccaattactacgtgatggacttggtgctaattaaaaacaccgatgtgcaggccgctcgcttaggcaacatcatacatgccatgataatgtataggagaaagctagaccgtgaggaaattaagcccgtaatggccctgggaattgtgcctatgtgtagttaccagatggaacggatgttcaacactacccgaatcccaggaaaagacacggacgtcttgcagcacctgtcagatagccggcatgtggccgtgtatcataaggggagattttttaaactatggttatatgaaggggcccgcctcctgaagccccaagacctggagatgcagtttcagaggatcctggacgacccatcgcccccccaacctggggaggagaaattggccgccctcacggccggcggacgcgtcgaatgggcccaagcacgacaggcatttttctcatcaggtaagaacaaggcagcactggaagccattgaaagagcggctttttttgtggctctcgacgaagagagttatagctacgatcctgaggatgaggccagcctatccctctacggcaaagctctcctacacggcaactgctacaatcgctggtttgataagagttttactctgatcagctttaagaatggccagctgggactcaatgctgaacatgcttgggccgatgcccccattattgggcatctttgggagttcgttctgggaacagattcgttccacctcgggtacaccgagactggtcattgcctgggcaaacccaatcccgccctggctcctcctacaaggctgcagtgggatatccccaagcaatgccaggctgtcatcgaatcatcatatcaagtggcgaaagcgttggccgacgatgttgaactttactgcttccagtttctcccgtttggcaaaggattaatcaaaaagtgtagaacctccccagacgccttcgtccagatagctctgcagctggcccactttcgagatagaggcaagttctgtcttacctacgaggcaagtatgacacggatgttccgagaaggcagaacagagaccgtccggtcgtgcacatccgaaagcacggccttcgtccaggctatgatggaaggatcccacactaaagctgatttaagagatctcttccagaaggctgccaaaaaacaccaaaacatgtatcggttggctatgacaggagctggaattgaccggcacttattctgcctgtacctcgtgtctaagtacctaggtgtcagttccccattccttgccgaagtgctgtcagagccatggcgcctgtccacttcccaaattccccagagccaaattcgcatgttcgaccctgagcaacaccctaaccacctcggagccggcggcggatttggccccgttgctgacgatggatacggggtgagctatatgatcgccggcgagaacactatctttttccacatctcttccaagttttcatcgtcagagaccaacgcacagaggtttggcaatcacatcaggaaggccctcctcgatatcgccgaccttttccaggtacctaaagcttacagctag

SEQ ID NO: 181698 - DNA, 2319 bp, synthetic construct
  misc_feature 1..2319: note = Description of Artificial Sequence: Synthetic coding sequence
  source 1..2319: mol_type = other DNA
atggccgaggcccaccaggccgtggccttccagttcaccgtgaccccagatggggtcgactttcgattgtctcgcgaggccctaaaacacgtgtacctttcaggaatcaatagttggaagaagcggctgatacgaattaagaacgggatcctgcgcggcgtatatcctggaagcccaactagctggctggtcgtaattatggctaccgtgggctcctctttttgtaatgtggacataagtctgggattagtttcctgtattcaacgatgtctcccccagggatgcggtccgtatcagaccccgcagaccagagccctattaagcatggccatcttcagcaccggggtgtgggttaccggaatcttttttttccgccaaaccctgaaattgctgctctgctatcacggttggatgttcgaaatgcacgggaaaacttctaatttgactcggatctgggctatgtgtatcaggttactctcctcgaggcaccccatgttatatagctttcagacttctctgcccaagctgcccgtgcctagggtgagcgccaccattcaacggtacctggagagcgtgcggcccctcctcgacgatgaagagtactaccgaatggagcttcttgccaaggaattccaggacaaaaccgcgcctcgcctgcagaagtatctggtgctgaagtcgtggtgggcaagcaattacgtgagcgactggtgggaagagtatatatacctgcgtgggcggtctcccttgatggtcaacagtaattactatgtgatggaccttgtgttgatcaagaataccgatgtgcaggctgcccgcttgggcaatatcatccatgccatgattatgtaccgacgaaagctggacagagaagagataaaaccagtcatggctcttggcatcgtgcctatgtgctcgtaccagatggagcggatgtttaacaccaccaggatcccaggaaaggacacagatgtgttgcagcatctctcggattctcgtcacgtcgccgtttaccataaaggtagattttttaaattgtggctgtatgagggcgcaaggctgctcaagccacaagacctggaaatgcagtttcagagaattctcgacgaccccagccccccccagccaggggaggagaaactggcagctctgacagctggagggcgggttgagtgggcgcaagcacgtcaagctttcttctcttccggaaagaataaggcagccctggaggccatcgagcgcgccgccttctttgtggctttagacgaagagtcttacagctatgaccccgaggacgaggcctccctgtcgctctatggcaaagccctgttgcacggaaattgttacaaccgatggttcgataaaagctttacattaatttccttcaaaaatggccaattaggcctgaatgccgaacacgcatgggcagatgcaccaatcatagggcatctctgggagtttgtgctgggaaccgactcattccatctgggttacactgaaaccggacattgcctgggaaagccgaaccctgccctggccccccctacgcgccttcagtgggacattcctaagcagtgccaagcagtcatcgaatcatcttaccaggtcgcgaaggcccttgcagacgatgtggagctctattgtttccagttcctcccttttggtaagggcctgataaaaaaatgccggacatctcccgatgcttttgtccagattgcattgcaacttgctcatttcagagaccgcggcaaattttgtctgacatacgaggcctccatgacaaggatgtttcgagaggggaggaccgagactgtccggtcttgtacgagcgagtcaactgcctttgtgcaggcaatgatggagggtagtcacactaaagcggacctccgtgacctgttccagaaagcagccaagaaacaccagaatatgtacaggctggccatgaccggtgctgggatagaccgacacctgttctgtctttatttggtgtcaaaataccttggagtatccagcccttttttggccgaggtgctatccgaaccgtggcgcctctcaacttcccagatcccgcagagtcagatccgcatgtttgatcccgagcagcatccaaatcacctgggtgccggtggcggatttgggccagtggccgacgacggatatggagtgtcctatatgatcgctggggagaataccatattctttcacattagtagtaagttttcttccagtgagacgaatgcccaaagattcggtaatcacattcgaaaagcacttctggatattgccgacctctttcaagtgcccaaggcttatagttag

SEQ ID NO: 181699 - DNA, 2319 bp, synthetic construct
  misc_feature 1..2319: note = Description of Artificial Sequence: Synthetic coding sequence
  source 1..2319: mol_type = other DNA
atggccgaggcccaccaggccgtggccttccagttcaccgtgacccctgacggagttgactttcgcctcagtcgggaggccctgaagcacgtctacttgtcagggataaacagctggaaaaaacgacttattaggataaagaatgggatacttaggggcgtataccccggttcccccaccagctggttagtcgtgattatggctacagttgggagtagtttctgcaatgtggacatcagcttaggactggtttcctgcattcaaagatgtctccctcagggctgtggcccctaccagacccctcagacaagagcattgcttagcatggccattttctccaccggcgtctgggttacaggcatttttttcttccggcagacactgaaactgctgttatgttatcatggatggatgtttgagatgcacggaaagacttcaaatctgacgaggatttgggccatgtgcatacgactactgtcttctcgccatcccatgctgtactcctttcagacttcactcccaaaactcccagtgccgcgagttagcgccacaattcaaaggtatctggagagcgtacgaccactgcttgatgacgaagagtactaccggatggaactccttgccaaggagttccaggacaagaccgctccacggctccagaaatacctagttttaaagtcttggtgggccagcaactacgtctcagactggtgggaagaatatatatatctgaggggacggagccccttgatggtcaacagtaactattacgtcatggacctcgttttgatcaagaataccgatgtgcaagctgccagactgggaaatatcatccacgccatgataatgtatcgacgcaagcttgatagggaagaaatcaaacccgtaatggctttggggatcgtccctatgtgttcctatcagatggaacgtatgttcaacaccaccagaatcccaggcaaagacacagatgtcctccaacatctttcagattctcgccatgtggccgtgtatcacaagggccgattcttcaagctatggctgtatgaaggtgcaagactgttaaaaccccaggatctggagatgcagttccagcgaattttagacgacccctcaccccctcagccgggcgaagagaaactagctgctctaacagccggcgggagagtggaatgggcgcaggccaggcaggcgtttttttcatccggcaaaaacaaggccgcccttgaggctattgagcgggccgctttctttgtcgctttggacgaggaaagctattcatatgaccctgaggatgaggcctcattatccctgtacgggaaggctctgctccatgggaattgttataaccgctggtttgacaagagtttcactttaatttcattcaaaaacggacagctggggctcaacgccgagcacgcttgggcagatgccccgattatcgggcacctgtgggagttcgtcttgggtactgatagcttccaccttggttacaccgagacgggacactgcctgggcaagccaaacccagccttggccccacccactagactgcagtgggatatccccaagcagtgtcaagccgtcatcgagtcatcatatcaagtggcgaaagcgctcgccgacgatgtggaactttattgcttccagtttctaccttttggtaaagggcttattaaaaagtgcaggacaagccccgacgcctttgtacagatagctctgcaactcgctcacttccgcgatagggggaagttctgcctgacctacgaggccagcatgaccagaatgtttagggagggccggaccgaaacagttaggtcctgtacgagcgagtcaacagccttcgtgcaagccatgatggagggcagccacaccaaagccgacctgagggacctcttccagaaagctgccaagaagcatcagaatatgtataggctggcaatgaccggagctggcatcgatagacacttattttgcctgtacctcgtttcaaaataccttggcgtgtcaagcccattcctggccgaagttttgagtgagccctggaggctgtcaacttcacagattccacagagccaaatccggatgttcgaccccgagcagcaccctaatcatctaggtgccggaggtgggttcgggcccgtcgccgacgacggctacggcgtgagttatatgattgctggtgagaataccatcttttttcacatcagtagcaaattcagtagttcagaaacgaatgcccaacgatttgggaatcatatcagaaaagccttgctggatatcgccgacctgtttcaggtacccaaagcctattcctag

SEQ ID NO: 181700 - DNA, 2319 bp, synthetic construct
  misc_feature 1..2319: note = Description of Artificial Sequence: Synthetic coding sequence
  source 1..2319: mol_type = other DNA
atggccgaggcccaccaggccgtggccttccagttcaccgtgacccctgatggtgtcgattttcgcctatcccgcgaggctctcaaacatgtttaccttagtggaattaattcttggaagaagagactgataagaatcaagaacggtattctgagaggagtttatccaggtagtcctaccagctggctggtggtgattatggcgacagtcggctcctcattctgcaatgtggatatatcccttgggctggtgtcctgcatccagcggtgcctgccccagggctgcggtccctatcaaaccccccaaacacgcgcccttctgagcatggccatcttctcgactggcgtgtgggtgaccggcatttttttcttccgtcagactttgaagttgctgttatgctatcacggctggatgttcgaaatgcacggcaaaacttccaacttgacccggatttgggccatgtgtatccgcctgttgtcctcaaggcaccccatgttgtatagcttccaaacatccttgcccaagctgccagtgcccagggtcagtgccactatccagcggtatttggagagcgtgcgccccctcttggacgacgaggagtactatcgcatggagttgctagcaaaagagttccaggacaagaccgctccacggctccagaagtatttagtactgaagtcatggtgggcatctaactacgtgagtgactggtgggaagagtacatttatctgcggggacggagcccactcatggtgaatagtaactattacgtcatggacctggtgctgatcaaaaatacggacgttcaggccgccaggctgggcaacattatacacgcaatgattatgtatcggcgcaagctggaccgggaggagatcaagccggtgatggcactcggcattgtgcctatgtgtagctaccaaatggaacgtatgttcaacaccacccgcattccagggaaggataccgatgtgctgcagcacctctccgacagtagacacgtggccgtgtaccacaaaggacgcttctttaagctgtggctgtatgagggggctcggttgctcaaacctcaagacctagaaatgcagttccagcggatcctggacgacccctcccccccacagccaggcgaagagaagttagcagcactgacagcaggagggcgagttgagtgggcccaggcccgacaagcctttttctctagcggcaaaaataaagcagctctggaagccattgagagagctgcattttttgttgctttggacgaggagagctacagctacgatccagaagacgaggcgtccctgtccctgtatgggaaggccttactgcacggtaactgctacaatcgctggttcgataaatcatttactctgattagcttcaagaacggtcagttaggcctcaacgcagagcacgcatgggccgacgctcccataattggccacttgtgggagtttgtacttgggaccgacagtttccatttgggttatacagaaactggacactgtcttggcaaacccaatcctgctctggctccacctacaagactgcagtgggacattccgaagcagtgtcaggccgttattgagtcgtcctaccaggtggctaaggcactcgctgacgatgtcgaactgtactgctttcagtttctgccctttggcaaaggcctgatcaagaaatgtcgtaccagtcccgatgcattcgtgcaaatagccctccaattggcccattttcgcgacagaggcaaattttgcttaacttatgaagcctcaatgacaaggatgttcagagaaggaaggacagaaaccgtacgttcttgtacttcggagagcacagcttttgtgcaggccatgatggagggttctcatacgaaagccgacctacgagatctttttcagaaggccgccaaaaagcaccagaacatgtacaggctggctatgacaggggcaggaatcgaccgccatttgttttgtctgtacttggtcagcaaatacctcggcgtctccagcccctttctggcggaggtgctctctgaaccttggagactatcgacctcccagatcccccagtcccagatcagaatgtttgacccagagcaacatcccaaccacctcggcgccggtggcggattcgggcccgttgcggatgacggttacggcgtgtcctacatgattgccggcgaaaacactatcttcttccacatctcctctaagttcagttctagtgagaccaacgcgcaacgtttcgggaatcacatccgcaaagcactcctggacatagctgacctttttcaggtgcccaaggcctacagctag

SEQ ID NO: 181701 - DNA, 378 bp, synthetic construct
  misc_feature 1..378: note = Description of Artificial Sequence: Synthetic coding sequence
  source 1..378: mol_type = other DNA
atggccgaggcccaccaggccgtggccttccagttcaccgtgacccccgacggagtcgatttccgcttgtctcgtgaagcgctcaagcacgtgtatctctctggaatcaacagctggaaaaagaggctcatcagaattaaaaatggcattttaagaggtgtataccctggatcacccacgagctggcttgtcgtcattatggcaacggtcggcagttcattctgtaatgtggatatatcactgggtctggtttcttgtatccaacgctgcttacctcagggttgtgggccataccagacaccccaaactcgggccctgctaagcatggctattttctccacaggcgtatgggtcactggtatattcttcttcaggtag

SEQ ID NO: 181702 - DNA, 1704 bp, synthetic construct
  misc_feature 1..1704: note = Description of Artificial Sequence: Synthetic coding sequence
  source 1..1704: mol_type = other DNA
atggagctgctggccaaggagttccaggacaagaccgccccccggctgcagaagtatctcgtcctgaaatcctggtgggctagcaattatgtctctgattggtgggaggaatatatttatctacgaggaagaagccctctgatggtgaacagtaattattacgtgatggatcttgtgctgatcaaaaacaccgatgttcaggccgcacgattaggcaatatcatccatgctatgatcatgtatcgcagaaaattagatagggaggagattaagcctgtgatggccttaggcatagtcccgatgtgctcttaccagatggagcgaatgtttaataccactcgaattcctggcaaggacaccgacgtcctgcaacacctatctgatagtaggcatgtcgccgtttaccacaaggggcggtttttcaaactgtggctgtacgagggcgcaagactgcttaaaccccaggacctggagatgcagtttcagagaatcttagatgacccatctccaccccagcccggcgaggagaagctggccgctctcaccgctgggggtcgagtggagtgggcccaagcccggcaagcctttttctcctccggcaaaaataaggctgcattggaggctatcgaaagagccgcttttttcgtggcactggatgaggagtcttatagctatgatcctgaagacgaagcctccctgtccctctacggcaaagctctgctccatggaaactgttataacaggtggtttgacaagagctttaccctgatctccttcaagaacgggcaacttgggctgaatgcggaacacgcctgggccgacgcaccaataatcggacacctgtgggagttcgtgcttggaaccgactcttttcacctcgggtataccgagaccgggcattgtctgggaaagcccaaccccgccctggcacctcccacacgtctccagtgggacatcccaaaacaggccgttatagagagctcctaccaggtcgccaaagcacttgccgacgacgtcgaactgtattgcttccagtttctgccgttcggcaaaggattgattaagaagtgtagaactagtcctgacgcttttgtgcagatcgccctgcaactggcacactttcgggatcgggggaaattttgcctgacctatgaggcttccatgactaggatgttccgggaaggacgcactgaaactgtacggagttgcacctccgagtccacggcattcgtgcaggccatgatggagggttctcataccaaggcagacctgagggacctcttccagaaggccgcgaagaaacaccaaaatatgtaccggcttgccatgaccggcgccggcatcgatcggcacctgttttgtttatatttggtaagtaagtacctgggggtgtcttctccgttcttggctgaagtactgtccgagccgtggcgactcagtacgagccaaattccccaatcccagatccggatgtttgacccggagcagcaccccaatcatcttggcgccggaggtggctttggtcctgtggctgacgatgggtatggggtttcatatatgatcgccggagagaatacaatcttctttcacatatcctccaaattctccagcagcgaaactaatgcccaacgtttcggaaatcatatcaggaaagcgctactagacatcgcagacctttttcaggttcccaaggcttactcttag

SEQ ID NO: 181703 - DNA, 2076 bp, synthetic construct
  misc_feature 1..2076: note = Description of Artificial Sequence: Synthetic coding sequence
  source 1..2076: mol_type = other DNA
atggccgaggcccaccaggccgtggccttccagttcaccgtgaccccagacggcgtggatttcagactgtctagagaggccttgaaacacgtgtacctgtcagggattaatagctggaagaaacgactgatccgaatcaagaatggcatcttgcgcggagtgtatccaggtagccccaccagctggttagtggtgataatggccaccgtaggcagctcattttgtaatgtcgacattagtctgggtctagtatcttgcatccaaaggtgcctcccacaaggttgtggcccctatcagacccctcagaccagagccctgctgagcatggcaattttctcaacaggcgtatgggtgactgggatcttcttcttcaggcagactttgaagctgttgctgtgctaccacggatggatgttcgagatgcatggcaagactagtaacctgacacgcatttgggccatgtgcataagactgctgagctctagacaccccatgctgtacagcttccagacatcgctgcctaaacttcctgtcccgcgggtatcagccaccatacaaagataccttgagtcggttcggccccttctagatgatgaggagtattatcggatggagctgctagccaaagaatttcaggacaagactgcccctagactccagaagtacttagttttgaaatcatggtgggcctccaactacgtgtccgactggtgggaggagtatatctatctgcgcggcaggagtcccctgatggtgaatagcaactactatgtgatggatttagttctgatcaaaaatacggacgtgcaagctgcaaggctgggcaatataatccatgctatgataatgtatcggagaaagctggaccgggaggaaatcaagcccgtgatggctctggggattgtgccaatgtgcagttaccagatggaaagaatgttcaacactacaagaatccctggaaaagacacggatgtcctgcagcatttgtccgactcgcggcatgtggccgtctaccacaagggacggttcttcaagctgtggctctacgaaggagcaagattgctgagtttgtatgggaaggctctgctgcatggcaactgctataaccggtggttcgataagagctttacactgatttctttcaagaacggacagttgggactgaacgcagagcacgcctgggccgatgctccaattattggacatctgtgggagtttgtcttgggaactgactcctttcacctggggtacactgagacggggcattgtctgggcaagccaaatcccgcactcgccccccctacccgactccagtgggacatacccaagcagtgccaggccgtgatagagtcttcttatcaggtggccaaggcgttggccgacgacgtggagctttactgtttccagttcctcccttttgggaagggactcataaaaaagtgtcggaccagccccgacgcattcgtacagatcgcactccagctggcacatttccgagatcgtggaaaattctgcctgacttacgaagcctccatgaccagaatgtttagagagggcagaactgagacagtgcgaagttgtacttccgagagtaccgcgtttgttcaggccatgatggaaggaagccacacaaaagctgacctgcgtgaccttttccagaaggccgctaagaagcaccagaatatgtatcgcctcgctatgactggggcagggatcgataggcacctgttctgtctctacctggtgagcaaatacctgggcgtcagtagtcccttcctcgccgaagttctgtctgaaccttggcggcttagcacttcgcagatcccccagagccagatccgtatgttcgatcccgaacagcaccccaaccacctgggagctgggggagggttcgggcctgttgctgacgatggatacggagtttcatatatgattgcaggcgagaacactattttctttcatatctcttcaaagttctcttcatccgagaccaatgcgcagcgctttgggaaccacatcaggaaagctcttctcgacattgcggacctgttccaggtgcctaaggcttattcttag

SEQ ID NO: 181704 - DNA, 2217 bp, synthetic construct
  misc_feature 1..2217: note = Description of Artificial Sequence: Synthetic coding sequence
  source 1..2217: mol_type = other DNA
atggccgaggcccaccaggccgtggccttccagttcaccgtgacccccgatggtgttgattttcgactctctcgggaggcgttgaaacacgtctacctgagcggcatcaactcatggaagaagcgcctgattcgtattaaaaatggtatactgcgaggcgtgtaccccggaagtcccaccagttggctggtcgttatcatggcgaccgtcggctccagcttctgcaacgtcgacattagccttggacttgtatcttgcattcagaggtgtctgccccagggatgtggcccctaccaaacaccacagactagagcacttttgagcatggctatattttcaacaggagtgtgggtaacaggcatcttcttcttcagacagaccctgaaattgctgctgtgctaccatggatggatgttcgagatgcacggtaagaccagcaacctgactagaatttgggcctatctggaatccgtccggccgctactggacgatgaggaatattacaggatggagctgttagctaaggagttccaggataaaactgctccccgcctgcagaaatacctggtgctcaagagctggtgggccagtaattacgtctctgactggtgggaggagtacatctatcttagaggtcgcagccctctaatggtcaactccaattattatgtgatggacctggttctcatcaagaacacggacgttcaggcagctagactgggcaatatcatccacgctatgatcatgtaccggcggaaactggaccgtgaggagattaagcctgttatggccttggggattgtgcccatgtgcagctaccagatggagagaatgttcaacaccacacgtattcctggcaaagacaccgacgtcctgcagcatctgagtgattcccgacatgtcgccgtatatcataaaggccgcttctttaaattatggctgtatgagggcgctcgcctgctaaagccacaggatctcgagatgcagtttcagagaattcttgatgatccctcccctcctcagcccggagaggagaagctcgccgccctgacggcaggcggacgcgtcgaatgggctcaggctagacaagccttcttcagctccgggaagaacaaggccgcactggaggctatcgagagggccgcctttttcgtggctctcgatgaggagagctattcctacgacccggaggacgaggctagcctctccctctatgggaaggctctgttgcatgggaactgttataaccgctggttcgataagtcctttacattaatctccttcaaaaatggccagctgggcctcaacgcagagcatgcgtgggctgatgcaccgatcatcgggcacctctgggagttcgttcttggaacagattccttccaccttggctacacagagacaggccattgcttgggaaagcctaatcccgcactcgcaccaccaacacgcctgcagtgggacatcccaaagcagtgccaagccgtgatcgagtcaagttaccaggtcgcaaaagctttagctgatgacgtggagctgtattgcttccagtttctgcccttcggtaagggattaatcaaaaagtgcaggacctcaccagatgcattcgttcagattgccctgcagttggcgcacttcagggatcgggggaaattttgcctaacctatgaggcctccatgaccagaatgtttcgcgagggcagaaccgagacggtcaggagttgcacctctgaaagcaccgcctttgttcaagctatgatggagggatctcataccaaggcagacctccgtgatctctttcagaaagcggccaagaaacaccagaacatgtataggctagccatgactggcgccggcatcgacagacatcttttttgcctgtatcttgtaagtaaatatctgggcgtaagcagtccctttctggccgaagttctgtcagagccttggaggttgtctacttcacagattcctcagtcccagattcgtatgtttgacccagaacagcaccctaaccatctaggagcaggtgggggtttcggacctgtagcagacgatggctacggggtgagctacatgattgccggagagaacacaatctttttccatatttcctccaaattttcttcatccgaaacaaatgctcagcgctttgggaatcacattcggaaggctctgttggatattgcagatctttttcaagtccccaaggcatatagttag

SEQ ID NO: 181705 - DNA, 1458 bp, synthetic construct
  misc_feature 1..1458: note = Description of Artificial Sequence: Synthetic coding sequence
  source 1..1458: mol_type = other DNA
atgctgttcagctaccagcggagcctgccccggcagcccgtgcccagcgttcaggataccgtgagaaagtatttggagagcgtaaggccaattctgagcgatgaggattttgactggaccgccgtgctcgcccaggagtttctaaggttacaggcctccctcctgcagtggtacctccgactgaagagttggtgggccagtaactatgtttccgactggtgggaggagttcgtctatttgcggagtagaaacccacttatggtaaatagcaattattatatgatggatttcctgtatgtgacccctacaccactgcaagccgcccgcgccggcaacgcagttcatgccctgctactgtatcggcatcgcctgaacaggcaggaaattcccccagtgcgcggcccacagtgggtccgcgacggcggtgttgtattatggcccttagggcacgtagggcccggtagacagctcactgcccacggtttcctccagacactcctcatggggatgcgtccattgtgctccgcccaatatgaaaagatcttcaacacaacccgcatccccggggtgcagaaagactacattaggcacctgcatgactctcaacacgtagctgtgttccaccgagggcgattctttcgtatgggcacccattcccggaatagcctgttgtcccctcgtgctctggaacagcagtttcagcgcattcttgacgatccaagtcctgcatgcccacacgaggaacacctggcagcacttacggccgcccctaggggcacctgggcgcaggtgcggacatcactgaaaacgcaggcagccgaggcacttgaggctgtggagggcgctgccttcttcgttagtttagacgccgaacctgccggtctcaccagagaagaccccgccgctagcctcgacgcctatgctcacgcccttcttgctggaaggggccacgacaggtggtttgataagtcttttacattaattgtattctccaacggaaagttgggactcagtgtagagcatagctgggccgattgtccaattagcggccatatgtgggaattcactctggccacagaatgcttccagcttggctattctaccgatggacattgcaaggggcatccagatcccactctgccccaaccacagcgactgcaatgggacctgcctgatcagatccatagttctattagtctggcgctgagaggagccaaaattctcagcgagaatgttgactgtcatgtggtgcctttcagcctgtttgggaagagttttattcgaaggtgccacctgtcatctgacagctttattcagattgcacttcaactcgcccactttagagtcagctgggtgccgcacccccagccaccgcaggggctatcccctcctgaaccaccccgccccgcccctccccgcttcctagttgtcgccgccatcgttggccggccctcctag

SEQ ID NO: 181706 - DNA, 2412 bp, synthetic construct
  misc_feature 1..2412: note = Description of Artificial Sequence: Synthetic coding sequence
  source 1..2412: mol_type = other DNA
atggccgaggcccaccaggccgtgggcttccggcccagcctgacctcggatggagccgaagtagagttgagtgctcccgtgctccaagagatttatctcagcggcttgcggagttggaaaaggcatctctcgcgcttctggaatgattttctcacaggcgtcttccccgcaagccccctgagctggttattcctgttcagtgccattcagctggcctggtttttacaactagaccctagccttggactgatggaaaagatcaaggaattgttacctgactggggcggccagcaccatggattaagaggggttttggcagctgccctctttgcaagctgtctctggggggccttaattttcactctgcacgtggccctgcggctactgctgagctaccatgggtggctgctggagcctcacggagctatgtctagtccgactaagacatggctggcgttagttcgaatattttccgggcgacatccaatgctgtttagttatcaaaggtcccttccgaggcagcccgtcccctcagtgcaggacaccgtgagaaagtatctcgagtccgtgaggcccatcctgagtgacgaggattttgattggactgccgtcctcgcacaggaattccttcgcctacaggcctcactgctccagtggtacctgcggctgaagtcttggtgggctagtaactacgtcagtgattggtgggaggagtttgtgtacctgaggtcaagaaacccgctcatggttaactcaaactactatatgatggatttcttgtacgtcacccccactccacttcaagccgcacgcgccgggaacgccgttcatgcgcttctgttgtatagacatagactcaataggcaggagatacctcccacactcctcatgggtatgcgacccctgtgctctgcccagtacgaaaagatcttcaataccacacgaattccgggcgttcagaaggactacattaggcacctccatgactcacagcacgtggccgtcttccacagaggccgcttctttaggatggggacccacagcagaaatagccttctcagtcctagggcactggagcagcagttccagagaattctggacgacccaagtcccgcatgtccacatgaggagcatctagccgcacttacagcagcccctcgtggtacctgggcccaggttaggacaagcctcaagacccaggctgcagaggctctagaagccgtggagggcgcggctttttttgtctccttggatgccgagcccgcaggactgacacgggaagatccggccgcgtccctagacgcatacgctcatgccttgctggcgggcagaggacacgacaggtggttcgataagtctttcacactgatcgttttttcaaacggcaagcttggtttgagcgttgagcacagctgggccgactgtcctatttctggacatatgtgggagtttacattggctaccgagtgctttcagcttgggtactccaccgatggccattgtaaagggcaccccgacccaactctgccccagcctcagcggctccagtgggacctacccgaccagatccacagtagtatttccctcgcattgcggggtgcaaagattctttccgaaaacgtcgattgccatgttgtgccgttctccctgtttgggaaatctttcatcaggcgttgtcatctttcttccgattcgtttatccagattgcactgcagctggctcatttccgagaccggggtcagttttgtctgacgtatgagtctgccatgacccgtcttttcctggagggacgcacagagacggtgcggagctgtaccagagaggcttgtaacttcgtgagggcaatggaggacaaagaaaaaactgacccccaatgtctagccctcttccgggtggctgtcgataagcaccaggcgttactgaaggcggctatgagcggccagggtgtcgatcggcacctgttcgccctgtacattgtaagccggttccttcacttgcaatccccattcctgactcaagtccatagtgaacagtggcagctgagtacctcccagattcctgtgcagcagatgcatttgttcgacgtgcataattaccccgactacgtgagctcgggcggtggctttggccctgctgatgaccacgggtacggggtcagctacattttcatgggcgatgggatgatcacattccatatctcttctaagaaatcctcaacaaaaaccgactcccatagactgggccagcacattgaggatgctctgctggacgtggctagcctgtttcaggcaggccagcatttcaaacgacgattcagagggtcggggaaggagaattcccgccatagatgcggttttctttcccgacagacaggcgcaagcaaagcctctatgacatcaaccgatttctag

SEQ ID NO: 181707 - DNA, 2145 bp, synthetic construct
  misc_feature 1..2145: note = Description of Artificial Sequence: Synthetic coding sequence
  source 1..2145: mol_type = other DNA
atggccgaggcccaccaggccgtgggcttccggcccagcctgacctcagatggggccgaggtcgagctgtcggcacccgtgctgcaggagatttatcttagcggtttgcggagttggaaacgccatctgtctcgcttttggaacgacttcttgacgggagtgttccccgcatccccactctcctggctgtttttgttctctgctattcagctggcctggtttttgcagttggatccgagcctgggcctgatggaaaaaatcaaggaacttttgcctgactggggcggtcagcatcatggtctgcgcggggtgctagctgccgccctgtttgcctcctgcttgtggggcgccctcatattcaccctccacgtcgctctccggctcttactgtcttaccacggttggctgctcgagccacatggggccatgagttctcctacaaagacttggctagcactcgtgcgcattttctcaggcaggcatcccatgcttttttcctaccaacgcagcttgccccggcagcctgtgcccagtgtccaggacacagtgagaaagtatctggaatcggtcaggcctatcctcagtgacgaggacttcgactggaccgctgtgctggcccaggagttcctgagactccaggcgtcactgctgcagtggtatttgagattgaagtcttggtgggcttctaattatgtatctgattggtgggaagagttcgtgtatctcagatcacggaatcccttaatggtcaatagcaattactacatgatggacttcctctacgtgacacctacccccttgcaagcagccagagccggcaacgctgtccatgctcttctactttataggcaccgactgaacaggcaagagattccgccaacacttttgatgggtatgaggcctttgtgctccgcccagtatgagaaaatctttaatacgaccagaatcccaggtgtccagaaagactacatcagacatctccatgattcccagcacgtcgccgtgttccatagaggtcgattcttccgaatgggcacacactccaggaacagtctcctctctcctcgcgcactggaacagcagttccagagaattctagacgacccaagccccgcctgtccacacgaggaacacctggcggctctgaccgccgctccacgaggcacttgggcccaggtgaggacatctctgaaaacacaggccgctgaagcactcgaggcggtggaaggtgccgctttctttgtgagcctcgatgcagaacccgccggtctaacgagagaagaccctgccgcatctttggacgcgtacgctcacgcattgttagcgggaaggggccatgacagatggtttgacaaatcctttaccctgatcgtgttctctaacggcaagctgggactctccgtcgaacatagctgggcagactgccccataagcggccacatgtgggaattcaccctggccacagaatgtttccagcttggctacagcaccgacggtcactgcaaaggccaccccgacccgacgctacctcagccacagagactgcaatgggatttgcccgatcagattcatagtagcatcagcttggcccttaggggcgccaagattctgtccgaaaacgtagactgtcacgtggtgccgttctcgttattcgggaagtcgtttatcagacgttgccacctgtcttctgattctttcattcagatcgccctacagctagcccactttagagaccgggggcaattttgtctgacttacgaatctgccatgacccgtttgtttctcgaaggaagaaccgagaccgtgcgttcttgtacccgagaggcctgtaatttcgtgcgcgccatggaagacaaggagaaaaccgccgatgaccatggctatggtgtgtcctatattttcatgggtgacgggatgattactttccacatcagctctaagaaaagttcgacgaagaccgactcccacaggcttggacagcatatcgaagatgcgctgctcgacgttgcgtcgttgttccaggccggacagcatttcaagcgcagatttagagggtctggcaaggaaaactccagacatcgctgtggatttttgtctaggcagaccggagcatcaaaggccagcatgacatccacagatttctag

SEQ ID NO: 181708 - DNA, 2412 bp, synthetic construct
  misc_feature 1..2412: note = Description of Artificial Sequence: Synthetic coding sequence
  source 1..2412: mol_type = other DNA
atggccgaggcccaccaggccgtgggcttccggcccagcctgaccagcgatggggccgaggtggagctgtctgcccccgtgctccaggagatctatctgtcggggctgcggagctggaagcggcacctcagtcgtttctggaatgatttcctcacaggggtgtttccggcttccccactgagttggctttttctgttctctgcgatccagcttgcctggttcctccagcttgatccatcactgggtttgatggagaagataaaagagctgctgcctgactgggggggccagcaccacggattgcggggtgtccttgcagctgctctttttgccagctgtctttggggtgccctgatttttacccttcatgtcgcactaaggctactcctaagctaccacggatggttgttggagccccacggggctatgagcagtcccacaaagacttggctagctcttgtccgaatcttcagcggacgtcatccaatgcttttctcataccagcgaagcctcccaagacagcccgtccccagcgtacaggatacagtgcggaaatatttggagtctgttcgtcctatcttgtctgacgaggactttgattggaccgctgtcctcgctcaagagttcttacggcttcaggcatcattgctccagtggtacctgaggctcaagtcgtggtgggcttctaactatgtcagcgattggtgggaggagttcgtatacttaaggagtcggaatcccctcatggttaattctaactactatatgatggattttctgtacgtcactccgaccccactgcaggccgcccgggcagggaatgcagtccatgcacttctgttgtataggcaccggttgaataggcaggagattcccccaacgcttcttatgggtatgaggccactttgctccgcccagtacgaaaagattttcaacaccactcgtattcctggcgtgcagaaggattatatccggcacttgcacgatagccagcacgtagctgtcttccataggggtcggtttttcagaatgggcacccacagcaggaatagccttctcagccctcgggccttagagcaacaatttcagaggatcctggatgatccttctccagcatgcccccacgaagagcacctcgccgccctgaccgcagccccacgtggtacatgggcgcaagtgaggacttctttaaaaacccaggctgcagaagccctggaagccgttgagggcgctgctttctttgtgtcgttagacgccgagccagccggtcttactagagaggaccccgccgcttctctagacgcgtacgcccacgccttactcgccggcagagggcacgataggtggtttgacaagagtttcaccttgattgtgtttagtaatggcaagctgggattgtcagtagagcattcttgggccgactgtccaatctccggccacatgtgggaatttaccctggccaccgagtgcttccaattggggtattcaactgacggccactgtaaaggtcaccccgaccctaccctccctcagccacagcggcttcagtgggatttgccagatcagattcactcaagcatatcgctcgcattgcggggggctaagatccttagcgagaatgttgattgccacgtggtgccttttagcctattcgggaaaagttttattcgccgatgtcatttaagttctgatagctttatccaaattgccctccagctggcgcactttcgggacagaggccagttctgccttacgtacgagtctgcaatgactagattgttcctggaagggcgtactgaaacagtgcggtcctgcactcgagaggcttgcaacttcgtccgtgctatggaagataaggagaagacagaccctcagtgcctcgcactgttcagggtggcggttgataagcaccaggctttgcttaaagctgctatgtccggacagggggtggacagacatctgtttgctctgtacatagtgtcccggtttctccatctgcagtccccattcctaacccaggtgcactccgaacaatggcagctgtccacatcccagatacctgtgcaacagatgcacctgttcgatgtccataactatcctgactacgtgtcaagcggggggggcttcggaccagcagacgaccatggctatggggttagttacatctttatgggggatgggatgataacattccacataagctctaaaaaaagttccactaagactgattcacaccggcttggtcaacatatagaagacgcgctgttagatgtcgcatccctctttcaggccggccaacactttaagcgccgctttcgagggagcgggaaagaaaactcacgccatcggtgtgggttcctttccaggcagaccggcgcatccaaagcatccatgacatctacggacttttag

SEQ ID NO: 181709 - DNA, 2379 bp, synthetic construct
  misc_feature 1..2379: note = Description of Artificial Sequence: Synthetic coding sequence
  source 1..2379: mol_type = other DNA
atggccgaggcccaccaggccgtgggcttccggcccagcctgacctccgatggcgcagaggtcgaactgagcgcgcccgttcttcaggagatatatctgagcggactgcggtcttggaagagacacttgtcccggttctggaatgacttccttactggcgtttttcccgcttcaccgctcagctggctctttctgttttctgccattcagctcgcctggttcctgcaactagatccatcattgggccttatggaaaagataaaggaacttctgcctgactggggagggcagcatcatggcctccgtggagtactggcggccgcgctgtttgcctcctgcctgtggggcgctctcattttcaccctgcacgttgccctgaggctactgctgtcttatcacggctggttgctggagccgcacggagcaatgtcttcccctaccaaaacctggctggctttagttcgcatctttagtggccgccacccaatgctcttctcctaccaacgctcactgccgaggcagccggttccatccgtacaagatactgtgaggaagtacctggaaagtgttcgccccatcctgagcgatgaagatttcgactggacggcagtactcgcgcaagaattcttgaggctgcaagcctcactgctccagtggtacctgcggttaaagagctggtgggctagcaattatgtcagcgattggtgggaggagttcgtgtaccttcgctccagaaacccgcttatggttaattcaaattactacatgatggccgccagagctggcaacgcagttcatgccctgctactatacagacataggctgaacagacaggagatccctcctacattacttatgggcatgagaccgttgtgttccgcccaatacgagaagatcttcaacaccactaggataccaggtgtccagaaagattacatcaggcacttgcacgattcacagcacgtggccgtctttcatcgcgggaggttctttagaatgggcacacacagtcgaaacagccttttgtcccccagggcgctggaacagcagtttcaacgaattctggacgaccctagccccgcctgcccgcacgaggagcacctcgcagccttgacagccgcccctcgaggcacctgggcgcaggtcagaacatctttaaagacccaggcggccgaggcgctggaagccgtcgagggcgcagcattctttgtctccctggatgccgagcccgccggtctcactcgcgaagaccctgccgccagtctggatgcttatgctcacgcactgctggccggccggggccacgaccgctggttcgataaatcctttacactgatcgtttttagtaacggcaagctcggcctgagcgtcgaacactcatgggcagattgccccattagtgggcacatgtgggagttcactctggccaccgaatgtttccaactggggtactccactgacggacattgtaagggacaccctgatcccaccttgccccaaccgcagcgcctccagtgggacctgcccgaccagattcactcttctatctccctggcccttaggggcgccaaaattctgtccgaaaatgtggattgccatgtagtccctttctcattgtttggcaagtcctttattagacgatgccacctatcctccgacagcttcatccaaattgctctccagctcgcccattttagagatcgtgggcagttttgcctgacgtatgaatccgccatgacgcgcctcttcctcgaaggacggaccgaaaccgtcaggagttgtaccagggaagcatgcaatttcgtgagagcaatggaggacaaagaaaagaccgatccccagtgtctggcactcttccgtgttgcagtggataaacaccaggcgttactgaaggctgctatgtccggccagggtgtagaccggcacctatttgcactgtacatagtgagcaggttcttgcatctgcagtccccctttcttacacaagtgcatagcgagcaatggcagctgagcacctcccaaattcccgtgcagcagatgcacctgtttgacgtgcacaactacccagattacgtgagctccggcggcgggtttggccctgcggacgatcacggttatggagtttcttatattttcatgggcgatgggatgatcacgttccacatttcctctaaaaagagttctactaagacggatagtcatagacttggacagcacatagaggacgctctcctggacgtggcctccctatttcaggctggtcagcacttcaagcgccgcttccgcggttccggcaaggagaattctcgtcatcggtgcggtttcctttcacgtcagacaggagcatctaaggcttcgatgaccagcacagacttctag

SEQ ID NO: 181710 - DNA, 2412 bp, synthetic construct
  misc_feature 1..2412: note = Description of Artificial Sequence: Synthetic coding sequence
  source 1..2412: mol_type = other DNA
atggccgaggcccaccaggccgtgggcttccggcccagcctgacctctgacggcgccgaggttgagctgagtgcaccagtcctgcaggagatatacctgtccgggctgcggtcctggaagcgccatctctctaggttttggaacgattttctcacgggtgtcttccctgccagcccactgtcctggctgttcttgttcagcgccatccagctcgcctggttcttgcagctggacccttcccttggtcttatggaaaagatcaaagaactgctgcctgattgggggggacagcaccacgggttaagaggggtgctcgcagctgctctttttgcatcttgtctgtggggggcccttatatttaccctgcatgtggccttaaggctccttctaagctatcatggctggcttctcgaaccccacggtgctatgtcttccccgaccaagacttggcttgcactcgtgagaatctttagcgggcggcacccaatgttatttagctaccagcgaagtctgccaaggcagcccgtgcctagcgtccaggataccgttcgcaaataccttgagtccgtccgccccattctatccgatgaagatttcgattggaccgccgtgctcgctcaggaattcctacgcttacaggcttctctactacagtggtacctgcggctgaagtcatggtgggccagtaactacgtttctgactggtgggaggaatttgtctaccttagaagtaggaaccccttaatggtaaatagcaattactacatgatggacttcttgtatgtcacccccacaccattgcaagccgctagagccggtaatgctgtgcacgctttacttttgtacagacacaggttgaacagacaggagataccccccacattgctgatgggaatgagaccactctgctctgcccagtatgaaaagatttttaacacaactcgaataccaggcgtccagaaagattatattcgccacttgcatgattctcaacacgtcgcggttttccatcgtggacgcttcttccgcatgggcactcatagcaggaactccctgctgagtcctcgcgcgctggaacagcagtttcaacggatcctggacgatccatccccagcgtgtccacacgaggagcacctcgcggccctgacggctgccccccggggaacctgggcacaggtccggacgagcttgaagactcaagcagccgaagcgctggaggcagtagaaggagccgccttctttgtctctctggacgccgaaccggccggtctgacacgagaagatcctgcagcctcgctcgatgcctatgcacacgcacttctcgccggccggggccacgacaggtggttcgataagtcttttaccctcattgtattttctaatggcaagctcgggttatctgtggaacattcatgggccgactgccctataagtggtcacatgtgggagtttacattggccactgagtgttttcagctcggctattcaaccgatggacactgcaagggacacccagatccaaccctgcctcagccccagagattacagtgggacctccctgaccagatccacagcagcatcagtctagctctccggggcgctaaaatcctctcggagaatgtggattgtcatgtagtcccattttcactgtttggcaaaagcttcattcgcaggtgtcacttaagttcagattccttcattcagatcgctctgcaactggctcacttcagagaccgcgggcagttctgccttacctatgagagtgctatgaccaggttatttctggaagggaggactgaaactgtgcgtagctgcaccagggaagcctgtaacttcgtgagagccatggaggacaaggagaaaaccgacccacagtgcctggccttatttagggtggcagtggacaagcaccaggctttgctgaaggcagctatgtctggtcagggcgtagaccgccaccttttcgctctctacatcgtatcacgttttcttcatttgcaaagcccttttctgactcaagtgcacagtgaacagtggcagctgtccacctctcagatccccgtgcagcagatgcatttgttcgatgtgcacaattaccctgactacgtgtctagtggcggagggtttggacccgcagatgatcacggatatggcgtgtcttatatttttatgggagatggtatgatcaccttccacatatcttctaagaagtcttcgaccaagaccgactctcaccggctgggacagcatatcgaggatgcccttctggatgtggcttccctcttccaggccggacagcattttaagaggaggtttcgaggctcaggcaaagaaaacagcaggcaccggtgcggattcctgtccagacagactggagcctccaaggcttcgatgacgagtacagatttctag

SEQ ID NO: 181711 - DNA, 1524 bp, synthetic construct
  misc_feature 1..1524: note = Description of Artificial Sequence: Synthetic coding sequence
  source 1..1524: mol_type = other DNA
atggaccccaagctgggccggatggccgccagcctgctggccgtgctgctccttctattggagagagggatgttctcttctccttcaccccctccagcgctcctcgagaaggtgttccaatacatcgatctccatcaagacgagtttgtacaaacgctgaaagagtgggtggccatcgaatctgactctgtccagccggttccgaggttccggcaggagctgttccggatgatggccgtcgccgcggataccctgcagaggctcggagcccgagttgccagtgtggacatgggccctcagcagctgcccgatggccaaagtctgcctatccctcccataattttggctgagctgggtagtgaccctaccaaaggaaccgtgtgcttttacgggcatttagacgttcagcctgccgatcggggtgacggatggctcaccgacccctatgtgctgaccgaagtagatggcaaactctatgggcggggtgccactgacaacaagggcccagtgctggcatggattaatgctgtaagcgccttccgagctcttgagcaagaccttcctgttaatatcaagttcatcatcgaggggatggaggaagccggttccgtggccttggaagaactggttgagaaggaaaaagaccgcttctttagtggcgtggattacatcgtcatttccgacaatctttggattagccagcgaaagccagcgatcacctatgggacaaggggaaatagctacttcatggtcgaggtgaaatgcagggatcaagactttcatagtggcacctttggaggtatactgcacgaaccaatggccgaccttgtggcactcttggggtcactggttgactcttccgggcacatcttggtgccagggatttacgacgaggtcgttcccctgaccgaggaggaaattaatacgtataaggcaatccacctggacctggaggagtataggaatagctcccgtgtggagaagttcttgttcgataccaaggaggaaatcttaatgcacctgtggcgatacccctcccttagtatccatggcatagagggggccttcgacgaacctggaacaaagactgtcattcctggacgcgtgatcggaaagtttagcataagactggtgccgcacatgaacgttagtgcagtggagaaacaggtgactaggcacctagaagatgtgttctcaaagcgcaattcaagcaacaagatggttgtgagtatgaccctaggcttgcacccatggatcgctaacattgacgatacccaatacctcgccgccaaacgtgcgattagaactgtgttcggtacagaaccagatatgatacgcgatggttcaacaatacccatcgccaaaatgttccaagagatcgtacataagtccgtcgtcctgatacctctaggcgctgttgatgatggcgaacacagtcagaatgaaaagattaataggtggaactatatagaaggaactaaactgttcgcagctttctttctggagatggcacagctgcactag

SEQ ID NO: 181712 - DNA, 2484 bp, synthetic construct
  misc_feature 1..2484: note = Description of Artificial Sequence: Synthetic coding sequence
  source 1..2484: mol_type = other DNA
atgctgctgtgcctgagccccgcctggctgatgaaggtgcccgccccaggacaacctggggaagccgccctcctggtgtctaaggccgtttccttccatccaggaggtctgacttttctggatgatttcgtgccacccagacgagccacctattttctcgcgggtttaggcttaggcccagggagggggcgcgaagcggccgagctcgcgcgtgatctgacctgccctactggggccagcgctgagttggcccggctgctcgaggaccggctgctgactcgccagcttctggcacagcaaggcggtgtggctgtgcccgctaccctggcgttcacctacaaaccccccggtctgctgcgggggggagacgctagcctgggtcttagactagtggagcttagcgggaaagaggggcaggaaacacttgtgaaggaggaggtggaagccttcctaaggagcgaagccctgggggatattctgcaggttgccgtgaagctatcggggtggagatggcgcggacggcaggcatggcgactccacccgagggctgaactgggtgctgttgtcgataccgtgttggccctgctagaaaagttggaggaggaggaatctgtgctggtggaagctgtttacccccctgcccaacttccatgttccgacggccccagtccgggccctggcctggccgtgcggatttgtgccgttgtgtgcaggacccagggggatcgaccgctcctgagcaaagttgtatgtggcgtgggaaggggcgatagaccgctccggcatcataactcactgcctagaaccctggaagtagccctggcgcagtgcggtctcggagaggaagctcaggtcgcggccgtgaggcaaagagtgaaggcagccgccgaggctgcattggcagccgtgctggccctcgaagccgggctttcagccgaacaacgcggcggcagacgagcgcacacagactttctcggcgttgacttcgctctgacggctgctggtggcgtactgactcctgtggccttagagctcaacggaggcctatgcctggaagcctgcggagccctggaagggttatgggcggcccctaggttggggcccgccgctgacgaggctgtggcagcacccctggtcgagacaatgctccgtcgcagcgcacgatgtctaatggaaggaaagcaactgcttgtcgttggggccgggggtgtgtcgaaaaaatttgtgtgggaagccgccagggactacggcctgcagttacaccttgtcgaatccgacccaaaccacttcgcatcccagctcgtgcagacattcatccatttcgatatgactgaacacagacgcgatgaagaaaatgcgagactcctggcggagctggtgcgcgcccgcggcttgaagctggacggctgcttttcttactgggatgattgcctggttctgacagccttactttgccaagaactgggcctcccctgtagttccccggctgctatgagacttgccaagcagaaaagcctcacacagctccacctgctgcaccaccacgggccaccgtggcctgctcccagcttacatgcagtcccatgctgtcctctggaatcagaggcagacgtagaaagagccgtccaccaagtgccattgcctggagtgatgaagttggagttcggcgctggggccgtgggagtacggctcgtcgaagacgctcctcagtgccatgaacacttctcacggattacgagagacctgcagggtgaggcggatcacccgggtattgggctaggatggggcaatgcgatgctgctgatggagttcgtggagggcactgagcatgatgtcgacttggttctgttcggaggcaggctgctcgcagcattcgtgagtgacaatgggcccacgcgcctgccaggattcaccgaaactgccgcctgcatgcctacaggactcgcacctgaacaggaagcccaaatggtgcaggccgcgtttcggtgttgccttggctgtggcctccttgatggtgtgtttaacgttgaactgaagctcaccggcgcgggcccgcggctgatcgagataaatcctcgcatgggcgggttttacctccgcgactggattctggaactgtatggggtagatctcctccttgccgcagtcatggtcgcttgtggtctgaggcctgcattaccaacccgccctcgcgccagaggccaccttgtgggggtgatgtgtctggtaagccagcacttgcaggcgttgagtagtacagcctctagagagacacttcaggccctgcatgatcgcggcctgctgcgtctcaatttgttggaggaggctttggtgcccggagagtatgaggagccttactgctccgtcgcctgtgccggcccatcccctaccgaggcacgcttgaggctgctaggcctctgccaggggttgggaatcgacggaccatcgtatcctgtggcccatttcctgtctcattttaaatag

SEQ ID NO: 181713 - DNA, 2484 bp, synthetic construct
  misc_feature 1..2484: note = Description of Artificial Sequence: Synthetic coding sequence
  source 1..2484: mol_type = other DNA
atgctgctgtgcctgagccccgcctggctgatgaaggtgcccgccccaggacagcccggcgaagcagcactcctggtttccaaagccgtgtcatttcatcccggcgggttgaccttcttggatgacttcgtgcctccaagacgagccacctactttttggccggcctgggtctaggtcctggtcggggccgtgaggccgctgaattagctagagacttaacatgtcccacaggggctagcgccgagcttgcgcgcttgctggaagatagactcctcacccgtcagttactggcgcagcaaggcggcgtggccgtgcccgcaaccctggcattcacctacaaacctccaggcttgctccgggggggggacgcatccttaggattgaggctggtcgagttgtcgggaaaggaaggccaggagactctggtgaaagaggaggtggaagccttcctgcgaagtgaggcactcggcgatatccttcaggtagcggtcaagttgtcaggctggcggtggcgcggtcggcaggcctggcgcctgcacccccgagctgagcttggcgctgtggtcgatacggtgctggccctcttggaaaaactggaggaggaagagagcgtccttgtcgaggctgtgtaccccccagcacagctaccgtgctccgacgggcccagcccaggccctggtctggcagtacgaatttgcgccgttgtttgccggactcagggggaccgccccctgctgtcaaaagtagtctgcggagtcgggcggggtgatcgccctctcaggcaccacaacagcttgccgcgcacactggaggtagccctcgctcagtgtgggctgggtgaggaagcgcaagtggctgccgtccgtcaacgggtgaaggcggccgcagaagccgcactcgctgcagtgctagcactggaggccggcctgagtgctgagcaaagaggcggcaggagagctcacacagactttctaggcgtcgattttgccctcacagcagccggcggagtcctcactccagttgcccttgagctcaacggcggactttgcctcgaggcatgtggagcacttgaggggctttgggccgcacctagactcggtccagccgccgatgaggccgttgctgccccactggtcgagaccatgcttagaagatcagctagatgccttatggagggtaaacagctcctcgtcgtgggcgctggcggagtgagtaagaaatttgtgtgggaggccgccagggattacggcctacagctccacttggtagagagcgacccaaaccatttcgcctcacaattggtgcagacattcatacactttgacatgaccgagcatcggcgcgacgaagagaatgcacgtctgctggctgaactggtgagggcgcgtggcctcaagctagacgggtgcttcagttattgggacgactgtttggtgctaactgcactgctgtgccaggaactgggccttccttgctcttccccggcagccatgcggctggcgaaacaaaagtccctcactcaactgcatctcctccatcaccatggaccaccctggcctgccccaagcctccatgctgtaccttgttgtcctttagaaagtgaggccgacgtcgagcgtgccgtgcaccaggtgcctctcccaggagtcatgaagctggagtttggcgccggcgccgtaggcgttagactggttgaggacgctccacaatgtcacgaacacttcagccgaatcacccgagatctgcagggggaagccgatcaccccggtataggcctgggctgggggaacgcaatgctccttatggagtttgtggaagggacagagcacgacgtcgatctcgtcctgtttggtggaagactgctggcagcatttgtttctgataatggtcctacaaggctccccggttttactgaaacagcggcatgcatgcccacaggcctcgcccctgagcaagaagctcagatggtccaggccgcatttagatgctgcctgggttgcggcctgctggacggcgtcttcaacgttgagctcaaattgaccggggctggtcctcgtctgatagagattaatccacggatgggcggtttctatctgagagattggatattggaactgtacggtgttgatctcctgcttgctgccgtgatggttgcatgtggtttgcgacccgccctacctaccagaccacgcgcccgggggcatctcgttggggtgatgtgcctggtcagccagcatttacaggctttgagcagcacagcctcgcgcgagaccctgcaggctcttcacgaccgggggctgcttagactgaatctgctcgaagaagcactcgtgccgggcgagtatgaggagccttattgttctgtggcctgcgccggcccaagccccacagaggctcggttgaggctcctaggactttgtcaagggctgggcatcgacggtccaagctatcccgtggcacacttcctttcacacttcaagtag

SEQ ID NO: 181714 - DNA, 2853 bp, synthetic construct
  misc_feature 1..2853: note = Description of Artificial Sequence: Synthetic coding sequence
  source 1..2853: mol_type = other DNA
atgctgagcctggaccccagcggccccgagtgggactgccccctgggatcgaaggatctcgaagaggaaggaccgtggggcggcggttccgggctacctcccaccggatgctttcccggaagctggcggcaggacgtcggtctcgactgtaagggtagtcctgaaggcgccgaagcaagagcctggacagtgtattactatagtctgctccagagttgtctgcagcaagctgggctgccagaaacacaggataggggacaggtcccgaggactggctgtcccggagccgaggtgactctgtgtgtcctgggatcccctagtacattcctgccggtactactcgaaggaggcgtgcagagtccggggaacatgctgctatgtttatcccctgcttggttgatgaaagtgcccgctccaggacagcccggcgaagcagcgctgctggtgtctaaagcagtcagctttcaccccgggggccttaccttcctggatgactttgtgcccccacgtcgagccacatacttcttagccggtctcggcctggggccagggcgcgggagggaggcggctgaactggcccgcgatcttacatgtccgactggagctagtgctgagctcgctagacttctggaggacaggctgttgacaaggcaactgctggctcagcaaggtggcgtagccgtacctgcgaccctcgctttcacgtataagccacccggcctgctgcgaggaggggatgcctcgttaggccttagactggtcgagctcagtggaaaggaaggacaggagacactggtgaaggaagaggtagaggcatttctccggagtgaggctctgggcgatattctgcaggttgcagtcaagctctccggctggcgttggcgcggccggcaggcctggcgcctgcatcctcgtgccgagctaggagccgttgttgacacggtgctggccttattagaaaagctagaggaggaagagtccgtcctcgtcgaggctgtttatcctcctgcccagcttccctgctctgacgggccttcccccggccccgggctagcggtgcggatctgcgccgtagtatgcagaacgcagggcgatcggccccttctgagtaaggtggtatgtggggtggggcgaggggatagacccctgaggcaccataacagcttacctagaacgctcgaggtagcattagcccaatgtggactgggagaggaggcacaggttgcagctgtccgacaacgggtgaaagcagccgcagaagccgctcttgccgccgttctggctctcgaagctggtctgagtgccgagcagcgcgggggccggcgggcacacaccgacttcttgggcgttgactttgctctgacagcggctggtggggttctaacacccgtcgctctggagcttaatggggggctctgtctagaggcttgtggagctctggagggcctgtgggctgctcctcggctgggtcccgccgctgatgaggcagttgcagcccctctggtagagactatgctgaggcggtccgcccggtgcttgatggagggcaagcagctgctagtggtcggcgctggcggcgtgagtaaaaagttcgtgtgggaggctgctcgcgactatggcctccagctacacctagttgaaagtgaccctaatcacttcgccagccagctcgtccaaacatttattcatttcgacatgaccgagcatcgccgggatgaagagaatgcccgcctgcttgcggagcttgtgagagccaggggtctgaaactggacggctgtttttcctactgggatgactgcctggtgcttacagcgctgctatgtcaagagctcggcttaccttgttctagcccagccgctatgcggcttgccaaacagaaatccctgactcagctccacttgctgcaccaccacggtcccccctggccggctccatcattacatgccgttccgtgctgcccactcgaaagtgaagcagatgtcgaacgcgcagtccaccaagtccccttgccgggggtgatgaagctggaattcggggccggcgcggtgggggtcaggctagtggaagatgcaccccagtgccacgagcatttcagtcgcattacgagggatttacagggagaagcagaccaccctggaattggcttagggtggggcaacgcaatgctactaatggagtttgttgagggtaccgagcatgatgttgatcttgtgctgtttggcggaaggctgctcgccgctttcgtctctgataacgggcccacgcgacttcctggattcactgagaccgctgcatgtatgccaaccgggctggcccccgaacaggaagctcaaatggtgcaggccgctttccggtgctgtctggggtgtggcctcctggatggagtcttcaatgtggagttgaaattgacgggtgcagggcctcggttgatcgagatcaaccctagaatggggggattttacctgcgggactggatcctcgaattatatggcgttgatctattgctggcggccgtaatggtggcttgtggactaaggcccgcgctgccaactaggccacgagccagggggcatcttgtcggtgtaatgtgccttgtcagtcagcatttacaagctttgagcagtaccgcctcccgagagactcttcaagccctgcacgatagaggactgctgaggctgaatcttctcgaagaagcgctggtgcccggggagtacgaggaaccttattgcagcgtcgcgtgcgccggcccatctccaaccgaagcaaggctcaggttacttgggctgtgtcagggcctaggcatagacggcccgtcgtacccagtggcccactttctgagccattttaagtag

SEQ ID NO: 181715 - DNA, 2775 bp, synthetic construct
  misc_feature 1..2775: note = Description of Artificial Sequence: Synthetic coding sequence
  source 1..2775: mol_type = other DNA
atgctgagcctggaccccagcggccccgagtgggactgccccctgggttcaaaggaccttgaagaagaggggccgtgggggggtgggagcgggctgccacccaccggttgtttcccgggctcctggaggcaggacgtgggcttggactgcaaagggagccccgaaggcgccgaagcccgggcctggacagtttattattacagcctgctgcagtcctgcctgcagcaggcaggccttcctgaaacccaggatcggggtcaggtgcctagaaccgggtgtcccggcgcggaggtgacattgtgcgtcctgggatccccatcaacctttctgcccgtcctactggagggaggagttcagtcccctggcaacatgttactctgtctcagccccgcatggttgatgaaggtacctgcacctggacaaccgggcgaggcggcactgctggtgtccaaagctgtgagcttccaccctggaggtctgactttcttggacgatttcgtcccccccaggcgagctacttactttctggcgggactcggcctcggcccggggcgcgggcgcgaggctgctgagctggctcgtgatttgacatgtccaactggcgctagtgctgaactcgcccggctcctggaggacagactgcttacgcgtcagctgctcgctcagcaagggggggtcgcagtccctgccacactagcgtttacatacaagcctccaggcctgctgcgcgggggggatgcgtctctgggcctgagactagtcgagctatccgggaaggagggtcaagaaaccctggtcaaagaagaggtggaagcattcttgagaagcgaagccctaggcgatattctccaagtggctgttaagctgtcaggctggagatggcgtggcaggcaggcgtggcgactacacccgcgtgcggaactgggtgccgtggtggacacggtcctagctcttcttgagaaacttgaggaagaggagagcgtgctggtcgaggcggtgtatccgcctgcacaacttccatgctctgatgggcctagccctggtccaggactggctgttcggatctgtgcggtggtgtgccggacccagggagatcggcctctcctatcaaaggttgtttgcggcgtgggtagaggcgataggccgctgcgccaccacaactcgctaccacgcactttggaggctgctctggcagccgtgctggcccttgaggcaggactgtcggcggagcagcggggggggcgcagggctcatacagatttcctaggtgtcgacttcgcgctcaccgcagctgggggcgtcttgactccagtagcactggaactgaatggtggactttgtctggaagcatgcggagccctggaaggactctgggcagctccccgcctgggtcctgctgccgacgaggccgtggccgctcccctggtggaaaccatgttacgacggagcgcccgctgcctgatggaagggaaacagctcctggtcgtcggcgctggcggagtctccaagaaattcgtttgggaggcagcaagggactatggtctgcagctgcatctagttgaatctgacccaaaccactttgcaagccagttagtgcagacttttattcactttgatatgaccgagcatcggcgggatgaggagaacgcacgcttgctcgctgagttggtgcgagcccggggcctcaagctcgacgggtgtttctcttactgggacgattgtctggtgttaacggctctgctgtgtcaggagttgggactgccctgctccagcccagctgccatgagactcgctaagcagaaatccctaacccaattacatcttctacaccaccacggccctccttggcccgctccctctctgcacgccgtgccatgctgtcccctggagtccgaagctgacgtggaaagggccgtgcaccaggtgcctctcccaggtgttatgaagttggagttcggtgccggagcagtgggggtgagactggttgaggacgcgcctcaatgtcacgagcacttctcacgaatcacacgagatctgcagggtgaggctgaccacccagggatcggacttggctggggcaatgccatgctgctcatggagttcgtggagggcaccgaacacgacgtcgatcttgttctgtttggcggaagactgttggcggcctttgtcagcgacaatggccctactcgcctcccaggcttcaccgagaccgccgcctgtatgcctacaggccttgccccagagcaggaggcccagatggttcaggcagcatttcggtgctgcctaggctgtggactccttgatggggtattcaatgtcgagctgaaattgacaggcgccggacctcgacttatcgaaatcaatcctcgaatgggcggcttctatttgcgtgactggatcctcgagctctatggagtcgaccttctcctggcagccgtcatggtcgcttgcgggttgcgcccagcgttacccaccagacccagggcaaggggccaccttgtgggagtcatgtgccttgtctcacagcacctccaggcactatcgtcaaccgccagtcgggaaacgctacaagcactgcacgatcggggcctgcttcgactgaaccttcttgaagaggcccttgtgcctggggaatatgaggagccttattgcagcgtggcctgcgccgggcccagtcccaccgaagcccgcttgagattgctcggtctctgccagggtttaggcatcgatgggccctcctacccagtcgcacacttcctaagccactttaagtag

SEQ ID NO: 181716 - DNA, 903 bp, synthetic construct
  misc_feature 1..903: note = Description of Artificial Sequence: Synthetic coding sequence
  source 1..903: mol_type = other DNA
atgtgccccctggcccaccccgcccaggacctgcccctgctgcccagccagttgtccttagatcccagcggacctgagtgggattgtcctctgggctcaaaagatttggaggaggagggtccctgggggggcgggtcggggctgccccctactggatgcttccctgggtcatggaggcaggatgtgggactggattgcaaaggaagcccagaaggggctgaagcacgggcctggacggtgtactattattcgctgctgcagagttgtttgcagcaggcaggtctcccagagactcaagacagggggcaggtgccccgaaccggctgtccgggtgcggaagttaccttgtgcgtactgggaagtccgtctaccttcctacccgtactactggaaggtggagtgcagtctccgggcaacatgctcttatgtctaagccctgcttggctgatgaaagttccagctcctggtcagcccggcgaggccgcccttctggtcagtaaggctgtatccttccaccctggcggcttaacgtttctggacgatttcgtccctccccgccgcgctacttactttctagctggattaggcctgggcccagggagaggccgtgaagcagcagaacttgctagggatctcacctgtcccacgggagccagtgcagagctcgctaggctcctggaggaccgcctactcaccaggcagctactggctcagcaaggcggcgtggcagtacctgccaccctcgcgtttacttacaaacctcccgggctcctgagagggggcgatgcttcgctcggactccggctggtggagctttcaggcaaagaagggcaggaaacacttgttaaagaagagaggacctggctcgggccaaaaccatggaccaacccagggaagacctag

SEQ ID NO: 181717 - DNA, 2775 bp, synthetic construct
  misc_feature 1..2775: note = Description of Artificial Sequence: Synthetic coding sequence
  source 1..2775: mol_type = other DNA
atgctgagcctggaccccagcggccccgagtgggactgccccctgggctcaaaggatctggaagaagaaggcccatggggtggagggtcagggctcccccccaccggctgttttcccggatcatggagacaagacgtcgggctcgattgtaaagggagccctgagggggcagaagctagggcatggacggtgtactactacagtttgttacagtcgtgtctccaacaggccgggcttcccgagactcaggatcgaggccaagtgcctcgaactggctgtcctggggccgaagtgaccctttgtgtgctcggctcgccctctacgtttctgcctgttttgctggaaggcggcgtgcagtccccgggaaatatgttgctgtgtctgtcgcctgcatggcttatgaaggtacctgcccctggccaaccaggtgaagctgctttgttggtctcgaaggccgtgagcttccatcccggaggactgaccttcctggatgacttcgtcccgccccgtcgtgccacatatttcctggccggactgggactgggtccaggtagagggagagaagcagcagagttagctcgcgatctaacctgtccaacaggggcctctgccgagttagcgcggctgctggaggaccgcttgttgactcgccaactccttgcacagcagggaggcgtggccgtccccgctacgctggctttcacctataaacccccaggtctcctacgagggggagacgcatccttagggctccggctggtggagttgtctggcaaagaggggcaagagactctcgtgaaggaggaagtggaggcattcctgagaagcgaggccctgggcgatatcctccaggttgccgtgaaactgagtggatggcgttggcggggcaggcaggcgtggaggcttcatccacgggctgagctcggtgccgtggtggataccgtgctggcgctgctggagaagctggaggaggaagagtctgtgcttgtggaggccgtgtatccacccgcccagctgccctgttccgacggacccagccctggacctggccttgcagtaagaatatgtgctgtcgtgtgccgcactcagggagatcgccctttgctatcgaaggtcgtatgcggagttgggcgtggcgaccgtcctcttcgtcaccacaactccctgcctcggaccctggaagtcgccctggccgccgtgttggctctcgaagcaggcctatcggcagagcagaggggaggtaggcgcgctcacactgactttcttggcgttgatttcgccctaaccgccgccggcggtgttctcacaccagtggccttggagctgaacgggggactttgcttagaagcttgcggggctttagaaggcctgtgggccgccccacgcctggggcctgcggcagatgaagccgtcgcagcaccactagtggagacaatgcttcggaggtccgcccggtgcttgatggaagggaagcagctgctggtagtgggtgcggggggtgtgtctaaaaagttcgtgtgggaagctgctcgagattatggtcttcagctgcatctggtggagtcagaccctaaccactttgcctcacagctggtgcagacattcatccattttgatatgacagagcacagacgggatgaggagaatgccagactgttggccgagctggttcgggcgcgtggtctgaaactagacggctgtttttcatactgggatgattgcctggtgttgaccgccttgctgtgtcaggagctcgggctgccctgttctagtcctgccgcgatgcggctggccaaacagaaatccctcacccagctccatctgctccaccatcacggccctccctggcccgcacccagcctgcatgcggtgccatgttgtcccctagaaagtgaggctgatgtagaacgcgccgtgcaccaggtgccactgccaggcgtgatgaaactggagttcggcgccggtgcggtaggggtcaggctggtcgaagatgcccctcagtgccatgaacacttttccagaatcactcgggatctccagggggaggccgatcatccaggaataggtttagggtgggggaacgctatgttactgatggagttcgtggagggcaccgaacacgatgttgacctagtgctgttcggaggccgtctcctggcagccttcgtttccgacaacggccctaccagactgcccggctttacagaaaccgccgcctgcatgcccacaggactagctccagagcaggaggcccagatggtgcaagcagcctttcgctgttgtctcggatgcggtctccttgatggtgtcttcaacgtcgagctgaaattaacaggtgcgggcccccgcctgatcgaaatcaaccccagaatgggggggttctatttaagagactggattctggaactgtacggtgtggatttgctattagccgctgtaatggtcgcttgtggtttgcgccctgcactgcctacaaggccccgcgcacgcggacatttggttggagtgatgtgcctcgtcagtcaacacctgcaggcccttagtagcaccgcgagccgagagaccctgcaggcactgcacgaccgggggctgcttcgcctcaatctgcttgaagaggctctcgtccctggagagtacgaggagccatactgttccgtggcctgcgctggaccgtcacccaccgaagcacgtctccgcctcctgggactgtgtcaagggcttggaatcgatggcccatcctacccagtggcccactttttgagccactttaaatag

SEQ ID NO: 181718 - DNA, 1206 bp, synthetic construct
  misc_feature 1..1206: note = Description of Artificial Sequence: Synthetic coding sequence
  source 1..1206: mol_type = other DNA
atggagcccggccggcggggcgccgccgccctgctggccctgctgtgtgtagcatgcgctttgcgagccggccgagcccaatacgagcgctactcttttcggagtttccctcgcgacgagctgatgcccttggagagtgcatatcgtcacgcacttgataagtatagcggtgagcactgggccgagagtgttggctacctggagatttcccttagattgcataggctcctcagagacagtgaagccttctgccacagaaactgctctgcggctccccagccagaacccgctgcgggcctagccagctaccccgagctgcggctgtttggaggcctcctgcgccgcgcccattgccttaaaaggtgcaagcaagggctgcccgctttcagacaaagccagcccagtcgcgaggtgctggctgactttcagcgtcgtgagccttacaagttcctgcaattcgcatattttaaagccaataaccttccgaaagccattgcagccgcccatacattccttctgaaacaccccgatgacgagatgatgaaacgcaatatggcatactataagtccctccctggagcagaggattacatcaaagacttagaaaccaaaagttatgaatccctgttcataagagcagttagagcatacaacggcgaaaattggcggactagtattactgatatggaattggctctcccagattttttcaaggcattctatgaatgcttagctgcctgcgaaggatcccgagagattaaagacttcaaagacttttacctctctatcgcagaccactatgttgaagtgttagaatgcaaaattcagtgcgaggagaatctcactcccgtgatcggcggctatcccgtcgagaaatttgtcgccaccatgtatcactacctacagtttgcatactacaaattgaatgacttgaagaatgcagctccctgcgctgtctcctatctgctctttgaccagaatgacaaagtaatgcagcagaatctcgtgtactaccagtaccatcgggatacttgggggcttagcgatgaacactttcagccccgcccagaagccgtgcagttctttaacgttactacacttcaaaaagaactgtatgattttgcaaaggaaaacatcatggatgacgatgagggtgaagtcgtagagtatgtggatgacctccttgagttggaggagacttcgtag

SEQ ID NO: 181719 - DNA, 789 bp, synthetic construct
  misc_feature 1..789: note = Description of Artificial Sequence: Synthetic coding sequence
  source 1..789: mol_type = other DNA
atggagcccggccggcggggcgccgccgccctgctggccctgctgtgcgtggcctgtgcgctccgggccggcagggctcagtatgagaggtacagcttcagatcgtttcccagagatgagcttatgcccctagaatctgcttaccggcatgctctcgacaagtattccggagaacactgggctgagtctgttggctacctggaaataagcctcaggctgcacagactgctacgcgatagtgaggctttttgccacagaaactgctcagccgcaccccagcccgagcctgcagccggtctcgcctcctatcccgaactgcgtctgtttggcggcttgctgcgacgagcgcattgtctcaaaaggtgcaagcaagggcttcctgccttccgacagtctcaacccagtagagaggttcttgctgattttcagcggagggaaccatataagtttctacagtttgcatactttaaggccaataacctccccaaagccatcgccgcagcacacaccttcctcctcaagcatccggatgacgagatgatgaagaggaacatggcatactataaatccctgcccggcgcagaagactatcttaaaacttggaagccatctcacatgaaagcgtgtagctcagaacagtgtggccacactacagtgcggacaggcgagcacccttctcagacctggagctggccgttcccaacaagtagcaaaccattcacgtccgtgtcgcagccagccagagtgcctgggcggagtaggacgagtcgcattagtacattcccttag

SEQ ID NO: 181720 - DNA, 789 bp, synthetic construct
  misc_feature 1..789: note = Description of Artificial Sequence: Synthetic coding sequence
  source 1..789: mol_type = other DNA
atggagcccggccggcggggcgccgccgccctgctggccctgctgtgcgtagcttgcgctctccgggccggacgcgctcagtatgagaggtatagcttccgttcctttccgcgtgatgaactcatgcccctggagagcgcgtaccgccatgctttagataaatattcaggagagcactgggcagaatccgtgggctacctggagataagcttaaggctccatcgcctgctgagagacagtgaggctttttgtcacagaaactgctccgcagcaccccagcccgagcctgcagcggggctcgcctcgtatcctgaacttcggttgtttggcgggctcctgaggcgggcccactgtctgaaaaggtgcaaacaaggcctgcccgccttccgtcagtcccagccgtctcgagaagtgttggctgactttcagcggagggaaccttataagtttctccagtttgcctatttcaaagcaaacaatctgccgaaggcaattgcggctgcccatacgtttctattaaaacaccccgatgatgagatgatgaaaaggaacatggcctattacaaatcactgcctggtgcagaagactatatcaaggacctagagacaaagagctatgaatctctattcatcgaacagtgcgggcacacaactgtcaggacaggtgagcacccatcccaaacctggtcctggcccttccccacttcctccaaaccttttactagcgtaagccagcccgctagagttccgggtcggtctcgtacatcgcggattagtactttcccatag

SEQ ID NO: 181721 - DNA, 1167 bp, synthetic construct
  misc_feature 1..1167: note = Description of Artificial Sequence: Synthetic coding sequence
  source 1..1167: mol_type = other DNA
atggagcccggccggcggggcgccgccgccctgctggccctgctgtgtgtggcttgcgccctcagagccggacgcgcccagtacgaacgatacagtttcaggagtttcccccgggacgaattaatgcccctggagtccgcctaccgtcatgccctggacaaatacagtggggagcactgggctgagagcgtccgcgacagcgaagctttttgtcaccgaaattgcagtgcggctccccagcccgagccggccgcgggactggcaagctatcccgaactgagactgttcgggggcctcctgcgacgtgctcactgccttaaacggtgcaaacaggggcttccagcattcagacaaagccagcccagcagagaggtgctcgcagattttcagcggcgagaaccctacaaattccttcagttcgcgtactttaaggcaaacaacctgcctaaagctatcgccgctgcccatactttcctgctcaaacatcctgatgacgaaatgatgaaacggaacatggcttactacaaatcactccctggcgcagaagactatatcaaggacctcgaaaccaagagttacgaatccctttttatcagagccgttcgggcatataacggcgagaattggaggacaagcattactgatatggaactcgcccttccagacttcttcaaagcgttctatgaatgtcttgccgcttgcgagggatccagagaaataaaggattttaaggacttttacctctctatagccgatcactacgtcgaggtgctggaatgtaagatccaatgcgaggaaaacctcacacctgttatcgggggctatccagtggaaaaatttgtggctactatgtaccactatcttcaatttgcgtactacaaactgaacgacctgaaaaatgcggctccatgtgcagtttcgtacttgctgtttgatcagaatgacaaggtaatgcaacagaacctcgtctactatcaatatcatcgcgacacgtgggggctcagtgacgaacactttcaacccaggccagaagccgtccagttttttaatgtgacgaccctgcagaaggaactgtacgactttgcaaaagaaaacatcatggacgacgacgaaggcgaggtcgtggagtatgtagacgacctgctcgagcttgaagaaacctcatag

SEQ ID NO: 181722 - DNA, 3471 bp, synthetic construct
  misc_feature 1..3471: note = Description of Artificial Sequence: Synthetic coding sequence
  source 1..3471: mol_type = other DNA
atggccagcctgctgcccctgctgtgcctgtgcgtggtggccgcccacctggctggcgcccgagacgccacccctacagaggaacctatggccaccgcacttggcctcgagagaagatctgtgtacacaggtcaacccagtcctgcactggaggactgggaggaggcaagcgaatggactagctggtttaatgtggaccacccgggaggtgacggggactttgagagcctggcagcaataagattttactatggccccgccagagtctgtcctagacccttggcgctagaagcgcgcaccacagactgggccctcccctccgcggtgggggagagagtacatctgaacccaacacggggtttttggtgtctcaatcgggagcagcctcgcggcagacgttgctctaactatcacgttagattccgatgtcccctggaggcctcttggggcgcctggggcccctggggcccatgctctggctcctgtgggcccggcagacgactccggagacgtcactgccccagccccgcgggggacgcctgtcccggaagacccctggaagcacagaagtgcgtgcggcctaggtgtcccggatgttctctggatacatgtgagtgcccggatcatattcttctagggagcgtggtgacgccttccgggcaacctctcctcggagcgagagtatccctgagagaccagccaggcaccgtcgccacatccgacgcgcatgggacatttagggtgccaggcgtgtgtgctgactcaagagcgaatatacgagcacaaatggatggcttcagcgccggagaggcccaagcccaggcaaacggctctatctcagtagtgacaataattttagacaagctggagaaaccgtatctcgtgaagcaccccgagagcagagttagagaggcaggtcaaaacgtgaccttctgttgcaaggcctcgggcacacccatgccaaaaaaatacagttggtttcacaacggcaccctgctcgaccgcagggctcatggctacggagcccacctggagctgcggggacttcggccagatcaggcagggatctatcactgtaaagcctggaacgaagctggcgccgtgcggtccggaacagccaggctgaccgtgttagcacccggacagccggcttgcgaccccaggcctcgggagtaccttatcaagctgccggaagattgcggtcagcccggatctggtccggcctatctggacgttggtctttgtccagacactaggtgtccgtcactggcagggtcgtctccaaggtgtggcgacgcctcctccaggtgttgcagcgtgagaagactggaacgccgggagattcattgcccgggctacgtcctgcctgtgaaagttgtggcagaatgtgggtgccagaagtgcctgcctccacgtgggctggttagaggaagagtggtggcagcggactcgggagaaccgctgcgcttcgcccgaatcctgctgggccaggagcccatcggcttcacagcctaccagggggacttcactatagaggttcccccaagcactcagaggctcgtggtaacatttgtcgatccatctggagagttcatggatgctgtgagagtgctgccttttgacccaagaggcgccggtgtctaccacgaagtgaaggcaatgaggaagaaagccccagttatcttgcataccagccagtccaatacaatccctctgggcgaactggaagatgaggccccgttgggcgaactggtcctacccagcggagcattccggagggctgacggcaaaccatattccggccccgttgaggcccgcgttacattcgtggaccctcgcgacctaacatctgcagcctctgccccaagcgacctcagattcgtggacagcgatggcgaactagcgcccctccgcacatatggaatgtttagcgtggaccttagggcgccaggctccgcagaacaattacaggttgggcccgtcgccgtgagggtcgccgcttcgcagatacatatgccggggcacgtggaagccctgaaattgtggtctcttaatcccgaaaccggtctgtgggaagaagaaagtgggtttaggagagaagggtcttcgggcccccgggtccgcagagaggaaagggtgttcctcgttggcaacgtggaaatccgcgagagaaggctgttcaatttagacgtcccggagaggcgccgatgcttcgtcaaagtccgcgcttacgctaacgacaagtttacgccctctgaacaggttgaaggcgtggtggtaaccttggttaatctggaacctgcacccggtttctcagctaatcctagggcttggggtaggtttgattctgccgttacagggcccaatggggcctgtctgccagctttctgcgatgccgaccgccccgacgcctatacagctcttgtaactgcaaccctggggggcgaggagctggaacccgcgcctagtctgcctcgtcccctgcccgctactgtgggggtgacccagccttaccttgacagactgggctaccgaaggacggatcacgacgacccagcttttaagaggaatggatttcgcataaatctcgccaaacctcgaccaggcgatccagctgaagccaatggacccgtttacccttggagatcgctgcgcgaatgccagggagcacctgtgaccgcatctcattttcggtttgccagggtcgaggccgataagtatgagtacaacgtcgtgcccttccgcgaaggcacgcctgcctcctggacaggagacctgctggcatggtggccaaaccctcaagagtttcgcgcttgctttcttaaggtaaagatccaagggccccaggagtatatggtaaggagtcacaatgccggtggctcccacccccggactcgaggccagctttatggcttgagagatgcacgttctgttagagaccccgagaggcccggaactagcgctgcatgcgtggagtttaagtgttcaggtatgctctttgatcagaggcaggtagacaggaccctggtcaccattatgccccagggcagctgtcgaagagttgccgtgaatgggctcctacgggactacttaacacgccaccccccgcccgtccccgctgaagatcctgccgcttttagtatgctggccccacttgaccccctgggacataattatggagtttacacagtcaccgatcagagtccaaggttggccaaggaaatagccatcgggcgctgcttcgacgggagttccgacggtttttctcgggaaatgaaggcagatgccggaaccgccgtgacatttcagtgcagggaacccccggctgggaggcccagcctctttcagaggctgcttgagagtcccgccacagctttgggcgacattaggagagagatgtcagaggctgcccaagcacaagcacgggcaagcggccctctgaggacccgaaggggccgtgtaagacagtag

SEQ ID NO: 181723 - DNA, 3555 bp, synthetic construct
  misc_feature 1..3555: note = Description of Artificial Sequence: Synthetic coding sequence
  source 1..3555: mol_type = other DNA
atggtgggcaccaaggcctgggtgttcagcttcctggtgctggaggtgacttctgtcctagggcgccagactatgcttactcagtccgttcggagagttcagccaggcaaaaagaatccctccatctttgcaaagcctgctgacaccttagaaagccctggagagtggactacctggttcaacatcgactatcccggcggaaagggggattatgagcggcttgatgccataaggttttactacggcgaccgggtgtgcgcacgacccctgcggcttgaggcacgtactactgactggaccccagccggctcaactgggcaggtagtccatggcagccccagggaagggttttggtgcctgaaccgcgaacagcgccccggtcagaactgctcgaattacacagttcgctttctctgcccacccggaagccttcgccgggataccgagagaatatggtcaccgtggagtccttggagtaaatgtagcgctgcctgcgggcagactggagttcagactagaacccgcatatgtctagctgagatggtatcactctgttctgaagcctctgaagaaggacagcactgcatgggacaggactgcaccgcctgtgatctgacatgtcccatgggacaggtgaatgccgattgcgacgcttgtatgtgtcaggattttatgctccacggcgccgtgtcgctccccgggggagccccggcgtccggggccgcaatctacttgctcacaaagacaccgaagctgctcacccaaaccgactcagacggcagatttagaatccctggcttgtgcccagatggtaaatccatcctgaaaatcacaaaagtcaaattcgcccccatcgtgctcaccatgccgaagacatctctcaaggctgccaccatcaaagcagagttcgtgagagccgagacaccgtacatggtaatgaaccctgagactaaagcccggcgggccggccagtctgtgtccttatgctgtaaggccactggcaagccccgacccgacaagtacttttggtatcataacgataccctcctggaccctagcctgtataagcacgaatcaaagttggtcttaaggaagttacagcagcatcaagcaggggaatatttttgcaaggcccagtctgatgcaggcgccgtgaagtctaaggtggctcagctcatcgtcatagctagcgacgagacaccgtgtaacccagtccctgagagctacctcatcaggctcccacatgactgtttccagaacgcgaccaactctttctattatgatgtggggaggtgtcctgtcaagacatgtgctggacagcaggacaacggaattcgatgtagggacgctgttcagaattgctgcggcattagcaaaaccgaagagcgcgaaatccagtgttcgggctatactctgcctacaaaggtggccaaggagtgctcctgtcagcgttgtacggaaactaggtctatcgtcagaggacgcgtctcagcagccgataacggggagcccatgagattcggccatgtctacatgggaaatagccgggtgtccatgactggatataagggaacttttactctgcacgtgccccaggacactgaaagactggtgttgactttcgtcgaccggctgcaaaagtttgtgaatacaacaaaggtgctgccattcaataagaaaggaagtgcagtttttcatgaaatcaagatgctgcggcgtaagaaaccaatcaccctggaagcaatggagacaaatatcatcccactgggggaagtcgtgggcgaggatcctatggctgaattggagattccttccaggtctttttacaggcagaacggtgagccttacatcggcaaagttaaggcgtccgttacattcctggaccctaggaacatctcgacggctactgcggcccagactgacctgaactttattaatgatgagggagacacctttcctttgagaacatacgggatgttctcagtggacttccgggatgaagtgacaagtgagccactgaacgctggtaaagtgaaagttcacctcgacagtactcaagtaaagatgcccgagcacatctctactgtcaagctttggtcactcaatccggacaccgggctctgggaggaagaaggggactttaagttcgaaaatcagaggagaaacaagcgtgaagaccgcacatttttagtgggtaacctcgagattcgggagcgcaggttgtttaaccttgacgttccggagtcacgtagatgtttcgtaaaggtgagagcttacagatccgagagatttctgcccagcgagcagatacaaggcgttgtgattagtgtgattaatctggagccccggaccggcttcctctcaaacccacgcgcttggggaaggtttgattcagttattaccgggcccaatggcgcttgtgtgcctgcgttttgtgatgatcagtctccggacgcgtactctgcgtatgtcttagcttcactggccggagaggaactgcaggcagtggagagttctcccaagtttaatcctaacgcaatcggcgtgcctcaaccctaccttaacaaactgaactacaggcgaacagatcacgaagaccctagggtgaagaaaactgcattccagattagcatggcgaaaccgcgcccaaactcagccgaggagtccaacggccctatttacgctttcgaaaatctcagggcctgcgaggaagctcctccgagtgccgcacactttcgcttttaccaaatagagggcgataggtacgactacaacaccgtgccctttaacgaggacgaccccatgtcttggactgaagactatttggcttggtggccgaagcccatggagtttcgagcctgctatattaaggtgaaaatcgtgggcccgttggaggtgaacgtgcgaagccggaatatgggggggacccacagacagactgtaggcaaactgtacggcattcgtgatgttaggagtacccgggaccgggatcagccgaacgtaagcgctgcgtgccttgagttcaagtgtagtggcatgctctatgaccaggatcgggtggaccgaacgctggtcaaggtgatccctcaggggtcttgtcgaagggcgtccgtgaaccccatgctgcacgaatacctggtgaaccacctcccactggctgtgaataatgacacctccgagtatacaatgctggcccctctcgaccccctcggtcataactatggaatatacaccgtcactgaccaggatccaagaaccgctaaggaaatcgcattaggccggtgctttgacggcacaagtgacgggtcttcccggatcatgaagtccaatgtgggggtggcccttactttcaactgcgttgagagacaggtgggtcgacagagtgcgtttcagtatctgcaaagcacgcccgcacagagcccagccgcgggaacagtacaggggcgcgtaccttcccggcgtcaacaacgcgcctcacgaggcggtcagcggcaagggggtgtggtcgcatccctgaggtttcctcgcgtggcccagcagcctctcattaactag

SEQ ID NO: 181724 - DNA, 8148 bp, synthetic construct
  misc_feature 1..8148: note = Description of Artificial Sequence: Synthetic coding sequence
  source 1..8148: mol_type = other DNA
atggccgccgccgccggcggcggcagctgccccggccccggcagcgccagggggcgcttccctgggaggccccgtggagctggcggtgggggggggagaggaggcagaggaaacggtgctgaaagggtgcgggtggctcttcgacggggcggcggcgccaccggtccaggaggtgcggagccaggggaagacaccgcactccttaggctgttggggctacggcgcggacttcggcgcctgcgccgcctttgggccggccccagggtgcaaaggggccgcggaagaggtcgcggcagggggtggggcccaagtcgaggctgcgtaccagaagaggaaagcagcgatggagaaagcgatgaggaggagtttcagggatttcattccgatgaagatgtggcaccttcatctctgagaagtgccctgcgctcccagagaggcagagcccccagaggcaggggcaggaagcataagacgacaccattgcctcctccacgcctcgctgacgtggcaccaaccccgccaaagacacccgcccgcaagagaggagaggaaggaacagagaggatggtgcaggcactcactgaactcctccggcgcgcacaagccccacaggcacctagatcgagggcgtgcgaaccaagtactccccgacggagccgtggcagaccacccgggcggcccgccgggccatgccggaggaaacagcaggctgtcgtagttgccgaagcggctgtgacgataccgaagcctgaacccccacctccggtagtgccagtgaagcaccaaacaggaagctggaaatgcaaggagggacccgggcctggtcccggtaccccccgtcgcggaggtcaatcttctagaggtggtaggggtggcagagggagaggccgcggcggggggttgcctttcgtgataaagtttgtgtctcgggccaagaaagttaaaatgggccagctcagtctaggcctcgaaagtggacagggccaaggacagcatgaagaatcatggcaggacgttccccaaaggcgtgtagggagcggacaggggggtagcccttgctggaaaaaacaggagcagaaactcgatgatgaggaggaagagaaaaaggaggaggaagaaaaggataaggagggggaggaaaaggaggaacgcgccgtggcggaagagatgatgccggccgcggagaaggaagaagctaagttgccccccccaccgcttaccccccctgcaccttcaccccccccgccacttcccccacctagcacaagcccaccaccacctttatgtccaccacctccgcccccggtgtcgccccctcccctaccgtccccccctcccccaccggcccaggaggagcaagaagaatcgcccccccccgtggtgccagccacttgcagtcgcaagaggggacggccacctctgaccccatcacaacgtgccgagcgtgaggccgcacgtgccggtcctgaggggaccagcccccccaccccaactccgtctacagcaacaggagggcctccggaggacagccccactgtggcccctaaatctaccacatttctcaagaatataaggcaatttatcatgcctgttgtttctgctcgctcctctagagtcatcaagacccccaggaggtttatggacgaagacccgccaaagcccccaaaagtggaggtgtcccccgtcctgagacccccaataactaccagccctcctgttcctcaggagccagcccctgtcccaagccccccacgtgccccaaccccaccaagcactccagtgccacttccagagaagaggcgctccatcttgcgcgaacccacctttagatggacctcgttgactagggagcttcctccacctccaccagccccaccgcctcctcccgcaccctctcccccacccgcccccgcaacctcctcacgccggccactgctcctgagagcccctcagtttacccccagtgaagctcacctcaagatctacgagtccgtcctgacccccccacccctaggcgctccagaagcccccgaacctgagcctcccccagccgacgacagtcccgctgagcccgagcctagggctgtgggaaggacaaaccatctctccttaccacgttttgccccagttgtgaccacgcctgtgaaagccgaggtgagccctcacggtgcacctgcgctatccaatggcccccagacccaggcacaactgcttcagccccttcaggcactgcagactcagctgctccctcaggccctacctcccccacaacctcaactgcagcctccccccagcccccagcaaatgccgccattagagaaagccaggatcgccggcgtgggctccctgcctcttagcggcgtggaggagaaaatgttttcattgctgaagagggccaaggtgcagttattcaagatcgaccagcaacaacagcagaaagttgctgcctcgatgcccttgtccccaggcggccaaatggaggaggtggctggagccgtgaaacagatatcagacagaggcccagtgaggtccgaggacgagagcgtagaagccaagcgcgagcgaccttctggaccggagtctcccgtgcaaggtccccggatcaaacacgtctgccgacatgctgccgtggccctgggccaggcacgtgccatggtgccagaggacgtgccaagattaagtgccctgccattacgggatcgccaagacctggctacggaggacaccagctcagcctcagagaccgagtccgtccctagccgttcacggcggggtaaggtcgaagctgccggtcctggtggcgagtcagaaccaaccgggtctggggggacccttgctcacactcctaggcgaagtctccctagccaccatggcaagaagatgcgcatggctagatgcgggcactgccgcggctgcttaagggtccaggattgcggttcgtgtgtgaattgcctggataaacccaaattcggcgggcctaacaccaagaagcagtgctgcgtataccgcaaatgcgataagatcgaggctcgtaaaatggaacgactcgctaagaagggcaggaccatagttaagacattactgccatgggactctgatgagtcaccggaggcctcaccaggtcctccggggcctcgaaggggcgcaggggcagggggtcccagggaggaagtggttgctcaccccggacccgaagaacaggactctctcttgcagcgcaaaagtgcgcgcaggtgcgtcaaacagagaccctcttacgacatcttcgaggacagtgacgactcagaacccggcggccccccagcccctcgtcggagaacacctagggaaaatgagctaccacttcccgaaccagaggagcagagtcgaccgagaaaacctactctgcaaccagtgctgcaacttaaagcgcggcgacgcctagataaggatgcactggcccctgggccattcgcctcctttcccaacggatggaccgggaagcaaaagtcaccagatggagtgcaccgtgtcagggtggattttaaggaggattgcgatctggaaaacgtatggttgatgggaggcctaagcgtactcacttctgtgcccgggggcccgccaatggtgtgccttttgtgcgcttccaaaggactccatgagctcgtcttctgtcaggtttgttgtgatccctttcaccccttctgcctggaggaagcagaacgccctctgccccaacaccacgatacgtggtgttgtcgccgttgcaagttttgtcacgtctgtggccgcaagggccgtgggagcaagcacctgcttgaatgtgaacggtgccgccatgcctatcatcctgcctgcctgggcccaagttaccccacccgagccaccagaaaacgaagacattggatttgctcggcctgtgtaaggtgtaaaagctgcggcgcaacgcctgggaagaattgggatgtagagtggtctggggactattctttatgcccccgatgcactcaattgtacgagaagggaaactattgtcctatctgcacccggtgctatgaagataatgactacgagagtaagatgatgcagtgcgctcaatgcgatcactgggtgcatgcgaagtgcgaaggcctttcagacgaggactacgagatcctgagtggcctgccagactctgttttgtatacttgtgggccctgtgctggagcggcccagcctaggtggagagaggcactcagcggggcgctgcagggcggactccggcaggtcctgcaggggctgctgagttccaaggtagttggcccattgctcctctgtactcagtgcggcccagacggtaagcagctgcaccccggcccatgcggcctgcaggccgttagtcagcgctttgaggatggccattacaagagcgtgcattctttcatggaggacatggttggtattctaatgagacatagcgaagaaggggagactcctgaccggagagccggaggacaaatgaagggcttacttttgaagctgttggagtcagccttcggttggtttgacgctcatgacccaaagtattggcgacgctccacaaggctgcccaacggcgttttgcctaatgccgtgctgcctccgtccttggaccacgtgtacgcacagtggcgccagcaagaaccggagacccccgagagcggacagccacctggtgaccctagtgccgccttccaagggaaggatcccgcggctttttctcatctggaggatccgcgccagtgtgctctgtgcctgaaatatggggatgctgacagcaaggaggctggtagactgttgtacattggccagaacgagtggacacatgtgaattgcgccatctggtctgctgaagtcttcgaagagaacgacggcagtctaaaaaacgtgcatgccgctgtcgcccgaggcaggcagatgcggtgcgaattatgtttaaagccgggcgctacagtcggctgctgcctgtcctcctgtctgtccaacttccactttatgtgtgccagagcctcatactgtattttccaggacgataagaaagtattttgccaaaagcataccgacctgctcgacggcaaggaaatcgtgaatccagacggcttcgatgtgctccgtcgggtgtatgtagacttcgagggcattaacttcaaacgtaagttcttgaccgggctggagcccgatgcgataaacgtcctgatagggtcaataaggatagacagcctggggaccctatcggatctcagtgattgcgagggtagactgtttcccatagggtaccagtgttctcggctctattggtctaccgtggatgcacgacgccgctgttggtatagatgtcgtatcttggaatacagaccttgggggcctagggaggagccagcgcatctcgaggctgctgaagaaaatcagacaatcgtgcattctcctgcgcccagcagtgagcctcctggtggcgaggatcctcccttggacactgatgtgctcgtccccggtgcccctgaaagacacagccctatacagaatcttgacccacctttacgccccgacagcggttctgctcctccgcccgcacctcgctcattcagcggcgcccggatcaaagtgcccaattatagtccaagccgaagacctctcggaggcgtcagcttcggtcctttgccaagtcccggctctccaagctccctgacccatcacattccgacagtaggagaccctgattttcccgctccacctcgtaggtcccgacgtccatcgccacttgctccccgcccccccccttcccgctgggcaagcccccctctgaagacatcccctcagttgcgagtcccaccccccacttctgtcgtgactgccttgacgcccaccagtggagagcttgcaccgccaggcccagcgccttccccacctcctccagaggacctcggaccagacttcgaggatatggaggtggtaagtgggctgtcagcggccgatctggactttgccgcatctttactgggcacagagcccttccaggaagagattgtggccgccggtgctatgggaagttcacacggtggccctggggacagctcagaggaggaatcctcccctaccagtagatatattcactttcctgtgactgtggtgtccgcccctggcttggcccccagcgccactccaggcgcgccaagaatcgaacagctcgatggcgtggatgacggcaccgattccgaagccgaggcggtgcagcagccgcggggccaaggcaccccaccaagcgggccaggggtcgtgagagctggcgtgttaggggctgccggtgaccgggcacgtccacccgaggatctgccgtccgaaattgtggacttcgtcttgaagaacctgggcggtcctggcgacggcggggctgggccacgcgaagagtccctgcccccagctccccccctggccaatggctcacagcccagccagggacttaccgctagtcctgcggaccctactagaaccttcgcttggctgcctggagcccctggagtgcgggttctgagcttggggcctgcgccagagcctcccaagcctgccactagcaagattatcctggtcaacaaacttggacaggtgtttgtcaagatggcaggcgaaggagaaccagtgccccctcccgttaagcagcctcccctgcccccgacgatatctcccactgcaccaaccagttggactctgccacctggcccgctccttggagtgctgcccgttgtgggcgtggtcagaccagcgcccccacccccgccaccacctctcaccttggtgctatctagtgggcccgcaagtcctccccggcaagcaataagggtgaagcgcgtgtccaccttctccggacgctcccccccagcaccaccaccatataaggctccccgtttagacgaggatggcgaggccagcgaggacacccctcaggtcccaggtctgggatcgggaggcttctcccgcgtccggatgaaaaccccaaccgtgcgcggcgtgctagatctcgatagacctggggagcccgcaggcgaagagagcccagggccacttcaagagcggtcgcccctgctccctttacccgaagacgggccacctcaggttccggatggtccaccagacttgctgctggaatctcagtggcatcattatagcggggaagcctcatcttccgaggaggaacccccctctcctgacgataaggagaaccaggctcccaaaagaacaggcccccaccttagatttgaaatcagcagcgaggacggattcagcgttgaagctgaatccctggagggggcgtggcggactctgattgaaaaagtgcaagaggccagaggacacgcgcggctgcgccacctctctttctccggcatgtctggcgccagactattaggaattcatcatgacgctgtcattttccttgcagagcagcttccaggggcgcaaaggtgccaacactataagtttagatatcatcaacagggcgaaggccaggaggaacctcccctaaatccacatggagcagccagagccgaggtgtaccttcgcaaatgcacattcgacatgtttaattttttagctagccagcacagggttctccctgaaggagccacttgtgacgaggaggaggacgaggtacagctgcgctctacacgcagagctactagtttggagcttccaatggcaatgagatttcggcacctgaagaagacatccaaagaagccgtgggggtttaccgctcggcgatccacggtaggggattgttttgtaaaaggaacatcgatgctggcgagatggtgatcgaatatagcggaattgtgatccggtcagtgctgacggacaagcgcgagaaattctacgatggcaaaggaatcggctgttatatgtttcgaatggacgattttgatgtggtcgacgcaacaatgcacggtaacgctgccaggtttatcaatcattcatgcgaacctaattgcttctctcgcgtgatccacgtggagggacagaaacacatcgtgatttttgctctgcgtcgcatcctgagaggcgaggagctcacctatgactataaattcccaatcgaagacgcgagtaataaattgccctgcaactgtggtgcgaagcgttgtcggaggtttctcaactag

SEQ ID NO: 181725 - DNA, 2115 bp, synthetic construct
  misc_feature 1..2115: note = Description of Artificial Sequence: Synthetic coding sequence
  source 1..2115: mol_type = other DNA
atggtgcccgacaccgcctgcgtgctgctgctgaccctggccgccctgggcgcctccggccagggacaaagtcccctggggagtgacctagggccacagatgttgcgagagctgcaggaaacgaatgcagcactccaagatgtacgggagttgctgcgacagcaagttcgcgagatcactttcctaaagaataccgtgatggaatgtgatgcctgtggcatgcagcagagtgtacggaccggcttaccaagcgtgcgccctctgttgcactgcgcccccggcttctgcttcccaggcgtagcctgcatacagacagagagtggggctagatgcggaccatgtcccgcaggctttactggaaacggctcccattgtactgacgtgaacgaatgtgaaacagggcagcataactgtgttcctaattccgtctgcataaatacccggggcagctttcaatgtgggccctgccaaccaggctttgtcggcgaccaagcgagcggctgccaaaggagagcacagcggttctgccctgatggcagccccagcgagtgccatgagcatgctgactgcgtgcttgagagggacggaagccgcagttgcgtatgcgcggttgggtgggctgggaacgggattttgtgcggcagggacacagatttagatgggtttcccgatgagaagctgaggtgccctgaacgccagtgccgcaaggacaactgtgtgacagttcctaactccggccaggaagatgtagacagagatggcattggggatgcttgcgaccctgacgctgacggtgatggtgtgcctaacgaaaaggataattgcccactggtgaggaacccagaccaacggaacacagacgaagacaagtggggtgacgcttgtgataattgcagaagtcagaaaaacgacgaccaaaaggataccgaccaggatggccggggggatgcctgtgatgacgacattgatggggatcggattagaaaccaagctgacaattgtccacgggtccccaactccgaccaaaaagacagtgatggcgacggcattggggacgcttgtgataactgtccacagaaaagcaatcctgaccaagccgatgttgatcatgatttcgttggagatgcttgtgactcagatcaagaccaggacggcgatgggcaccaggactcaagagataattgtcctactgtacctaacagcgcccaggaagacagcgaccatgacggtcagggagatgcctgcgatgatgatgatgataatgacggtgtcccagactcaagagataactgccgcttggtcccgaaccccggccaggaggatgcggaccgcgatggagttggagatgtgtgccaggacgacttcgacgccgataaggtggttgacaagatcgatgtgtgcccagaaaacgccgaggtcaccctgactgatttccgcgctttccaaaccgtggtgctggatcccgagggtgacgcccagatagatcccaactgggtagtattgaatcagggaagggagattgtgcagaccatgaatagcgaccccggcttggctgtggggtatacggccttcaacggggtggactttgaagggacttttcatgtgaataccgtaaccgacgatgactatgccggattcatattcggctatcaagattcatcatctttctacgtggtcatgtggaagcagatggaacagacatattggcaggctaacccctttcgcgccgttgctgaaccaggtattcagctcaaagctgttaaatcctcaacaggtcccggggagcagcttcggaatgccctatggcacacaggcgacacagaatcccaagtcagactgttgtggaaggaccctcgcaacgtaggatggaaggacaaaaaaagctatcggtggttcctacaacatcggccgcaggtcggctacattagagtccggttctatgaggggccagaactggttgcggattcaaatgtcgtgctcgatacaaccatgagagggggacggttaggcgtgttctgtttttcccaggagaacattatctgggccaatctgcggtatcggtgtaatgataccatccctgaggattatgagacacatcagttaagacaggcctag

SEQ ID NO: 181726 - DNA, 2235 bp, synthetic construct
  misc_feature 1..2235: note = Description of Artificial Sequence: Synthetic coding sequence
  source 1..2235: mol_type = other DNA
atggtgcccgacaccgcctgcgtgctgctgctgaccctggccgccctcggggcctcgggacaggggcaatccccactgggtagcgacctcgggccacagatgctgcgcgagctgcaggagaccaatgctgcgcttcaggacgttcgggagcttctgcgccagcaagtgagagagatcaccttcctcaagaacacggttatggagtgtgatgcctgtgggatgcagcagtccgtgaggaccggcctccccagtgttaggcctcttcttcactgtgctcctggtttttgctttcccggcccatgtcctgctgggtttacgggcaacgggtctcactgcactgacgtcaatgaatgtaatgcacatccttgtttcccgagagttagatgtatcaatacctctcctgggtttaggtgtgaggcatgcccaccaggatacagcgggccaacccatcagggggtggggctggccttcgctaaggccaacaaacaagtttgcaccgatattaacgagtgtgagacaggccagcataattgtgtgcctaacagcgtgtgcatcaacacaagggggtcgtttcagtgtggaccttgccagcccggctttgtgggggaccaggcttctggctgccagcggcgagcccaacgcttctgtccagacggaagcccgtctgaatgccacgagcacgctgattgtgtcctggaaagggatgggagccgttcatgcgtgtgcgctgtaggatgggcaggtaacggaatcctgtgcggtcgggacaccgacctcgatgggttccctgacgaaaagcttcgatgccccgagcgtcagtgccgtaaggacaactgcgtcacagtccctaactccgggcaggaggacgttgaccgtgacgggatcggcgatgcttgcgacccagacgctgacggtgatggcgtccctaatgagaaagataattgccctctggtacgcaacccagatcagagaaacacggacgaagataaatggggtgatgcgtgcgacaactgccggagccagaagaatgatgaccagaaagacacagaccaagacggccggggggatgcctgcgatgatgatatcgacggcgataggattcgtaatcaggcagataattgcccgcgcgtgccaaactctgatcaaaaagattcagacggagatggtattggcgacgcctgtgacaactgcccacaaaaatccaaccccgaccaggcagacgtggatcatgacttcgtgggcgatgcatgtgattccgaccaagaccaagatggagatgggcaccaggactcacgggataattgtcccaccgtccccaactctgcacaggaagacagcgaccatgacggccagggcgacgcgtgcgacgacgacgacgacaatgatggcgtgcctgacagccgtgacaattgtagattagttcctaaccctggccaggaggacgccgaccgcgatggagtgggagatgtatgccaggatgactttgacgctgacaaagtggtggacaagatcgacgtgtgccccgagaacgcggaagtgactctgaccgattttagagcattccaaaccgtggtgctggaccctgagggagatgcacaaattgaccccaattgggtagtactgaatcagggccgggagattgtacagacgatgaattctgaccctggattggctgtgggttatactgcctttaacggggtcgatttcgaaggaaccttccacgtgaatactgtgactgacgatgactacgccgggtttatttttggataccaggactcatcttccttttacgttgtgatgtggaaacagatggaacagacttattggcaggcgaacccttttagggctgtagccgaacctggcatccagctgaaggccgtcaagagcagtaccggccctggggagcagctgaggaatgcgctttggcacaccggggacactgagagccaagtgcgcctgttatggaaagatccacggaacgtcggttggaaggacaaaaagtcttaccgatggtttctgcaacatcgccctcaggtcggatatatccgggtgagattttacgaaggaccggagctcgtggctgactcaaacgtagtgctggataccactatgaggggcggcaggctgggagtcttctgtttcagtcaggaaaacattatctgggccaatctgcgctatcggtgcaatgacactatcccggaagattacgaaacacaccagctgcgacaggcttag

SEQ ID NO: 181727 - DNA, 2394 bp, synthetic construct
  misc_feature 1..2394: note = Description of Artificial Sequence: Synthetic coding sequence
  source 1..2394: mol_type = other DNA
atggccgccctggcctacaacctgggcaagcgggagatcaaccactacttttctgtgcgcagcgctaaagtgctggcacttgtagccgtcctgttattggccgcttgtcatctggcatcccggcgttaccggggcaacgattcttgcgaatacttgctgagcagcggcaggttcctcggggagaaagtctggcagccacatagctgtatgatgcataagtacaagatttctgaagccaaaaattgtcttgttgataaacatattgccttcattggcgatagtagaatacgacagctattttacagcttcgtgaagattatcaacccacagttcaaggaagagggaaacaagcatgagaatattcctttcgaggataaaaccgcctccgttaaggttgacttcctatggcaccccgaggtcaatggttccatgaagcaatgcatcaaagtctggacagaggattcaatagcaaaaccccatgtgatcgtggctggagccgccacatggtctattaaaatccacaatggcagctccgaagcactgagtcagtataagatgaatatcacttcaattgctcctctcctggaaaaactagcaaaaacatctgatgtgtattgggttctccaagatccagtctacgaagatctgctatcagagaatagaaagatgataacgaacgaaaaaattgacgcctacaatgaggccgctgtgagcatcctcaattcatccacccggaattcaaagtccaacgtcaaaatgttcagcgtctctaaattgatcgcccaggagacaattatggaatcgctggatgggctgcacctgccagagtcctcaagagagactacagctatgattctcatgaacgtctattgcaataagattctgaaacctgtggatgggtcctgctgccagccccgacctcccgtgaccctgatacaaaagctggcagcctgcttcttcactttgtctatcatagggtatcttatcttctacattatccataggaatgcccataggaagaacaagccttgcactgatctggaaagcggagaagagaaaaaaaatatcatcaacacaccagtgagttctctggagattctcctccagtctttctgtaagttaggcctgattatggcatacttctacatgtgtgacagggcgaacctctttatgaaggaaaataaattttacacacatagttcatttttcatccctattatatacatattagtcctcggagttttctacaacgaaaataccaaggagacaaaagtcctcaatcgagaacaaactgatgagtggaagggttggatgcagctggttatcttaatatatcacatttcaggtgcgtctaccttcctccccgtttacatgcatattcgagtccttgtggcggcttacctgttccagactgggtatggccacttcagctacttttggataaagggtgatttcggcatttaccgagtgtgccaagtgctgttcagactgaactttctagttgtggtgctgtgcatagtgatggatcgaccatatcagttctattactttgtgccattggtcaccgtgtggtttatggtaatttacgtaaccctggccctctggccccaaatcattcagaagaaggcaaacggaaactgtttctggcacttcgggcttcttttaaagctagggtttttactgctatttatttgcttcctggcttattctcagggagcttttgagaagatcttctcgctgtggcccctgtcaaagtgcttcgaacttaaaggaaatgtctacgagtggtggttcaggtggagactagaccggtatgtagtgttccacgggatgttgtttgcttttatctatctcgccctccagaagcgacaaattctcagtgaagggaagggtgagccactgttcagtaataaaattagcaactttctgctcttcatcagtgttgtgagctttcttacctatagtatttgggcatcgagctgtaagaataaggcagagtgtaacgaactccacccttccgtgtctgtggttcagattctggcctttatcttaatccggaacatccccggctatgccagaagcgtgtacagcagcttctttgcctggttcggaaagatctcgctggaacttttcatctgccaatatcacatctggttggccgctgacactcggggaattctggtgttgatccctggaaatcccatgctcaacataatcgtatccacgtttatcttcgtctgcgtggctcatgagatttcccagattaccaacgacctggcgcaaatcataattccaaaggacaatagttctctcctgaaacggctggcctgtattgctgcttttttttgtggcctactgatactgtcctctatccaagacaagagcaaacactag

SEQ ID NO: 181728 - DNA, 2721 bp, synthetic construct
  misc_feature 1..2721: note = Description of Artificial Sequence: Synthetic coding sequence
  source 1..2721: mol_type = other DNA
atggccggcaacgtgaagaagagcagcggcgccggcggcggcagcggatccggtgggtcgggtagcggtggattgatcgggctcatgaaagatgctttccaacctcaccatcaccaccaccaccatctgtccccccatcccccaggtactgtagacaaaaaaatggtggaaaagtgttggaagctgatggacaaggtggtccgactgtgccaaaacccaaaactggcactgaaaaactcgccaccttatatcctcgaccttttacccgatacttatcagcatttacggaccatcctgtctaggtatgaaggaaagatggaaaccctgggggagaatgaatactttagggtgtttatggagaaccttatgaagaagacaaaacagactattagcttgtttaaggagggcaaggaaagaatgtatgaagaaaattcccagccaagaagaaacctgacaaagctcagcctcattttctcacacatgctggctgagctcaaggggattttcccctctgggctctttcagggagatactttcagaatcacaaaggccgacgccgccgagttctggaggaaagcttttggggagaagaccatcgtgccttggaaatcttttagacaagctctgcatgaagtgcacccaatttccagcggcctagaggcaatggccctcaagagcacgattgacctgacatgcaacgactatatcagcgtttttgagttcgatattttcacccgattgttccagccttggagctcactgcttcggaactggaattccctggcggtcactcacccaggctatatggcttttctgacttacgatgaagttaaggctagactgcaaaagttcatccacaagcccgggagttatatatttagattgagttgtaccaggctgggccaatgggcaataggctatgtcaccgcggatggtaacatacttcagacgatcccccataataagccccttttccaagctctcatcgatggtttcagggaggggttctacctgtttccagacgggagaaaccagaacccggatctgacgggcttgtgcgagcccaccccccaggaccacatcaaagtcacccaggagcagtatgagctgtattgcgaaatggggagcacgttccaattgtgcaagatctgcgcggagaatgacaaggacgtcaaaatagaaccttgcggccatctcatgtgcaccagctgtctgacgtcttggcaggagtcagaaggacagggctgcccattctgtcgctgcgaaatcaagggcacggagcctatagtggtcgaccccttcgatcctcgcggcagtggctcccttctgaggcagggggcggagggggcaccctctccgaactacgacgacgacgacgatgagcgagctgacgacaccctctttatgatgaaagagctagctggggccaaggttgagcggcctccatcacccttctcgatggccccacaagcaagcctcccacctgttcctccaaggctcgatctgctgcctcaaagagtctgcgtgccctcctcggcgtcggccctgggcaccgcaagcaaagctgcaagtggatcactccataaggataagccgctgccagtgccacctacactgagggatttgccaccaccaccgccacccgaccgaccttactcagttggagccgagtccaggccgcagcggcgccctcttccatgtacccccggcgactgcccctcacgagacaaactgcctcccgttcccagctctaggctgggtgactcctggctgccccggccaatccctaaagtcccagtgtctgctcccagctcgtcggatccctggactgggcgcgagctgacaaatcgacacagtctcccgttttcactgcctagccagatggagccaagacctgatgttccacgcctgggttccacttttagtctggacacctctatgtctatgaatagttcacccctggtcggcccagaatgtgatcatcctaaaatcaaaccaagttctagcgctaacgcaatttactccctcgctgcaagacccttgcccgtgccgaagctcccccccggtgagcaatgcgagggggaggaggacacagagtatatgactcccagctcacgtcctttgagaccattggatacatcccagagcagtcgcgcttgcgattgcgaccaacagatagactcatgtacatatgaggccatgtacaacatccagagtcaggcccccagcatcaccgagtccagtactttcggtgaaggcaatttggcagccgctcacgctaacactggcccagaagagtccgagaacgaggacgatggctacgatgtgcccaaaccacctgtgcctgccgtgctggctcggaggacactaagcgacatcagcaatgccagctcctcttttggttggctgagcctcgacggtgaccctaccactaacgtcacagagggatcccaggttcctgaaaggcctccaaagccattcccaagaagaatcaactccgagcggaaggccggatcctgccagcagggaagcgggcccgctgcctctgccgctacagcatccccccaactcagctcagaaatcgaaaacctcatgtctcagggctactcgtaccaagacatccaaaaggccttagtgatcgctcagaataatatagagatggcaaaaaatatccttcgcgagtttgtttctatttccagccctgctcatgtcgccacttag

SEQ ID NO: 181729 - DNA, 2949 bp, synthetic construct
  misc_feature 1..2949: note = Description of Artificial Sequence: Synthetic coding sequence
  source 1..2949: mol_type = other DNA
atggccaacagcatgaacggccggaaccccggcggccggggcggcaacccgcgcaagggaagaatcctgggcatcattgatgccatacaggacgcagtgggccccccaaaacaagccgccgctgatagaagaactgtggaaaagacttggaagctgatggataaagtcgttaggctgtgtcaaaacccaaaattgcaactcaaaaattccccgccttatatcctggatatccttccagacacatatcagcacttgcgtctgatactgagcaagtatgatgacaaccagaagctcgctcagctgtctgaaaatgagtacttcaagatatatatagattcacttatgaagaagagtaaacgggccataagactattcaaagagggaaaggaaagaatgtatgaagagcagagccaagacagacgcaatttgaccaaactgtcgctaattttcagccatatgctcgccgaaattaaagccatcttccctaacggccagttccagggggacaactttaggattaccaaggcagatgccgccgagttttggcgcaaatttttcggggacaagacaattgtcccatggaaggtgtttcgccagtgtctacacgaagtgcatcagataagttcagggctagaggcaatggctttaaagagcactattgacttaacgtgtaacgactatatctcagtctttgaatttgacatttttactcgtttgttccagccatggggtagtatcttaagaaattggaacttcctagccgttacacaccctgggtacatggccttcctgacctacgacgaggtcaaggctcgcttgcaaaaatactccactaagccaggaagttatatcttccggctctcttgtactcgccttggacagtgggcgataggctacgttacgggcgacgggaacatcctgcagacaataccccataataagcctttgtttcaagctcttattgacggcagcagagagggtttttacctgtatccagacgggaggagctataaccccgatttgaccggtttgtgcgagcccactccccatgaccatatcaaagttacccaggagcagtatgagctatattgtgagatgggttccacctttcagctgtgcaagatttgtgccgagaacgataaagatgtaaaaatagaaccctgcggccatttgatgtgtacatcttgccttacagcctggcaggaatcagacgggcagggatgccccttctgtcgttgtgagatcaagggcaccgaacctattatcgtggatccttttgacccccgggacgaggggtctagatgctgctccataatagaccctttcggcatgcccatgctggacctggatgacgatgacgaccgagaggaatccctgatgatgaaccgactcgcaaacgtgcgcaagtgcactgaccggcagaattctccggtcacctctccaggcagtagccccttggcacagagacggaagccccagccggacccactgcagattcctcatctgagtctaccgcccgtgccacccagactcgacctcattcagaagggaatcgtgagatctccttgcggatctcccaccggctcccctaaaagctccccttgtatggtgagaaagcaggacaaacccctgccggctcctccaccaccactgcgcgatccccccccccctccacccgagagaccgcctcctataccccccgataaccgcctgagccgtcatattcaccacgtggaaagcgtaccgtctcgggatccaccaatgccgctggaggcgtggtgtccacgagatgtgttcggcactaatcagctcgtggggtgtaggttgctgggcgaggggagtcccaaaccggggatcaccgcatcatctaatgtgaatggcagacactccagagtcgggtctgatcccgtgctcatgcgaaagcaccggaggcacgacttgcccctggaaggcgcaaaagtgttcagcaatggtcatcttgggagtgaggagtatgacgtgcctccccgcctatccccaccacccccagtgacgacccttctaccatccatcaaatgcacggggcctcttgccaattctctgagcgaaaaaactcgcgaccctgtcgaagaagacgatgacgaatataaaataccttccagtcatcctgtgagcttgaacagtcagccatcacattgtcataatgttaagcctccggtgaggagctgcgataatggacattgcatgctgaacggtacacacggccccagttctgagaagaaatccaatatacccgatcttagtatatacctcaagggagatgtgttcgactcagccagtgatccggtacccttgccccccgctagacctccaaccagggacaacccgaaacacggaagttccttgaacagaacgccttccgactacgacctcctgattccacctttaggtgaggacgcctttgacgccctaccacctagcctaccgcctccccccccccccgcccgccatagtctgattgagcacagtaaaccccctggaagctctagcaggccatcttccggccaggatctcttcttactgccatcagacccttttgtcgatcttgcttccggccaggttccccttccgcccgctagacggctcccaggcgagaacgtaaagacaaatcgtacaagccaggactatgaccaattgccatcctgctccgatggaagccaggccccagctcgcccgcccaagcctcgaccacgaaggacagcccccgagattcatcataggaagccccatggccctgaggcagcattggaaaacgttgacgccaaaatagcgaaattgatgggcgaaggatacgcttttgaggaggtaaagcgtgccctggagatcgcacagaacaatgtggaagtcgctcgaagcatcctcagagaattcgccttccctccacccgtcagtccacggctcaacctttag

SEQ ID NO: 181730 - DNA, 2883 bp, synthetic construct
  misc_feature 1..2883: note = Description of Artificial Sequence: Synthetic coding sequence
  source 1..2883: mol_type = other DNA
atggccctggcccccggccccgacgcccacgcccacctgcccccccttatcgaactcaaatttcagatggcgaattctatgaatgggagaaacccagggggtagaggcggcaatccacggaagggccgcattctcggcattatcgacgccattcaagacgcagtcggcccgccaaaacaagctgcagccgacaggcgcaccgtagaaaaaacgtggaaactcatggacaaagtggtgcgtctctgccagaacccaaagttacaactgaaaaactccccgccatatatactagatattctgcccgacacataccagcacctgaggcttattttatctaagtatgacgacaaccagaaactggcccaactgtccgagaacgaatacttcaaaatctatattgattctttaatgaagaagtccaaaagagctattagactttttaaagaggggaaggaaaggatgtacgaggaacagtcccaggacagacgcaacctcacaaagctgtcactgatcttttcccatatgctcgcagagataaaggccatattcccgaacgggcaattccagggggacaattttcgcattaccaaagccgatgcagctgagttttggcgtaagtttttcggagataagaccattgtgccatggaaagtgtttaggcaatgcttacatgaagtgcatcaaatctcatctggcctggaggcgatggcattaaaatccacaatcgacctcacgtgtaatgactatattagtgtttttgaatttgatatttttaccaggttgtttcagccgtggggctctattttgagaaattggaatttccttgctgtgactcaccccggctatatggcatttcttacgtacgatgaggtcaaggcccggctccagaagtacagtaccaaaccgggctcctacatattccgacttagctgcacccgcctggggcagtgggcgataggatatgtcaccggggatggcaatattctgcagaccatcccacataataagccccttttccaagcactgattgacgggagtcgcgaagggttttatctgtacccggacgggagatcctacaacccagacctgaccggcctatgtgaacccacacctcatgaccatatcaaggttacacaggagcagtacgagctttattgcgagatgggcagcaccttccagctatgcaaaatctgcgcggaaaatgataaggatgtgaagattgaaccttgcgggcatctcatgtgtaccagctgtctcaccgcctggcaggaaagcgatgggcagggatgtcctttctgccggtgcgaaatcaagggtactgagccaatcatagtcgacccctttgacccaagggacgagggaagcaggtgttgcagcattatcgacccttttggcatgcccatgctcgacctagacgatgatgacgatcgtgaagagtccttgatgatgaatagacttgccaacgtgagaaagtgtactgatcggcagaactcccccgtgacttctcccggatcaagccctcttgcccagaggcgtaagccacaaccagacccacttcagatccctcatttgagcctgccgcctgtgcccccacggcttgatctgatccagaaggggatagtgaggagcccttgcggctctcctactggatcaccaaaatcatccccatgcatggttaggaagcaggataaaccgctgccagctccacctccgccattgagggatccgcctcccccccctccagagcgaccacccccaatccctccagacaatcggctgtcgcgccatattcatcacgtggagagcgtaccatccagggaccctcccatgccactggaagcgtggtgcccgcgagacgtctttgggacgaatcagctggtgggatgccgcctgctgggagagggttctccaaagccaggtattaccgcctcaagtaacgtgaatgggaggcattccagagtgggatccgacccagttctcatgcgaaagcacaggagacacgatctgcctctggagggggctaaagtattttccaatggtcacctcgggtccgaggagtacgatgtcccaccaagattgtctccccctcctcctgttacaactttgcttccctccataaagtgcacagggcccttggctaattctctgtccgagaagacgcgggacccggttgaagaggacgacgacgagtacaaaatcccttcttctcaccctgtaagcctgaactcccaaccgtctcactgccataacgtgaaaccgcctgttcgctcttgcgataacggccattgtatgctcaacggaactcacggcccaagttcagagaaaaagagcaacatccccgatctttccatctatcttaagggcgaagatgccttcgatgcattgccccctagtctgccacctccgccccctcccgcccgccatagcctgatagagcatagcaagcccccaggatccagtagccgcccctcttctggacaggatctttttcttctgccgagcgaccccttcgttgacttagcatccggtcaagtgcccctgccacctgctcggaggctaccaggtgagaacgtcaagaccaacagaacctcgcaggactatgaccagctgccatcttgctcggatggctctcaagccccggctaggcccccgaaacctaggccccggcgaacagcccctgaaatccatcaccgcaaaccccacggccccgaggccgccctagagaacgttgacgcaaagattgccaagctgatgggagagggctatgcttttgaagaagtcaaacgcgcgctagaaatcgcacagaataatgtcgaggtagcccgcagtatcctgagggagttcgcattccctcctcctgtttccccccgactcaatctgtag

SEQ ID NO: 181731 - DNA, 2313 bp, synthetic construct
  misc_feature 1..2313: note = Description of Artificial Sequence: Synthetic coding sequence
  source 1..2313: mol_type = other DNA
atggccaacagcatgaacggccggaaccccggcggccggggcggcaatcctaggaaaggacggatccttgggatcatcgatgctatccaggacgcagtgggaccacccaaacaggccgccgccgacagacggacggtggagaagacttggaagctgatggataaagtggtccgcctgtgccagaaccctaagctacaactaaagaactcccccccctatatacttgacatcctgcccgacacctaccagcatctgcggctcattctaagcaaatatgatgacaaccagaagttggcccagctcagtgagaacgaatacttcaagatctacatcgacagcttgatgaaaaagagtaagagggccatccggctgttcaaagaaggaaaggagagaatgtacgaggagcagagtcaagatcgccgaaacctcactaagctgagtttgattttttctcacatgctagcggaaattaaagccatattccctaatgggcagttccagggtgataacttccggatcacaaaggcggatgctgcagagttctggaggaagtttttcggcgacaagacaatcgttccatggaaagtgttcaggcagtgtctgcacgaagtccaccagatttcttccgggctggaagccatggctctgaagtcaacgattgacctgacttgcaacgattacatttccgtattcgaattcgatatcttcacacggctgttccaaccctggggcagtatactgaggaattggaatttcctggccgtgacccaccccggctatatggccttcttaacctacgacgaagtcaaagcgcgcttgcagaaatactctacaaaacctggtagttatatattcagactgtcgtgtacaagactcggccagtgggccatcggctatgtcaccggcgacggcaacattctgcagaccatcccccataacaaacctctctttcaggcactgatcgatgggtctcgcgaaggtttttacctgtatccggacggacgatcctataaccccgatctaacaggcctctgtgagcctacccctcacgaccacattaaagtcacacaagagcaatatgaactgtactgcgagatgggtagcactttccagctgtgtaaaatttgtgcggaaaacgacaaggatgtaaagatagagccctgcgggcatctcatgtgcactagttgcctgacagcgtggcaggagtctgacgggcaaggctgccccttttgtaggtgtgaaatcaaggggacagagccaatcatcgtcgatcctttcgaccctcgcgacgaggggtctcggtgctgctccattatcgacccctttgggatgccaatgctcgacctggatgacgatgacgatcgcgaagaatcacttatgatgaaccgtctcgccaacgtccgcaagtgcactgatcgacagaattcaccagtaacaagtccggggtcttcaccattagctcaacggcggaagccccagccagaccctctccagatcccccacctctccctacctcccgttccacccagattagacttgattcagaaagggattgtgcggtcaccatgcggcagtccaacaggatccccaaaaagctctccctgtatggtgcgtaaacaggacaagcctcttccagcccctccacctcccctgcgagaccctccccctccccctcctgaaagaccaccgccgattccccccgataatcggctcagccgacacattcaccatgtcgagtcagttccaagtagagaccctcccatgcccctagaggcatggtgccccagagatgtgttcggcacaaaccaactggttggatgccggttactcggggaaggctcaccaaaaccaggaattacagcttcttccaacgtaaatgggaggcactctcgcgtgggcagtgaccccgtgttgatgagaaagcatcgccgtcatgatcttcctcttgagggagcaaaggtgttcagcaatggccacctggggtcagaagaatacgacgtgccaccccggttgtcacctcctcccccggtgaccacactactgccatccattaagtgcaccggtccccttgctaactctctgtctgagaagacaagagatcctgttgaggaagacgacgacgagtataagattcccagtagtcacccagtatccctgaacagccagccatcccattgccataatgtaaaaccgcccgtgcgctcctgtgataatggccactgcatgctcaatggcacacacgggcccagctcagaaaaaaagagcaacatccccgacctgtccatatatttaaagggtacttataggatctag

SEQ ID NO: 181732 - DNA, 2433 bp, synthetic construct
  misc_feature 1..2433: note = Description of Artificial Sequence: Synthetic coding sequence
  source 1..2433: mol_type = other DNA
atggccaacagcatgaacggccggaaccccggcggccggggcggcaatccccgtaaagggcgaatcctgggtataattgatgccattcaggacgccgtgggaccccccaagcaagctgccgccgataggcggacagtcgagaaaacttggaagcttatggacaaggtcgtgaggctgtgtcagaatccaaaactccaactcaagaacagccctccatacatccttgacatcttacccgatacctaccagcatcttcgtctgattctttcaaagtacgacgataatcagaagcttgcacagcttagtgaaaatgaatactttaagatttatatcgactcactcatgaaaaaatctaaacgggctatccgactgtttaaagagggcaaggagcggatgtacgaagaacagagccaggatagaagaaatttgacaaagctttcattgatattctctcacatgctggcggagatcaaggctattttccctaatgggcagtttcagggcgacaactttcggattaccaaagcggacgccgccgagttttggcggaaatttttcggtgataagacaatcgtgccttggaaagttttcagacagtgtctgcacgaggtgcatcagatcagcagtgggttagaggccatggccctgaagagcaccattgatctaacctgcaacgattacatctcagtgttcgagttcgacattttcacccggttattccagccctggggaagcattctgaggaattggaactttttggcggtcacgcaccccgggtacatggcctttctgacttatgatgaagttaaggcaagactgcagaaatactcgactaaacctggctcttacatttttaggctgtcatgcacaagactgggacagtgggcaattggctatgtgacaggggatggaaatatccttcagaccatcccccacaataagcccctgtttcaggcgctgatcgatggatctcgtgaaggcttctatttgtatcccgacggcaggtcctataatccagacctgaccggactgtgcgaacctactccgcacgatcacattaaagtcacacaagagcagtacgagctctactgcgagatggggtccaccttccaattgtgtaaaatttgcgcagagaatgataaagacgtcaagattgaaccctgcggtcatcttatgtgcaccagctgtttaaccgcctggcaggaatctgacgggcagggctgtcctttttgtcgctgtgaaattaagggaacagaaccaatcatcgttgatccctttgacccacgcgacgaggggagcagatgctgcagcatcatagacccgtttggcatgccaatgttagatctggatgacgacgacgatagagaggagagcctaatgatgaaccgcctggccaatgtgagaaaatgcactgaccggcaaaatagccctgtcaccagcccagggagcagccctctcgcgcaacgacggaaaccgcaacctgacccgcttcaaatcccacatctgagtcttccccctgtccctcctagactcgacctgatccagaagggcatagtccggtccccatgcgggtcccctacaggcagccctaaaagcagtccgtgtatggtgagaaaacaggataagccattgcctgctcccccacccccccttcgggacccaccgccaccccctcctgaaagaccacccccaattccccccgataatcggttatcacgccacatccatcacgtcgagtccgtgccaagccgagacccgcccatgccactagaggcctggtgtcctagagacgtgttcggcactaatcagctcgtgggttgtcgactcctgggcgaggggtcacctaaacccggaatcaccgcttcatccaatgtaaacgggcgccacagcagggtgggctctgaccctgttctaatgcgaaagcataggcgccatgacctccccttagaaggagctaaagtattttctaacggccatctcggcagcgaagagtatgatgtgcctcctaggctctctccaccaccccccgtcacaaccctcctaccatctatcaagtgcaccggcccactggccaattcactgtcagaaaaaaccagggatccagttgaggaagatgacgatgagtacaagatacctagcagccatccagtcagtctgaacagtcagccctcgcattgccacaacgtgaaaccaccagtcagatcgtgtgataacggacattgcatgctgaacggcactcacgggcctagctctgagaaaaagtccaacataccggatctcagtatttacctgaaaggcgatgtgttcgattcagcctcagacccagtccctttgccccccgcccgcccaccgacccgagacaacccaaagcacggctcaagtctcaacaggaccccatccgattacgacctgctgatacctccacttggttag

SEQ ID NO: 181733 - DNA, 420 bp, synthetic construct
  misc_feature 1..420: note = Description of Artificial Sequence: Synthetic coding sequence
  source 1..420: mol_type = other DNA
atggccaacagcatgaacggccggaaccccggcggccggggcggcaaccctagaaaaggaaggatcctgggtattatcgacgccatccaggatgccgtggggccccctaaacaagcggcggcagaccggcgaaccgtagagaaaacctggaaactgatggataaggtcgtcaggttgtgccagaatcctaaattgcaactgaagaactcacccccctacatactcgacatcttgccagacacatatcagcacctaaggctcatactatccaaatacgatgacaatcaaaagttggcccaactcagcgaaaatgagtattttaagatatacatcgactcgctgatgaagaagtcaaagcgcgctatacggctgtttaaagaaggcaaggagcgtatgtacgaggagcagtcccaagattag

SEQ ID NO: 181734 - DNA, 684 bp, synthetic construct
  misc_feature 1..684: note = Description of Artificial Sequence: Synthetic coding sequence
  source 1..684: mol_type = other DNA
atggccctggcccccggccccgacgcccacgcccacctgcccccccttattgagctcaagtttcagatggccaattccatgaacggtcgtaacccaggcgggagaggtggtaatcctaggaagggaaggattctcggtatcattgacgccattcaagatgccgtcgggccccccaaacaggcagccgcagacaggaggacagtggaaaaaacatggaagctgatggacaaggtcgtgaggttgtgtcagaacccgaagctgcaactaaaaaactctcccccttacatcctggacatcctgccagacacttaccagcaccttcggctcatattgtctaaatacgatgataaccagaagttggcgcagctatctgagaatgagtatttcaagatctatatcgactctctgatgaagaaaagcaaacgcgcaattcgactgtttaaggagggcaaagagagaatgtacgaagaacagagccaggatcgcactattgtgccctggaaggtgtttaggcagtgtcttcacgaagttcatcagatttcatctggcctggaggccatggccctgaagtccacaattgatctcacctgtaatgattacattagtgtgttcgagtttgacatttttacacggcttttccaggtgagtgacaatttcacagaatacctaatctatcttacctag

SEQ ID NO: 181735 - DNA, 1425 bp, synthetic construct
  misc_feature 1..1425: note = Description of Artificial Sequence: Synthetic coding sequence
  source 1..1425: mol_type = other DNA
atggccctggccgtggccccctggggccggcagtgggaggaggccagagctttaggcagagcggttcggatgcttcagcggttagaggagcagtgcgtggatccgcggctgtccgtgtcaccaccaagtcttagagatctcttaccacggacagcccagttgctccgagaagtggcccactctaggagagcagcgggtgggggggggccagggggacccggagggtctggggattttctgcttatctacttggctaatttggaggccaagagccgacaggttgccgctttgctaccccctagaggcaggcgctccgcaaatgacgagttgttcagagcgggctccagattgcggcggcaactggccaaattagcaataatcttttcccatatgcacgccgagctgcacgctctgtttcctggtggaaagtactgcggccatatgtaccagctcacaaaggcgcccgctcacacattttggcgcgagtcatgcggcgcacgatgcgttctcccttgggccgaattcgaaagcctgcttggaacttgtcaccctgtggaaccgggttgcaccgccctggccctgcggactactattgacctcacctgctctggccatgtgtcaatttttgagttcgacgtcttcaccaggcttttccagccttggcccacactcctgaaaaattggcagctgttggctgtgaatcacccaggctatatggcgttcctgacttatgacgaagtgcaggagcggctccaggcatgtcgagacaagcccgggtcatatatctttcggccatcatgcactcggttgggccagtgggctatcggttacgttagctccgatggttctatattgcagacgatcccagctaataagccgttgtcccaagtgttgctcgaaggacagaaagacggcttttatctatatcctgacggtaaaacccacaaccctgatctcaccgagcttggacaggcagagccacagcagaggatacatgtgtccgaggagcaattgcagctgtactgggctatggacagtacatttgaattgtgtaagatctgcgctgagtctaataaagacgtcaagatagagccttgcgggcatctgctctgcagctgttgcttggcggcctggcagcattccgactctcaaacttgtccgttctgtcgttgcgaaatcaagggttgggaggctgtgtccatctaccagtttcacggccaggccaccgccgaagacagcggcaattctagcgatcaagagggtcgggagctcgaattgggacaagtcccactcagcgccccccctctcccgcctagacccgatctcccgccgcgcaagccccggaacgcccagccgaaagtgcgcctcttgaaagggaatagcccacctgcagccctggggccccaggatccagctccggcctag

SEQ ID NO: 181736 - DNA, 1287 bp, synthetic construct
  misc_feature 1..1287: note = Description of Artificial Sequence: Synthetic coding sequence
  source 1..1287: mol_type = other DNA
atggccctggccgtggccccctggggccggcagtgggaggaggcccgcgccctgggtcgtgctgtgcgcatgttgcagcggctggaggagcagtgcgtggaccctcgtttgtctgtatcccctcccagcttacgagacctactgccacggaccgcccaacttctacgagaggtcgcccacagccggagagccgctggcggtggggggccgggcggtcccggcggatcgggggactttctcctcatctaccttgccaacttggaggctaaatcacgacaggtcgctgccctgttacccccaaggggaaggcgatcagctaatgatgagctctttagggccggctctcgcctgcgacgccagctagctaagcttgcaataatcttctcccatatgcacgccgagctgcatgccttattccccggcggcaagtactgcggccacatgtatcagcttactaaggcacctgcacacactttctggcgcgagagctgcggtgctcgctgtgtgttgccctgggcagaatttgaaagcctactcggcacatgtcaccccgtggagccgggctgcactgctttggcactccgaacaactatagacctaacctgtagcggtcatgtcagtatattcgagttcgatgtgttcaccaggctgtttcagccttggcccacattgctgaagaactggcaactgctggccgtgaaccacccgggatacatggccttcctgacctatgatgaagttcaggagcgactgcaggcctgccgggataagccaggaagctacctctaccccgatggaaagactcacaacccagacctcaccgagcttggtcaagccgaaccacaacagcgcatccatgttagcgaagaacaactgcagctctattgggctatggatagcacattcgagctctgtaaaatatgcgctgagtccaataaggatgttaaaattgagccctgcggccaccttctatgtagctgttgcctggccgcctggcagcacagcgactctcaaacatgtcctttctgtcgctgtgaaatcaaaggttgggaggcagtttctatataccaattccatggccaggccactgccgaagacagcgggaattcaagtgaccaggaaggccgcgaattagaacttggacaagtacctctttctgctcctccccttccacctagaccggatttgccaccccgtaaacctcggaacgcacagcccaaggttcgactcttaaagggaaacagtcccccagccgctctcgggccacaagatcccgcccctgcctag

SEQ ID NO: 181737 - DNA, 2355 bp, synthetic construct
  misc_feature 1..2355: note = Description of Artificial Sequence: Synthetic coding sequence
  source 1..2355: mol_type = other DNA
atgagcgaccagaagaaggaggaggaggaggaggccgccgccgccgctgcaatggccacagaaggaggaaagacctcagagccagaaaataacaacaaaaagccaaagacttccggctctcaagacagtcagccctccccactggcactactggcggcaacgtgcagcaagataggcactccaggagagaatcaagccacaggccagcagcagatcataattgaccctagccagggcctggttcagttgcaaaatcagccccagcagctagaactcgtaaccactcagctggccgggaacgcgtggcagctggttgctagcactccacccgcttcaaaggaaaataatgtttcacagccggcctcgtcttcatcttcgtcctctagcagcaacaacggcagtgccagcccaaccaagacgaagtccggaaacagcagtactcccggacaattccaagttatccaagttcagaacccaagtgggagcgtccagtatcaggtcatcccccagctccaaaccgtcgaaggtcagcagattcagatcaatccaacatcctcatcctcactgcaggacctgcaggggcaaattcagctaatctctgccggaaacaatcaagcaattctcactgcggccaatagaactgctagtgggaatatcctcgcccagaaccttgccaatcagactgttccggttcagatacgccctggtgttagtatcccattacaactccagaccttacctggaacccaggcacaggttgtgaccacacttcccatcaatattgggggcgttacactagccttacctgtgattaataatgtcgccgcaggcggagggacggggcaagtcgggcagccagccgccactgctgacagtggaacatcaaatggcaaccagttggtttctactcctacgaatactaccacctccgcatccactatgccagaatcacccagcagtagtaccacctgcaccacaacagcctctaccagcctcacctccagcgacactcttgtatcgtcagctgacactggccagtacgcttctaccagcgcaagcagcagtgagcgaaccatcgaagagtctcaaacgcccgccgcaactgaatctgaggctcaaagctcctcacaattgcagcctaatggaatgcaaaacgctcaggaccagagcaatagcctgcagcaggtccaaatcgtcggacagcctatccttcagcagatccagattcagcagccccagcagcagatcatccaggctatacctccacagtccttccagctccagtccggccagactatccaaactattcagcaacagccactgcaaaacgtacaacttcaagccgtaaaccccacccaagtgctgattcgggcccctaccttgacacctagcggacagatcagttggcagactgttcaggttcagaacatacaaagtctgtctaatttgcaggtgcagaatgcaggactgagccagcagctgactatcaccccagttagttcttcaggaggaaccacactggcccagatcgcaccagtcgccgtggcgggcgcccctattaccctgaacaccgctcagctcgcttcagtaccaaaccttcagaccgtcagcgtggcaaaccttggggctgcgggagtacaggtgcagggtgtgccagttaccattacatcagtcgcaggacagcagcagggccaggatggcgtgaaggtgcagcaggccaccatagctcctgtgaccgtagccgtcggggggatcgcaaacgcgaccataggagccgtcagccccgatcaattgacacaggtgcatctgcaacagggacagcagacgtcagaccaggaggtccagccaggaaagcgactgcggcgagtcgcatgctcatgtcccaactgcagagaaggcgaaggacgaggatcaaacgagcccggaaagaaaaagcagcacatctgccatatcgagggatgcggaaaggtttatggaaaaacaagccacctgcgtgctcatctgagatggcacaccggagagcgcccctttatctgcaactggatgttctgtggaaaacggtttaccaggagtgatgagctgcaacggcaccgccgaacccatactggggagaaaagatttgagtgtccagagtgctccaagagattcatgcgtagcgatcacctgagtaaacacgtcaagacccatcagaacaaaaagggaggaggaaccgctctggctatcgtgaccagcggggagctcgattccagtgtgactgaggtgttggggtccccccgcattgtcactgtggcggcaatctcccaggattctaatcccgccacccccaacgttagcaccaacatggaagagttttag

SEQ ID NO: 181738 - DNA, 1476 bp, synthetic construct
  misc_feature 1..1476: note = Description of Artificial Sequence: Synthetic coding sequence
  source 1..1476: mol_type = other DNA
atggaccacaccgacaacgagctgcagggcaccaacagcagcggcagccttggcgggctagacgttcgtcgacgcatccccattaaacttataagcaagcaagccaataaagccaagcccgcaccccgcacccagagaaccatcaatcgaatgcccgctaaggcgcccccgggcgatgaggaggggttcgactacaacgaggaagagcgctatgattgtaagggaggtgaactgttcgctaatcaacggcgctttccaggtcacttattttgggactttcaaattaatattcttggcgagaaagacgacactccggtgcacttttgcgataagtgtggactcccaataaaaatatacggacgaatgatcccttgtaaacacgtgttctgctacgactgcgctatactccatgagaaaaagggggacaaaatgtgtcctggctgttctgatcccgttcagagaatcgagcagtgcacacgtggttcacttttcatgtgttctatcgtacagggatgcaaaaggacatatctgtcgcagcgcgacctgcaggcgcatattaaccataggcatatgcgtgctggaaaacccgtgacccgcgccagtcttgaaaatgttcatcctccaatcgcccctccacccaccgaaattccagaacggtttatcatgccccccgataagcaccatatgagccatatccccccaaagcagcacattatgatgccccccccacctttgcagcatgttccccatgaacattataaccagccgcatgaggacatacgtgcaccccccgcagagttgagtatggcacccccccctccaagaagtgtgagtcaagaaaccttcaggatctctactcggaagcattccaacctcattaccgtgccaatccaggacgatagtaatagcggcgccagagagcccccacctcctgcacccgcccccgctcaccaccatccagaataccagggccagcctgtggtgtcccacccccaccacattatgccacctcagcaacattacgcacccccacccccacctcctcctccgataagccatcccatgcctcaccctccccaagcagccgggactcctcatctcgtgtacagccaggcacctcctcctcccatgaccagtgcgcctccccccatcacgcctccccccggccacatcatagcccagatgcccccttacatgaaccatccaccccctggcccaccaccaccccagcacggcgggccccctgtgactgcaccgcctccacatcactacaaccccaattctctgccccagtttaccgaagatcaagggacactgagcccaccgttcacacagccaggtgggatgtctccgggaatctggcctgccccccgcggacccccacctcctcctagactgcagggcccaccgagccagacacccctgcctgggccacaccaccctgatcagacaagataccggccatactaccagtag

SEQ ID NO: 181739 - DNA, 1113 bp, synthetic construct
  misc_feature 1..1113: note = Description of Artificial Sequence: Synthetic coding sequence
  source 1..1113: mol_type = other DNA
atgatcccctgcaagcacgtgttctgctacgactgcgccatcctgcatgagaaaaagggagataagatgtgtcctggctgctctgaccccgttcagaggatagagcagtgcacacggggcagcctgttcatgtgcagcatcgtgcaaggctgtaaacggacatacctgtctcagcgcgacctgcaggcccatatcaatcatcggcatatgagggccgggaagccagtgactcgggcctctcttgaaaacgtgcaccctccaatcgccccacctcctaccgagatccccgaacggttcatcatgccccctgacaaacaccacatgagtcacattccaccgaaacagcacattatgatgcctccgcccccgctccaacacgtgcctcatgagcactataaccaaccccatgaggacattagagctccccccgccgagctcagcatggccccaccgccgcctagatccgtatcccaagaaactttcagaatatccactagaaagcactctaacctgatcactgtgccaatacaggacgactccaattctggcgctcgcgaaccgcctcccccagctccggctccagcacatcatcacccagaatatcagggtcagcctgtagtctcgcatccccatcatataatgcctccccagcaacactacgctccccccccgccccctccccccccaatctcacatcctatgccacatccaccccaggccgccggtacccctcaccttgtttactctcaggctccacctccccctatgacatccgcgcctccgccaatcacaccacctcccggccacataattgcacagatgccgccttacatgaatcacccgccacccgggcctccccctccacagcacggcggccctcctgttacagcacccccaccacatcactacaacccaaattcccttccccagttcactgaggaccagggcactctgagtccgcccttcacccaacctggggggatgagccccgggatctggcctgcaccacgagggcccccgccgccaccacgactccagggtccaccttctcagactccattacctggaccacaccaccctgaccagacccgttacaggccctattaccagtag

SEQ ID NO: 181740 - DNA, 681 bp, synthetic construct
  misc_feature 1..681: note = Description of Artificial Sequence: Synthetic coding sequence
  source 1..681: mol_type = other DNA
atgaaggtgctgatcctggcctgcctggtggccctggccctggccagggaaaccatcgagagtctgtcctccagcgaagagtccatcaccgaatataaacagaaagtcgagaaagtgaaacatgaggaccaacaacaaggggaagatgagcatcaggataaaatttacccctcattccaacctcagccactgatttacccattcgtagagccaatcccttacgggtttctcccccagaatatcctgcccctggcacaacccgccgttgtccttccagtgccccagcccgaaataatggaagtcccaaaggccaaagataccgtgtacacaaagggaagggtcatgcccgttctaaaatccccgacaatccctttcttcgatccacagattcctaaattaacagatttggagaatctccacttgccactcccattgctgcagccattgatgcagcaggtccctcagcccattccccagacccttgccctgccaccccagcccctgtggtccgtgcctcagcctaaggtattgcctatccctcagcaggttgtcccctatccccagcgagccgtcccagtgcaagctctgttactgaaccaggagctgctgttgaatccaacgcaccagatctatcctgtgacccaacctctggcgcccgtgcacaatcctatttcagtgtag

SEQ ID NO: 181741 - DNA, 549 bp, synthetic construct
  misc_feature 1..549: note = Description of Artificial Sequence: Synthetic coding sequence
  source 1..549: mol_type = other DNA
atgaagagcttcctgctggtggtgaacgccctggccctgaccctgccctttctagccgtcgaagtgcagaaccaaaagcagcccgcatgccatgaaaatgacgagcgcccgttttaccagaaaactgccccctatgtccctatgtattacgtaccaaacagttatccatactacgggactaatttgtaccagcgccgccctgccatcgccatcaataatccatatgtgccacggacctattacgcaaaccccgctgtcgtccgcccacacgcccagattccccagaggcagtaccttcccaacagccaccccccgacagtggtccggcggcccaacctgcacccgtcattcatcgctattccccccaagaagattcaggataagatcattattccaactattaacacaatagcaacagtggaacccacgcctgcccccgctacagagcccactgttgactcagtcgtgaccccagaggcattctctgaatctatcatcactagtacacccgagacaaccaccgtcgccgtgactcctcccaccgcctag

SEQ ID NO: 181742 - DNA, 978 bp, synthetic construct
  misc_feature 1..978: note = Description of Artificial Sequence: Synthetic coding sequence
  source 1..978: mol_type = other DNA
atggccagcagcagcggcagcaaggccgagttcatcgtgggcggcaaatataagctggtgaggaaaatcggaagtgggagtttcggggacatatatctggccattaacatcaccaacggcgaggaagtggccgtcaagctcgaaagccagaaggccaggcacccccagctgctgtacgaaagcaagctttacaaaatccttcagggcggggtgggcatcccccacatcaggtggtacggtcaggagaaagactataacgtgctggtgatggacctactcgggcccagcctggaagatctgtttaatttttgctcccgccgatttaccatgaaaacagtactcatgttagcagatcaaatgatcagtaggatagagtacgtgcatactaagaactttatccaccgggacataaagccagacaacttcctgatgggcatcggacgccactgtaacaagcttttccttattgattttgggcttgcaaaaaaataccgcgataacaggacccgccaacacattccttatagggaagacaagaacctgacgggcaccgctcgctatgcatccattaacgcacatctgggcatcgaacagtcgcggcgcgatgatatggaatcactggggtatgtccttatgtattttaaccgcacctccctaccgtggcagggactaaaggcggcaactaagaagcagaagtatgagaagatctccgaaaagaaaatgtccacccccgtagaagtcctttgcaaagggttcccagctgaatttgccatgtacctgaattactgtcgagggctgcggttcgaggaggcaccggactacatgtatcttcggcaactgttccggatcctgttccggacgctgaaccatcagtatgattacacttttgactggacgatgcttaaacagaaggcagctcagcaggccgcgagctccagtggccaagggcaacaagcacaaacgccaactggcttctag

SEQ ID NO: 181743 - DNA, 978 bp, synthetic construct
  misc_feature 1..978: note = Description of Artificial Sequence: Synthetic coding sequence
  source 1..978: mol_type = other DNA
atggccagcagcagcggcagcaaggccgagttcatcgtgggcggcaagtataaactggtgcggaagattggttctggtagttttggtgatatctacctggctatcaatattaccaatggagaagaggttgcagtgaaacttgaaagccagaaagccaggcatccccagctcttgtacgagagcaagctgtataaaatactccagggaggcgtcggtataccgcatattagatggtatggccaggagaaggactacaatgtactggtaatggacttactcggccccagtttagaggatctcttcaacttctgttcacggaggtttactatgaagactgtcctgatgctagctgaccagatgatcagtcggattgaatatgtgcacaccaagaatttcattcaccgcgatataaagccagataacttcctaatgggaattggcagacattgtaataaactgttcctcattgattttggcttagctaaaaagtatcgggacaaccgcacaagacagcacatcccatatcgtgaggataagaatctgaccggcactgcaaggtacgcctctataaatgcccacttgggaatcgaacagtcaagacgggacgatatggagtcacttggctatgtgttgatgtacttcaaccgtacaagtctgccgtggcagggccttaaagcggctaccaaaaagcaaaagtacgagaaaatcagtgagaagaaaatgagcactccggtggaggtcctctgcaaaggattccctgcggagttcgccatgtacctcaattactgtcgggggctgcgtttcgaagaggctcccgattacatgtatcttaggcagctgttcaggattctatttcgcacgttaaaccatcaatacgattacaccttcgactggaccatgttaaagcagaaagcagcccagcaggctgccagttcatctgggcagggacagcaggctcaaactcctacaggcttttag

SEQ ID NO: 181744 - DNA, 1014 bp, synthetic construct
  misc_feature 1..1014: note = Description of Artificial Sequence: Synthetic coding sequence
  source 1..1014: mol_type = other DNA
atggccagcagcagcggcagcaaggccgagttcatcgtgggcggcaagtacaaacttgtgaggaagattgggtctggcagcttcggcgatatctacttagccataaacattactaatggcgaagaagtggccgttaagctggagagccagaaggccaggcaccctcagctgctctatgaaagtaagttatacaagatcctacaggggggagttggcattcctcacattcggtggtatggccaggagaaggattacaatgtcttagtgatggatctgctggggccctccctggaggatctgttcaacttctgcagtcgcaggttcaccatgaagaccgtgcttatgctggctgatcagatgatctctagaattgagtatgtgcacacaaagaatttcatacatagggatatcaagccagacaacttcctgatgggtatcggtaggcattgcaataagttatttcttattgacttcggcctagcaaaaaagtatcgtgacaatcgtacccgccaacacatcccatatcgcgaggacaaaaatctgactggcaccgctcgatacgcgtcaatcaacgcacatttgggaatcgaacagtccagaagagatgacatggaatctttaggatacgtgctgatgtacttcaaccgtacttctctgccctggcaaggcttgaaagcagcgaccaagaagcagaagtacgagaaaatctctgaaaaaaagatgagcaccccagtcgaagtcctgtgcaaaggattcccagcagaattcgcgatgtatctgaattactgccgtggactgcgttttgaggaagcacccgattacatgtacttgaggcaactttttcgtattctgtttagaaccctcaatcatcaatatgattacaccttcgattggacgatgctgaaacagaaagcggcccagcaggctgcatcatcttctggacagggtcagcaggcgcagacacctacaggcaaacaaacagataaaaccaagtccaacatgaagggcttttag

SEQ ID NO: 181745 - DNA, 1098 bp, synthetic construct
  misc_feature 1..1098: note = Description of Artificial Sequence: Synthetic coding sequence
  source 1..1098: mol_type = other DNA
atggccagcagcagcggcagcaaggccgagttcatcgtgggcggcaaatacaagttggtgagaaaaattggctcagggagctttggcgacatatatctggcgatcaatatcaccaacggagaggaggttgccgtgaagttagaatctcagaaggctaggcatcctcagctgttatacgaatctaagctgtacaagatcctccaaggaggggtagggataccacacatccggtggtatggtcaggaaaaggactacaacgtcctagtgatggaccttctgggcccatctctggaagatctcttcaacttctgctctaggcgcttcactatgaagacagttcttatgctggccgatcagatgatctcccgaattgagtacgtgcacaccaagaactttatacatcgcgacatcaaaccggataactttctaatggggatcggcagacactgtaacaagtgtctcgaaagtcccgtggggaaaaggaaaagaagcatgacagtgtccacatctcaggatccaagcttcagtggactgaaccaactgttcctcatcgacttcggcctagcaaaaaagtacagagataaccggactcggcagcatataccttacagggaggacaaaaacctgaccggaaccgccaggtacgcaagcattaatgcccacttgggcatcgagcagagtagaagagacgatatggagtcactgggctacgtcctcatgtactttaacagaacctccttgccctggcaagggctgaaggcagccaccaaaaagcaaaagtatgagaaaatcagcgagaagaagatgagtacgccggtggaggttctctgcaaaggtttcccggccgaatttgctatgtatctgaattattgcaggggactgcgattcgaggaagctcccgactatatgtacctgagacagctgttccgaatcctttttcggacactgaatcaccagtacgactacacatttgactggactatgttgaagcagaaggctgcgcaacaggcggcaagctcttcgggtcagggacagcaagcccagacacctaccggaaagcagacagacaagactaagagtaacatgaaaggattctag

SEQ ID NO: 181746 - DNA, 1029 bp, synthetic construct
  misc_feature 1..1029: note = Description of Artificial Sequence: Synthetic coding sequence
  source 1..1029: mol_type = other DNA
tgccgggaggagatcagccggatcgagtacatccacagcaagaactttatacatagggacgtgaaaccagacaacttcctgatgggcctgggcaaaaagggcaatttggtgtacatcatcgattttggactggcaaaaaaatatcgtgacgcgcggactcatcagcatataccatatcgggagaacaagaacctcacaggaactgctcgctacgccagcatcaacacacaccttggcattgaacaatcgcgaagagacgacctcgagtcactggggtatgtgctgatgtacttcaatctgggctcccttccttggcaggggttgaaggccgctaccaaacgccagaaatatgagaggatatccgaaaagaagatgtcaacccccattgaagtgttatgcaaaggatatcccagcgaatttgcgacatatctgaatttctgccgttccctgcgtttcgacgacaaaccggattactcatacttgaggcagctgttccgcaacctgttccacagacagggattctcctatgattatgtatttgactggaacatgctgaagttcggcgcttctagagccgcagacgatgccgagagagagcggagggaccgcgaagaacgccttagacactctagaaacccggctacccgaggactgccaagtacggcctctggccgcctgagggggacccaggaagtggcccctcccacacctttgacccctacttctcacactgccaacacctcaccaaggcccgtttctgggatggaacgggagagaaaggtgagtatgcgcctgcacagaggtgcgcctgtaaacatatccagtagcgacctcacaggccgccaagacacaagtcgaatgagcactagccaggtgggggcggaattgcccggtggtcgctgggcctctggatatcccgtgcgagttaaaagtggcctgtggttccttcaaggattcttctttccattctttcctccattccttagggtgtttaacttggcccgggtatggaggcttggctgtcgctag

SEQ ID NO: 181747 - DNA, 1248 bp, synthetic construct
  misc_feature 1..1248: note = Description of Artificial Sequence: Synthetic coding sequence
  source 1..1248: mol_type = other DNA
atggagctgcgggtgggcaaccggtaccggctgggccggaagatcgggagtgggtcttttggcgacatttacttagggacagacatagctgctggcgaagaagtggctattaaactggagtgcgttaagaccaaacacccacaactccatatagagagcaagatttataagatgatgcaggggggcgtcggcattcctaccattcgatggtgtggtgcagagggcgactataatgtgatggttatggaacttctcggcccatctctggaggatctgtttaatttctgctctcgcaagttctcactcaagactgtactccttttagccgatcaaatgattagccgcatcgagtacatacactcgaagaacttcatacaccgggatgtcaaaccagacaattttctgatgggattgggcaagaaaggcaatttagtgtacatcattgattttgggctggctaaaaagtatcgtgatgcaagaactcaccagcacattccctatagggagaacaagaaccttactggaaccgcccggtacgcttcgatcaacacccatctgggcatcgagcaaagtcggagagacgatctggagtccctgggatacgtgttaatgtacttcaaccttggctccctaccatggcagggcctcaaggctgccaccaaacgccaaaagtatgagcggataagtgagaagaaaatgtccacaccgatcgaggttctttgtaagggctaccccagtgaattcgcaacctacctaaatttctgtcggagcctgaggtttgacgataagccagattatagctacctccgccaactctttcgcaacttgttccacagacaaggcttctcttatgattacgtttttgactggaacatgctgaaatttggcgcctcgagagccgccgatgacgccgagagagagaggagggacagggaggagcgtctccgccatagcagaaatccagccacacggggactgccttccaccgcaagtggccgcctccggggcacgcaagaggtggcgcctccaacccccttgacccctacctctcacaccgctaacacaagtccgcgtccagtcagcgggatggaacgcgaaaggaaggtgagtatgcgcctgcacagaggtgcacctgtaaatatcagttcaagcgatctcacaggcagacaggacacatcgaggatgtcgacgtcccagattccaggacgggtcgcctcctctggcctgcagtccgtggtgcaccggtag

SEQ ID NO: 181748 - DNA, 1230 bp, synthetic construct
  misc_feature 1..1230: note = Description of Artificial Sequence: Synthetic coding sequence
  source 1..1230: mol_type = other DNA
atggagctgcgggtgggcaaccggtaccggctgggccggaagatcggttccggcagttttggggatatatacctgggaaccgacatagcagccggcgaggaagtggctatcaagctagagtgcgtcaagactaagcatccacagctacacatagagtcaaaaatctataagatgatgcagggcggcgtcggaattccaaccatcagatggtgtggggccgagggagattataatgtgatggtgatggaactgttgggtcccagcctggaagacctgttcaacttctgttcccggaagttctctctcaagactgtcctgctgctggctgatcagatgatctctcgtatagaatacattcacagcaagaactttattcacagggatgtgaaacccgataacttcctgatgggactcggcaagaaaggaaacctggtctacatcatcgatttcggtttagccaaaaaatatcgggacgcgaggacccaccagcacattccataccgagagaataaaaacctcacgggcactgccaggtatgcgtccattaatacccatctgggaatcgaacaatcacgacgcgatgatctcgagagcctcggatacgtgttgatgtattttaatctgggatctctgccatggcaagggttgaaggcagccacaaagcggcagaagtatgaacggatcagtgaaaaaaaaatgtctaccccaatcgaggtgctttgcaaggggtacccttctgaattcgccacttacctgaatttctgccgctctctgcgctttgatgataaaccagactacagctacctgagacaactctttcggaacttgtttcacagacagggcttctcatacgactacgtattcgactggaacatgctcaaattcggggcaagtcgtgcggccgacgacgccgagcgcgagaggagagaccgggaggagcggctgagacatagcaggaaccccgctacccgcggcctgccatccaccgcctccgggcggctgagaggcacgcaagaggtggcacctcccacaccactcacgccaaccagtcataccgcaaacaccagtccaaggccagtctcaggtatggagagagaacgcaaggtgtctatgcgcctgcataggggagcacccgtcaatatatcctcgtcggatttgacaggcagacaggataccagccgcatgtccactagccagaactctattccattcgagcatcatggcaaatag

SEQ ID NO: 181749 - DNA, 1077 bp, synthetic construct
  misc_feature 1..1077: note = Description of Artificial Sequence: Synthetic coding sequence
  source 1..1077: mol_type = other DNA
atgatgcagggcggcgtgggcatccccaccatccggtggtgcggcgccgagggcgattataacgtcatggtgatggagcttctcggaccttccttggaagatttgttcaatttttgctctcgcaaattttctctgaagactgtgctcctgctggcagaccagatgatttctcgtatcgagtatatccatagcaaaaatttcatccatcgtgacgtgaagccagataactttttaatgggattgggaaagaagggtaacctggtgtacataattgatttcgggctcgctaagaagtaccgcgatgcccgcacacatcaacacatcccctatcgtgaaaataagaatctcaccgggacagctcgttatgcctcaatcaacacgcatctcggcatcgagcagtcacggcgggacgatctggagtcattgggctacgtgctgatgtattttaatctcggaagcctgccatggcagggtctgaaagcggccactaagcgccagaaatacgagagaatctccgagaaaaagatgtctacccctatcgaggtcttatgcaaggggtacccctcagaattcgccacctatctcaacttctgcagatcactcaggttcgatgataaaccagactacagctacctcaggcaattgttcaggaacctctttcataggcaaggcttctcctacgattacgtctttgattggaacatgctcaagtttggggcctccagggcagcagacgatgccgaacgggaaagacgcgatcgagaagagaggttgcgccattcgcgcaatcctgccacaaggggccttcccagcacagccagtggtcgcctgagaggaactcaggaggtggccccgcccacaccccttacccctacatctcataccgcaaatacttctcccaggcccgtgagcggcatggaaagggagcggaaggtgtctatgagactccacagaggagctccagtgaacatctctagttctgatcttacaggaaggcaggacacctcccggatgagtacgtcacagatccccggcagagtggcatcaagcggcctgcagtccgtggttcaccgatag

SEQ ID NO: 181750 - DNA, 381 bp, synthetic construct
  misc_feature 1..381: note = Description of Artificial Sequence: Synthetic coding sequence
  source 1..381: mol_type = other DNA
atggagctgcgggtgggcaaccggtaccggctgggccggaagatcggatctggctcatttggggacatctacctcggcaccgatatcgctgccggagaggaagtagccatcaaactggaatgtgtgaagacaaagcacccccagcttcacatcgaatcaaaaatctacaagatgatgcagggcggcgtgggcattcctacaatcagatggtgcggggctgaaggagactataatgtgatggtgatggagctcctgggcccctctcttgaggatcttttcaacttttgtagccgcaagttctccctgaaaacagtgctgcttctcgcggatcagatgaacaacccggaggaaatgacatggagcttgtgggccacgtgttag

SEQ ID NO: 181751 - DNA, 1251 bp, synthetic construct
  misc_feature 1..1251: note = Description of Artificial Sequence: Synthetic coding sequence
  source 1..1251: mol_type = other DNA
atggagctgcgggtgggcaacaagtaccggctgggccggaagatcggcagcggttctttcggagatatatatctcggcgcaaatattgccagcggagaggaagttgccattaaactagagtgcgtcaagacaaagcaccctcagctgcatatagaatctaagttctataagatgatgcaggggggcgtgggcatcccctccatcaagtggtgcggtgctgaaggtgattataatgtgatggtgatggagcttcttggtccaagcctagaagatttgttcaacttctgcagccggaaattttccctgaagaccgtgctgctgctggcagatcagatgatcagcagaattgaatacattcattcaaagaactttatacaccgtgacgtcaagccagataacttcctgatggggctgggcaagaaaggcaatctcgtgtatataattgatttcggcctggctaagaagtacagggacgcacggacgcaccagcacattccctaccgagaaaataaaaacctcaccggcactgcccgatacgctagcatcaatacacatctgggcatcgagcagtctcgcagggacgacctggagtcacttggctatgtgctgatgtacttcaatctcggctccctgccctggcagggccttaaggccgccaccaaacgacagaagtacgagaggattagcgagaaaaagatgagcacacctattgaagtgctttgcaaaggatatcctagcgagttttcaacttacctgaacttctgccgcagcctcaggtttgacgataaaccggactattcttacttgcgacagttgtttagaaacctgtttcaccggcagggattctcttatgactacgtgtttgactggaatatgctgaaatttggcgcggcaaggaatcctgaagatgtagatcgggaaagaagggagcacgagcgggaggaaaggatgggacaactcagagggtccgcaacaagggccttgccgcccggcccccccacgggggcgaccgccaaccggctgcggtccgcggcggagcccgtcgcgtctactccagcgtcaagaatccaaccagctgggaatacctccccacgtgcaatttcacgtgtggaccgagagagaaaagtaagcatgcgcctccaccgcggcgctccggcaaacgtcagctcttctgacttaactggccggcaggaggtatcacgtatccctgcctcacaaacaagtgtgccatttgaccacctcggcaagtag

SEQ ID NO: 181752 - DNA, 360 bp, synthetic construct
  misc_feature 1..360: note = Description of Artificial Sequence: Synthetic coding sequence
  source 1..360: mol_type = other DNA
tgacggaaccccgaggacgtggaccgggagcggcgggagcacgagcgcgaggaacgaatgggacagctccgcggctccgcgacgagggcactgcctcctgggcctcccacaggagcgacagctaaccgacttcggtctgcagccgagccagtggctagcaccccagccagtcgcatacagcctgccggaaacacctccccgcgcgccatcagccgcgtggatcgcgaaagaaaggtaagcatgcgcctgcaccgaggggcccccgccaacgtgtcttcctctgacttgaccggccgccaggaggtgagccgcatcccagcttcacagacttcagtgccgtttgaccacctgggcaagtag

SEQ ID NO: 181753 - DNA, 1251 bp, synthetic construct
  misc_feature 1..1251: note = Description of Artificial Sequence: Synthetic coding sequence
  source 1..1251: mol_type = other DNA
atggagctgcgggtgggcaacaagtaccggctgggccggaagatcggatctgggtcctttggagatatctatctgggagccaacatagcctccggggaggaggtcgccataaaattggagtgtgttaaaaccaagcatccccagctccacatagaatcgaaattttataaaatgatgcagggcggggtgggaatcccatcaattaagtggtgcggggctgagggcgactacaatgttatggtcatggaactgctagggccaagcttggaagatctgttcaatttttgctctagaaagttcagcttaaaaaccgtgctgttgctcgctgaccagatgatttctcgcatcgagtatatacactccaagaactttatacaccgcgatgtgaagcctgacaatttcttgatgggtttaggcaagaaaggaaacctcgtgtacattatcgattttggcctggcaaagaaatacagggatgcacgcacccatcaacacatcccatatcgcgagaataaaaatctgacgggcactgcaaggtatgcctccattaacacccatctcgggatagaacagtctcgaagggacgatctcgaaagccttggatacgtgcttatgtactttaatctggggtcactcccctggcaaggactgaaggcggcaactaaaagacagaagtacgaacgcatttccgaaaagaagatgtccacgccgatcgaggtgttatgcaagggctacccgtcagaattctccacctatctgaacttctgtcggtctttacgcttcgacgacaagcccgactactcctacctgcgtcagttattcaggaaccttttccaccggcagggcttctcttatgactatgtcttcgactggaatatgctgaaatttggggcagcgagaaatcccgaggatgtggatcgagagcggagagagcatgagcgagaagaacggatgggacaactgcgaggctcagccacacgagccctgccccctggtccaccaacgggggcaaccgccaatcgcctccgctccgcagccgagccagtcgcctccactccagccagccgcatccagccggctggcaacacctccccacgcgctatttcacgcgtagatagagagagaaaagtgtccatgcgactccaccgtggcgcccctgctaatgtatcttctagcgatctaaccggcaggcaagaagtttcacgtatcccagctagtcagacgtcggtcccttttgatcatctggggaagtag

SEQ ID NO: 181754 - DNA, 1251 bp, synthetic construct
  misc_feature 1..1251: note = Description of Artificial Sequence: Synthetic coding sequence
  source 1..1251: mol_type = other DNA
atggagctgcgggtgggcaacaagtaccggctgggccggaagatcgggagcggatctttcggtgatatctatctgggtgcaaacatcgcatcgggcgaagaggtagcaataaaattggaatgcgtgaaaaccaagcatccccagctgcatatcgagtcgaagttttataaaatgatgcagggcggcgtcggcatacctagcatcaaatggtgcggagccgagggagattacaacgttatggtcatggagcttctggggccatccctggaagatctatttaatttttgcagcagaaagttttcactgaagactgtcctcctgttagctgatcagatgatatcacgcatcgaatacatccactctaaaaattttattcacagggatgtgaagccagataacttccttatgggccttgggaagaagggtaacttagtgtacattatagacttcggactggcgaagaagtatcgcgatgccaggacgcaccagcatatcccttatcgggaaaacaagaatttaaccggaacggcacgatatgccagtatcaacacccacctggggatcgagcagagcagaagagacgacttggagagtctcggatacgttctgatgtactttaatttaggctcactgccgtggcagggactcaaagccgccactaaaagacagaagtatgaacgcatctcagaaaaaaaaatgagtacaccgattgaagttctgtgcaaagggtacccctcggagtttagtacgtacctcaacttttgtcgctcactcagattcgacgataagcctgactattcatatctcaggcaattatttaggaatctgttccacaggcagggattctcctacgactacgtgttcgattggaatatgcttaagttcggggcagctagaaacccggaagatgtggacagggagagaagagagcatgagcgggaggaacgcatgggccagttacggggaagcgcaacacgggccctgccacccggtccccctactggcgcaaccgcaaaccgcctgcggtctgcagccgagccagttgcatcaactccggcaagccgtattcagccagcgggcaatactagccccagagccatatccagggtggacagagagcgaaaggtcagtatgcgactgcaccgcggagccccagcgaacgttagtagcagtgatctgaccggcagacaggaagttagcagaattccagctagccagacctctgtccctttcgaccacctcggaaagtag

SEQ ID NO: 181755 - DNA, 1251 bp, synthetic construct
  misc_feature 1..1251: note = Description of Artificial Sequence: Synthetic coding sequence
  source 1..1251: mol_type = other DNA
atggagctgcgggtgggcaacaagtaccggctgggccggaagatcggctccggaagcttcggcgacatatacctaggcgcaaatatcgcttccggcgaagaggtggcgattaaattggaatgtgtcaagactaagcacccccagctgcatattgaatcaaaattctacaagatgatgcagggaggcgtcgggattccttcaatcaaatggtgcggcgctgaaggcgattacaatgtcatggtgatggagcttctggggccatctttagaggacctttttaacttctgctccagaaagttctcattgaagactgttctattgctggcagatcaaatgattagcagaatagaatacatccatagcaagaattttattcatagggacgtcaagccggataactttctaatgggacttgggaaaaagggcaaccttgtgtatattattgattttgggttggccaaaaagtatcgcgacgcccgcacccatcagcatattccctatcgcgagaataaaaacctgaccgggactgcaaggtatgctagtatcaacacccacttgggtattgagcaatcccggcgcgacgacttggagtccttagggtatgtgctcatgtactttaatttgggcagcttgccatggcagggtttaaaagccgcaactaaaagacagaagtacgagcggatttctgaaaaaaaaatgtccacacctatcgaagtgttatgcaaagggtacccaagcgaatttagcacctacctcaacttctgccggagcctgagatttgatgacaagccagattactcgtaccttcgacagctctttcgcaacctcttccataggcagggcttcagctatgattacgttttcgattggaacatgctgaaattcggtgcagcgcggaaccccgaggacgtcgatcgtgagaggagagagcatgaaagggaggaacggatgggtcaactgcggggatccgcaaccagggccctgccacctggaccccccaccggcgcgacagcgaataggttgcgatcagccgctgagccagtggctagcacgcccgcttcccggatacagcctgcaggcaatacttcgcccagggcgataagccgtgtggatagggaacggaaagtgtccatgcgtctgcaccggggggcccccgcgaatgtctccagctctgatcttacaggcaggcaagaagtgagtcgtatacccgcaagccagacctccgtcccatttgaccacctggggaagtag

SEQ ID NO: 181756 - DNA, 1251 bp, synthetic construct
  misc_feature 1..1251: note = Description of Artificial Sequence: Synthetic coding sequence
  source 1..1251: mol_type = other DNA
atggagctgcgggtgggcaacaagtaccggctgggccggaagatcggctccggatcttttggggacatatacctcggtgcaaatattgcatccggggaagaagtagcaattaaacttgagtgtgtaaaaaccaagcatcctcagctccatattgaatcgaaattttacaaaatgatgcaggggggagtagggatccctagcataaagtggtgcggagccgagggtgattataacgtgatggtcatggaattgcttggaccttctctagaggacctctttaatttttgtagtcgtaaattctctctcaagacggtactcctcctggccgaccagatgatttcacgcattgagtatatccatagcaagaattttattcatcgagatgtaaaacccgacaatttccttatgggacttggcaagaagggaaacctggtgtacatcattgacttcgggctggctaaaaagtaccgcgatgcacggacacaccagcatattccttatagagaaaataagaacctgacaggcacggccaggtatgcctcgatcaacacacacctgggaatagagcagtcaagacgggacgacctagagagtctgggctacgtcctgatgtattttaacttgggctctcttccctggcagggattgaaggctgccaccaaacggcagaaatatgagagaattagtgagaaaaagatgtccacacctattgaggtgctgtgcaaggggtatccaagcgaattttctacttatctgaacttctgtagaagcctgagatttgatgataaaccggactactcatatctccgccagctgtttcggaacttgtttcatagacagggattttcatacgactatgttttcgactggaacatgctcaagtttggagcggcccgcaatcccgaggatgtggaccgtgaacggagagagcatgaaagagaggaaagaatgggacagttaagaggctcagccacccgcgcactccctcccggccctccaaccggagcaaccgccaatagacttcggagcgccgccgagccagtggcttccacccccgcctccagaatccagcctgccggcaacacaagtccacgcgctataagcagagtggaccgcgagcgtaaagtcagtatgcgacttcatcgaggggcccctgccaatgttagttcttctgacctcacaggaagacaagaagtttcgaggattccggcatctcagacctcagtcccttttgatcacctagggaagtag

SEQ ID NO: 181757 - DNA, 678 bp, synthetic construct
  misc_feature 1..678: note = Description of Artificial Sequence: Synthetic coding sequence
  source 1..678: mol_type = other DNA
atggagctgcgggtgggcaacaagtaccggctgggccggaagatcggctcgggatcgttcggggacatttacctgggcgccaatatcgccagcggcgaggaagtggcaattaaactcgagtgtgtaaaaaccaaacacccacagttacacatcgagtcgaaattttataagatgatgcagggtggcgtaggaataccgtcaattaaatggtgcggggctgagggcgattacaacgtcatggtgatggagctcttaggccccagcctggaggaccttttcaatttctgttcgagaaaatttagcctgaagacagtgctgctgttagcggatcagatgatttctagaatagagtatatccattcaaaaaacttcatccacagagacgtgaaacctgacaactttctcatggggctcggaaaaaaagggaacctggtctatattatcgacttcggtctggccaaaaagtacagagatgctcgcactcaccagcatatcccgtatagggagaataagaacctaaccggaaccgctcgctatgccagcattaatacacacctgggtattgagcagtcaagaagagacgatctagagtctctgggctacgtgttgatgtattttaacctcggttcactgccttggcaagggctgaaggcagccaccaagaggcagaagtactag

SEQ ID NO: 181758 - DNA, 435 bp, synthetic construct
  misc_feature 1..435: note = Description of Artificial Sequence: Synthetic coding sequence
  source 1..435: mol_type = other DNA
tgacggaacctgttccaccggcagggcttcagctacgactacgtgtttgactggaatatgctgaagtttggcgctgccagaaaccccgaagacgtggatcgggagcggagggagcacgaaagggaggaaagaatgggccagcttcgcggtagtgcaaccagggccctgccgcccgggccacctacaggcgcaacagcgaaccgattacgttcagccgccgagcccgtggcaagtacacctgcctccagaatccagccagcaggcaacacatccccccgagccatctctcgtgtggatcgggagaggaaggtctctatgcgactgcaccgcggggctcctgcaaacgtttctagctccgacctgacaggtcggcaggaagtatcccgcattccagcctcacagacttcagtccctttcgaccacttgggaaagtag

SEQ ID NO: 181759 - DNA, 1182 bp, synthetic construct
  misc_feature 1..1182: note = Description of Artificial Sequence: Synthetic coding sequence
  source 1..1182: mol_type = other DNA
atggaccaccccagccgggagaaggacgagcggcagcggaccaccaagcccatggctcagaggagtgcacactgttcccgcccatcaggctctagttcaagttccggagtgctgatggtggggcccaatttccgcgtgggaaagaagataggttgtggaaactttggggaattgcgactcggcaagaacctctacaccaacgagtacgtggccataaaattggagccaattaaatcgcgtgcgcctcaacttcatctcgaataccggttctataagcagctgggctcagctggggagggcctgccacaggtttactattttggtccgtgtgggaaatacaacgcaatggttcttgaattactcggaccctccctggaagaccttttcgatctgtgcgataggacctttactcttaagaccgtcttaatgatcgccatacagctgttatcaagaatggagtatgtccactccaaaaacctgatatatagagatgtgaagcccgaaaactttctgataggtcgccagggaaataagaaagaacacgtgatccatatcatcgactttgggctggccaaggaatatattgaccccgaaaccaagaaacacatcccttaccgcgagcacaaatcactaactggcacggctcgatacatgtccatcaatacacaccttggaaaggaacagagcaggcgcgacgacctggaggccctgggacacatgttcatgtacttcctgcgggggtctctcccttggcagggcttaaaggctgatactcttaaggagcgctatcagaagattggtgacactaaaagaaacacacccattgaagccctctgcgaaaacttcccagaggagatggcaacctacctccggtacgtgcgcaggttggacttttttgagaagcccgattacgagtaccttcggacccttttcacggacctgttcgagaagaaaggatatacatttgattacgcttacgactgggtcgggcgccctattcctacccccgtgggctctgtccatgtggatagcggcgcttcagcgatcacacgggaatctcacacacaccgtgaccgcccctctcaacagcaacctctgcgcaatcagtcacttaggactgtgactgctgaacattatgacgtgaacaactctgccatttggcacagggggaggggcacatag

SEQ ID NO: 181760 - DNA, 1269 bp, synthetic construct
  misc_feature 1..1269: note = Description of Artificial Sequence: Synthetic coding sequence
  source 1..1269: mol_type = other DNA
atggaccaccccagccgggagaaggacgagcggcagcggaccaccaagcctatggctcagcggtccgcacactgttctcgaccatcagggtcatcatcctcttcaggcgtgttaatggttgggccaaatttccgtgtcggcaaaaaaattggatgtggcaattttggcgagctaaggttaggcaaaaacctgtatacgaatgagtacgtcgcaatcaagctggaacccatcaagtcgcgggccccacagctgcatctcgagtatagattttacaaacagctgggatctgccggtgagggactgccacaggtgtactacttcggtccatgtggaaaatacaatgctatggtgctggaactgctggggccttcccttgaagatctgtttgatctttgcgatcggacatttacgttaaagactgtgctgatgattgctatacagctcctgtcaaggatggaatatgtgcactctaaaaacctgatctatagggacgtcaaaccagaaaactttctgattggcagacagggaaacaaaaaggagcacgtgatccatatcatcgactttgggctcgcaaaggagtacatagaccccgaaaccaagaaacatatcccctaccgggaacacaagagcctgaccggcacagcacgttatatgtcgattaacacccatctgggtaaggagcagtctcgtagagacgatttggaggccttgggacacatgttcatgtacttccttagaggatcactgccatggcaggggctgaaggcagacacactcaaagagcgttaccagaaaattggagataccaaacgcaacactcccatcgaggctttatgtgaaaactttcccgaggaaatggccacttatttgcgttacgtacgccgcttagatttcttcgagaaaccagactatgagtacttaagaacacttttcactgacttgttcgagaaaaaaggctacacgttcgattacgcctatgactgggtcggtcggcccataccaacccctgtgggctccgtgcatgtcgacagcggggctagtgcaatcacgcgcgaatcccatacacatagggacaggccgagccagcagcaacccctgcggaatcaagtggtttccagtaccaacggagaactcaatgtggatgaccctacaggggcccattctaacgccccaattactgcacatgccgaggtggaagtggtggaagaggctaaatgttgctgtttcttcaaaagaaagcgaaagaagacagcccagagacacaagtag

SEQ ID NO: 181761 - DNA, 1137 bp, synthetic construct
  misc_feature 1..1137: note = Description of Artificial Sequence: Synthetic coding sequence
  source 1..1137: mol_type = other DNA
atggaccaccccagccgggagaaggacgagcggcagcggaccaccaagcccatggcccagagaagcgcacactgttcaaggccttctgggtcatcctcaagctccggcgtcctgatggtcggaccgaactttagggtgggcaagaagatcggttgtggaaattttggggagctgagattaggcaagaatctctatacgaacgagtatgtggccattaagctggagctcctaggaccctctctcgaggatctcttcgatttgtgtgatcggacctttactctcaagacagtgctcatgattgcaattcaattgctgagccggatggagtatgtgcatagcaagaatctgatatatcgtgacgtgaaacctgaaaacttcctcataggccgccaaggaaacaaaaaagaacacgtgatacatatcattgacttcggtcttgcaaaggagtatattgatccggaaacgaaaaagcatatcccttaccgcgaacataaaagccttacaggtacagccagatacatgtccatcaacacacacctcggtaaggaacagagtcgccgggatgatctggaagccctcggccacatgtttatgtatttcttgaggggatctctcccttggcagggtctgaaagcggatactctgaaagagaggtatcagaagatcggggacaccaagaggaacactcctatcgaagctctgtgcgaaaactttccggaagagatggctacctacctgagatatgttaggcggcttgactttttcgaaaaacctgattacgagtacttgcgcacgctattcaccgatctgtttgaaaagaagggttacacttttgattatgcatacgactgggtgggacgtcccatccccacccctgtcgggtccgtccatgtggattcgggagcttctgccatcactagggagagccacactcatcgtgataggccatctcagcagcagcccctgcgaaatcaggtggtcagctcgaccaatggggagctcaacgtcgacgaccctacaggggcacatagcaacgctccgataaccgcacacgccgaggttgaagtggtcgaggaggccaaatgctgttgcttctttaaacgcaaaaggaagaaaacagcacaaaggcataaatag

SEQ ID NO: 181762 - DNA, 1248 bp, synthetic construct
  misc_feature 1..1248: note = Description of Artificial Sequence: Synthetic coding sequence
  source 1..1248: mol_type = other DNA
atggacttcgacaagaagggcggcaagggcgagaccgaggagggcagaaggatgtctaaggccggaggcggtaggtctagtcacgggattagatcaagcggcacatcaagtggcgtgttaatggttggcccaaattttcgggttggaaagaagattggttgtggaaatttcggtgagctccgactcggcaaaaatctgtatacgaatgagtacgtggcaattaagcttgagcccattaaatctagggctccacagctccacctggagtacagattctataaacagttatctgccactgaaggcgtcccacaggtctattatttcggaccctgtggaaaatacaatgctatggtgctggagcttcttgggccctcactagaagatctattcgacctttgcgatcggacttttacccttaaaaccgtgctcatgattgcgatacaactgatcactcgcatggagtacgtacacacgaagagcttgatttaccgagatgtcaagccagaaaacttcttggtgggacggccaggcaccaagaggcaacacgccatccatattatcgactttggacttgcgaaggagtacatagacccagaaacgaagaagcatattccttacagagagcacaaaagtctcaccggaaccgccaggtatatgagcatcaacacccacctagggaaggagcagtctaggcgcgacgatctcgaagccttgggccatatgtttatgtactttctccgcggctcgctgccttggcagggtttaaaggcagacactctcaaggaacggtaccagaaaatcggcgatactaagagagcgacgccaatcgaagtgctgtgcgagaatttccctgaagagatggccacttacctgagatacgttcgcagactcgacttctttgaaaagccagactacgattatctcaggaagcttttcactgatctctttgacaggagtggcttcgtttttgactacgagtatgactgggcggggaagcctttgcctacacctatcggaacagtgcacacagatctgccgtcacagccacagcttagagacaagacacagccacactcaaaaaatcaggcgctgaatagtacgaatggtgagctcaacgctgacgatcctaccgctggccacagtaatgctccaatcacggcgcctgctgaggtagaagttgcggatgagactaaatgctgttgcttcttcaaaagaaggaaaagaaaatccctgcagcgccacaagtag

SEQ ID NO: 181763 - DNA, 645 bp, synthetic construct
  misc_feature 1..645: note = Description of Artificial Sequence: Synthetic coding sequence
  source 1..645: mol_type = other DNA
atgagcatcaacacccacctgggcaaggagcagagccggcgggacgacctggaagcactggggcatatgtttatgtactttctcagaggttcattgccctggcagggtctgaaggccgatacactgaaagagagataccagaaaatcggggacacaaaacgagcaacccctatagaagttctctgtgaaaactttcccgaggagatggcaacctacttgcgctacgtgaggaggctggacttcttcgagaagccagattatgattatctcaggaaactcttcaccgatctattcgaccggagcgggttcgtgttcgactatgagtacgactgggcggggaagccacttccaacaccgatcggtacagttcacaccgatctgccgagccagccacagctacgggataagacgcagcctcccgagtccagtccctgttccccgttggggagagacctcgttcggggacctcggggccccccaacggccgcgcagggacagaccttagctggctctcagaatgccgattgtagaggcagggcctggctaagacgtccccaccccagggacgtgggctcactgccctcatgtaagaccctcgcagaaatcagtacacccgtgtcctcaccacctctccaggaacactag

SEQ ID NO: 181764 - DNA, 1272 bp, synthetic construct
  misc_feature 1..1272: note = Description of Artificial Sequence: Synthetic coding sequence
  source 1..1272: mol_type = other DNA
atggagaacaagaagaaggacaaggacaagagcgacgaccggatggcccgtccctctggcagatctggccacaatactcgggggaccggctctagttctagtggcgtcctcatggtaggacccaatttccgggttggtaaaaagatcggctgcggcaactttggggaattgaggttgggaaagaacctgtatactaacgagtacgttgctatcaagctagaacccatgaaatccagggcaccccagttgcacctggaatataggttttacaagcagctggggagcggcgatggtattccacaggtctattacttcggtccatgtgggaagtacaacgcaatggtcctggagttgttgggaccatcccttgaagatctgtttgacctttgtgaccggactttctccctcaagacagtgttgatgatagctatccagctgatcagccgaatggaatacgtacattccaaaaatcttatttaccgcgatgtcaaacccgaaaacttcctgatcggtcgcccgggaaataagactcaacaggtgatccacatcatagactttggcttggcgaaagagtatatcgaccctgagactaaaaaacacataccatacagagagcataagagcctaaccggcaccgccaggtacatgagcattaacacccacctcggtaaggagcagtccagacgcgacgatctggaagctctcggtcacatgtttatgtactttctgaggggctctctgccctggcagggcctgaaagccgataccctaaaagaaaggtatcagaagataggggacaccaaacgggctacacctatcgaggtcctgtgcgagaacttccccgagatggccacatacctgcgctacgtccgaaggctcgacttcttcgaaaaaccagattacgactacctgcgaaagctgtttacagatctctttgatcggaaaggatatatgtttgactatgaatatgactggatcggcaagcagctgcccaccccagtaggcgccgtacaacaagacccagctctctcatctaatagggaagcacatcagcacagggataagatgcagcagtccaagaatcaggtggtatcctccaccaatggcgagctgaacacagacgatcctactgctggccgaagcaatgctcctataaccgccccgacagaggttgaagtgatggacgagaccaactgtcagaaggtccttaacatgtggtgttgctgcttcttcaagcgcagaaaacgcaaaaccatccagagacacaagtag

SEQ ID NO: 181765 - DNA, 1368 bp, synthetic construct
  misc_feature 1..1368: note = Description of Artificial Sequence: Synthetic coding sequence
  source 1..1368: mol_type = other DNA
atggagaacaagaagaaggacaaggacaagagcgacgaccggatggctagacccagtggtcggtccgggcataacacaagggggactgggtctagctcgagtggcgtgctcatggttggtcccaactttcgggtgggaaagaaaattggctgcgggaacttcggcgagctcagactgggaaagaacctctacacaaatgagtatgtggcaattaaacttgaacccatgaagagccgggctcctcagctccaccttgagtatcgcttttataagcaactgggttccggcgacggaattccacaggtgtactactttggtccttgcgggaaatacaacgcgatggtacttgagctcctgggtccgtccctggaagatcttttcgacctctgcgaccggaccttctccctgaagacagtgctgatgatcgcgatccaacttatttcaaggatggagtatgtccatagcaagaacctgatctatagggacgttaaacctgagaactttttgatcggacgcccaggcaataaaacccagcaggtgatccatattatcgatttcgggcttgccaaggaatacatcgaccccgaaactaaaaaacatattccttacagggagcataagagcctgaccggcacagctaggtatatgagcatcaacacacatctcgggaaggagcaaagtaggagggatgatctggaggctctcggccacatgtttatgtattttctgagaggctccttaccctggcagggcttgaaagccgataccctgaaagagcgttatcagaaaatcggcgacaccaaacgtgccacccccatcgaagtgctgtgcgaaaatttcccagagatggccacctatcttcgctacgtacgccgtctcgattttttcgaaaagccggattatgactacctgagaaagctgttcaccgatttgttcgaccgaaaagggtatatgtttgactatgaatacgattggatcggcaagcagctgcccactcctgtgggcgctgtgcagcaggatcccgcactttcttccaaccgcgaggctcatcagcacagagataaaatgcagcagagcaagaatcagagcgctgaccatagagccgcatgggactcacaacaggccaatccgcatcacctgagggcccatcttgcggccgataggcatggaggttctgtccaagtggttagcagcacaaacggcgagttgaatactgatgacccaaccgccgggaggagtaacgccccaataaccgcaccaacagaagtggaggtgatggacgaaacgaactgccaaaaggttttgaatatgtggtgttgctgctttttcaagcgtcgcaagcgcaagacgatacagagacataaatag

SEQ ID NO: 181766 - DNA, 1344 bp, synthetic construct
  misc_feature 1..1344: note = Description of Artificial Sequence: Synthetic coding sequence
  source 1..1344: mol_type = other DNA
atggagaacaagaagaaggacaaggacaagagcgacgaccggatggcccggccctcaggaagaagtgggcataatacccggggaaccggtagcagcagtagtggggtcctgatggtggggcccaactttagggtgggaaagaagataggctgcggtaattttggtgaactgagactggggaagaatttgtatacgaatgagtatgtggcaatcaaacttgaacctatgaaatcaagagcacctcagttgcacctggaatacagattctataaacagctgggatcgggcgacggaattccgcaagtgtactatttcggtccatgcggaaaatacaacgctatggttttggagttgctagggccaagtctggaggacctctttgatttgtgtgacagaactttctccctgaagactgtgcttatgatagccatacaattaatcagtcgaatggaatacgtgcactctaaaaacctgatatatcgggatgtgaaacctgaaaattttctcattggcaggcctggcaacaaaacccaacaggtcatccacataattgactttggactggcgaaagaatacatcgaccccgagaccaaaaagcacataccataccgggaacacaaaagtctcacaggtactgccagatacatgtccatcaacacacatctgggcaaggagcagtctcgccgggatgatctggaggcattaggtcacatgttcatgtatttcctgcggggatctctgccttggcaggggttaaaggctgacacactcaaggagaggtaccagaaaatcggggacactaaaagagccactccaatagaggtgctctgtgaaaactttcccgagatggctacttatctgcggtatgtgagacgcctcgatttttttgagaagccagactacgattatctacgaaagctcttcaccgacttgttcgacaggaagggctacatgtttgattatgagtatgactggatagggaagcagctccctacaccagtcggggcagtccagcaagatccagcactcagctctaatcgagaggcccatcagcaccgcgacaagatgcagcagagcaaaaatcagtctgccgaccatcgggctgcttgggatagtcagcaggccaatccacaccacttgagagctcaccttgccgccgataggcatggcgggtccgtccaagtggtgtccagtaccaatggtgaattaaatactgacgacccaactgccgggcgcagtaatgcaccgattacagcgcccacggaagtcgaggtgatggatgagacgaagtgctgctgtttttttaagcgcaggaaacgaaagaccattcaacggcataaatag

SEQ ID NO: 181767 - DNA, 1344 bp, synthetic construct
  misc_feature 1..1344: note = Description of Artificial Sequence: Synthetic coding sequence
  source 1..1344: mol_type = other DNA
atggagaacaagaagaaggacaaggacaagagcgacgaccggatggcccggccgtctggcagatcaggtcacaatactcgggggacaggaagcagctcctcaggtgtactcatggtaggccctaacttccgtgtcggtaaaaagatcggatgtgggaacttcggtgaacttcgtctgggaaagaacctctacactaatgagtatgtagcgataaagttggagcctatgaagagcagagctccacagctccacctcgaataccgattctataaacaactaggttctggcgacggtattcctcaggtttattactttggcccatgcggcaagtataatgccatggtgctcgagttgcttgggcccagcctggaagaccttttcgatctttgtgaccgcactttctctcttaaaactgtcctgatgatcgctatccaactgatatctcgcatggagtatgtgcactcaaagaacctaatatatagagacgtgaagcccgaaaactttcttatcggccgccccgggaataaaacccagcaagtgatccacattatagactttggccttgctaaggagtatatcgaccctgagacaaaaaaacacatcccgtatagggagcacaagtcactcacaggcactgctaggtacatgtccataaacacgcacctggggaaggagcagagcagacgagacgacctggaggcacttggacacatgtttatgtatttcctgcggggtagtctgccatggcaaggccttaaggccgataccttgaaagagcgatatcagaagatcggggacactaaaagagccacgccaattgaggttctgtgtgaaaattttcccgagatggctacatacctacgatatgtgagacgactggattttttcgagaagcccgattatgactatctgcgcaagttattcaccgatttgttcgaccgcaaaggctatatgttcgattacgagtacgactggatcggaaaacaactcccaacgcctgtaggagcggtacagcaagacccagctctgtcttcaaatcgggaggctcatcagcatcgtgataagatgcagcagagcaaaaatcaatcagccgaccatagggctgcctgggatagtcaacaagcaaatccccaccacctgcgggcccaccttgccgcagacaggcacggtggctcggtccaggtagtgagttccacaaacggcgaattaaacaccgacgatccaacggcgggtcggtccaatgcacccatcacggctccaactgaggtggaagtgatggacgagacaaaatgttgttgcttctttaagcggcgcaagcggaagactattcagcgacataaatag

SEQ ID NO: 181768 - DNA, 1368 bp, synthetic construct
  misc_feature 1..1368: note = Description of Artificial Sequence: Synthetic coding sequence
  source 1..1368: mol_type = other DNA
atggagaacaagaagaaggacaaggacaagagcgacgaccggatggcccggccatcagggcgatcaggtcataatacccggggcacaggctccagttcctcaggcgtactgatggtcggtccaaactttcgcgtgggcaagaagatcggctgtggcaatttcggagaattgcggctagggaagaatctgtacactaatgaatacgtagctattaagctcgagcctatgaaatctcgggccccgcagcttcacctggaatacagattttataagcagctcggcagcggcgacggaatcccgcaggtgtattattttggcccatgtggaaagtacaatgccatggtgcttgagctcctcggtccgtcactggaggatctttttgatctgtgtgacagaacattttccttgaaaaccgtccttatgattgcgattcagctaatctctcggatggagtacgtgcactccaagaacctgatataccgagacgtgaaaccagagaactttctcatcggcagacctggaaataaaacacagcaggtcattcacatcatagatttcggactggcaaaggaatacatcgacccggaaaccaaaaaacatattccctaccgggaacacaaaagcttgaccggaacagccaggtatatgtcaattaacacccatttgggcaaggagcagagtcggcgtgatgacctggaagcactgggacatatgtttatgtacttcctgcgcgggagcctaccgtggcagggcttgaaggctgacaccctgaaagagcgctaccagaagatcggcgacactaaacgggctaccccaatcgaagtcttgtgcgagaactttcctgagatggccacctatctgcggtatgttagacgtcttgatttctttgagaaaccggattatgattacttgaggaagctgttcactgacttgtttgataggaaaggatacatgttcgactacgagtatgattggataggcaaacagcttcccactccagtgggggccgtgcagcaggaccctgccctgtcatccaaccgggaggcacaccaacatcgagacaagatgcagcagagcaaaaatcagtctgcggaccatcgggccgcatgggactctcagcaggccaatcctcaccacctcagggcacacctagcagctgatcgccatggggggagcgtgcaggtggtctcctccactaatggagagctgaatactgatgatcctacagcaggtcggagtaatgcacccatcaccgccccaactgaggtggaagtgatggatgagaccaactgccaaaaggttctcaatatgtggtgctgctgcttttttaagaggcggaaacgcaagacaatacagcgccacaagtag

SEQ ID NO: 181769 - DNA, 1275 bp, synthetic construct
  misc_feature 1..1275: note = Description of Artificial Sequence: Synthetic coding sequence
  source 1..1275: mol_type = other DNA
atggagaacaagaagaaggacaaggacaagagcgacgaccggatggctaggccatcagggcgatccggccacaacacgcgaggaacaggtagtagcagcagcggtgttctcatggtagggccgaacttcagagtcggaaaaaagattggctgtggaaattttggggaacttcgtctcgggaagaatctgtacaccaacgaatatgtcgctattaaactggagccgatgaaatcacgcgctccgcaactgcatctggaatatcgcttctacaaacagctcgggtccggtgacggaatcccacaggtgtattatttcggaccgtgcggcaagtataacgcaatggttttagagctgctggggccaagtctggaagatcttttcgatctctgcgatcggactttcagcttgaagaccgttttaatgatcgccatccaacttattagccggatggaatacgtgcatagcaagaacctgatatatcgagatgtcaaacccgaaaattttctcataggcagaccgggcaataagacgcagcaggtgatccacataatcgactttggcctcgctaaggagtacatcgacccggagaccaaaaagcacattccttaccgcgagcacaaatccctgactggaaccgcaagatacatgtcgatcaatacccacctgggaaaggagcagtcacggagagacgaccttgaagcactagggcacatgttcatgtacttcctgaggggctcactgccgtggcaggggctcaaggcagacactctgaaggagcgataccaaaagattggtgacacaaagagagccacacccatcgaggtgttatgtgagaacttccccgaggaaatggccacgtacctgcggtacgttcgtcggctagacttcttcgagaaaccagactacgattatctccgaaagctgttcacagatctgttcgatcgaaaaggctacatgtttgattatgagtatgactggattggcaaacaactgcctacccccgtcggggctgtacaacaagatcccgctctgagctcgaacagagaggcccaccagcacagagacaagatgcagcagtcaaagaaccaggtcgttagctccactaacggggaactgaataccgatgatcctacggctgggagaagcaacgctcccatcacagcccctaccgaggtcgaagtcatggacgagacaaattgccagaaagtgctgaatatgtggtgctgctgctttttcaagaggcgtaagagaaagactatacagcggcacaaatag

SEQ ID NO: 181770 - DNA, 1272 bp, synthetic construct
  misc_feature 1..1272: note = Description of Artificial Sequence: Synthetic coding sequence
  source 1..1272: mol_type = other DNA
atggagaacaagaagaaggacaaggacaagagcgacgaccggatggctcggcccagtggccgttcaggtcacaatacccgaggcaccggtagctcgtcatccggggtgctgatggtaggtcccaatttcagagtaggtaagaagataggatgcggtaatttcggcgagctgagactgggcaaaaatctctatactaatgagtacgtggctataaaactggagcccatgaagagtagagccccacaactgcatctcgaatatcgattctacaagcagcttggttccggtgatggcataccgcaggtatattatttcggcccttgtgggaaatataacgctatggtgttagagctgctggggccttctctggaagatctcttcgatctttgcgacagaacattcagcctgaagactgtactaatgattgctatccagttgatttcacgtatggagtatgtgcacagcaaaaacctgatttaccgcgacgtaaagccagagaacttccttattggccgcccgggtaacaagacccagcaggttatccatataattgacttcgggctggccaaagagtacattgaccccgaaacaaaaaagcacatcccgtatcgcgagcataagagcttaactgggacggccagatacatgtcaatcaacactcatctgggcaaggagcagtctcgccgggatgacctagaggcactgggacacatgtttatgtacttcctgcgtggcagtcttccctggcagggcctgaaagctgatacactgaaggaaagatatcagaaaataggggatactaagcgggctactccgattgaggtcctctgcgaaaattttccagagatggcgacatatctccggtacgttcggaggctggacttctttgagaaacccgattatgactacctgagaaagctgttcacagacttgtttgacagaaaaggctatatgtttgattacgagtacgactggattgggaaacaactgccgaccccggttggggcagtgcaacaagaccctgcactgagctcaaatcgagaagcccatcagcacagggacaagatgcagcagtccaaaaatcaagtcgtttctagtacaaacggcgaactgaataccgacgaccccacagccggacggtccaatgcccctattaccgctcccacagaagtagaagtaatggacgaaactaattgtcagaaggtgctcaacatgtggtgctgttgcttttttaaaaggaggaagagaaagaccattcagcgccacaaatag

SEQ ID NO: 181771 - DNA, 648 bp, synthetic construct
  misc_feature 1..648: note = Description of Artificial Sequence: Synthetic coding sequence
  source 1..648: mol_type = other DNA
atgagcagcagcgaggaggtgagctggatcagctggttctgcggcctgcgggggaacgagtttttttgtgaagttgatgaggattacatccaggataaattcaacctgactgggctgaatgaacaggtgcctcactaccggcaagcacttgacatgattcttgacctggaacccgatgaagaattggaggacaaccccaaccagtctgacctgattgagcaggcagcagagatgctgtatggattgatccacgcccgatacatattgactaatcgaggtatcgcccagatgctcgaaaagtatcaacagggtgacttcggctactgcccccgggtgtactgcgagaaccagcccatgctgccgattggcctttcagacatacccggggaggcgatggtgaaactgtactgtcccaaatgtatggatgtctataccccaaaatcaagccggcatcatcacaccgacggcgcctactttggtaccgggtttccacacatgctcttcatggttcacccagaatatcgacctaaacggcctgccaatcagttcgttcctaggctgtatgggttcaaaatccatccgatggcttaccaactccaactgcaggcagctagtaatttcaagagccctgtgaaaacgatccgctag

SEQ ID NO: 181772 - DNA, 648 bp, synthetic construct
  misc_feature 1..648: note = Description of Artificial Sequence: Synthetic coding sequence
  source 1..648: mol_type = other DNA
atgagcagcagcgaggaggtgagctggatcagctggttctgcggcctgagaggtaatgagtttttctgtgaagtggacgaagactatatccaggataaattcaatttgacgggtttgaacgaacaggtgccacactatcgtcaggcgctggacatgattcttgatctcgaacccgatgaagagctcgaagataaccccaaccagtcggacctcatcgagcaggccgcggagatgctttatggcctgattcacgctcgatacatattaactaacagggggatcgctcagatgctggagaagtaccaacagggggatttcggttattgccctcgcgtttattgcgagaatcagccaatgcttccaattggcctgagtgatatccccggggaggctatggtgaaactgtactgtccaaagtgtatggacgtgtacacccccaaaagctcaagacaccaccatacagatggcgcgtattttgggactggttttccacatatgcttttcatggtacaccccgagtatcgaccgaagcggccagcaaaccagttcgtgcccaggttatacggtttcaagatccatccaatggcctaccaattgcagcttcaggctgcttcaaacttcaagtcacccgttaaaactatcagatag

SEQ ID NO: 181773 - DNA, 648 bp, synthetic construct
  misc_feature 1..648: note = Description of Artificial Sequence: Synthetic coding sequence
  source 1..648: mol_type = other DNA
atgagcagcagcgaggaggtgagctggatcagctggttctgcggcctgagaggaaatgagtttttttgtgaagtggacgaggactatattcaagacaagttcaacctgacaggcctgaacgaacaagttccccattataggcaggcccttgacatgatcctcgatctcgaacctgacgaagaattggaagataatccaaaccagtccgatctgatcgagcaggctgcggagatgttatatggcctgattcatgctcggtacatcctgacaaaccgcggaatcgctcagatgttggagaaataccagcagggagacttcggctactgtccccgggtttactgcgaaaaccagcccatgctgccaatcggcctaagcgacatccccggtgaagccatggttaaactgtactgtccaaaatgcatggacgtttacaccccaaagagttcacgccaccatcatacagacggagcctatttcgggacaggtttcccgcacatgctcttcatggtgcaccccgagtaccgacctaagaggcccgccaaccagttcgtaccgcggttgtatggctttaagattcatcctatggcataccaactacagctgcaggctgcctcaaactttaagtcaccagttaagactatccgctag

SEQ ID NO: 181774 - DNA, 648 bp, synthetic construct
  misc_feature 1..648: note = Description of Artificial Sequence: Synthetic coding sequence
  source 1..648: mol_type = other DNA
atgagcagcagcgaggaggtgagctggatcagctggttctgcggcctgcgagggaatgagttcttttgcgaggttgacgaggactacattcaggacaagttcaatctgacaggtctgaatgagcaggtaccccattacaggcaggccctggatatgattcttgaccttgagccagatgaggaactggaggacaatccaaaccagagcgatctgatcgaacaggccgctgagatgctgtacggtcttatccacgcacgatatattcttactaaccgcggcatcgcccagatgctggagaaataccagcagggagactttggctactgccctcgcgtgtattgtgagaaccaacccatgctacccattggactgtcagacattccaggagaggccatggttaagctgtactgtccaaaatgtatggacgtttacactcctaagagctcacgacaccatcacacagatggcgcttatttcggcactggctttccacatatgttattcatggtccacccagaatatcgacccaagaggcctgccaatcagttcgtcccaaggctatacggatttaaaattcaccccatggcttaccagttgcagctgcaagccgcttccaatttcaaaagtcctgtgaagacaatcagatag

SEQ ID NO: 181775 - DNA, 687 bp, synthetic construct
  misc_feature 1..687: note = Description of Artificial Sequence: Synthetic coding sequence
  source 1..687: mol_type = other DNA
atgagcagcagcgaggaggtgagctggatcagctggttctgcggcctgcggggaaatgagttcttctgcgaggtggacgaggattacatccaggataaatttaacctcacagggctaaacgagcaggtgccccactatcgccaggctctggacatgattctagaccttgaacccgatgaggagttagaggacaatccgaatcagagcgacctaatagaacaggccgcagagatgttatatggtcttatccacgcgaggtatatacttacgaacagagggatagcacagatgctggagaagtatcagcagggcgactttggctattgtcctagagtgtactgtgagaatcagcccatgctgcccatcggactgtcggatatccctggtgaggctatggtcaaactctattgccctaagtgtatggacgtgtatacacctaagtcctcccgccaccaccatacagacggtgcttattttggaacaggttttccgcatatgctgttcatggttcacccagagtatcgccctaagaggcccgcgaaccagttcgtcccaagcagttgttcccgtcatcccgatgtccccttattgcccaggcggcgacccttttgcaggatgcattttcggctgcgcgaggtgtatcatcagcaactgattccagtccacggggatcatcacttgctctag

SEQ ID NO: 181776 - DNA, 648 bp, synthetic construct
  misc_feature 1..648: note = Description of Artificial Sequence: Synthetic coding sequence
  source 1..648: mol_type = other DNA
atgagcagcagcgaggaggtgagctggatcagctggttctgcggcctacggggtaatgaatttttttgcgaggtcgacgaggattacattcaggacaagttcaacctaactggactcaatgagcaggtgccacactaccgacaggcactggatatgatcctggatctggaaccagacgaggaacttgaggacaaccctaaccagagcgaccttatcgaacaagccgctgaaatgctgtacggcctgattcatgcacggtatatcctcacaaaccggggaatagctcagatgctggaaaagtatcagcaaggcgacttcggatactgcccccgtgtgtactgcgagaaccaacccatgctccccattgggctgtctgacatccctggagaggctatggtaaagttgtactgccctaaatgcatggacgtctacacacctaaatcatctcgtcaccaccacaccgacggagcttacttcggcacgggcttccctcacatgctttttatggtgcacccagagtatcggcctaagcgcccagccaatcagtttgtgcccaggttgtatggttttaagattcaccctatggcttaccagctgcagctgcaggctgccagcaattttaaaagcccagtgaagaccatccggtag

SEQ ID NO: 181777 - DNA, 648 bp, synthetic construct
  misc_feature 1..648: note = Description of Artificial Sequence: Synthetic coding sequence
  source 1..648: mol_type = other DNA
atgagcagcagcgaggaggtgagctggatcagctggttctgcggcctgagagggaacgagttcttttgtgaagtcgacgaagactatattcaggacaaatttaaccttaccggcctcaatgagcaggtcccccactatcgacaagcactcgatatgattctggaccttgagccagacgaggaactggaggacaatcccaaccagtctgaccttatcgagcaagccgctgagatgctgtacggcttgatacatgctcgttatatcctgacgaacaggggcattgcccagatgctggagaaataccaacagggagatttcgggtactgcccgcgcgtatattgtgaaaaccagccaatgctgccaatcggcctgtccgacatacccggggaggcaatggtgaaactttattgcccaaagtgtatggacgtctatacacctaagtcaagcagacatcaccatacagatggtgcctattttgggactgggttcccccacatgctgttcatggtgcatcctgagtaccgccccaagcgtcctgccaatcagttcgtcccacggctatacgggtttaagatccaccccatggcttatcagctgcagctgcaggccgcatccaattttaagagccctgtgaagaccatccggtag

SEQ ID NO: 181778 - DNA, 705 bp, synthetic construct
  misc_feature 1..705: note = Description of Artificial Sequence: Synthetic coding sequence
  source 1..705: mol_type = other DNA
atggagaagtgcaagggcaccagccggatggccggcaccaccagcgctgatgtaaaaatgtcctcctccgaggaggtgagctggatttcctggttctgtggactgagagggaacgagtttttttgtgaagtagatgaagactatattcaagacaaattcaatctgaccggtctcaacgagcaggtaccacactacagacaagctctcgacatgattcttgacctggagcccgacgaggaattagaagacaacccaaaccaatctgaccttatcgagcaggccgccgaaatgctgtatggccttatccatgctagatacattctcaccaaccgcggcatcgctcagatgttggaaaagtaccaacaaggagacttcgggtattgcccgcgagtgtactgcgaaaaccaaccaatgcttccaattgggttatcagacattcctggcgaggccatggtcaagctctattgtccaaaatgtatggacgtctatactccaaagtcctcaagacatcatcacactgatggagcatattttggtaccgggttccctcacatgctcttcatggttcatcccgaatatcgcccaaaaagaccagccaatcagtttgtgccacggctttacgggtttaagatacatcctatggcctatcaattgcagctccaggccgcctctaacttcaaatcacccgtgaagacaattcgctag

SEQ ID NO: 181779 - DNA, 648 bp, synthetic construct
  misc_feature 1..648: note = Description of Artificial Sequence: Synthetic coding sequence
  source 1..648: mol_type = other DNA
atgagcagcagcgaggaggtgagctggatcagctggttctgcggcctacggggaaacgaattcttttgtgaagttgacgaagattatatccaggacaagttcaatctaactggtctgaatgaacaggtcccccattatagacaggccctagacatgatactggacttggagccagacgaggagctcgaggataatccaaaccagagcgatctgatagaacaggcagccgaaatgttgtacggacttatacacgctcgttacatcctgaccaatcgcgggattgcccagatgctggagaagtaccagcaaggtgattttggctactgtccccgagtgtattgtgagaaccaacccatgcttcccattggcctttctgatatcccaggcgaggctatggtgaagttgtattgccctaaatgcatggatgtctatacacccaaatcctctagacaccaccatacagatggagcctatttcgggacagggttcccgcacatgctgtttatggtccaccctgaatatcggcccaagcgccccgctaatcagtttgtgccaagattatacggattcaaaatccaccccatggcctaccagttacagctgcaggcagcttctaacttcaaatcccccgtcaagactattcggtag

SEQ ID NO: 181780 - DNA, 687 bp, synthetic construct
  misc_feature 1..687: note = Description of Artificial Sequence: Synthetic coding sequence
  source 1..687: mol_type = other DNA
atgagcagcagcgaggaggtgagctggatcagctggttctgcggcctgaggggcaacgaattcttttgtgaggttgatgaagactatatccaagataagttcaatctgacaggactcaacgagcaggtccctcactaccgacaggctctggatatgatcctggacctggaaccagacgaggaactggaagataaccctaaccagtccgacctcatcgaacaagcagccgaaatgctgtacggcctgattcatgctcggtacatcctcactaacaggggtatagcgcagatgctggagaagtaccagcaaggtgacttcggatattgcccgcgtgtatactgtgagaaccagcctatgttaccaattggtctatcagatattccaggcgaagctatggttaagctgtactgtcccaagtgtatggacgtctacacccctaaatcttcccgccaccatcacactgatggtgcctacttcggtacaggatttcctcacatgttgtttatggtccacccagagtaccgccccaagcgacccgccaatcagtttgtgccctcatcgtgtagtcgccatccggacgtgcccttattgcctcgaagacgccccttctgtcgcatgcactttaggctccgtgaggtctaccatcagcagctcattcccgtacatggcgaccaccatctgctgtag

SEQ ID NO: 181781 - DNA, 687 bp, synthetic construct
  misc_feature 1..687: note = Description of Artificial Sequence: Synthetic coding sequence
  source 1..687: mol_type = other DNA
atgagcagcagcgaggaggtgagctggatcagctggttctgcggcctgagaggcaatgagtttttctgtgaggtggatgaagattatattcaggataagttcaacttgaccggcctcaacgaacaagttcctcactaccgccaagcattagatatgatcctggacttagagccagacgaggagcttgaagataatcccaaccagtctgacctcatagaacaggccgcggaaatgctgtatggcctgatacacgctcgctacattctaactaatcgtggtatcgctcagatgttagaaaaatatcagcaaggcgacttcggatactgcccgagagtgtattgtgaaaatcagcccatgttgcccataggtttaagcgatatccccggtgaggccatggttaaactgtattgtccgaagtgtatggacgtgtatacccccaagtcttccagacatcaccataccgacggtgcatatttcggcacgggctttccacacatgctgtttatggtacatccggaataccggcctaaacgaccggccaatcagttcgtccccagctcgtgtagccgccaccctgacgtgcctcttctgcctcggcggcgccccttctgccggatgcacttcaggttacgtgaggtctatcaccaacagctgattccagtgcatggggaccaccacctcctatag

SEQ ID NO: 181782 - DNA, 648 bp, synthetic construct
  misc_feature 1..648: note = Description of Artificial Sequence: Synthetic coding sequence
  source 1..648: mol_type = other DNA
atgagcagcagcgaggaggtgagctggatcagctggttctgcggcttgaggggtaacgagttcttttgtgaagtagatgaagattacatacaggacaagttcaatctcacaggcttaaacgaacaggtcccacattaccgccaagctctggatatgattctggacctggaaccagatgaagaactcgaggacaaccccaaccagtccgatcttatcgagcaggctgctgaaatgttgtacggtttaatccacgcccgttatatcctgacgaatcgtggcatcgcgcagatgctggagaaataccagcagggcgacttcggctattgcccccgcgtttattgcgagaaccagcccatgctgcctatcggactgagtgatatcccaggcgaggcgatggtaaagctgtactgccctaagtgtatggatgtctacaccccaaagtcctcaaggcaccatcatactgacggcgcctactttggaactggatttcctcacatgctgtttatggtgcatcctgagtacaggccaaaacggccagctaaccagttcgtccctcgcctgtacggcttcaagatccacccaatggcctaccagctgcagctccaggctgcaagcaactttaagtcccccgtgaaaaccataagatag

SEQ ID NO: 181783 - DNA, 705 bp, synthetic construct
  misc_feature 1..705: note = Description of Artificial Sequence: Synthetic coding sequence
  source 1..705: mol_type = other DNA
atggagaagtgcaagggcaccagccggatggccggcaccaccagcgccgacgtgaagatgtcgtccagcgaagaagtcagttggatttcctggttctgcgggctgcgcggtaatgagtttttttgcgaggttgacgaagattatatccaagacaagttcaacttaactgggttgaacgagcaagtgccacattaccgtcaagctttggacatgattctggacctggaacccgacgaagagctggaagataacccgaatcagtcagacttgatcgagcaggccgctgaaatgctgtacggccttatccatgcgcggtacatcctaaccaacagggggattgcccagatgctggagaaataccagcaaggagatttcggttactgcccccgtgtgtactgtgagaaccagcctatgttacccattggattatcagatattcctggcgaggcgatggtgaagctgtactgcccaaaatgcatggacgtgtatacgcctaaatccagtaggcaccatcatacggacggcgcatattttgggacggggttccctcatatgctgtttatggtccatcccgagtatcggccaaagcggcctgcgaaccagttcgttccccgcctgtatggatttaaaatacaccctatggcatatcagctgcagctgcaggcggcttcaaactttaagtcgcctgttaagacgatcagatag

SEQ ID NO: 181784 - DNA, 648 bp, synthetic construct
  misc_feature 1..648: note = Description of Artificial Sequence: Synthetic coding sequence
  source 1..648: mol_type = other DNA
atgagcagcagcgaggaggtgagctggatcagctggttctgcggcctgagaggcaacgaattcttctgtgaggtcgacgaggactatatccaggataaattcaatctcacggggttgaacgagcaggtgcctcactaccgccaagcgctggacatgattctggatctggagcctgatgaggagcttgaagataacccgaatcagagcgatttgatcgaacaggccgctgaaatgctgtacgggctgatacatgctagatacatcttgaccaacaggggtattgcccaaatgcttgagaagtaccaacaaggggactttggttactgcccccgggtatattgcgaaaaccagccaatgctacccattggcttgagcgacatccctggcgaggccatggttaaactttactgtcccaagtgcatggatgtttacacacccaaatcttcgagacatcaccacactgatggggcttacttcggtaccgggtttccccacatgctgttcatggtgcacccagagtaccgcccaaaaaggcccgcgaatcagtttgtccctcggttgtatgggttcaagattcatccaatggcttaccagctgcaactgcaggccgcctctaacttcaaatccccggtgaaaacaatacgctag

SEQ ID NO: 181785 - DNA, 705 bp, synthetic construct
  misc_feature 1..705: note = Description of Artificial Sequence: Synthetic coding sequence
  source 1..705: mol_type = other DNA
atggagaagtgcaagggcaccagccggatggccggcaccaccagcgcagatgtgaaaatgtcctcttcggaagaagtgtcatggatcagttggttttgtgggttgagagggaacgagttcttctgcgaggtggacgaggattacattcaggacaaatttaatctaactggcctcaacgagcaagtgcctcattacaggcaggctctcgatatgatcttagacctagagcctgatgaagaacttgaagacaatcccaatcagtctgatctgatcgagcaggccgcggaaatgttgtacgggctcatccatgcacgttatattctaactaacaggggcatcgctcagatgttagagaagtaccaacaaggtgactttggttattgcccgagagtgtactgtgaaaatcagcctatgctgcctatcggactgagtgacattcccggagaggcaatggtgaaactgtactgccccaaatgtatggacgtctacaccccaaaatccagcaggcatcatcacacagacggggcttacttcgggacggggtttccacacatgctgtttatggtccatcccgaatataggccaaagcgtccagccaaccagttcgtaccccgactctatggatttaaaatccatccgatggcttaccaactgcagctgcaggccgcgagcaattttaaatcccctgtgaaaacaattaggtag

SEQ ID NO: 181786 - DNA, 705 bp, synthetic construct
  misc_feature 1..705: note = Description of Artificial Sequence: Synthetic coding sequence
  source 1..705: mol_type = other DNA
atggagaagtgcaagggcaccagccggatggccggcaccaccagcgctgacgtcaaaatgagttcgtccgaggaggtttcatggatctcttggttttgtggtctcagaggcaatgagtttttttgcgaggtggatgaagattatatccaggacaaatttaacctaacgggacttaacgaacaagtgccacattataggcaggccctcgacatgatcctggatcttgagcctgacgaagaacttgaggacaaccccaaccagtccgacctgatcgagcaggctgcagaaatgctgtatggtctgattcatgctcggtacatcttgaccaatcgcgggatcgctcagatgctcgaaaagtaccagcaaggcgattttggctactgtcctcgcgtgtactgcgagaatcagcctatgctgcccattggtctctccgatatcccgggcgaggccatggtcaaattgtactgtccaaaatgcatggacgtgtacactcccaaatcttcaaggcatcatcacacagatggcgcgtacttcgggaccgggtttccacatatgctattcatggtgcaccctgagtacaggcctaaaagacctgcaaaccagtttgttccgcgtctgtacgggttcaagattcatcccatggcttatcagctgcagctgcaggctgcatcgaacttcaagagccctgtaaaaacaatccgatag

SEQ ID NO: 181787 - DNA, 648 bp, synthetic construct
  misc_feature 1..648: note = Description of Artificial Sequence: Synthetic coding sequence
  source 1..648: mol_type = other DNA
atgagcagcagcgaggaggtgagctggatcagctggttctgcggcctgcgcggcaatgaattcttttgcgaggtggacgaagactatatccaggacaagttcaacctgaccggacttaatgagcaggtgcctcattacagacaggccttggatatgatccttgacctggaacccgacgaagaacttgaggacaaccccaaccaatccgacttgattgaacaagcagctgaaatgttgtacggtctaatccatgctcgttacattctcaccaatcgcggtatcgcccaaatgctggaaaaataccagcaaggtgatttcggctattgccctcgggtgtactgtgaaaaccagccaatgttgcctatagggctttccgacataccaggagaggcgatggtaaaactgtattgtcccaaatgtatggatgtttacacaccaaagtcttcaagacatcaccacacagacggagcatatttcgggactgggttccctcacatgctttttatggtacatccagagtataggcctaaacgacctgccaaccagtttgttcctaggctatatggcttcaagattcatcctatggcctaccagctgcagcttcaagctgctagcaactttaaatcgccggtcaaaactatcagatag

SEQ ID NO: 181788 - DNA, 648 bp, synthetic construct
  misc_feature 1..648: note = Description of Artificial Sequence: Synthetic coding sequence
  source 1..648: mol_type = other DNA
atgagcagcagcgaggaggtgagctggatcagctggttctgcggcctgagagggaacgagttcttttgcgaggtcgatgaagattatatccaggacaagtttaacctcactgggctgaatgaacaggtaccccactaccggcaggccttagacatgatccttgatctcgagccagacgaggagctggaggataaccccaaccaaagtgatcttatcgagcaggcggccgaaatgctgtatgggttaattcatgctaggtatattctgaccaataggggaattgcccagatgctggagaagtaccagcagggggacttcggatactgtccacgggtttactgtgagaaccaacctatgctccctatcgggcttagtgacatccctggagaagccatggtcaagctctactgcccaaagtgcatggacgtctatacacctaaaagttctcggcatcatcataccgatggagcatacttcggtacagggttcccacatatgctgttcatggtgcatcctgagtataggcctaaacgacctgctaaccaatttgttccacgactctacgggttcaagatacatcctatggcttaccagttacagttgcaagccgccagcaactttaagtcccccgttaaaaccataaggtag

SEQ ID NO: 181789 - DNA, 705 bp, synthetic construct
  misc_feature 1..705: note = Description of Artificial Sequence: Synthetic coding sequence
  source 1..705: mol_type = other DNA
atggagaagtgcaagggcaccagccggatggccggcaccaccagcgccgacgtaaagatgtcatcctccgaggaggtaagctggatatcctggttctgtggacttagaggaaatgagttcttctgtgaagtggatgaagactatatacaagacaaatttaacctgacaggactcaacgagcaggtgcctcattatcgccaggcactggatatgatcctggaccttgaaccagacgaggagcttgaagacaaccccaaccaatcggatcttatcgagcaggctgccgagatgctctatggactgatccacgcacgctatatcctcaccaatcgtggaatcgcacagatgcttgaaaagtatcagcaaggggactttggatactgcccgcgtgtgtactgtgaaaaccaacctatgctgcctatcggcctatccgacatacccggggaagctatggtgaagctgtattgtcctaagtgtatggatgtatatactcctaagtcttcacgccatcatcacactgacggcgcctacttcggcaccggattccctcacatgctcttcatggttcatccagagtatcggcccaagaggcctgcaaaccagtttgtcccacgcttgtatgggttcaagatacatccgatggcataccagctgcagcttcaggccgcaagtaactttaagtccccggttaagacgatccggtag

SEQ ID NO: 181790 - DNA, 648 bp, synthetic construct
  misc_feature 1..648: note = Description of Artificial Sequence: Synthetic coding sequence
  source 1..648: mol_type = other DNA
atgagcagcagcgaggaggtgagctggatcagctggttctgcggcctgagagggaacgagtttttttgcgaagtggatgaggattacattcaggacaagttcaatctgacaggcctcaacgagcaagtgccccattatcgccaggcacttgatatgatcttagatcttgagcccgatgaggagctcgaggacaatccaaaccaaagcgatttaatcgaacaggccgcagagatgttgtacgggctcatacacgcccgctatatccttacaaatcgcggcattgcccagatgttggagaagtatcagcagggtgatttcgggtactgcccccgggtgtactgcgaaaaccaaccaatgctgccgattggactgtcagatattcctggggaagccatggtgaaactatattgcccaaaatgcatggacgtatacacacctaaaagcagtcgacaccaccacactgacggggcgtactttggaactgggttccctcacatgctatttatggtccacccagagtaccgcccgaagagaccagcgaatcaattcgtgcctcgcctctacgggttcaagattcaccctatggcgtatcagctgcagctgcaagcagcctcgaactttaaatcccccgtgaaaacgattcggtag

SEQ ID NO: 181791 - DNA, 687 bp, synthetic construct
  misc_feature 1..687: note = Description of Artificial Sequence: Synthetic coding sequence
  source 1..687: mol_type = other DNA
atgagcagcagcgaggaggtgagctggatcagctggttctgcggcttgagggggaatgagtttttttgcgaggtggacgaagattacatccaagataagttcaacctgacgggcctcaatgagcaggttcctcattatcggcaggcccttgatatgatactcgatctagagccggacgaggaactggaagacaatcctaaccaaagtgatctaatcgagcaggctgcagaaatgctatatggactgatccacgccagatacatactgaccaatcgcggcatagcacagatgctcgagaaataccaacagggtgacttcggatattgtccaagggtgtattgtgaaaaccagccaatgcttcctataggactaagcgatatacctggagaggcaatggtgaagctctactgtccaaaatgcatggatgtctatacaccaaagagtagtcgtcaccaccatacggacggagcgtatttcggcaccggcttccctcacatgttattcatggtgcatcccgagtaccggccgaagcgtcccgccaatcagttcgtaccgagcagctgcagccggcatcctgatgtaccactgttgccaagaaggaggcccttctgcaggatgcacttcaggctcagagaagtgtaccaccaacaactgattcctgtgcatggggaccaccacctactgtag

SEQ ID NO: 181792 - DNA, 705 bp, synthetic construct
  misc_feature 1..705: note = Description of Artificial Sequence: Synthetic coding sequence
  source 1..705: mol_type = other DNA
atggagaagtgcaagggcaccagccggatggccggcaccaccagcgcggacgtcaaaatgagttcttcagaagaggtttcctggattagctggttttgcggcttaaggggtaacgaatttttctgtgaagtggacgaggattacatccaggacaaattcaacctcaccggattgaacgagcaggttcctcactacagacaggcactggatatgatcctggatctcgagccagacgaggaacttgaagataatccaaatcagtcggacctgatcgagcaggcggctgaaatgctgtacggcctgattcacgctcgatatatactcacaaatagaggaattgctcagatgctggaaaagtatcagcagggggactttggctattgtccccgagtgtattgtgaaaatcaaccaatgctgcctattggtctctcggatattccaggagaggctatggtcaagctgtactgtcctaaatgcatggatgtctataccccaaaaagcagtcggcaccatcacaccgatggtgcgtatttcggaaccggcttcccgcacatgcttttcatggtacaccccgagtaccggccaaagcgacctgctaaccagtttgtgccaaggttgtatggatttaaaattcatcccatggcgtaccagttgcaacttcaagctgcttctaacttcaagtctcctgttaagaccatacgttag

SEQ ID NO: 181793 - DNA, 648 bp, synthetic construct
  misc_feature 1..648: note = Description of Artificial Sequence: Synthetic coding sequence
  source 1..648: mol_type = other DNA
atgagcagcagcgaggaggtgagctggatcagctggttctgcggccttagaggcaacgaattcttctgtgaggttgatgaagattatatacaggacaagttcaacctgacaggcttaaatgagcaggttccccactatcgacaggcactcgatatgatactcgaccttgaaccagacgaagaactggaagacaatcccaaccagtcagatttgatcgaacaggcagctgaaatgttgtatgggctgattcacgcacgctacatattgaccaatcgaggaatcgcacagatgctcgaaaagtatcaacagggggactttggctactgtcctagagtgtactgtgagaaccagcctatgctacccatcggcctaagtgacatccccggtgaggccatggtcaagctgtactgccctaaatgtatggatgtgtacacaccaaagagctctagacaccatcacacagacggagcctacttcggtaccgggttccctcacatgctgttcatggtgcaccccgagtatcggccaaaacgcccagccaatcaattcgtccccagactttatggcttcaagattcaccccatggcctatcagcttcagctgcaagccgctagtaatttcaaaagccccgtgaaaactatcaggtag

SEQ ID NO: 181794 - DNA, 648 bp, synthetic construct
  misc_feature 1..648: note = Description of Artificial Sequence: Synthetic coding sequence
  source 1..648: mol_type = other DNA
atgagcagcagcgaggaggtgagctggatcagctggttctgcggcctcagaggtaacgaattcttttgcgaagtagatgaggactacatccaagacaaattcaacctgacaggattaaacgagcaggtgcctcattaccgccaagcgttagacatgatacttgatttagagcccgatgaagaactagaggataatccaaaccagagcgacctcatcgagcaggccgcagagatgctttacgggctgattcacgctcggtacatactcacaaataggggcatagctcagatgctcgagaaatatcagcagggagattttggatactgccctagggtgtactgtgagaatcagcccatgctgcccatcggactgagcgacatcccaggggaggccatggtgaagctgtactgccctaagtgcatggacgtctacacccccaagagtagtaggcatcatcacaccgatggagcctactttgggactggttttccccacatgctgtttatggtgcacccagagtaccgaccaaagcgacccgccaatcagttcgtcccaagactctatggtttcaagatccatcccatggcttatcagctgcaattgcaggcagcttccaactttaagtcacctgtgaaaacaatcaggtag

SEQ ID NO: 181795 - DNA, 648 bp, synthetic construct
  misc_feature 1..648: note = Description of Artificial Sequence: Synthetic coding sequence
  source 1..648: mol_type = other DNA
atgagcagcagcgaggaggtgagctggatcagctggttctgcggcttacggggaaatgaatttttttgtgaggtggacgaagattatattcaggataagttcaatttaacaggcctgaacgaacaggtgcctcattacagacaggcattggatatgattctggatctcgagccagatgaggagctggaagataatccaaaccaaagcgacctaatcgaacaggctgctgaaatgctgtatgggctgatccacgcacgctacatcctaaccaacaggggcatcgcacaaatgctggaaaagtaccagcaaggggactttggctactgtccaagggtttattgtgagaatcaacccatgctccctattggactctcggacatcccaggtgaagccatggtcaaactgtattgtcccaagtgcatggacgtctacacgccaaagagtagtcggcaccatcacactgacggggcatactttgggactggttttccccacatgctctttatggtccatccagaatatagacctaagcgcccggccaatcagttcgttccaaggctgtacggattcaaaattcacccaatggcttatcagctccagctccaggccgcctccaatttcaaatcacccgtcaagaccatcaggtag

SEQ ID NO: 181796 - DNA, 648 bp, synthetic construct
  misc_feature 1..648: note = Description of Artificial Sequence: Synthetic coding sequence
  source 1..648: mol_type = other DNA
atgagcagcagcgaggaggtgagctggatcagctggttctgcggcctacgaggcaatgagttcttttgcgaggtggacgaagactacatccaggataaattcaacctgaccggcctgaatgagcaggtgccccattacagacaggctctggatatgatactggatctggagcctgatgaagaactggaagacaatcctaaccaatctgacctgatcgaacaggccgcagagatgctgtatggcctgatccatgcacgatacattctcactaaccgaggcatcgcacagatgctcgagaagtatcaacagggagacttcgggtattgtcctcgggtttactgtgaaaatcagccaatgttgcctattgggctatcagatatccctggcgaagctatggtcaagctatactgtccaaaatgcatggacgtctatacacccaaatcgtcccgacatcaccacaccgatggtgcgtacttcggcaccggtttcccccacatgctgtttatggtacatccggagtaccgcccaaagcgcccagcaaatcagtttgtgccacggctttacggctttaagatacaccccatggcatatcaattgcaactgcaggctgctagcaattttaagtctccagtgaagacgatcaggtag

SEQ ID NO: 181797 - DNA, 648 bp, synthetic construct
  misc_feature 1..648: note = Description of Artificial Sequence: Synthetic coding sequence
  source 1..648: mol_type = other DNA
atgagcagcagcgaggaggtgagctggatcagctggttctgcggcctgcggggaaatgaattcttttgtgaagtggacgaagattatattcaggataagttcaatctgaccggattgaatgaacaggtgccacactaccgccaggcactcgatatgattctcgacttggagcctgatgaagaactggaggataaccccaatcaaagtgacctgatagagcaggcagccgagatgctgtacggacttattcatgctagatatatcttgactaaccgggggattgcccagatgctggaaaagtatcagcagggtgattttggctactgcccccgagtttattgtgagaaccagcccatgctgcccatcggtctttcggatatcccgggggaagcaatggtgaagttatactgtccaaagtgtatggatgtgtacaccccaaagtcctcccgacaccaccacacagacggggcttattttggcactggtttcccccacatgctgttcatggtacatcccgagtataggcctaaacgcccggctaatcagttcgtgccgagattgtatggctttaaaatccatccaatggcatatcagcttcagctgcaggccgcaagcaatttcaagagccctgtgaagaccataagatag

SEQ ID NO: 181798 - DNA, 648 bp, synthetic construct
  misc_feature 1..648: note = Description of Artificial Sequence: Synthetic coding sequence
  source 1..648: mol_type = other DNA
atgagcagcagcgaggaggtgagctggatcagctggttctgcggcctgcgtggcaacgagttcttttgtgaagtggatgaggattacatccaggacaagttcaatctgacagggttgaacgagcaagtgcctcactatcgccaggctcttgacatgattctcgatttggagcccgacgaggagttggaggacaatcccaatcagagcgatctgatcgagcaggccgccgagatgttatatggactgatacatgccagatacatcctgactaacaggggcattgcgcagatgctcgaaaagtaccagcaaggggactttggttattgtcccagggtttattgcgagaaccaaccaatgctgccgatcggcttatcggatattcccggtgaggcaatggtcaagctgtactgtcctaaatgtatggacgtctatactcccaaatcgagccgtcaccaccacacggacggcgcctattttggaaccggttttcctcatatgctttttatggtgcaccctgagtatcggcctaaaaggcctgcgaatcaattcgttcccaggctctatggtttcaaaatacatcccatggcttatcagcttcaacttcaggcggcttcaaactttaaatcgcccgttaagaccattaggtag

SEQ ID NO: 181799 - DNA, 648 bp, synthetic construct
  misc_feature 1..648: note = Description of Artificial Sequence: Synthetic coding sequence
  source 1..648: mol_type = other DNA
atgagcagcagcgaggaggtgagctggatcagctggttctgcggcttaagagggaatgaattcttttgcgaggttgacgaggactatatccaagacaagtttaaccttaccggtctgaacgagcaagttcctcattataggcaagctctggatatgatcctcgatctcgaaccagatgaggaactggaagataatccaaaccaatccgatcttattgagcaggcggccgaaatgttatacggtctcatacatgcccgatatatcctgacgaatagagggatagcccagatgctggaaaagtatcaacagggcgactttggctactgcccaagggtgtattgtgagaatcaacctatgctgcccattggactgtctgacatcccaggggaagccatggttaaactatactgccctaagtgtatggacgtatacacccctaagtcctctcgacatcaccataccgacggtgcttattttggtaccggatttccccacatgctgttcatggtccatcctgagtacagaccgaagcgccccgccaatcagtttgtcccaagattatatgggtttaagattcaccccatggcataccaactgcagctgcaggcagccagcaatttcaaaagcccagtaaaaacgattaggtag

SEQ ID NO: 181800 - DNA, 648 bp, synthetic construct
  misc_feature 1..648: note = Description of Artificial Sequence: Synthetic coding sequence
  source 1..648: mol_type = other DNA
atgagcagcagcgaggaggtgagctggatcagctggttctgcggcctcagaggcaacgaattcttctgtgaggttgacgaggattacatccaagataagttcaatctcaccggactcaacgagcaggttccacactatcggcaggcgctggatatgatccttgacctggaaccagacgaggaattggaagataaccctaaccagtcggaccttattgagcaggccgctgagatgctctatggcctaatccatgctaggtacatattaactaatagaggcatcgcccagatgcttgagaagtatcagcagggggatttcggatattgcccacgggtttactgtgagaatcagcccatgctaccaattggattgtctgacatccctggcgaggctatggttaagttgtattgtcccaagtgtatggacgtctatactcctaaatcgtcccgtcatcaccataccgatggcgcgtatttcgggaccggctttccccacatgctgttcatggtgcacccggaatatagacctaagagacccgcaaatcagtttgtcccacgactgtacggattcaaaatacaccccatggcctaccagctccaattgcaagcagctagtaactttaaatcccccgtgaagacaatcagatag

SEQ ID NO: 181801 - DNA, 648 bp, synthetic construct
  misc_feature 1..648: note = Description of Artificial Sequence: Synthetic coding sequence
  source 1..648: mol_type = other DNA
atgagcagcagcgaggaggtgagctggatcagctggttctgcggcctcagaggcaacgaattcttttgtgaggttgatgaggattatattcaagacaagttcaatttgacagggctgaacgagcaagtcccgcactatcgtcaagcgctggatatgattctcgaccttgaacctgacgaagaactggaggacaatccaaaccagagtgacttgatcgaacaggcagctgaaatgctgtacgggctgatacatgccaggtacatcttaacaaaccgaggcattgcacagatgctcgagaagtaccagcagggcgacttcggctattgtcctagggtttactgcgagaaccagcccatgttgcctatcggcctgagcgatatacccggcgaagcaatggtgaagctgtactgccctaaatgcatggacgtttatacgcccaaaagctctcgacaccaccataccgacggcgcatacttcggcaccggatttcctcacatgttgtttatggtccaccccgaatacaggcccaaaaggcccgccaatcagttcgtgcctagactatacgggttcaagattcatccgatggcctaccagctgcagctgcaggccgctagcaacttcaagagccccgtcaaaactatcagatag

SEQ ID NO: 181802 - DNA, 4296 bp, synthetic construct
  misc_feature 1..4296: note = Description of Artificial Sequence: Synthetic coding sequence
  source 1..4296: mol_type = other DNA
atgggcaaggagcaggagctggtgcaggccgtgaaggccgaggacgtcggaaccgctcagcggctccttcagcggcccagacctggcaaggccaaactactggggtctactaagaaaatcaatgtgaacttccaagacccggatggtttcagcgcactgcatcacgcagccctcaatggaaacacggaacttatatccttattactggaagcgcaggctgcagtagatattaaggataacaagggaatgagacctctgcactatgccgcatggcaggggagaaaagagcccatgaagctggtgttaaaggcaggatctgccgtcaacattccgagcgacgagggtcacattccactgcacctggcagcgcagcacgggcactatgacgtcagtgaaatgctactccagcatcaatccaacccttgcatggtcgataacagtggaaagactccgctagatctggcttgtgaatttggaagagtgggcgtggttcagcttctcctgagttccaacatgtgcgcagctctgttggaacctcgccctggcgacgccacagaccctaatgggacatctccgttgcatctcgccgccaaaaacggccatatcgatatcatccgcctccttctgcaggccggaatcgacattaaccgccagacaaagagtgggaccgcactgcatgaagctgccctttgtggcaagacggaggtggtaagactgctactggactctggcatcaacgcgcatgtgagaaatacttatagtcagacggcacttgacatcgtgcaccagttcactaccagtcaggcatctagagaaatcaagcagctccttagggaagccagcgcagccctccaggttcgcgccacgaaagattattgcaataattatgacctcacttccctgaatgtgaaagccggcgatattatcacagttttggagcaacaccccgacggaaggtggaagggctgtattcatgataaccgaacgggaaacgacagggttggctatttcccctcatcactcggcgaagctatcgtcaaacgagccggatctcgcgccggaacagaacctagtctgccgcagggctcaagtagttccggacccagcgccccccccgaagaaatctgggtactgcggaagccattcgccggcggcgacagatctggctcgattagtggaatggccggcgggagaggtagcggcggccacgccctacacgctggctctgaaggagtaaagctgttagcaacagtcctttcccagaagtccgtctctgagtccggcccaggcgattctcccgccaaaccacccgagggttccgcaggggtggctcgctcccagcctcctgtggcgcatgcaggacaagtttatggagaacagccaccaaaaaaactggaaccagcctcagaaggaaaaagctccgaagctgtgagccaatggctgactgcattccaactgcaactgtatgcgccaaatttcataagtgcaggctacgacctgcccaccatcagccggatgactcccgaggacttaaccgccatcggcgtaacgaaaccaggccatcgcaagaaaatcgctgccgagatctctgggctgtcaattcccgattggctgcctgagcataagccggcaaacttggcggtgtggttaagcatgataggtctggcacagtactataaggtgctggtggacaatgggtacgagaacattgactttatcactgacataacatgggaggacctccaggagattggaatcacgaagctgggacaccaaaaaaagcttatgctggccgtgcggaagttagcggaactgcaaaaggcagaatatgcaaagtacgaggggggcccccttagaaggaaagcgccccagagtcttgaggtcatggcgatcgagagcccgccacctccagaacccacccctgcagactgccaaagtcccaaaatgaccacatttcaggactcggaactgtcagatgaactgcaggccgcaatgaccggaccagccgaagtcggccccactaccgaaaagccttccagtcacctgccgccaaccccccgagccacgacacgccaggattctagtctgggaggacgggcccggcacatgagttcttcccaagagcttttaggagatggaccccccggtccgagcagtcccatgtcgcggtctcaggagtatctgttggacgaaggacctgcccctgggaccccgccaagggaggcccgccctggccgccatggtcacagcatcaaacgtgcctcagtgccaccggtccccggcaaaccacggcaggtcctaccccctgggaccagccacttcacccctcctcagacccccacaaaaactagacctggcagccctcaggccctgggcgggccgcacgggccagcccccgccacagctaaagttaagcctacaccacaactgctacctcctacagaaagacctatgagccctcgatcactgcctcagtcacctacacaccgaggattcgcgtacgttttaccccagcccgtcgagggcgaggtcggaccagccgcacctgggcctgctcctcctcctgtacccactgccgtgccaactctgtgcttacctccggaggccgacgcggaacccggtcggcctaaaaagagagcccactccctaaatcggtacgcggcaagcgactccgagcccgagagagacgaactcctggtgcccgctgccgccgggccttatgctacagtgcaaaggcgcgtaggtcgaagccattcggtgcgcgcccctgcgggagccgacaaaaatgtgaacagaagccaatcattcgccgtgcgccctaggaaaaaaggacctcctccgccaccccccaagaggtccagtagtgctcttgcgtctgcaaacctggcagatgaacccgttcctgatgctgagccagaggatgggctgctgggtgtgcgggcccagtgcagaagagcttccgatctcgccgggtcggtagatacaggttctgccggctcggtgaaatcgattgctgccatgctggagctgtccagtattggaggaggcggaagggctgctaggagaccacccgagggacatcctaccccccgaccggcatcccccgaacccgggcgcgtcgccacggtgctcgcaagtgtcaagcacaaagaggctatcggtcctggcggcgaggtggtgaacagaagacggaccctgtcagggcctgtcaccgggctgttagctacagcacgtcgcggcccaggtgagagcgctgatcccggtccttttgtggaggacggcaccggacgccagaggccccgcgggcctagcaaaggggaggcaggagtggaaggacctccactggcaaaggtcgaagcatctgctaccctgaagaggagaatcagagcgaaacaaaatcagcaggaaaatgtcaagtttatattaactgagagcgataccgtgaagaggaggccaaaagctaaggaaagagaagccggcccagagcctccaccaccactgtcggtgtaccataacggcactggcactgtcagacgtcgcccggccagcgagcaggccggcccgcctgagctacctcctcccccgccacccgctgaacctccccctactgacctcgcacacttaccccctcttcctcctcccgaaggggaggctcgtaaaccggccaagcctccggtgtcccccaaaccagtgctcacgcagccagtaccaaaactgcaaggtagccccacccctacatcaaagaaagtccccctccctggaccgggaagtcctgaagtgaaacgtgcacacggcacgccccccccagtgagtcccaagcccccaccacctcctacggcccccaagcccgtgaaagccgtggccggactgccgagcggatccgcaggcccttcaccggctccttctcccgctcgtcagccaccggccgcactcgccaagccacccggtaccccccccagtctgggagccagccccgctaagccgccttcgcccggcgctcccgctctgcatgtgcctgccaagccacccagggccgcagccgcagccgctgctgccgcggctgcccctcccgcacctcccgaaggcgccagccctggcgactccgcgagacagaaactagaggagacctctgcttgtctggcggcagctctgcaggctgtggaagagaagatccggcaggaggacgcccagggccctagagacagtgccgccgagaagtccacaggctcgattcttgatgacatcggcagcatgttcgacgacctcgccgaccagcttgacgctatgctggaatag

SEQ ID NO: 181803 - DNA, 2115 bp, synthetic construct
  misc_feature 1..2115: note = Description of Artificial Sequence: Synthetic coding sequence
  source 1..2115: mol_type = other DNA
atgtgcgccgccctgctggagccccggcccggcgacgccaccgaccctaatggaacatctcccctccacctggcagccaagaacggacacattgatatcatcagactgctcctccaagctggcatagatatcaaccggcaaacaaagtccggaacagctctgcacgaagccgcgctctgtggaaaaactgaggtggtgaggctgttgcttgacagcggcataaacgcacacgtgaggaatacatactctcaaacagcattggatatagtgcatcagttcactacctctcaggccagcagagagatcaaacagctcttgagggaggcttcagccgctctccaggttagggctacgaaggactattgtaataattacgacctgacttccctgaatgtcaaggcgggtgacatcatcaccgtgctggagcagcatccggatggccgctggaaaggatgtatccacgataacaggacgggcaatgacagagtaggctattttcccagtagcttgggcgaggccattgtaaaacgtgctgggtccagggcgggtaccgagccttcgcttccacagggctcttccagcagcggaccaagcgccccccccgaggagatctgggtactgcggaagccattcgccggcggggaccgaagtggtagtattagtggaatggctgggggcaggggaagcggcggtcatgccttgcacgctggctctgagggggtgaaattactggctaccgtactgagtcagaaaagcgtatcagaatcagggcccggtgattccccagccaaaccgccagaaggcagcgccggtgtggcaagatcccagccccccgtcgcacacgccgggcaggtgtacggtgagcagccaccgaagaagctcgaaccagcgtccgaggggaaatcctcagaggctgtgagccagtggctgaccgcattccaactacagctgtatgcgcccaacttcatctcagcaggttacgatctgcccacgatatcccgcatgacacccgaagacttaactgctattggagtcaccaagcccggccatagaaagaagatcgcagctgaaatttcagggctgtctattccagactggctgccagagcacaaacctgctaatctggccgtctggctctcaatgattgggcttgcgcagtattacaaggtcctggtcgataacggttacgagaatattgattttatcacggatattacctgggaagacctccaggagatcggcattacaaagttaggtcatcagaagaagttgatgttagccgtgcgaaaactggccgagctccaaaaggctgaatacgctaaatatgaaggcggacctctcaggagaaaagccccccagagcctagaagtgatggcgattgaatcgcctccccctccagaaccaacccccgctgactgtcaatccccgaagatgactacttttcaggattccgaactttcagatgagctccaggcggccatgacagggcctgctgaggttggccctactactgaaaagccaagtagccatcttcctcccacaccccgggctaccacccgacaggatagtagcctggggggacgggctcgtcacatgagctcatcacaggagctcctgggggacggccctccagggccatcctccccaatgagccgatcccaggagtacctgctggacgaaggaccagcacccggtacacctccaagagaggcccgcccaggccgacacgggcacagcatcaagcgtgccagcgtcccgccggttcctggtaaaccgagacaggtcctgccccctggaacttctcacttcacgcctccccagactcctacaaagacaaggccaggctctccgcaggctctgggtggaccacatggacctgcccctgctaccgccaaggtgaaacccacgccgcagcttctcccccctactgagagacccatgtccccaaggagcctaccacaaagtccaacacagagaacagggcctggacccgcccagaattgtccctctgggagaccagccagccgttctggggcggcacagggaacaggagatcagggccagggcccaccagcccccccgcacccccagaatatcagctaccaggagtactag

SEQ ID NO: 181804 - DNA, 3609 bp, synthetic construct
  misc_feature 1..3609: note = Description of Artificial Sequence: Synthetic coding sequence
  source 1..3609: mol_type = other DNA
atgggccgggagcaggacctgatcctggccgtgaagaacggcgacgtaaccggcgtgcagaagctcgttgccaaagtgaaggctaccaaaactaagctgttgggcagtactaagcgactaaacgtcaactaccaagacgcagatggcttttccgccctgcaccacgccgccttaggtggctccctcgagttgattgccctgttgctggaggcccaggctactgtggatatcaaagacagtaatggcatgcggcccctgcactacgccgcatggcagggtcgcctcgagcccgtccggttattacttcgcgcgtctgccgctgtgaacgccgcctccctggatggtcagatccctctgcatctggccgcccagtatggacactatgaggtatccgagatgctccttcagcatcaaagcaacccgtgtctggtgaacaaagcaaaaaagaccccccttgatttggcatgcgagtttggcaggctgaaggtggctcaactcttgttgaattcccacttgtgcgtggcgctgcttgaaggggaggctaaggacccgtgcgacccgaattataccacaccactccacctggcagccaagaacgggcatcgtgaggtgattagacaattacttcgtgcaggcattgagattaataggcagactaaaaccggaaccgctctgcatgaagccgctctgtatggaaagaccgaagtggtcaggctgcttctggagggcggggtggacgttaatattcggaacacgtataatcaaactgctctggatatcgttaatcagtttaccacctcacaggcctctcgcgaaatcaagcaactgttgagggaagctagcggcatccttaaagtccgtgcactaaaagatttctggaacctgcacgaccccactgcactgaacgtgagggctggagatgtaatcacagtactcgaacaacaccccgatggcaggtggaaggggcacatccatgaatcacagcgtggcacggacagaatcggatattttccccctggcatcgtggaagtggtctcgaagagggtgggcatccctgccgcccgcctgccaagcgcccctactccactcaggcccggcttcagccgcaccccccagccacccgcggaggaaccaccgcaccccttaacatactcacagctcccacgagtcggcctctcaccagactccccagccggcgaccggaactcagtcgggtcagaaggatctgtcggttcaattcggagcgcgggatccggccagagctctgagggcaccaacggacacggccctggtcttttaattgaaaatgcacaaccccttccctctgcgggcgaggatcaagtgctgccgggactgcatccccccagtttggccgacaatctgtcccaccgccccttggcaaattgtagatcaggagagcagatttttacccaagatgtccgtccagagcagctgttggagggcaaggacgcccaggctatccacaactggctgtctgaatttcagctcgaggggtacaccgcacacttcctgcaggcaggttatgacgtgccaaccatttcccgtatgacgcccgaggatcttaccgcgattggcgtaaccaagcctggacacaggaaaaaaatcgcctccgagattgcacagctttcaatcgccgaatggctgccgagctatatcccaaccgatctcctggaatggctgtgcgccctgggactgcctcagtatcataaacagctcgtatcaagtggatatgattccatgggcttagtagcggatttaacatgggaggagcttcaagagattggtgttaataagctcggccatcagaagaaactgatgctcggggtgaagagacttgccgaattgcggaggggtctgctccaaggggaggccttaagcgaaggggggcgcagactggctaagggtccggagcttatggctatcgaaggtctggagaatggtgaagggcccgccactgctgggcctagactcttaacttttcaaggcagcgaactttcccccgagctccaagccgcgatggctggaggcgggccggaaccattacctctgcctccagctaggtcgccaagtcaggaaagcatcggagcccgaagcaggggcagcggccatagtcaggagcagcctgcgccccagcctagcggcggcgacccttctcccccacaggagagaaacctacctgaaggcacagaacggccacccaaattgtgctcctctcttccaggacagggaccccctccgtatgtgtttatgtaccctcagggaagcccctcctcaccggctcctgggcctcctcctggagccccttgggctttttcctatctggcagggccgccagctaccccccccgatccaccacgcccaaagcgtaggtctcattccctgtcacgccccgggccaacagaaggtgatgccgaaggcgaggctgaagggcccgttggcagtacgttgggcagctatgcgaccttaacccggcgcccaggcagaagcgctttggtacggacgtctcctagcgtgactcccacacctgccagaggaacacctcggtctcagtcttttgcacttagagccagacggaagggtcctcctcctcccccccctaagcgcttatctagcgtcagcggaccctcacctgaacccccaccacttgatgaatccccaggaccaaaggaaggagccaccggcccacgccggcggacactgagcgagcccgctggaccctctgagcctcccggtcctccagcccccgctggacccgcaagcgacaccgaggaagaggaaccgggccctgagggcaccccccctagccggggctcttccggtgagggtctgccctttgccgaggagggcaatctcacgatcaagcaacgccccaagcccgcaggcccgcccccccgggaaaccccggtgcctcccgggttagacttcaacctcacagaatccgataccgtcaagcgacggcctaagtgccgcgagagagagcccctccagaccgctctgctggcctttggggtggcttcagccactcctggtccagccgcacccctgccttcccctacaccaggagagtctccaccagccagtagtctaccacagccggagccaagctcactgcccgctcagggagtccccactccattggctcccagtcccgccatgcagccccccgtccctccttgtcccggaccagggctagagtcttccgccgcttcacggtggaatggtgaaaccgaaccccctgccgcccctgccgccctcctgaaagtaccaggggccggtacggcacccaaaccagtgagtgtcgcatgcacacagctggcattttctggccctaaactcgcccccaggctcggccctaggcccgtgccacctcctagacccgaatcaactggcacagtcgggcccggtcaggcccagcaacggctggagcagactagttcctccctggctgccgccctgcgcgcagccgaaaagagcatcggtacaaaggagcaggaaggaactccttctgcaagtacaaaacacatcctggacgacatttcgactatgttcgatgcgttagctgaccagctcgatgcaatgctcgactag

SEQ ID NO: 181805 - DNA, 3363 bp, synthetic construct
  misc_feature 1..3363: note = Description of Artificial Sequence: Synthetic coding sequence
  source 1..3363: mol_type = other DNA
atgcggcccctgcactacgccgcctggcagggccggctggagcccgtgagacttctattgcgagcctctgctgccgttaatgccgcgtccctggacgggcagatccccttgcacctagccgcccagtatgggcactatgaggtgagcgaaatgcttttgcagcatcagagtaatccttgcctggtcaacaaggcgaagaaaactcccttggatctcgcttgtgaatttggcaggctgaaggtagcgcagttgctgctcaacagccatctatgtgtcgccctgctggagggagaggccaaggatccctgcgaccccaactacaccacacccctgcacctggcagcaaaaaacgggcatcgcgaggttattaggcagctactgagggcgggaattgagatcaaccgacagactaagactggcactgctcttcatgaggccgccctctacgggaaaacagaggtcgtcaggctgttgttggaggggggggtcgacgttaacatcaggaacacatacaaccagacagccctagacatcgtgaatcaattcaccacatctcaggcatcccgcgagatcaagcagctgcttcgagaagcttccggaatcttgaaggtgagggcccttaaagacttctggaacctccatgacccaaccgctctcaacgtccgtgctggagacgtgatcaccgtgttggagcagcatccggatggtcggtggaagggccatatacatgagtcccaacggggtacagacaggattggctatttccctccaggaattgtcgaggtcgtgagcaaaagggtcggtataccggccgccagactaccaagcgcccctactccattgcgtcccggatttagccgtactccgcagccacccgctgaagagccaccgcaccccctgacctattcccagcttccccgggtgggtttgagtcctgatagtccagccggcgaccgaaacagtgtcggctccgaagggtcagtcgggtctattcgttcagcaggaagcggtcagagcagcgagggcactaatggacacggtccaggcctgctgattgaaaacgcgcagcccttaccaagcgccggcgaagaccaagtcttacctggacttcatcctcccagcttggcggataacttgtcacatagacccctggccaattgccgttccggcgagcagatttttactcaggacgtaagaccggagcagttgctcgaagggaaagatgcccaggctatacataactggttgagtgagtttcagttggaggggtatactgctcattttctgcaggccggttatgatgtcccaaccatctcccggatgacgccagaggatctgaccgccattggcgtgacgaaaccagggcatagaaagaaaatcgctagcgagattgctcagctgtctattgcagagtggctgccaagctacattcccaccgaccttcttgagtggctttgcgccctggggctcccccagtaccataaacagctggtatcttctggctatgattcaatgggattggtggccgacctaacctgggaagaactgcaagagattggcgtgaataagttggggcatcagaagaagcttatgctgggcgttaagcgcctggccgagctgcggagaggcctcctgcaaggcgaagcgctatctgaggggggccgacgcttagcaaagggtccggaattgatggctatcgagggtctggagaacggagaagggcctgcgaccgccgggccccgtctgctgacatttcagggtagcgaactctccccagagcttcaggccgcgatggcagggggtgggccagaacctcttcctttaccgcccgctaggagcccatcccaagagtccatcggggcccgaagcagaggcagcgggcacagccaggagcaaccagcccctcagcctagtggtggcgacccgtcccctccccaggaaaggaacctccctgagggaaccgagcgcccaccaaagctctgctcaagcttgcctggtcagggtcctccaccatatgtattcatgtacccacaggggtctccgtcctcccccgctccaggacctcccccaggagccccttgggccttctcttacctcgctggcccgcctgcaactccccctgatccaccgaggccgaagcggcgctcccatagtttatctagacccggcccaacagagggtgacgcggagggcgaggctgaaggcccagtgggatccactctgggcagctatgcaactctgacacgccgtcctggacgcagcgccctggttagaacttcccccagcgttacccccacccctgccagggggaccccaagatcccagagtttcgccttgagggctcgacgcaaggggcctcctccccctcccccgaagagactgagcagtgtatctggcccctcacctgagcctcctcccctggatgagtcacctggccccaaagagggcgccacaggacccagacggcgcaccttgtctgaacctgctgggccctcagagccacccgggcctcctgcccccgctgggccagcctccgacacagaagaggaggaaccaggtccagagggaacaccccccagtcgggggtcatcaggagaggggctgccctttgccgaagaggggaaccttactataaagcaaaggccgaaaccagctggaccccccccccgagaaactccagttccacccggtctggacttcaatctcacagagtccgatacagtgaagcgtagaccaaagtgcagggagagggagccgctgcaaaccgccttattagcttttggagtcgccagtgccacacccgggccggcggctcccctccccagcccaacaccaggagaatcccctcccgcctctagcctccctcaaccagagccatcttcactccctgcccagggcgttcccacacctctggccccatctcctgccatgcaacctccagtgccaccgtgccccgggccgggcctcgaaagctctgcagcctccaggtggaacggagagaccgaacccccagcggcccctgctgctcttcttaaggtaccaggcgctggcaccgcacctaagcccgtcagcgtagcttgtacccagttagcattcagtggacctaagctagcaccacgcctagggccccgaccggttccgcccccccgaccggaaagtacaggcacggtcggcccgggacaagcccagcagcggctggaacagactagtagtagcctggccgcagccctaagggctgcagagaaatcaatcggaacgaaggagcaggaaggtactccctccgcctcaacaaagcacattctagacgacattagtacaatgttcgatgctctagccgaccaattagatgcaatgctggactag

SEQ ID NO: 181806 - DNA, 1026 bp, synthetic construct
  misc_feature 1..1026: note = Description of Artificial Sequence: Synthetic coding sequence
  source 1..1026: mol_type = other DNA
atggccgacgagaagcccagcaacggcgtgctggtgcacatggtgaagctgctgattaagacttttctcgacggcattttcgacgatctgatggaaaacaacgtgttgaataccgacgaaattcatctgataggtaaatgcctcaaattcgtggttagcaatgccgaaaatcttgttgacgacatcacagagactgcccagacagcaggcaaaatctttcgtgagcacttatggaattccaagaaacaactaagctcagatatctcttctgatggcgagagggaggccaacatgcctgggctgaatattaggaacaaggaatttaactatcttcacaaccgcaacggatctgagttagatctccttggaatgcgcgatctgctggagaatttgggatactccgtggtaattaaggaaaatctgaccgctcaggaaatggagactgccttgcggcagtttgccgctcatcctgagcaccagtctagcgatagtactttcctcgtgttcatgagccacagtattctgaatggcatatgcggcacgaaacactgggaccaggaacctgacgttctgcacgacgacacaatattcgaaatatttaacaatagaaattgtcagagcctcaaggataaaccaaaggtcataataatgcaggcatgtagagggaatggggctggcattgtctggttcaccaccgatagtggcaaggctggggcggacacacatgggcgtctgctccaaggcaacatatgcaatgacgctgtgaccaaagctcacgtggaaaaagacttcattgccttcaagtcaagcactcctcacaatgtttcctggaggcatgagaccaatgggtcagtttttatttcacaaatcatctactactttcgagaatattcatggtcccaccacttggaagagatattccagaaggtgcagcacagcttcgagacaccaaatatcctgactcagctgcctacaatcgaacggttgagtatgacccggtatttctacctgttccctggaaattag

SEQ ID NO: 181807 - DNA, 1026 bp, synthetic construct
  misc_feature 1..1026: note = Description of Artificial Sequence: Synthetic coding sequence
  source 1..1026: mol_type = other DNA
atggccgacgagaagcccagcaacggcgtgctggtgcacatggtgaaactgctcattaagactttcctggacgggatcttcgatgatctgatggaaaacaatgtgctaaacacagacgaaatccacttgattggaaaatgccttaaattcgttgttagcaacgccgaaaatctggtagatgatataaccgagacagcgcagactgcaggcaagatctttcgggagcatctttggaattccaagaagcagctgagcagcgatattagctcagatggagaacgggaagctaacatgccaggtctaaacatacggaataaagaatttaattacctgcacaaccggaacgggtccgagcttgatctgcttgggatgagggacctgctggaaaacttggggtacagcgtggtgattaaagagaacctgactgctcaagaaatggaaaccgctctcaggcaattcgccgctcaccctgaacatcaatccagtgacagcacatttcttgtgttcatgtcccatagtattctgaacggaatctgtggtacaaagcattgggaccaagaaccagatgtgttgcacgacgatacgatcttcgaaatcttcaacaaccgtaactgccagtctctgaaggacaagccaaaggtgattatcatgcaggcctgccggggcaacggagctggaattgtgtggtttactacggattcaggaaaggccggagccgatacccacggtcgactgttgcaggggaacatttgtaatgacgccgtcacaaaggcacacgtcgagaaagattttatagcattcaaaagttccacccctcacaatgtgtcatggaggcatgaaaccaacgggtctgtgttcatcagtcagattatctattactttcgagagtattcttggtcccaccacttagaggagatcttccaaaaagtgcagcactccttcgagaccccaaacatcctgacccaactgcccacaattgagaggctgagcatgactaggtacttctatctgttcccaggcaattag

SEQ ID NO: 181808 - DNA, 834 bp, synthetic construct
  misc_feature 1..834: note = Description of Artificial Sequence: Synthetic coding sequence
  source 1..834: mol_type = other DNA
atggagaacaccgagaacagcgtggacagcaagagcatcaagaacctggaaccaaaaattatccacggaagcgagagcatggatagcggcatttcgctggacaactcctacaagatggactaccccgagatgggtctgtgcatcatcattaataacaaaaattttcataaatctactgggatgaccagtcgatcaggcacagacgttgatgccgcaaaccttcgtgagacattccgcaacctaaaatatgaagtgcgcaacaagaacgatctgaccagagaggaaatagtggaactgatgcgcgatgtttccaaggaggatcatagcaaacgttcatccttcgtctgtgtcctcctgagtcacggagaagagggcatcatctttggtacaaacgggcctgttgatcttaagaagatcactaactttttccggggtgacagatgcagatctctcaccggcaaacctaagctttttatcatacaggcatgtcgaggcaccgaactggattgcgggatcgagactgactctggtgtagatgatgacatggcttgtcacaagatccccgttgaagccgacttcctgtatgcgtactcaactgccccgggctattactcttggcgcaattccaaggatggctcttggtttatccagtcgctttgtgctatgctcaaacagtatgccgacaaactggaattcatgcacatcctaacacgggtcaatcgaaaggtggcaacggaattcgagtcctttagctttgatgccacatttcacgcaaagaagcagattccctgtatcgtgtccatgttgaccaaagagctgtacttctaccactag

SEQ ID NO: 181809 - DNA, 471 bp, synthetic construct
  misc_feature 1..471: note = Description of Artificial Sequence: Synthetic coding sequence
  source 1..471: mol_type = other DNA
atgagcgacgccctgatcaaggtgagcatggagaacaccgagaacagcgtcgacagtaagagtatcaaaaatctagaaccaaagatcatacatggctctgaaagtatggattcaggaatctctcttgataattcatacaaaatggattaccccgaaatgggactgtgcataatcatcaacaataaaaatttccacaagtctactggcatgacgtctaggtccggaacggatgtagatgccgccaaccttagggagacctttcggaatctaaaatatgaggtccggaacaagaacgacctgaccagagaggagattgtagagctcatgagggacgtctccaaggaagaccacagcaagcgcagtagctttgtgtgtgtcttgctgagtcacggagaagagggaatcatttttggtacaaacggccccgttgatttaaaaaataacaagctgtttcagcgcggaagcttgtag

SEQ ID NO: 181810 - DNA, 354 bp, synthetic construct
  misc_feature 1..354: note = Description of Artificial Sequence: Synthetic coding sequence
  source 1..354: mol_type = other DNA
atggagaacaccgagaacagcgtggacagcaagagcatcaagaaccttgaacctaagattatccacggttcagagtcaatggatagcggtatctctcttgacaactcgtataaaatggattaccccgaaatggggctatgcattattattaacaacaaaaattttcataaaagtaccggaatgacatcaagatcagggaccgatgtagatgccgcgaatctgagggagacgttcagaaatctgaagtacgaggtacgtaataagaacgacctcacaagagaggaaatcgtggagctgatgcgcgacgtaagcaaggaggaccacagcaagcgctcttctttcgtgtgcgtttag

SEQ ID NO: 181811 - DNA, 834 bp, synthetic construct
  misc_feature 1..834: note = Description of Artificial Sequence: Synthetic coding sequence
  source 1..834: mol_type = other DNA
atggagaacaccgagaacagcgtggacagcaagagcatcaagaacttggaaccaaagatcatacacggctctgagtcgatggatagtggtatctccctggataacagctataagatggattacccggagatgggcctgtgcatcataattaataacaagaatttccacaaatctaccggtatgacctcccggtctgggactgatgttgatgccgctaacctcagagagacctttaggaacttgaagtacgaagtcagaaacaagaatgacctgacaagagaggagatcgtggaactgatgagagatgtcagtaaagaagaccactccaagcgatcttccttcgtgtgtgtgctcttgagccacggagaggaaggcatcatattcggcacgaatggccccgttgacctcaagaagatcacgaactttttcaggggtgaccggtgcaggagtcttacagggaaacccaagttgtttattattcaggcctgccgcggcaccgagctcgactgtgggatagagaccgattctggcgtcgatgatgatatggcttgtcacaagattcctgtggaagcggactttctttatgcctatagtacagctcccggatactactcgtggcggaactccaaggatgggtcatggtttattcaatctttgtgtgccatgttaaaacaatacgccgataagttggaatttatgcacatccttactcgcgtcaatagaaaggtggcaaccgagttcgaatcattctccttcgacgcaactttccacgccaagaagcagattccctgtatcgtcagtatgctgaccaaggagctgtatttctaccactag

SEQ ID NO: 181812 - DNA, 966 bp, synthetic construct
  misc_feature 1..966: note = Description of Artificial Sequence: Synthetic coding sequence
  source 1..966: mol_type = other DNA
atggccgacagcatgcaggagaagcagcggatggccggccagatgctgctgcagacattttttaacattgatcagatttcccctaacaaaaaagctcatccgaatatggaggctggacctcctgagtcgggcgagtccactgacgcgttaaaactgtgtcctcacgaggagttccttcggctgtgcaaggaacgggcagaagaaatataccctatcaaggaaaggaataaccgaactcggcttgccctgatcatttgtaatactgagtttgatcacctacctccgagaaacggggcagactttgatattacagggatgaaggaactcctggaaggactggactattccgtagacgtagaagagaacctcaccgcacgcgacatggagtctgctctaagagcatttgctacacgccctgagcataaatcctccgactcaaccttcctggttctcatgtcacacggcatcttggaaggaatatgcggaactgttcacgatgagaaaaaaccggatgtcctgctgtacgatacgatcttccagatcttcaacaacagaaattgcctgagccttaaggataagcctaaggtgataatcgtccaagcatgccggggcgcgaaccgcggggagctctgggtgagggacagcccggctagtctggaagtggcctcctctcagagcagcgaaaacctggaagaggacgccgtgtacaagacccatgtcgagaaggactttatcgcgttctgctctagcacgcctcacaacgtctcatggagggattcaaccatgggcagcatcttcatcacacaactgatcacctgcttccaaaagtacagctggtgctgccacctggaggaagtatttagaaaagtccagcaatcatttgagacgccccgggcaaaagcgcaaatgcccacaattgagagactctcaatgacacgctacttctatctgtttcccggtaactag

SEQ ID NO: 181813 - DNA, 213 bp, synthetic construct
  misc_feature 1..213: note = Description of Artificial Sequence: Synthetic coding sequence
  source 1..213: mol_type = other DNA
atggagaagaaggagtgccccgagaagagcagcagcagcgaggaggaactacctaggcgggactccggcagctccaggaacattgatgcctctaagctgattcgcctgcagggatcaaggaagctcctcgtggacaactccatcagggaattgcaatatacaaaaaccggcatcttctttcaagccgaggcttgtgttactaatgatacgtag

SEQ ID NO: 181814 - DNA, 3099 bp, synthetic construct
  misc_feature 1..3099: note = Description of Artificial Sequence: Synthetic coding sequence
  source 1..3099: mol_type = other DNA
atgcccggccgggccgaggccggcgaggccgaggaggaggccggcgccggaagcggctcagaggccgaggaagacgcactttgggaacggattgagggcgtgcggcacagattggctcgagcattaaatcccgcaaaactgactccttaccttaggcagtgtagggtgatagatgaacaggatgaggaagaagtgctgagtacataccggttcccctgtagggtcaatcggaccggcaggctcatggatatactgcgatgccggggaaaacggggctatgaggccttcctggaagcccttgagttctactaccccgagcactttacactccttacagggcaggagccagcgcaacgttgttcaatgatcttagacgaggaaggtcccgaggggctgacgcagtttctcatgactgaagtccgacgtcttcgagaagccagaaaatcccagctccagagggagcagcagctccaggccaggggcagagtgctcgaggaagaaagggccggcctcgaacagcgtctgagggaccaacagcaggcccaggagaggtgtcaacgtttgcgggaagattgggaagcggggagcctggagctccttaggctaaaggacgagaactatatgatcgccatgcgcttggcacagttatctgaagagaagaacagtgctgtgctacgctcaagagatcttcagcttgctgtggatcagttgaaactgaaggtttctcggctggaggaggagtgcgcgctgttacgtagagcaagaggaccaccacctggcgctgaagaaaaggaaaaagagaaagagaaggagaaggagccagataacgtcgaccttgtaagcgaactccgcgccgagaaccaacgtctcaccgctagtttgcgggaactgcaggaaggcctgcagcaagaagccagccggcctggtgctcctggaagcgagcgcattctgttggacattctagaacacgattggagggaggcccaggatagtcgccaggagctgtgccagaagctgcacgccgttcagggcgagctgcagtgggcggaagagctccgggaccagtatttgcaagagatggaggatttgagattgaaacaccgtacattgcagaaagactgtgatctctataagcacaggatggcaacagtgctggctcaactggaagaaatcgagaaggagcgtgaccaggccatccaaagccgggaccggattcaactgcagtattcgcagtcattgatcgagaaggaccagtatcgtaagcaagttcgcggcttggaggccgaacgcgacgaattactcactacccttacctccttagaaggaaccaaagccttgctggaagtccagctgcagagagctcaggggggtacatgcctgaaagcttgtgcatccagccattccctctgcagcaacttaagttctacatggtctctcagcgaatttcctagtccactgggcggccccgaggccactggcgaggcggctgtaatgggaggaccagaacctcataatagcgaagaggccacggactccgagaaggaaataaatcgactttccatcttaccattccctccatccgccggttcaatactgagacgtcagcgtgaggaggaccccgctccccctaaaaggtccttcagctctatgtctgacatcacaggctccgtgactctgaaaccctggagccctggcctcagttcctcctcctcttccgacagcgtttggccactgggcaaacctgagggtctgctggcaagagggtgtggattggattttctcaataggagcttagccattcgcgttagcgggcgaagtcctccagggggtccagaacctcaggacaagggccccgatggactgtcattttacggtgataggtggagcggagctgtggtgcgtcgggtgctctcgggacccgggtctgcccgcatggagccgcgggaacagcgggtggaagccgcaggcctcgagggagcttgcctggaggccgaggctcagcagagaaccctgctctggaaccaggggagcactctgccatctttgatggacagcaaggcttgtcagtcattccacgaggctctcgaggcctgggccaagggcccaggggccgagcctttttacatccgggcgaatctgacgctgccagaacgcgcagatccacacgccctgtgtgtgaaggcacaggagattctgcgactagttgactctgcatacaaacggagacaagagtggttttgcacgagagtcgaccccttgaccctgagagatctagatagaggtaccgtgccgaattaccagagagcgcagcagcttttggaagtgcaggagaaatgtctgccatcttcacggcatcgcgggcctagatcaaacctgaagaaacgcgccctggaccagctacgactggtgagacctaaaccagtgggtgctccagctggcgatagccctgatcaactgctcctggaaccatgcgccgagcctgagagaagcctgcggccctattctctggtgcggcctctgcttgtgtccgccctcagacctgttgtgcttctgccagaatgcctggcccctaggcttattaggaacctcttggacctgccctcctctaggctggatttccaagtgtgtccagccgagtccttatctggggaggaactgtgcccatcttctgctccaggggcccctaaggcccagcccgccacacccggactgggatcaaggattagggccattcaggaatctgtcggtaaaaagcattgccttcttgagctcggagcccggggggtacgcgagctcgtgcaaaacgagatataccccatcgttattcacgtggaagttacagaaaaaaacgttagagaggttcgaggactgctgggcagaccaggttggcgtgattcggaattattgcgacagtgtcggggctctgagcaggtactgtggggccttccttgttcttgggtgcaggtacctgcccatgaatggggccatgctgaggagcttgctaaagtggtgagggggaggatcttacaggagcaggcacgcctcgtttgggtggaatgtggaagctctaggggctgcccatcttccagcgaggcgtag

SEQ ID NO: 181815 - DNA, 3099 bp, synthetic construct
  misc_feature 1..3099: note = Description of Artificial Sequence: Synthetic coding sequence
  source 1..3099: mol_type = other DNA
atgcccggccgggccgaggccggcgaggccgaggaggaggccggcgctggttcgggttccgaagccgaagaagatgcactctgggaaaggatcgagggagtgcgacatcggctggcgcgagccctgaacccagctaagcttactccttacctcagacaatgtcgagtcatcgatgagcaggacgaggaggaagtactgtccacttataggttcccctgcagggtcaacagaactggccgactgatggacatcctccgttgcaggggcaagcggggctatgaagccttcctggaagccctggaattctactatccggagcattttactctgctgaccggacaggagccggcgcagcgctgcagtatgattctagacgaggagggacctgaaggattgactcagtttttaatgacagaagtgcgcagattgcgagaagcacggaagagccagttgcagcgggagcaacagcttcaggcgcggggcagggtcctcgaggaggagcgcgctggccttgaacagcgccttcgggatcaacagcaagctcaggaaagatgtcagcgcttgagagaggactgggaagccggctctcttgagctgctgcgccttaaagatgagaattacatgatcgctatgcggctggcacagctgtccgaagaaaagaactcagccgtattgagatccagggacctgcagctagccgtggatcagctgaagctcaaagtgtcgcgcttggaagaagagtgtgccctgctgcggagagctcgcgggcccccacctggggctgaagagaaagaaaaggaaaaggagaaagaaaaagagcccgataacgttgatctggtcagcgagctgcgagctgagaaccagcgtctaactgcttccctgcgcgagttacaggaggggctgcaacaggaggcatctcggcccggcgccccagggagcgagcgtatacttctagacatcctagaacatgactggagggaggctcaggacagtcgacaggagttgtgccaaaagctgcacgccgttcagggtgaactgcaatgggctgaggaactgagggatcagtacctgcaggaaatggaagatctcaggctgaagcaccggaccctacaaaaggactgtgatctgtacaagcacaggatggctacagttctggcgcagctcgaggagatcgagaaagagagggatcaagccatccagtctcgggaccgaatacagctccagtacagccagtctctgattgagaaagaccaatacagaaagcaggtaagaggcctcgaagccgagcgcgacgaacttcttacaacacttaccagccttgagggcaccaaagcgctgctggaggttcaacttcaacgggcccagggaggcacatgtctcaaagcctgtgcgagttcccatagcctgtgttccaatctgagctccacctggtctctgtctgaatttccatcccctttaggaggtccggaagccaccggtgaggccgccgtgatgggtggacctgagcctcacaattctgaggaggctacagattccgagaaagaaattaatcggctgagcatattgccttttcctccttccgcgggaagcatcttgcgccggcagagggaggaagaccccgcacccccaaagcggagcttcagtagtatgtctgacattacggggtccgtaactcttaagccctggagccccgggctcagctcatctagcagttccgattctgtgtggccattggggaagcccgagggactccttgccaggggttgcggactcgacttcttgaacaggtccctggccattcgagttagcgggagaagccctccaggagggcccgaaccacaggataagggacccgacgggctgtccttttatggcgaccgttggtccggtgcagttgtcaggcgcgtccttagcggccccggcagtgcccgcatggaacctagggaacagcgtgtggaggccgcaggcctggaaggcgcatgccttgaagctgaagcacagcagagaacactgttatggaatcagggttcgactctgccctctctaatggattccaaagcttgccaatcattccacgaagccctggaggcgtgggctaaaggacccggtgcagaaccattctatattcgggccaacctgactctcccagaacgcgcggacccccacgctctctgtgtgaaagcccaggagatcctgaggctggtcgatagtgcatacaaaaggagacaggagtggttctgtacacgtgtggatcccttgaccctgcgagacctggatagaggtactgttcctaactatcaaagagcccagcaactcctggaggtgcaagagaaatgcctgccatccagcaggcaccgggggcccaggagtaacttgaagaagcgcgcgcttgaccagctgagacttgttagacccaaacctgtaggggctccggccggcgactctccggaccagctgctgctcgaaccctgtgccgaacctgagaggtccttacgcccctactccctggttcggcctctcctcgtatctgcgctacgcccggttgtcctcctccctgagtgccttgcccctcgcttaataaggaatctgcttgatttgccttccagcagacttgacttccaagtctgccccgccgaatccctgtccggggaggagctatgtccctcgtctgctcctggggccccaaaggcacagcctgcaactcctgggttgggatcgcgcataagggccatacaggagtctgtcgggaagaaacactgtcttttagaattgggagctcgaggagtacgcgagcttgtgcagaatgaaatttatcctattgtgattcatgtggaagttaccgaaaagaacgttcgggaggtgcgcgggctgctggggagacccggctggagagactctgaattgcttaggcagtgtcggggttccgagcaggtcctttggggtctcccctgctcttgggtgcaagtaccggcgcatgagtggggtcacgccgaggaacttgccaaagtggtgcgcggaagaatactgcaggagcaggcacggctggtatgggtggaatgtggcagttctcgtggctgtccctccagctcagaggcctag

SEQ ID NO: 181816 - DNA, 2241 bp, synthetic construct
  misc_feature 1..2241: note = Description of Artificial Sequence: Synthetic coding sequence
  source 1..2241: mol_type = other DNA
atgggcgtgggcgtgggcctgggcaacggcctgcggctgctgccctggatggaagcttcccgacccggagcccccgggtctgagaggatcctcctagacattttagaacacgactggagagaggcccaggattcaaggcaggaactatgtcagaaactacacgcagtccagggcgagctgcagtgggcagaagagctgagggatcagtatttacaagagatggaggacctgcgcttgaagcaccggacattgcagaaggattgtgacctatataaacatcgcatggcaaccgttcttgcccagctggaggaaatcgaaaaggagcgggatcaggcaatccaatctagagacagaattcaactgcagtactcgcagagcctcatcgagaaggatcagtacagaaaacaggtgaggggactggaggcagaaagggacgagcttcttacgactctcacctctcttgaagggaccaaggctctgctggaagtgcagctgcagcgggcacagggcgggacgtgtctcaaggcttgtgcatcctcccactccctgtgctcaaatcttagcagcacctggtctcttagcgagtttccttctcctctcggaggacccgaggctaccggcgaagctgccgtgatgggtggcccggagcctcacaatagcgaggaggctacagacagtgagaaagaaattaatcgactgagtatcctccccttccccccatcggctggcagtattttgcgacgccagcgggaagaagaccccgctcccccaaaaaggagtttctcttcaatgtctgatatcacgggatctgtcactctcaaaccttggtctcctgggctttcatcgagcagtagttcagacagtgtatggcctttaggaaagccagaagggctcctagcccgtggctgtggtctggactttctaaacagatcgctggccattagggtgagtggccggtcaccgccgggcgggcctgaaccccaagataagggtcccgacggattaagcttctatggagacagatggagcggtgctgtcgtgcgacgcgtgctgagcggcccggggtccgccagaatggagcctagggagcaacgtgtggaggcggcaggcctggagggggcctgcctcgaggccgaggctcagcagagaaccctcctgtggaatcaaggctccactctaccatctctgatggattctaaggcatgtcagtccttccatgaggctctcgaagcctgggccaagggacccggggctgagcctttttacatacgggccaacctcaccctgcccgagagagctgacccgcatgctttgtgcgttaaggcgcaagagatactgagactggtcgatagtgcctacaagagacgccaggagtggttttgcacccgcgtggatcccttgactctcagagacctagatcgtgggaccgtaccaaactaccagagagcgcagcaattgctcgaagtccaagaaaaatgtctaccctcctccagacatcggggacctaggtcaaaccttaagaaacgtgcgctggaccaactccggctggtcagaccaaagccagtcggggcgccggccggtgacagccccgatcaattactgctggaaccttgcgctgaacctgaacgcagtctgagaccatactcattggttagacctctcctagtgagcgccctacgccccgttgtgctgctccccgagtgtctggcaccgcgcctgattcgcaacttgctggatttgcctagcagtcgcctcgatttccaggtatgtcctgcggagagcctcagcggcgaggagttgtgtccatcatctgccccgggcgcgcctaaggcccagcctgccacacctggattgggttcaagaatccgtgcaattcaggaatccgtgggaaagaagcactgcttgctggagttaggcgctaggggagtgcgtgaactggttcagaacgagatctacccgatagtgatccacgtggaggtgactgagaaaaatgtgcgggaagtacgcgggctattgggcaggccaggctggagggactcagagctcctgcggcagtgcagaggaagcgagcaggtgctttgggggctaccctgcagttgggtacaggtccctgctcacgaatggggccatgccgaagaattagcgaaggtcgtgaggggcaggatcctccaggaacaagcccgcttggtttgggtagagtgtggatcctctagaggctgtccatctagttccgaggcatag

SEQ ID NO: 181817 - DNA, 1443 bp, synthetic construct
  misc_feature 1..1443: note = Description of Artificial Sequence: Synthetic coding sequence
  source 1..1443: mol_type = other DNA
atggaggacctgcggctgaagcaccggaccctgcagaaggactgcgatctctacaagcatcggatggctacagtactcgcccagctcgaagagattgaaaaagagagggaccaggccattcagtcccgtgaccggatccagctgcaatatagccagagcctcattgaaaaagatcagtaccgtaagcaggttagagggctcgaggccgaaagggacgaactgcttaccacccttaccagtctggaaggtacgaaagcgctgctcgaggtgcagttacagcgcgcacagggcggcacctgcctgaaagcatgtgcatctagtcactccctgtgttcaaacctttcatccacatggtctcttagcgagtttcccagccctttaggtggtcccgaagcaaccggagaggccgccgtgatggggggaccggaaccccataatagcgaggaagccacggacagtgagaaagagattaataggctcagtatcttaccctttccccctagtgctggatccattctgcgtcgacaacgggaggaggaccctgccccacccaaacgctccttctctagcatgtccgatattacaggctcagttactctgaagccatggagtccagggttgtcctccagctcctcctctgatagcgtctggccgctgggcaaacccgagggactcctggcaaggggttgcggtcttgactttttaaataggagccttgccattagggtgagcggccggtcaccaccaggcggcccggagccgcaggacaaggggcctgatggtctgtccttttacggagatcgctggtctggcgctgttgtgcgcagagtcctgtcgggacctggatccgcccggatggaaccacgggagcagcgagtagaggcagcgggactcgaaggcgcttgtctggaggccgaagcgcagcaaaggaccctactctggaatcagggctcaactttgccgtctttgatggacagcaaggcatgccagagttttcacgaggccctcgaagcttgggctaagggtcccggcgccgaaccattttatattcgcgctaatcttacactccctgagcgtgcggaccctcacgccctgtgcgtgaaggctcaggaaatactgcgcctagtggatagtgcatacaaaaggaggcaggaatggttctgtactcgcgtggacccactgacactgcgggacttagatcgagggactgtgcccaattatcagagagctcaacaattgctcgaagtacaggagaagtgccttccaagcagcagacatcgtggaccacggtctaatctcaagaagcgggctctggatcagctgaggctggttcgccccaaacctgttggtgcgcctgctggggactcccctgaccaacttttgttggagccctgtgccgagccagaaaggagcttgcgcccatactccttggtgagaccctag

SEQ ID NO: 181818 - DNA, 222 bp, synthetic construct
  misc_feature 1..222: note = Description of Artificial Sequence: Synthetic coding sequence
  source 1..222: mol_type = other DNA
atgcccggcggcggccccgagatggacgactacatggagaccctgaaggacgaagaagacgcactctgggaaaacgtcgagtgcaaccgccacatgctcagcagatacatcaaccctgctaagttgacaccatacctgaggcaatgcaaggtgatcgatgagcaggatgaagatgaggtgttgaacgctcccatgcttccttccaagattaatcgggcctag

SEQ ID NO: 181819 - DNA, 3465 bp, synthetic construct
  misc_feature 1..3465: note = Description of Artificial Sequence: Synthetic coding sequence
  source 1..3465: mol_type = other DNA
atgcccggcggcggccccgagatggacgactacatggagaccctgaaggacgaggaagatgctctgtgggaaaatgtcgagtgcaatcggcacatgctaagtcgctacattaatcccgccaagttaactccttatctgcgacagtgcaaggttatagatgagcaggacgaagatgaggtgctgaatgctcctatgttgccatctaaaatcaaccgcgcagggagattactggacattttgcacaccaaggggcagcgcgggtatgtagtctttcttgagagcctggaattctactaccctgagttgtataagcttgtaacgggcaaggaacctacgaggcggttctcaacaatcgttgtagaagagggacacgagggactgacccatttccttatgaacgaggttataaaacttcagcagcagatgaaagctaaagacctccagcgatgcgaacttcttgcacggctgcgacagttggaggacgaaaagaaacagatgaccctcactcgggtggagctcctcaccttccaggaaaggtattacaaaatgaaagaggaacgggatagctacaatgacgagcttgtcaaggtcaaagacgacaattacaacttagctatgaggtatgcacagcttagtgaagagaaaaatatggcggtaatgcgaagccgggatctgcagctcgaaattgaccagctgaaacacagacttaataagatggaagaggagtgtaagctcgaacgaaaccaatccctgaagttgaagaatgatattgaaaatcgcccaaaaaaggagcaggtgctcgaactcgagcgcgaaaatgaaatgctgaagaccaagaatcaggaacttcaaagcataatacaggccgggaagcggtcactgcccgacagcgacaaggccatcctggatatcctagagcatgatcgcaaagaggccctggaggataggcaggagttagttaataggatctacaacttacaggaagaggcaaggcaggcagaggaactgagggataaatatttggaggaaaaagaggacttagagttgaagtgttctacactgggcaaagactgcgagatgtataagcacaggatgaatacagttatgctgcagctggaggaagtggaaagagagagggatcaggcatttcattcgcgggacgaggctcaaacacagtatagccagtgcctcattgagaaggacaaatataggaaacagatacgagaactcgaagaaaagaatgacgaaatgaggatagagatggtgcgtagagaggcttgcatagtcaacctggaaagtaagttacggaggctctccaaggattcaaataacctagatcagagcctgcctcggaacctaccagttaccattatctcccaagatttcggagatgccagtcctagaaccaacggacaggaggcagacgactcatccacctctgaggagtcacccgaggacagcaaatacttcctgccctaccacccacctcaacgacgaatgaacttaaaaggaattcagttgcagcgtgcaaaaagtcccatcagcctgaaacgcaccagtgacttccaggcgaagggacacgaagaagaaggaacagacgcttcaccctcaagctgcggtagcctccccattacaaatagtttcactaaaatgcaacctccgcgctctcgatctagcatcatgtccatcactgcagagccccccgggaatgattccatcgtcagaagatataaagaggacgccccccacaggtctaccgtagaagaggacaacgactcagggggctttgacgcgcttgatcttgatgatgatagccacgaaagatattcgtttggccccagttcgattcattcctctagttcaagtcaccagtccgaagggcttgatgcttatgatttggaacaagtgaatctgatgtttaggaagttctcccttgagaggccctttcggccgtcagtgacctcggtcgggcatgttagaggacccggcccaagtgtgcagcataccaccctgaatggggacagcctgacgtcccaactgacccttttgggggggaatgcacgcggttctttcgtgcactctgtcaagcctgggagtctcgcagaaaaggccggcctgcgggaggggcatcagctccttttacttgaggggtgcatccggggagagcgccaaagtgtgccgctggacacttgcaccaaagaagaggcccattggacaatacagaggtgttcagggccagtgactcttcactataaagtcaaccacgagggataccggaaactggtgaaggatatggaagacgggttgatcaccagcggcgattccttttacattcgcctcaacttaaacatctcctcacagctcgatgcctgtacaatgagccttaagtgcgacgatgtcgtacacgtccgcgatacaatgtatcaagacagacatgagtggctctgtgccagggtggatcccttcaccgaccatgacctggacatgggaacaatcccttcatacagccgggcgcaacagctgcttctggtgaagctccagcggttaatgcataggggttctcgggaggaggtagatggaacacatcatacccttagggcccttcggaatactttacagccagaggaggctctgtctacaagcgacccccgggtaagcccccgattgtccagggcctccttcctgttcggccagttgctccagttcgtttccagaagcgagaacaaatacaaacgcatgaactccaatgagcgggtccgtataatttcggggtcccctctgggatctctcgcacggtctagcctggacgctaccaaactgttgaccgaaaaacaggaagaattggaccccgagagtgagctgggtaagaacttgtctctcatcccatattcccttgttcgagcattttactgcgagaggagacgcccagtgctgttcacacctacagtgctcgctaagacgctggtacagcgtctgctgaactccgggggcgccatggaatttactatttgcaaaagtgacattgtcacgcgtgatgaattcctacggaggcaaaagacggagaccatcatttatagccgggaaaagaatccgaatgcctttgagtgtatcgctccagccaacattgaggccgtagctgcaaagaacaagcactgtctgctcgaagccggtattggctgtaccagagacttgattaaatctaacatctatccaattgtgctgttcatcagggtgtgcgaaaagaacatcaaaagattccgcaagttgctgcctaggccggagaccgaagaagagtttctccgcgtgtgcaggctgaaggagaaagagctcgaggcactcccatgtctgtacgccaccgtagagccagacatgtggggttccgttgaagagctcctgcgtgtagtgaaggataaaataggggaggaacaacgcaagacaatatgggtagatgaggaccagttgtag

SEQ ID NO: 181820 - DNA, 3114 bp, synthetic construct
  misc_feature 1..3114: note = Description of Artificial Sequence: Synthetic coding sequence
  source 1..3114: mol_type = other DNA
atggccaccgagagcacccccagcgagatcatcgagcgggagcggaagaagttactggagattctgcagcacgatcccgactctattctggacaccttaacatccagacgcctaattagtgaagaagaatatgagacactggagaacgtaaccgaccttttgaagaagtcgcggaaactgttgattcttgtgcagaagaaaggtgaggcgacctgccaacacttcctcaagtgcttgttcagcacattcccacagagcgccgcaatctgcggcttgaggcacgaggtcctgaagcatgagaacaccgttcccccacagagcatgggggctagctcaaactccgaggacgctttctcccccggtataaagcagcctgaagcgcctgagattactgtgttcttcagcgaaaaagagcacctggacttggagacaagtgaattctttcgtgataagaaaacctcttacagggaaactgcgctgagtgccagaaaaaatgagaaagaatacgatacccctgaagttacgctgagctattctgttgagaaggttggttgcgaagtgccagctactatcacatacatcaaagacgggcagagatacgaggagttggacgattctttgtatctcggtaaggaagagtacctcggttccgtggatacccctgaagacgccgaggcaactgtcgaggaggaggtgtatgatgatcctgagcacgtggggtatgatggcgaggaggatttcgaaaacagcgagacaacagagttttcaggtgaggagccatcttacgagggctcagaaacaagcttgtcattagaggaagaacaggaaaagagtatagaggagaggaaaaaagtcttcaaggatgtgctgttatgtctgaatatggatcggagtcgaaaagttctgccagactttgtgaagcagttctccctggaccgcgggtgtaagtggacacccgaatctccaggcgacctggcttggaactttctgatgaaagtgcaagctcgagacgtaacagcgcgagacagcatcctgagccacaaggtcttggacgaagattccaaagaagacttattagccggcgttgagaacctcgagatccgggacatccaaactatcaatcccctagacgtcttatgcgcaacaatgctgtgctcggattccagcctgcagcgccaggtgatgtcgaacatgtaccagtgtcaattcgctctccccctgttacttcccgacgcggagaataataagagtattctgatgttgggcgccatgaaggatatcgtgaaaaaacagagtacacagttttccgggggccccaccgaggacacggagaaatttcttactttgatgaaaatgcccgtgatctccttcgtgcggctgggatactgcagtttttcgaaatctaggatcctgaacacacttctttcccctgcacagctcaaactccacaagatttttctgcaccaagacctgccactgttggtcctaccccgtcagatcagcgatggcctggtggaaatcacatggtgttttcctgactctgatgatagaaaagagaatccgttcttccagaagcctgtcgcgctcgccaacttgcggggaaacctagagtccttttggactcagtttggatttctcatggaggtgagctcagctgtattcttttttactgactgcctgggagaaaaggaatgggacctgctgatgtttctcggcgaggccgcgattgaacgatgttacttcgtattatccagccaggccagggagtccgaggaagcacagatttttcagagaattctgaatctcaagcctgcccagctgctgttttgggaacgaggggacgctggcgatcgaaggaagaatatggagggacttcaagccgcccttcaggaggttatgttttctagctgtttacgctgcgtcagcgtggaagacatggctgcattggcgcgagaattggggattcaggtcgacgaagattttgagaacacacaaaggatacaagtctctagcggagaaaacatggcaggtacagccgagggtgagggccagcagaggcacagccagctgaagtcctccagtaagtcccaggccctcatgccaatccaggagcctggtacccagtgcgaattatctcagaacctgcagaatctgtatgggacccccgtgtttaggccagtcctggaaaattcttggctgttcccaacacgcatagggggcaacttcaaccatgttagcttgaaggcatcctgggtgatgggccgccccttcggctccgagcaaagacccaaatggttccacccactgccattccagaatgctggtgcccagggccgcggtaagagcttcggcattcagagctttcatccacaaatcttctattccggagagcggttcatgaagttttctcgcgttgctaggggttgccatagtaacggaacatttggccgcctgccaaggcctatctgccagcatgtgcaggcgtgtcctgaaaggcctcaaatgatgggaactctggagagatctagagccgtcgcctctaaaatcgggcactcctacagcctggatagtcagccggcccgcgccgtggggaaaccatggccacaacaagcctgcacaagagtcacagagctcaccgaggctacggggaagttaattagaacatctcacatcggtaagccacatcctcaatcatttcagccagctgcggctacacagaaactgagacccgcttctcagcagggagtgcaaatgaagacacagggtggcgcatcaaatcctgctttgcagataggcagccatccaatgtgcaagagttcccaatttaaaagcgatcagtctaaccccagcacggtgaagcatagtcagccaaagcccttccactctgtcccgagccagccaaagtcatcacagacaaaatcatgccaatcacagccctcacaaactaaaccatccccttgcaagagcacccagcccaagccgtcccagccctggccacctcagtccaagccatcccagccccgtccaccccagcccaaaagttcttccacgaatccttcccaggccaaggcccatcattccaaagccgggcaaaaacggggaggcaagcattag

SEQ ID NO: 181821 - DNA, 933 bp, synthetic construct
  misc_feature 1..933: note = Description of Artificial Sequence: Synthetic coding sequence
  source 1..933: mol_type = other DNA
atggccaccgagagcacccccagcgagatcatcgagcgggagcggaagaagttgctagagatcctccagcatgacccagacagcatcctggatacattgacctccaggcggctaatcagcgaggaagagtatgagactttagagaacgtgactgatctactgaaaaaaagtaggaagctgctcattctcgtgcagaagaagggagaggccacatgtcagcactttctgaaatgcttattcagtacttttccacagagtgccgcaatttgtggattacgtccagaggtgctgaagcacgaaaacactgttcccccacagagcatgggggcgtcctccaattcggaggacgcattttccccgggcataaagcagcctgaagctcccgagataaccgtgtttttctctgagaaggaacaccttgacttggagacatcagagttctttagagataagaagacttcctacagggagacagctcttagcgcacggaagaacgaaaaagagtacgatacacctgaagtgaccctgtcttactccgtggaaaaagttgggtgtgaggtgccagcgactataacatacattaaggacgggcagcggtatgaagagttagatgatagtctttatctgggaaaagaagaatacctgggatcagtggatacacccgaagacgccgaagccactgtggaggaagaagtgtacgacgaccccgagcacgtaggatatgatggagaggaagatttcgaaaatagtgagaccacggagttctccggcgaggaacccagttatgagggctccgagacatcacttagcttagaagaagagcaggaaaagagcatcgaggggtggtcccgcacacacggcctgaagcgcagctcgcacgtgggtttgcctaagtgttgggactacaggagagagccgccatgcctggcatag

SEQ ID NO: 181822 - DNA, 1446 bp, synthetic construct
  misc_feature 1..1446: note = Description of Artificial Sequence: Synthetic coding sequence
  source 1..1446: mol_type = other DNA
atggccaccgagagcacccccagcgagatcatcgagcgggagcggaaaaagctacttgaaatcctgcagcacgatccggattcgatactagacaccctaacctctcgacgccttatatcagaagaggaatacgagaccctcgagaacgtaaccgatctactcaaaaaatctaggaaattgttgatcctggttcagaaaaaaggagaggccacctgccagcatttcctgaaatgtttgttctcgacgttcccccagagcgcggccatttgtggtctcaggcacgaagtgctcaaacacgaaaataccgtacctccacagtcaatgggggcctcctctaactccgaggatgctttctcgcccggcataaaacagcccgaagctccggaaatcaccgtcttcttttccgagaaagaacatttagatctggaaaccagcgagttcttccgcgataaaaaaacctcatatagggaaactgccctcagcgccagaaaaaacgaaaaagagtatgatactcctgaggttaccctgtcatactcagtagagaaggtgggatgtgaagtccccgccaccattacatatattaaggacggccagcgctacgaggaactggatgatagcttgtacctcggcaaagaggagtacttgggctccgttgatacccccgaggatgccgaggcgacagtcgaggaggaggtgtacgatgacccagaacacgttggctatgacggagaggaggacttcgagaacagcgaaaccaccgaattttctggagaggagcctagttacgagggaagtgagaccagcctgagtcttgaagaggagcaggaaaaaagcatcgaggagaggaaaaaggtatttaaggacgtgctgctctgccttaacatggaccgaagcaggaaagtgctgccagatttcgtcaagcagttctccctggaccgcgggtgtaagtggactcccgagtcgcccggcgacctcgcctggaatttcctgatgaaagttcaggcacgggatgtgacagccagggattccatattatcccacaaggtactggatgaggattctaaagaggacttgctggccggggttgagaatcttgaaatacgagacattcaaactatcaaccctttagacgtgttgtgcgcaaccatgctatgctctgatagcagtctgcaacgccaggtcatgagcaacatgtatcaatgtcagttcgctctgcctctcctgctgccagatgctgagaataataaaagcattctgatgctaggcgccatgaaggacatcgtaaagaagcagtctacccagtttagtggaggacctaccgaagataccgaaaaattcctgactctgatgaagactctgaaaaccctcagggaattcaaatttcctcttgagaaaacatggctgggccagctcaaggtcagggtttctaaggataccgtgtcttag

SEQ ID NO: 181823 - DNA, 570 bp, synthetic construct
  misc_feature 1..570: note = Description of Artificial Sequence: Synthetic coding sequence
  source 1..570: mol_type = other DNA
atggtgctggagcaccccgcccgggtggagcccttctacgccgtgttggagagtccaagcttttcactgatgggaattctgctgaggatagcttcaggtacccgcctgagcatcccaataaccagcaacacactcatttattaccacccacacccagaggacattaagttccacttgtacctggtcccctccgacgctctcttgactaaggccattgatgacgaggaggatcggttccacggcgtccgcctgcagacgtcccctccaatggagccactgaactttggaagtagttacattgtttctaattctgcaaatttgaaggtgatgccaaaggaactgaaactttcctatcgaagtcccggtgagatccagcatttctccaaattttacgccgggcagatgaaggaaccaatccagctcgagattacagagaagaggcacggaaccctggtgtgggatacggaggtgaagccagtggacttgcagttagtggctgcatctgcaccaccaccgttcagcggactcctgtggcaacgacagccgctgaaccccccacctgcaaggtag

SEQ ID NO: 181824 - DNA, 1296 bp, synthetic construct
  misc_feature 1..1296: note = Description of Artificial Sequence: Synthetic coding sequence
  source 1..1296: mol_type = other DNA
atgatgcggcagcggcagagccactactgcagcgtgctgttcctgtctgtcaactatttaggcgggacattccccggagacatttgttcggaggaaaaccagattgtgagctcctatgctagcaaagtgtgcttcgagattgaagaagactacaaaaatcgacaattcctgggcccagagggcaatgttgatgtcgaactgattgacaagtccactaatcggtattccgtgtggttccctactgcagggtggtatctttggagcgccaccggtctgggctttctcgtgagggacgaagtgacggtgacgatcgcatttggaagctggtcccagcatctggccctcgacctgcagcaccatgaacaatggttagtagggggaccattattcgacgttactgctgagcccgaggaagctgttgcagaaatccatttgcctcacttcattagcctgcagggggaagtggacgtgtcatggttcctggttgcacacttcaagaacgagggtatggtactggagcaccctgctcgcgtggagcctttctacgcagtgctagaatcccccagctttagtctgatgggaattctgctgaggatagcctctgggacccggcttagtatacctataacttctaacactctcatttattatcacccacaccctgaagacattaagtttcatctctacctcgttccctcggatgcgttactcacgaaagctatcgacgacgaggaagataggtttcatggggtgagactgcagacaagccctccaatggaaccccttaatttcggctcctcatacatagttagtaattccgccaacctcaaggttatgccaaaggagctcaaactctcctaccggtcacctggcgagatacagcatttcagcaagttctatgccggacaaatgaaagagcccatccagctggaaattacggagaaaagacatgggacactggtttgggacactgaggtgaagcccgtagacctgcagctggttgctgcctctgccccccctcccttcagcggggccgccttcgtcaaggagaatcatagacagcttcaggcccgaatgggcgaccttaaaggggtcctggatgatctccaggacaacgaggtcctgaccgaaaacgagaaagagttggtggaacaggaaaaaaccagacagtctaagaatgaggccctgctatcaatggtcgaaaaaaagggggatctcgccctcgatgtgctgttcaggtccatttccgaacgagatccttatctggttagctatctgagacagcaaaatctgtag

SEQ ID NO: 181825 - DNA, 1614 bp, synthetic construct
  misc_feature 1..1614: note = Description of Artificial Sequence: Synthetic coding sequence
  source 1..1614: mol_type = other DNA
atggagaagaaggagtgccccgagaagagcagcagcagcgaggaggagttaccgcggagggactctggctcaagccgaaacatcgatgcctcaaagcttatcaggctgcaggggagccgcaaattactggttgacaacagcatccgcgaactacaatacacaaagaccgggatttttttccaggcagaggcctgtgtgactaatgacacggtctatcgggaactcccttgcgtctctgagacactttgcgacatttctcacttttttcaggaggacgacgaaaccgaggccgaacctctcctttttcgggctgttccagaatgccagctctccgggggggatatacccagcgttagcgaggaacaggagtccagcgagggtcaagacagcggtgatatctgttctgaggagaatcagatcgtaagctcttacgcatccaaggtgtgttttgagatcgaagaggactataagaatcgccagtttcttggcccagaaggcaatgtcgatgtggagctcatcgacaagtccaccaatcgatatagtgtatggttccctacagccggatggtatctttggtctgctacgggcttagggttcctggtacgtgacgaggttactgtcacaattgcttttgggagctggagccagcacttggccctggatctccagcaccacgaacagtggctggtgggaggacctctctttgatgtaaccgccgagccagaggaagcagtagccgaaattcacctgccacactttatttccttgcaggccggcgaggtcgatgtttcgtggttcctcgtggcccacttcaagaacgagggcatggtgttggaacaccctgctcgtgtcgaacctttctatgcagtgcttgagagccctagctttagccttatgggcatcctcctgaggatagcatcagggactcgcctgagtattcccataacatctaataccctgatctattaccaccctcaccccgaggatattaagttccacctgtacctggtgcccagtgatgccttactgaccaaagctatcgatgacgaggaggatcggttccacggggttagattgcagaccagtccaccgatggagcctctgaactttggcagttcatacattgtgtcaaacagcgccaacctcaaggtgatgccaaaggaacttaagctctcctaccgtagccccggcgagattcagcacttctctaagttttatgccggacagatgaaagagcctatccagctggaaataaccgagaaaagacacggtaccctcgtttgggatacagaagtgaaacctgtggacctacagctcgtcgcggcctcagcccctccccctttcagcggcgcggctttcgtgaaggagaaccacaggcagctgcaagcccgcatgggtgatttgaaaggggtgctcgatgatctgcaagacaatgaggtgctgactgagaatgaaaaggaactagtagagcaggagaaaacaaggcagtccaaaaatgaggccctcctgtccatggtggaaaagaaaggcgacctggcattggatgtgttatttcgcagcatttcagaacgcgatccctacctcgtgagctatctgcggcagcagaatctgtag

SEQ ID NO: 181826 - DNA, 1464 bp, synthetic construct
  misc_feature 1..1464: note = Description of Artificial Sequence: Synthetic coding sequence
  source 1..1464: mol_type = other DNA
atggagaagaaggagtgccccgagaagagcagcagcagcgaggaggaactgccccgaagggtatatcgagagttaccctgtgtgtccgaaactctttgtgatatcagccacttctttcaagaggatgatgagaccgaagccgagcctctgctctttagggcagtccccgagtgccagctgagcgggggtgacattccctcagtttctgaggagcaggaaagttcagaaggtcaagattctggagatatctgctcagaagagaatcagatcgtgtcctcgtacgcgtccaaagtctgttttgaaattgaggaagactacaaaaataggcaatttctgggcccggaaggtaacgtggacgtcgaactcatcgacaagagtactaaccggtactcggtgtggtttccaaccgcgggatggtacctttggagtgcaacgggcctcggcttcctggtcagagatgaggtgactgtcacaatagcattcggatcatggtcccagcacctggccctggaccttcagcaccatgaacagtggttggtgggggggccccttttcgacgtaaccgcggagcctgaagaagccgtggccgagatacacttgccacattttatcagcctccaagctggtgaggtcgatgtgtcgtggtttttggtggctcatttcaaaaatgagggaatggtcttggaacatccagctagagtggagcctttctacgccgtgctggagtcaccttcatttagcctgatgggaatactcctgcgtatcgccagcgggactcggctgagtattcccatcacctctaataccttgatttactaccaccctcaccctgaggacatcaaatttcatctctacctggtgccgtcagacgccctgctgaccaaagcaatcgacgacgaagaagacagatttcacggagtgaggctccagacatcaccaccaatggaacctctcaactttgggtcttcttacattgtgtctaactccgccaatttgaaagtaatgcccaaggaactaaagcttagctacaggtcccctggggaaatccagcacttctcgaagttctatgctggacaaatgaaagagcccatccagcttgaaatcaccgagaagcgacacgggacactcgtatgggatactgaggtcaagcccgtggatctgcagctcgttgctgcatccgcccctccccctttctccggggccgcctttgttaaggagaaccatcgacagctgcaggcgcggatgggtgacctcaaaggggtcctcgacgatttgcaggataacgaggtactcacagagaacgaaaaagaactagtggagcaggagaagacacgacagagcaagaatgaagccttactcagcatggtggagaaaaaaggcgatctcgctctggatgtcctttttcggtcaatctctgagcgtgacccatacctagtttcatatttgaggcagcaaaatttatag

SEQ ID NO: 181827 - DNA, 1101 bp, synthetic construct
  misc_feature 1..1101: note = Description of Artificial Sequence: Synthetic coding sequence
  source 1..1101: mol_type = other DNA
atgagcgactacgagaacgacgacgagtgctggagcgtgctggagggctttcgagtcaccctcactagtgtgatagatccaagccgcataacaccctatctgcgacaatgtaaagtcctgaacccggacgacgaagaacaggtcttgtcggaccctaacctggtgattcgcaaacgaaaggtcggagtactcctcgacatccttcaaaggaccggccacaaaggatacgtggccttccttgagtctctggaactctattaccctcagctctataagaaagtcactgggaaagaacccgcccgtgtgtttagtatgatcatcgacgcctctggggagtccggtcttacacaactgctgatgacagaggtgatgaaattgcagaaaaaagtgcaggatctgacggctctgctttcaagcaaggatgattttataaaggagttgagagtgaaagattccttgcttagaaagcatcaggaaagagtgcaacgattgaaagaggagtgtgaggccggatctagagaactgaagaggtgcaaagaggagaattacgacctagccatgcgccttgcccatcagagtgaggagaagggagccgctctcatgaggaacagggatttacagctggagatcgatcagctgaaacactctctgatgaaagcggaagatgattgcaaagtcgagaggaagcatacccttaagctgagacacgcaatggaacagcggccgagccaggaacttttgtgggaactgcagcaggagaaggcccttctgcaagcaagggtacaggaacttgaagccagtgtgcaggaggggaaactggaccgttccagtccctacattcaggtactggaggaagattggcggcaggccctgcgggatcatcaggagcaggccaacacaatcttcagcttaaggaaagacctccgccagggagaagcccgacgccttaggtgcatggaagagaaggaaatgtttgagctgcagtgtctggcgctcaggaaagattctaagatgtacaaagatcgcatagaggcaatcctgctccagatggaagaagtcgctattgagcgcgaccagagcacacagatggaaggactttag

SEQ ID NO: 181828 - DNA, 1611 bp, synthetic construct
  misc_feature 1..1611: note = Description of Artificial Sequence: Synthetic coding sequence
  source 1..1611: mol_type = other DNA
atgagcgactacgagaacgacgacgagtgctggagcgtgctggagggatttagagtgacactcacttcggtgatcgatccttccagaattaccccttacctccggcaatgcaaggtactgaacccggatgacgaggagcaggtactctctgatccaaatctcgttattagaaagcgaaaagtcggagtgctgttggacattctccaaaggactggccacaaaggttacgtggcgtttctggagtccctggagctgtattacccccagttatacaagaaagtcacgggaaaagagccagcccgggtgtttagtatgattattgacgcaagcggtgaaagtgggcttacccagttactcatgactgaggtgatgaagttgcaaaagaaggttcaggatctgactgccttgttatcatcaaaggacgacttcatcaaggaactgcgagttaaggattcactgctgcgcaagcatcaagagagagtgcagcgcctgaaggaggaatgcgaggctggcagtcgggaactcaagcggtgtaaggaggaaaactacgacttagccatgagactggctcaccagagtgaagagaagggcgcggctctcatgaggaatcgcgacctccagttagaaatcgaccagctgaagcactccctaatgaaggcggaagacgattgtaaagtggagcggaaacacacattaaaattaagacatgcaatggaacagagaccctcccaggaactcctctgggagttgcagcaggaaaaggcgttgttacaggcaagagtccaggaactcgaagccagtgtgcaggagggcaaattagatagatcttccccttacatccaggtcttagaagaagactggagacaggccctcagagaccaccaggaacaagcaaatacgattttttcacttcggaaagacttacgccaaggcgaggcccgacgactgagatgcatggaagagaaagaaatgtttgagctgcagtgcctcgcactgagaaaagacagcaagatgtacaaggatcggattgaggccatcctgctgcagatggaagaggtcgctatagaaagggatcaagccatcgccactcgggaggagctccatgcgcagcatgccaggggactgcaggagaaagacgccttaaggaagcaggtgagagaacttggtgaaaaggccgatgagctccagctgcaggtttttcagtgcgaagcccaactcctggccgtagagggtcggctgagacggcagcagctcgagactctggtgttaagctctgaccttgaggatggttcaccccgtcgcagccaagaacttagcctaccgcaggaccttgaggacacacagctttctgataagggttgcctggcaggcggcggttctcctaagcagccatttgccgcactgcaccaggagcaggtcttaaggaacccacatgacgccgggttgtcctccggggaacccccggaaaaagaacgtcgccgactgaaggaatccttcgagaattatagacggaaacgggcacttaggaagatgcaaaaaggctggcggcagggtgaagaagatcgtgagaacaccactgggagtgataacacagacacagaagggtcgtag

SEQ ID NO: 181829 - DNA, 1479 bp, synthetic construct
  misc_feature 1..1479: note = Description of Artificial Sequence: Synthetic coding sequence
  source 1..1479: mol_type = other DNA
atgagcgactacgagaacgacgacgagtgctggagcgtgctggaggggttcagagttaccctcactagcgtgatcgatccaagtcggattaccccatacctgcgacaatgtaaagttctgaaccccgacgatgaggagcaggtattgagcgatcctaacctggtcatccgaaagcgaaaggttggtgtgctgctggatatactccaaaggacaggtcataagggctacgtggcctttctggagtctctggagctgtactatccccagctgtataagaaggtgaccggcaaggagccggctagagttttctcaatgattatcgatgcttcaggcgagagcgggctcactcagctgcttatgactgaggtgatgaaactccaaaaaaaggttcaggacctcacagcactgctatccagtaaggatgacttcattaaggagttacgggttaaggactcgctgctgcgcaagcatcaggagagggtgcagagactcaaggaggagtgcgaagccggtagtagggaattaaaacgatgcaaggaggaaaactatgacctcgccatgcgcctggcccaccagagcgaagagaaaggagccgcattgatgcggaacagagacctccaactcgaaatcgatcaactaaaacattctctcatgaaggctgaagacgactgtaaagtcgagcgcaagcacaccctgaaactccgacacgcgatggaacagcgcccgtcccaggaactcctatgggagcttcaacaggaaaaagccctgctgcaggcacgggtgcaggagcttgaggcctcagtgcaagagggcaaacttgaccgctcgtctccttatattcaggtgcttgaggaagactggcggcaggccctgcgggaccaccaggagcaggcaaacactatcttttccctgcggaaggatctgcgtcaaggcgaagcgaggcgtctccgttgtatggaggagaaagaaatgtttgagctccagtgccttgctctgcggaaggacagcaagatgtataaagataggatcgaagccatcctcttgcagatggaagaggttgccatagagcgggaccaagctatcgccactcgggaagaactccacgcacaacatgctcgcggattacaagaaaaggacgcactgagaaaacaagtccgggagcttggggaaaaggccgatgaactccagctgcaagtatttcagtgcgaggctcaattgctcgccgtagaaggcaggctgagaagacagcaactcgagacattggtgctgtcaagcgatctggaggacgggagccctagaagatcgcaggaattgagcttgccccaggacctggaagatacacagctctcggataagggctgcttggccggcgggggcagtcctaagcaacctttcgccgctctccaccaggaacaggtcctccggaatccgcatgatgcaggtcctgccgggctgccaggaataggagccgtgtgctag

SEQ ID NO: 181830 - DNA, 3501 bp, synthetic construct
  misc_feature 1..3501: note = Description of Artificial Sequence: Synthetic coding sequence
  source 1..3501: mol_type = other DNA
atggacctgggcaccgccgagggcacccggtgcaccgacccccccgccgggaaaccagctatggctcctaagcgaaagggcggactcaaactgaacgccatctgcgcaaagctttctagacaagtggtagtggaaaaacgtgccgatgccggctcgcataccgagggcagccctagtcaaccaagagatcaggagaggagtgggcccgagtctggcgctgcccgggcgccacgaagcgaggaggataagcgacgcgccgtgattgagaagtgggtgaacggtgaatactctgaagaacccgccccgactcctgtgctgggaagaatagctagagaagggcttgaactgccacctgagggtgtctacatggtgcagcctcagggttgcagcgatgaggaagaccatgccgaggaaccaagcaaagacggtggcgccttggaggaaaaagactccgacggggccgctagtaaggaggatagtggaccatccacccggcaggcatcaggggaggccagttctctacgggattacgcggcatcgactatgactgagtttttggggatgttcggctacgacgatcagaatacacgagatgagcttgctagaaagatcagcttcgagaagctgcacgcaggctcaacccctgaagccgcaacttcaagcatgctgcccacatctgaggacaccctaagtaaacgggcccgttttagcaaatacgaggaatatattcgtaagctgaaggccggagagcaattatcttggccggctccctcaacaaagaccgaggagagagtgggtaaagaggtggtgggaacactacccgggctgcggctgcctagctctactgcgcacttggagacgaaggctacaatcctgccgttgccctcacactcaagcgttcagatgcagaatttggtagcgcgtgccagcaagtatgattttttcattcagaaactgaagacgggcgaaaatctaaggcctcagaacggcagtacgtataaaaagccctctaaatatgatttggaaaacgttaaatacttacacctgttcaaaccgggtgaaggcagtcccgatatggggggagccattgcctttaaaaccggcaaagtcgggaggccgtcaaagtacgacgtccgcgggatccaaaagccgggacccgccaaggtgcctccgaccccttctcttgctcctgccccattagcaagcgtgccctccgcacctagtgcgcctgggcctgggccagaaccgcccgcctccttgagtttcaacactcctgagtatttgaaatcaacattttcgaagacggattccatcacaaccggtaccgtgtccacagtcaagaacgggcttcccacggacaaaccggcagtgacagaggatgtgaatatctatcagaagtacatcgcccgattctctggctctcagcattgcggacatatccattgcgcctatcaatacagagaacattaccattgtctcgatcccgagtgtaactatcaaagatttacctcgaagcaggacgtcattaggcattacaatatgcataaaaagagggataactcattacaacatggattcatgagattctcaccgcttgatgattgcagtgtgtactaccacggttgccatctgaacggcaagtctactcactatcattgcatgcaggtcggctgcaacaaggtgtatacgtcaaccagcgacgtcatgacccatgagaacttccataagaagaatacacagctgatcaatgacggcttccaaagattccgggccaccgaggactgcggcaccgccgactgtcagttctacggacagaaaacaacacacttccactgccgccggccaggatgtacatttactttcaagaataagtgtgatattgaaaagcacaaaagttatcatattaaggacgacgcatatgcgaaagacggtttcaaaaaattctacaagtatgaggaatgtaaatacgaaggatgtgtgtacagcaaagctaccaatcatttccattgtattcgagctggctgtggttttacattcactagcacttctcagatgacgtctcacaaacgcaagcatgagaggcgccacatcagatcctcaggagctcttgggcttccgccttcgctgctaggtgccaaagatactgagcacgaagaatcttctaacgacgatctcgttgacttttccgctctatcctcaaagaactcctctctctctgctagcccaacctctcagcagagctccgccagtttggcagccgcaaccgcagccaccgaggccggtccgtcagcgactaagccacctaattctaagatcagcggactgttgccacaaggcctgccggggtctatccctttagcccttgccctcagcaattccgggttgccaacccctacgccttatttcccgatcctggctgggcggggatccacgtctctgccagtcggtacgcctagccttctgggcgctgtgtcatcaggatctgccgcctctgctacacctgacaccccaactctggtagcaagtggagctggagattcagccccagtggccgcagcgtccgtacccgcgcctcctgcctccatcatggaacgtattagtgcgagcaagggattaatctcccccatgatggcacgcttagcagctgcagcactgaagccatcagcaacctttgacccgggatcagggcagcaggttacccctgcccggttcccacctgctcaagttaagccagaaccaggagagtccactggagcgcctggtccacacgaggcttctcaggatcggtcgcttgatcttactgtcaaggagcccagcaacgagagcaacggtcacgctgtgcccgctaattcaagcctgctgtcatcccttatgaataaaatgagtcagggcaaccctggactcggctcactgctgaatatcaaagccgaggccgagggctcacctgccgcagaacctagcccattcctgggcaaggcagtcaaggccctcgttcaggaaaagcttgcggagccatggaaggtttacctgagacgattcggaaccaaggatttttgtgacggacagtgtgacttcctgcataaggcacactttcattgtgtggtagaggagtgtggcgcactgttctcaaccctggacggtgcaattaagcacgcaaactttcacttcagaactgaagggggcgccgcgaagggaaatactgaagcagcattccccgcctctgccgccgaaactaaaccacccatggcgccatcttctcccccagtgccccccgtgacaaccgctactgtgtcctcactggagggccccgctccaagtccagcctccgttcctagtactccaaccttacttgcatggaagcagctggctagcacaattccccagatgccccagatccccgcctctgtgccgcacctgcccgcaagcccgctcgctaccacatccttggaaaatgcgaagccccaggtcaagcctggttttctccaattccaggagaaatag

SEQ ID NO: 181831 - DNA, 5280 bp, synthetic construct
  misc_feature 1..5280: note = Description of Artificial Sequence: Synthetic coding sequence
  source 1..5280: mol_type = other DNA
atggacctgggcaccgccgagggcacccggtgcaccgacccccccgctggcaagcctgcaatggctcctaaaagaaaaggcggcttgaaactcaacgcaatctgtgctaaactgagtcggcaggtggttgtggaaaaacgcgccgacgccggcagccacactgagggatcaccttctcagccaagagaccaggagcgctctgggcccgagtccggcgcggcccgggcacctcggagcgaagaggacaagaggagagcagtgattgagaagtgggtaaacggcgagtatagcgaggaaccagctccaacccccgtgctgggccgaattgctcgggagggcctggaactgccacctgagggtgtgtatatggtgcaaccacagggatgttccgacgaggaggatcatgcagaagagcctagcaaagatggtggagctcttgaagagaaggatagtgatggagccgcgagcaaggaggatagtggccctagtacccggcaagcaagcggcgaagcttcctcgctgcgggattacgccgcaagcactatgactgaattccttggaatgtttgggtacgatgatcagaatactagagatgaactagcgcgaaagatctcgttcgagaagcttcatgcagggtccacgcctgaggcagcaacctctagtatgcttcctacctcagaagacaccctctcgaagcgggctaggttctccaaatatgaagagtacatccgcaagcttaaagcaggtgagcaattgtcgtggcctgccccatcaaccaaaactgaagaacgcgtaggcaaggaagtagtgggcaccttacccggcttgcggcttccaagctcaacagcgcacctcgagactaaggctaccatattacccctgccttctcatagctccgtgcagatgcagaacttggtcgcccgtgcctcaaagtacgatttctttatccagaagctcaagaccggtgaaaacctgcggccccagaatggtagtacttataagaagccttccaagtacgatctagaaaacgtgaagtacctgcacctgttcaagcctggagaggggagcccagatatgggtggcgccatagctttcaagacaggcaaggtcggtcgccctagcaaatatgacgttcgtggaatacaaaagcccggtccagcaaaagtgccacctaccccctctctggcccccgcccctctcgccagcgtccctagcgcccccagcgcacctgggccaggcccagagccacccgcctccctttcctttaatacgccagaatatctgaagagcaccttctctaagacagattccataacgacagggacagtgagcactgtaaaaaacgggcttcctacagacaagcctgcagtaacagaggacgttaacatctaccagaaatatattgcgcgctttagcggtagtcagcattgtggacatatacattgtgcctaccaatatagagaacattaccactgtctggatccagaatgtaattaccagcggtttacttcaaaacaggacgttatccggcattataatatgcacaagaagagggataacagtttacagcatggtttcatgcgcttctcccctctggacgattgtagtgtttactaccacggctgccacctgaacgggaaaagcacccactaccactgtatgcaagtgggctgcaataaggtctatacaagcacgtccgatgttatgacgcatgaaaacttccataagaagaacacccagctgatcaatgatggctttcagaggtttcgtgctactgaagactgcggcaccgccgattgtcagttttatggacagaagacaactcattttcattgccggcgtcccgggtgcacattcacattcaaaaataagtgcgacattgaaaagcataaaagctaccacatcaaagatgatgcatacgccaaagacggcttcaagaaattctataagtacgaagagtgcaagtacgaagggtgtgtttactccaaagccactaatcacttccactgcataagagctggatgtggatttacattcacaagcacttctcaaatgacttcacataaacgcaaacacgagagacgtcacatacggtcctcaggggcactgggcctccccccctctctcctgggcgccaaggacacagaacacgaagaatccagcaatgatgatctggtggacttttctgccctttccagcaagaattccagcttgtctgcctcacccaccagccagcagagtagcgcttcccttgctgccgccaccgcagctacagaggcaggtccctcagctaccaagccaccaaatagtaagatcagcgggctattaccccagggcttacctggatcaattcctctggctctggcgctcagcaattctggccttccaacaccaacaccctattttccaatcctcgcagggagagggtccacatctcttccagtgggtactccatcccttctaggggccgtaagtagcgggtccgccgcctcggccacccctgacacaccaacgctcgtagccagcggggcgggggattccgcgccagtagcggccgccagcgtacccgcaccaccagcttctatcatggaaagaatcagcgcctcaaagggcctaatctcacccatgatggcccgcttggccgccgctgcacttaagccaagcgccaccttcgatccaggtagcggacaacaggtgacaccggcacggttcccacccgctcaggtcaagcctgaacctggtgagtccactggcgcgcccggaccccatgaagccagccaggatcgcagcctggacttgaccgtaaaagagccatctaacgaaagcaatggtcacgccgtgccagccaacagctctttattgtcttcgcttatgaacaagatgtcacagggcaatcccggattaggctcattgctcaatatcaaagccgaggccgaggggtcccccgccgcggagccgtcgcctttcctgggaaaggccgtcaaggctctggtgcaggagaagctcgccgagccctggaaggtgtacctacggagatttggaacaaaggacttttgtgacggacaatgcgacttcttgcataaggcacactttcactgtgtggtggaagagtgcggcgccctcttttccacacttgacggggccataaagcacgcaaattttcactttcggaccgaaggaggcgcagctaaggggaacacggaggcagcgttcccagcttccgccgcagaaaccaaaccccctatggctccaagtagtccccctgtgcctccagttaccactgctaccgtctccagtctggaggggccagccccctccccagccagtgtgccctcaacccctacccttctggcgtggaaacagttggctagcaccatcccacagatgccacaaatccccgccagtgtcccacatttgcctgcctctcccctggccactaccagtcttgagaacgccaagccacaggttaaaccagggtttcttcaattccaagagaacgacccctgtctggcaacggactgtaagtacgccaacaagtttcacttccattgtctcttcggaaattgcaagtatgtatgtaagacttctggcaaagcagagtcacactgcctggatcacatcaaccctaacaataacctggtgaacgtgagagaccagttcgcctattattctttgcaatgtctgtgtccaaatcagcattgtgagttccgcatgcgcggtcattatcattgtctccgaacaggttgctacttcgtgacgaacatcacgacgaagctcccttggcatattaaaaagcatgaaaaagccgagaggagagctgccaatggattcaagtattttacaaaaagagaggaatgcggcagactaggatgcaagtacaaccaggtaaattcgcactttcactgtattcgtgaaggctgccaattctctttcctgctgaaacatcagatgacttcccacgcacggaagcatatgagaaggatgctaggaaaaaactttgaccgggtgccccccagtcagggcccacccgggctcatggacgctgaaaccgatgagtgtatggattacaccggatgtagcccaggagccatgtcctccgagagctccactatggatcgcagctgctcctcaaccccagtcggcaatgaaagcactgccgccggaaataccattagcatgccaacggcatctggcgccaagaaacgattctggattatagaggacatgagcccatttggtaaacggagaaagacagcatcaagccggaagatgctggatgaaggaatgatgctcgagggctttcgcagatttgacctatacgaggactgcaaggatgcagcctgccagttcagcctgaaagtcacccattatcactgtacaagggaaaactgtggctataagttctgtggacgcacccatatgtacaagcacgctcagcatcatgacagggttgacaatctcgtactcgacgactttaagcgctttaaggcatccctgtcttgtcacttcgccgactgcccattcagtggtacaagcacccacttccactgcctcaggtgtcgttttcgctgtaccgatagtacgaaagtcaccgcacaccgaaaacaccacggtaaacaggatgtcatctcagcagctgggttctgccagtttagctcgtctgcagactgtgccgttcccgactgcaaatacaagctgaaatgctcccacttccattgcactttcccgggctgccgccacactgttgttggtatgtcccagatggactctcacaagaggaagcacgagaagcaggaacggggcgagcccgcagctgaggggcctgcaccaggccctccaataagtctggatggctcattgtcactaggcgcagagcccggaagtctcctcttccttcagtcggcagctgcagggctgggcttagcactcggtgatgcgggcgacccagggccccctgatgctgccgcacctggccctagggagggcgctgcagccgccgcggcagcagccggcgaaagcagtcaagaagacgaagaggaggagctcgagttacctgaagaggaggccgaggatgatgaagacgaggatgatgatgaagacgacgatgacgaggatgatgatgaggacgatgatgatgaggacctgagaaccgatagtgaggaatctctgccagaggccgctgctgaggccgcgggggcaggggcccgcactcccgcactcgccgcgctcgctgcccttggggccccagggcctgcacctacggccgctagttccccgtag

SEQ ID NO: 181832 - DNA, 4332 bp, synthetic construct
  misc_feature 1..4332: note = Description of Artificial Sequence: Synthetic coding sequence
  source 1..4332: mol_type = other DNA
caggagctggaggccgccctgcaccgggacgacgtggagttcatcagcgacctgattgcatgtctgttgcagggctgctatcagcgacgcgacattacgccccagacctttcactcataccttgaggacataatcaactatcggtgggagctagaagagggaaagcctaacccgctgcgagaagcaagctttcaggatctgccccttaggactagggtggaaatcctgcaccggttgtgcgattacagacttgatgccgacgatgtgttcgacttgcttaagggcttggatgccgatagcttgcgagtggaacccctaggggaagacaactctggcgccctctattggtacttctacggcacacgaatgtataaagaagaccccgtccaaggcaagagcaatggagaacttagccttagccgggaatcggaggggcaaaaaaacgtatcctcaatccccggtaagactggtaagaggcgtggcaggccacccaagcgcaaaaaactgcaggaggaaattctgttgtctgaaaaacaggaggagaactcactggcgtccgagccccagaccagacatggaagtcaaggccctggccagggtacttggtggctcttgtgccagaccgaggaggaatggcggcaggtcaccgagtccttccgagaaagaacatctctaagagagcgacaattatacaagctgctgtctgaagatttcctgcctgagatatgtaacatgatagcccaaaaggggaagaggccgcagcgtaccaaggctgaactacaccctcggtggatgtctgaccacctgagcataaagcctgtgaagcaggaagaaacaccagttcttactcggatcgaaaagcagaaacgtaaggaggaagaggaagagcgtcagatcttgctagcagtccagaagaaagagcaggagcagatgctgaaggaggagcggaaacgcgaactggaagagaaagtaaaggctgtggaagggatgtgctcagtacgtgttgtctggcgcggtgcctgtcttagcacctccagacctgtggacagagcaaaacggagaaagctaagagaggagagggcttggttgcttgctcagggaaaagaacttccacccgagctgtcccacctggaccccaactctccgatgcgggaggaaaaaaaaactaaggacctcttcgagttagacgatgacttcactgccatgtataaggtcctggacgttgtgaaggcacacaaagactcttggcctttcctggaacctgtggatgaaagctatgcccccaactattatcaaataatcaaggctcctatggacatctcgagtatggaaaaaaagctgaatggcgggctatactgtacaaaggaggagtttgtaaacgacatgaaaaccatgttcaggaattgtcgcaagtataatggcgagtcctctgaatacacaaagatgagcgataaccttgagcgctgttttcaccgcgctatgatgaaacactttcccggggaagacggagatactgacgaggaattctggatccgcgaggatgaaaagcgagaaaaaaggagaagtagggccgggcggagtggtggatcccatgtctggacccgaagtcgagatcccgagggcagtagtcggaagcagcaacccatggagaacggtggaaaaagcttgcctccaactagacgcgcgccctccagcggcgacgaccagagcagctcaagcacccaacctcccagagaagtaggcacatctaatggtcggggtttcagtcatcccctccattgcggcggcactcccagccaggccccctttctgaatcaaatgagaccagccgttcctgggaccttcgggcccctgagagggtcagatccagctaccctgtatggcagcagtggggttcccgagccacatcccggtgagcccgtgcaacagcgacagccgttcaccatgcagccccctgtgggaattaattcactgaggggtccgagactagggaccccggaggaaaaacaaatgtgtggtggactgacacacttgtctaacatggggccgcaccccgggtcgctccagctaggccaaataagcggccctagccaggacgggagtatgtacgcgcccgcgcaatttcagcccggcttcatccctcccaggcatggaggagcgccagcaaggcctcccgattttccagagagcagcgagatcccgccttcacacatgtaccgctcgtacaaatacctcaaccgtgtccattctgccgtgtggaacggcaaccacggcgcaaccaatcagggcccgttaggacccgacgagaagccgcacctcggaccaggacccagccatcagccccgcacactcggacacgttatggattcccgtgtcatgagaccgccggtgcctccaaaccagtggacagagcaatcaggatttctcccacatggggtgccaagctccggatacatgaggccaccatgcaaatccgccggccaccgactgcagcctccgcccgttccagccccctcaagcctgtttggggcccccgcccaagccctgagaggggtgcaaggcggcgatagcatgatggacagcccagaaatgattgctatgcaacagctcagcagcagggtttgccccccgggcgtcccgtatcacccacaccagcctgcccaccctcgcctgcctggtccatttcctcaggtggcgcaccccatgtctgttacagtatcggccccaaaacccgctttgggcaacccagggcgggcacctgagaacagcgaggcccaggagcctgagaatgaccaggctgaaccactgcccggcctggaagagaagccaccaggtgttggtaccagtgaaggtgtttacttaactcagctgccccatcctacacctcctctacagacagattgcacacgacagtcctccccccaggagcgggagaccgttggccccgagttgaaatccagttcttcagagagtgctgataactgtaaggcaatgaagggaaagaacccttggccctccgactccagttatcctggtcctgcggcacaagggtgtgtgagggacctgtctactgttgcggacagaggggcgctatccgagaatggggtgataggggaagcctcaccctgtgggtccgagggaaaagggctagggagtagcggctccgaaaagctcctgtgcccaagaggcaggaccctccaggagaccatgccctgtaccgggcagaacgctgcaacccctccatcaacagatccaggtctcacaggagggactgtcagccaatttcctcccctctatatgccgggcctggaataccctaacagcgcagcccattaccatattagtcctggtctccagggcgttggtccagtgatgggtgggaagagccccgcaagccatccccagcactttcctcctcgaggcttccagagcaaccacccccattccggcggatttccccgataccgccctccccagggtatgcgctattcgtaccatcccccaccccagccctcttatcaccattaccagcggacaccctattatgcgtgcccgcagtccttctccgattggcagaggccactgcatccccagggctctccgtcagggcccccagcaagccagcctccacctccacgctcgctcttctcagataaaaatgccatggcctccctccagggctgtgagacactgaacgccgccctcacgagccccacacgaatggacgcagtcgcagcaaaggtgcccaatgatgggcagaatccaggtccagaggaggagaaacttgatgaatcaatggaaaggcctgaatccccaaaagaatttcttgacctggacaatcacaacgcagctacaaagagacaatcatctctgtctgcaagcgagtatctctacggtacacccccgccattgtcatccggtatgggctttggctcgagtgccttcccgccacattccgtgatgttacagactggacccccctacacacctcagcgtcctgcatcacactttcagcctagggcatactcaagcccagtcgccgctctcccacctcaccatcccggagccacacagccgaatggcctatctcaagagggacctatttataggtgccaggaggagggactcgggcactttcaggctgttatgatggaacagatcggaactcgttctggaatcagaggcccttttcaggaaatgtataggcctagtgggatgcagatgcacccagtccagtctcaagcctccttcccaaaaacgccaaccgccgcgaccagtcaggaggaagtgccccctcataaacccccaaccctccctctggatcagtcctag

SEQ ID NO: 181833 - DNA, 1371 bp, synthetic construct
  misc_feature 1..1371: note = Description of Artificial Sequence: Synthetic coding sequence
  source 1..1371: mol_type = other DNA
gagctggaggccgccctgcaccgggacgacgtggagttcatcagcgatctgatcgcatgcctactccaaggatgctatcagagacgagatattaccccccagacttttcattcatatcttgaggacatcattaactacagatgggagctcgaagaaggaaagcccaaccctctgagggaagccagctttcaggaccttcccttgcggacaagggtagaaattctccatcgtctgtgcgattaccgacttgacgcagacgacgtatttgaccttctgaagggtcttgacgccgactcactccgcgtggaacccctcggcgaagataattccggcgctctgtattggtatttttacgggaccagaatgtataaggaagaccccgtgcagggtaagagcaacggcgagctgagcctatcccgcgaatcggaagggcagaaaaatgtgtcctcaatccccggcaaaacgggcaaacgccgcgggcggccacctaaacgcaagaagctacaagaggagatcctgcttagcgaaaagcaggaagagaacagcctggcttctgagccacagaccagacacggcagccaggggcccggacagggcacctggtggctgctgtgtcagacggaggaggaatggcgtcaggtgactgagagctttcgggagcgaactagcctcagggaacgccaactatacaaactgctttccgaagacttcctgccggaaatctgtaatatgatcgcccagaaggaaacaccagtccttaccaggattgaaaagcagaaacggaaggaagaggaggaagagcgccaaattctgttagccgtccagaagaaggaacaggagcagatgcttaaggaggaaagaaaacgagagctggaagagaaagtgaaggctgtcgagggcatgtgtagcgtgagggtggtctggaggggcgcctgcttgtctacctctcgtcccgttgatcgagcaaagaggcggaaacttagagaagagcgggcatggctgctagctcaggggaaagaactgccccctgagctctcccacctcgacccaaattcaccaatgagagaagaaaagaagactaaagatctgttcgagctagatgacgactttacagccatgtataaagtgctggacgtggtcaaggctcacaaggatagctggcctttcctcgagcccgtcgatgaaagttacgcccccaactactaccagatcataaaagcacccatggatatctcaagtatggaaaaaaagctgaacggcggattatattgtaccaaggaagagtttgttaatgacatgaaaacaatgttcaggaattgtcggaaatataatggcgagtctagcggcaagcaggggcgctcgctgtgttag

SEQ ID NO: 181834 - DNA, 1584 bp, synthetic construct
  misc_feature 1..1584: note = Description of Artificial Sequence: Synthetic coding sequence
  source 1..1584: mol_type = other DNA
atggccgacagccgggaccccgccagcgaccagatgcagcactggaaggagcaaagagcagcccagaaagccgacgttttaaccacaggcgccggcaacccggtgggtgacaagctcaacgttatcacagtaggcccccggggacctctgttggtgcaagacgtcgtctttacagacgaaatggcccacttcgatcgggagagaatcccagagcgggtcgtgcacgccaaaggcgcaggtgcatttggttactttgaagtcacgcacgacattaccaaatacagtaaggctaaggttttcgaacacattgggaagaaaacgccaattgcggtccggttctctacagttgctggcgagagcgggtcagcagataccgtgcgggacccacgagggtttgccgtgaagttctacacggaggatgggaattgggacctcgtcggaaacaatacaccgatcttctttatcagagacccaatcctgttcccttctttcattcattctcagaaacgcaacccccagacccacctcaaagaccccgacatggtctgggacttctggtctctccgacctgaaagcctccaccaggtctcattcctatttagtgatcgcgggattccggacggtcatcgtcacatgaacggctacggatcacacaccttcaaactcgttaacgccaatggcgaggccgtttattgcaagtttcattataaaacggatcagggcataaagaatctgtccgtagaggacgcagcaagactgtcacaggaagatcccgactacggtatcagagatctttttaatgctatagcaacaggcaagtatccatcgtggacattctatattcaggttatgacattcaatcaggccgaaacctttccttttaaccccttcgatttgactaaggtatggccccataaagattaccctttgattccagtcggaaaattagtactaaacagaaatcccgtgaactatttcgctgaggtggagcagattgcctttgatccctcgaacatgcctcccgggatcgaagcatcccctgacaagatgcttcaagggcggctgttcgcctacccggatacccatcgccatcgactgggaccaaattatctccatatccccgtgaattgtccctacagagctagagtggcaaactatcagcgtgatggcccgatgtgtatgcaagacaaccagggaggagcaccgaactattatcctaatagctttggggccccagagcagcagccctctgcactagagcacagcatacagtactctggcgaggtccgacgattcaatactgccaacgatgataacgtcacacaggtgagggcattctatgtcaacgtgttgaacgaggaacagcgtaagcggctctgcgaaaacattgccgggcatctgaaggacgcccagatctttattcagaagaaagcggttaaaaactttaccgaagtgcatcccgattatggcagtcacattcaagcactgttggacaaatacaatgcagagaaacccaagaacgctatccatacctttgtacaatctggaagccatctagcagcaagagagaaggccaacctgtag

SEQ ID NO: 181835 - DNA, 816 bp, synthetic construct
  misc_feature 1..816: note = Description of Artificial Sequence: Synthetic coding sequence
  source 1..816: mol_type = other DNA
atgcccgaggccccccccctgctgctggccgccgtgctgctgggccttgtactgcttgttgtgttgttgctcctgttacgccactggggatgggggctgtgtcttatcggttggaatgagttcatccttcagcctatccacaatctacttatgggcgatacgaaagagcagcgcatcttgaatcatgtcttgcagcacgctgaaccaggcaacgcccagtctgtcctcgaagctattgacacctactgcgaacagaaagagtgggcaatgaatgtgggcgataagaagggcaagatagtggatgcagtaattcaggaacaccagccctctgtcctcctcgagctaggcgcatactgcgggtattccgccgtgcggatggcaaggctattgtccccgggggcacgattgattacaatcgagatcaaccctgattgcgcagctattacacagcgtatggtggattttgccggcgtgaaagacaaagtcaccctggtggtgggtgccagccaggatatcatacctcagcttaagaagaagtacgacgtggatactctggacatggtctttctagatcattggaaggatcgttatctccccgacacactcctgctggaggagtgtgggctcttgaggaagggtactgtgctgctcgcagacaatgtcatctgccctggggccccagattttctggcacatgtgagaggctcctcttgcttcgagtgtactcactatcaaagctttctggaataccgagaggttgtggacggtttggaaaaggctatctataaaggacctggatctgaagccggtccatag

SEQ ID NO: 181836 - DNA, 816 bp, synthetic construct
  misc_feature 1..816: note = Description of Artificial Sequence: Synthetic coding sequence
  source 1..816: mol_type = other DNA
atgcccgaggccccccccctgctgctggccgccgtgctgctgggcctggtcctattagtggtcttgctgctgctgctgaggcactggggctggggactttgccttatcggatggaacgagttcatactgcagcccatccataatttactcatgggcgacaccaaagagcagaggatcctgaatcacgtcctccagcatgctgagccaggcaatgctcagtccgtgctcgaggcaatagacacatattgcgagcagaaagagtgggctatgaatgttggggacaagaagggaaagatcgttgacgccgtcattcaggagcatcagcccagtgtcctcttggagttgggagcctattgcggatatagcgccgtgcgcatggcccggttgctttccccgggggccaggcttattacaatagaaattaatcccgactgtgccgccattacccagcgaatggtggattttgccggcgtcaaggacaaagtcacgctggtggtcggtgcaagccaggacatcataccacagctcaagaagaagtacgatgtggatactctggatatggtctttctggaccattggaaagacaggtacctccctgacactctcctgctcgaggagtgcggacttctacggaagggaacagtcttgctcgccgataacgtgatatgcccgggagcaccagattttctggcccacgtccggggtagctcctgcttcgagtgtacccactaccagagttttctcgaataccgagaggtggtcgatggattggagaaggcaatatataaaggacccgggagcgaggcaggaccatag

SEQ ID NO: 181837 - DNA, 816 bp, synthetic construct
  misc_feature 1..816: note = Description of Artificial Sequence: Synthetic coding sequence
  source 1..816: mol_type = other DNA
atgcccgaggccccccccctgctgctggccgccgtgctgctgggcctagtcttgttggtcgtgctcttactgctgctccgccactggggatggggactgtgtttgataggttggaatgagtttatcctccagcctatccataacttgttgatgggggacaccaaagagcagcgcatcctcaatcacgtcctccagcatgccgaacccggcaacgcccaaagcgtgttagaggccattgacacgtattgcgaacaaaaggagtgggccatgaatgtgggtgataagaagggcaagatcgtcgatgccgtcatacaagaacatcagcccagtgtcctcctggaactcggagcctactgcggttattctgcagtccgaatggctcgactcctgtctcctggcgccagactcatcacaattgagataaaccccgattgcgcagccatcacacaacgtatggttgattttgcaggcgtgaaggacaaggtcacactggttgtcggagcctcacaggatatcatcccccaattgaagaagaagtatgacgtggatacccttgacatggtgttcctcgatcactggaaagatcggtacctacctgatacactgctgctggaggaatgcgggctgctgcggaaaggcactgtgctactggctgacaacgtcatatgccctggagcccctgatttcctggcacacgtgcgcgggtcatcatgcttcgagtgcacacattatcagtcatttctcgagtaccgggaagtggtggacggcctcgagaaagcgatctataaaggcccgggaagcgaggccgggccctag

SEQ ID NO: 181838 - DNA, 666 bp, synthetic construct
  misc_feature 1..666: note = Description of Artificial Sequence: Synthetic coding sequence
  source 1..666: mol_type = other DNA
atgggcgacaccaaggagcagcggatcctgaaccacgtgctgcagcacgcagagcctggcaacgctcagagcgtactggaagccatcgatacatactgtgaacaaaaggaatgggcaatgaatgttggtgataagaaggggaaaattgtggacgccgttattcaggaacaccagccaagcgtgcttcttgagttaggggcttattgcggctattcagccgtgaggatggcaagactgctgagtcccggagctagactgatcacaattgagatcaaccctgattgcgccgcaatcactcagaggatggtggactttgcgggcgtgaaggataaagtcaccttagtggtcggcgcgtcccaggatattattccacagctgaaaaagaaatatgatgtagataccctggacatggtgttcttagatcactggaaagataggtatctccctgatactttgcttctcgaagaatgcggattactgagaaaggggacagtactactggccgacaacgttatttgtccaggcgctcccgatttcctggcccatgtccggggcagctcttgctttgagtgcacacactaccagtcttttcttgagtatcgtgaggtggtggatgggctggagaaggccatatataaggggcctggctctgaagccgggccctag

SEQ ID NO: 181839 - DNA, 672 bp, synthetic construct
  misc_feature 1..672: note = Description of Artificial Sequence: Synthetic coding sequence
  source 1..672: mol_type = other DNA
atgcccgaggccccccccctgctgctggccgccgtgctgctgggcctcgtgttattagtggtgctgctcctgctgcttaggcattggggttggggcctctgtttgatcggatggaacgagttcattcttcagcccattcacaacctgctgatgggggacaccaaggagcaacgtatactcaatcacgtcctccagcatgcagagcctggcaatgcacaatcagttctcgaggccatcgatacctattgcgagcagaaagagtgggcaatgaacgtcggagacaagaagggaaaaattgtggacgcggtgattcaagaacaccagcccagtgtgctgctggaacttggagcctattgcggctattccgccgtgcggatggctaggcttcttagcccaggagcgcggcttatcacgatagagatcaaccccgactgcgccgctattacccaacgcatggtggacttcgcaggtgtgaaagacaaggtgactctggtggttggggctagccaggatataatccctcagctgaaaaagaagtacgatgtggatactctggatatggtgttcctcgaccattggaaggaccggtacctaccagacacccttctgctggaagagtgcggcctcctgcgcaagggtaccgttctactggcagataacgtgatatgctag

SEQ ID NO: 181840 - DNA, 666 bp, synthetic construct
  misc_feature 1..666: note = Description of Artificial Sequence: Synthetic coding sequence
  source 1..666: mol_type = other DNA
atgggcgacaccaaggagcagcggatcctgaaccacgtgctgcagcatgcggagccaggaaacgcccagtctgttctagaggctatcgacacctactgtgaacagaaggagtgggcaatgaacgtgggagacaaaaagggtaaaattgttgatgctgtaattcaggagcaccaacctagcgtcctgcttgagctgggggcgtactgcggttactctgccgtccgcatggcacgactgctgtcacccggagcaaggcttataacaattgagattaacccagactgtgcagccataactcagcggatggtggacttcgccggggtcaaagacaaggtaactttggtcgtgggcgctagtcaggatatcatcccacaactaaagaaaaaatatgacgtagacaccctggatatggtatttctcgatcactggaaggatagatacctgcctgacaccctcctgctcgaggagtgcggccttctgcggaaaggcacagtacttctggccgataacgtgatatgtcctggagcccccgattttctggcacatgtgagaggctcaagctgctttgagtgtacacactaccaatcttttttggagtatcgagaagttgtggacggattggagaaggccatttataagggcccgggcagcgaagctggaccctag

SEQ ID NO: 181841 - DNA, 2664 bp, synthetic construct
  misc_feature 1..2664: note = Description of Artificial Sequence: Synthetic coding sequence
  source 1..2664: mol_type = other DNA
atggccaacggcaccctgacccggcggcaccagaacggccggttcgtgggcgacgcagaccttgagagacagaagttttcagatctcaagcttaatgggcctcaagatcactcacacctcctctacagtaccatacctagaatgcaagagcctggccagattgtcgagacgtatacagaagaggatccagaaggagccatgtctgtggtttccgttgagacctccgatgatgggaccacccgcaggacagagaccaccgttaaaaaggtcgtgaagactgtcacaacccgtactgttcagccggttgccatgggcccagatggccttccagtggatgcctcctccgttagcaataactacatccagacactgggaagagatttccgaaaaaacggaaatgggggtcccgggccctatgtgggacaggcagggacagctacgcttccccgcaacttccattatccccctgacgggtactctcggcactacgaagatggatatcccggaggatctgataattacggctccctgagtcgagttacccggatagaagaacgctataggcctagtatggagggttacagagccccctcacgccaggatgtgtatggacctcaaccacaagtgcgcgtgggcggaagctccgtagacctacatagattccatcccgagccctacggcctggaagatgaccagcgctccatgggatatgacgatctggactacggtatgatgtctgattacgggacggctagacgcaccggtaccccttctgatcccagacgcaggttgcggtcctacgaggacatgatcggcgaggaagttccctctgatcagtattattgggcccctttggcccagcatgaaaggggatctctggccagtttagattcgctgagaaaaggtggacctcctccccctaactggaggcagcctgaactgccagaggtgattgcaatgctgggcttcaggctcgatgccgtgaagtcaaacgccgccgcctacctgcagcatctatgctaccggaacgacaaggtcaagaccgatgtgagaaaactcaagggaattcctgtgctcgtgggactgcttgatcacccaaaaaaggaggtccatctgggggcctgcggagcgctgaagaacatctcattcggccgggatcaggacaacaagattgccatcaagaactgcgatggcgtgcccgcactggtgagattactgcggaaagcgcgggacatggacctgacagaggtgatcaccggcacgctctggaatctttcatcccatgattccattaaaatggagatcgtggaccacgcactccatgcactcacggatgaggtcattattccccacagcggatgggaacgggaaccaaacgaagattgtaagccacgccatattgagtgggaaagtgtgcttacaaacacagcggggtgcctgcgcaacgtgtcaagcgagcgcagcgaggccagacgcaaactgcgagagtgtgacggcctcgtggacgccttaatatttatcgtgcaagccgaaattgggcagaaggactctgattccaagttggtggagaattgtgtttgcctgctgagaaatctctcataccaagttcatagggaaatcccccaggccgagcgttaccaggaggccgcccctaacgtggccaataataccggtccgcacgcagcatcatgttttggagcaaagaaagggaagggcaaaaaacccatcgaggatccagcaaatgataccgtggattttccgaaacgaactagtccagctagggggtacgaactcctatttcaaccagaggtcgttcggatctatatttcccttctaaaagaaagcaaaacacccgcaatcctcgaggcaagcgcaggggcaattcagaacctttgcgcaggacggtggacatacggacgctatatccggtcggcattaagacaagaaaaagctctgagcgcgatcgccgacctgttgactaacgagcacgagcgggttgtcaaagccgcctctggggcactccgcaatttggcagttgacgctcgcaacaaggagctaatagggaagcacgctatccctaatttggtgaaaaatctccctgggggacaacaaaatagctcttggaactttagcgaagatactgtgatttctatactgaatactatcaacgaggtgatcgctgagaacttagaggccgccaaaaagctgcgcgagacgcagggcatcgaaaaactcgtattgatcaataaatccgggaatagaagcgagaaagaggtgcgggcagctgcgttggtgctgcagaccatctggggttacaaggaactcaggaagccgctcgagaaggaggggtggaaaaagtccgattttcaagtgaacctcaacaacgccagccgtagccagtcgagccacagctacgacgattcgaccctcccgctgatcgaccgcaaccagaagtctgacaataattactctacacctaacgagagaggcgaccacaaccgcacccttgatagatcaggggaccttggggatatggagcctttgaagggaactacccccctcatgcaggatgaaggtcaggagtcactggaggaagaactggatgtcctcgtactggatgatgaaggcggtcaggtgtcctatccctctatgcaaaaaatttag

SEQ ID NO: 181842 - DNA, 1755 bp, synthetic construct
  misc_feature 1..1755: note = Description of Artificial Sequence: Synthetic coding sequence
  source 1..1755: mol_type = other DNA
atggacggctggcggcggcccctgcagagcgtgggcaaggtgtgcgaaaagaacatgaaaacctctgagatgcatacaatgagtggggcccaaacagggagaaaagaaaaaggagaccctctcaacatcgcaatagataaaatgacaaagaagactagggatttgcggcgccaactgcgtaaggctgttatggatcacattagcgatagctttcttgagactaacgttcctctactggtgctgatcgaagctgcaaagtcgggcaatgaaaaagaggtcaaggagtatgcccaggtgttccgagagcacgctaacaaactggtggaagtcgccaaccttgcctgttctatctcaaacaatgaggaaggcgttaaacttgtaagaatggccgctacccagatagatagcctctgccctcaggtcatcaatgctgcgctcaccctggcagcacgaccacagagtaaggtggctcaagataatatggatgtctttaaggaccagtgggaaaagcaggtcagggtgttgactgaggctgtggatgacattacctccgttgatgacttcctgtcagtgtccgagaaccacatattagaagacgtgaataaatgcgtgatagctctccaggaaggggatgtggacacactggatcgaacggctggagccattaggggtagggcagctcgggtgattcatatcattaacgctgagatggaaaattatgaggccggcgtgtacaccgaaaaagttctggaggccacgaaactgttatccgagacagtgatgcctagattcgccgagcaggtggaagtcgctatagaagcattgtccgccaatgtccctcagccctttgaagagaatgagtttattgacgccagtagactagtgtacgacggtgtccgcgatatcaggaaggctgttctcatgatccggacgccggaagagcttgaagacgattccgattttgaacaggaggactacgacgtgcggagtaggacgtccgtacagaccgaggatgatcagctcatcgctggccagtctgccagagccattatggcacagcttccccaggaggagaaagccaagatcgccgagcaggtcgagatattccatcaggagaagtcaaagttagacgctgaggtggctaagtgggatgacagcggtaatgacatcattgttctcgctaagcagatgtgtatgatcatgatggaaatgacagactttacaagggggaaggggcccttaaagaatacctcagatgtcattaatgcagcaaagaaaatcgcagaggccggcagtcgcatggataaattggccagagcagtggccgaccagtgtccggactccgcttgtaagcaggatctgttggcatacttacagagaattgcgctgtactgtcaccagctgaacatctgcagtaaagtaaaggctgaggttcagaatttggggggggaacttattgttagtggcctggattcggccacaagcctgatccaagcggcaaagaatctcatgaatgccgtggttcttactgtgaaggcttcttatgtagcctcaaccaagtaccagaaggtgtatggaaccgcagctgttaacagcccagttgttagctggaagatgaaagcccctgagaagaagccgctggtgaagcgagagaaacctgaggagttccagacccgtgtgaggaggggctcacagaagaaacatatttcgcccgtgcaggccctgagcgaattcaaggcaatggactccttttag

SEQ ID NO: 181843 - DNA, 2820 bp, synthetic construct
  misc_feature 1..2820: note = Description of Artificial Sequence: Synthetic coding sequence
  source 1..2820: mol_type = other DNA
atgagcggcctgatctgcctgcagtacggcctgtggcacggccagaagattgatttcggggggccaagacgcctgctgcagaggaacagaggtgaagggtctatgacaagtgccacttcaccaattatcctgaagtgggatcctaagagcctggaaattcggaccctgactgtggagcgattactggagcctctggttactcaggtaacaaccctggtgaacacatcgaataagggcccttctggtaagaaaaagggaaggtctaaaaaggcgcacgttctggctgctagtgtagaacaggccacccagaatttcttggaaaaaggggaacaaattgctaaagagtcccaggaccttaaagaggagctggtagcagccgtcgaagatgtccggaagcagggggagactatgagaatcgccagctctgaattcgcagacgacccgtgttcaagtgtcaaaaggggtaccatggtgcgtgctgcacgtgcactgctgtctgcagtcaccagattattgatactggctgacatggccgatgtaatgcgcctgctcagccatctgaaaattgtggaggaagctctagaagcagtgaagaatgccactaatgaacaggatcttgctaatcggttcaaggagttcgggaaagagatggtgaaactaaactacgtcgcagcccgccgccagcaggaattaaaggaccctcattgcagggacgagatggctgccgcgaggggagccctgaaaaagaacgccaccatgctgtatacagcaagccaggcgttcctgcgtcacccagacgtggcggccacacgggctaaccgggattatgtgttcaaacaggtgcaagaggcaatagccgggatctccaatgccgcacaggcgacaagtccaactgacgaggccaaggggcatacagggatcggagagctggccgccgccttgaatgagtttgataacaagatcattctggacccaatgacctttagcgaggcaagattcaggccgtcgctcgaggagcgcctggaaagtattatttcaggggcagcactgatggccgacagctcttgtacgcgggatgataggcgcgaacgcattgtagccgagtgcaatgccgttcggcaagcccttcaagatctgctgagcgaatatatgaataacaccggacgaaaggagaagggtgatcccctgaacatagctatcgacaagatgaccaaaaagacacgcgacctgcgaagacagctgaggaaggccgttatggatcacattagcgattcattcttagaaacgaatgtccctttgcttgtgctcatcgaggctgcgaagtccggcaatgaaaaagaggtgaaggagtacgcccaagttttccgcgagcacgctaacaagttggtggaggtagccaacttggcatgtagcattagcaacaacgaggagggcgtgaaactggttaggatggctgctacacagatagattccctgtgcccccaggtgattaatgctgctctgaccctggcagcacgtccgcagtcaaaggtcgcacaggacaacatggatgtgttcaaagatcagtgggagaaacaagttcgggtccttaccgaggccgtcgacgatattacatccgttgacgactttctgagtgtgtccgaaaaccatattcttgaggatgtaaataaatgcgtcattgcattgcaagagggagatgtcgacactctcgaccggacagcgggtgccatacgcggcagggccgcccgggtgatccacatcattaatgccgaaatggaaaactatgaggccggtgtgtataccgagaaggttcttgaggccacgaaactattaagcgagacggtaatgcctcgattcgctgagcaggttgaagtggcaatcgaggcactgtccgccaatgtcccacagccctttgaggaaaacgaattcatcgatgctagccgcctagtgtatgacggggtcagggatatccgcaaggccgttctcatgattcgaaccccagaggaactcgaggatgacagcgattttgagcaggaagactatgatgtgagaagccggactagcgtacagacggaggatgaccagctgatagctggacaaagtgcacgcgccatcatggcacagctgccccaagaagagaaagccaagatcgccgaacaggtggagatttttcatcaagaaaagagtaagctcgatgccgaagtcgccaagtgggatgattctggtaacgacatcatcgtgcttgctaaacagatgtgtatgattatgatggagatgacagacttcacaaggggaaaggggccacttaagaacacaagcgacgttatcaacgccgccaaaaagatcgcagaggccggaagcagaatggacaagctggcccgagcggtcgcagaccaatgccccgacagcgcgtgcaagcaggacctattggcgtatctccagcggatagcactctattgtcaccaactgaacatctgtagcaaagtaaaggcagaagtccagaatctggggggtgaattaattgtgagcggactggactccgctacatctcttatccaggccgccaagaatctgatgaacgctgtagttctgactgtcaaagccagctacgtggcctccactaagtaccaaaaggtctatggcactgcagcggtaaactcacctgttgtatcctggaaaatgaaagcccccgaaaagaagcccctggtgaagcgggaaaagccagaggagtttcaaactcgggttcgccgcgggtcacagaagaagcatatcagccctgttcaggccctatccgagttcaaggccatggattctttctag

SEQ ID NO: 181844 - DNA, 2862 bp, synthetic construct
  misc_feature 1..2862: note = Description of Artificial Sequence: Synthetic coding sequence
  source 1..2862: mol_type = other DNA
atgaccagcgccaccagccccatcatcctgaagtgggaccccaagagtctggaaattaggaccctgacggtggaaagactgctagagcccctcgtcacacaagtaacgactctcgtgaatacgtcaaacaaggggccgagcggcaaaaagaaaggcaggtcaaagaaagcacatgttctggccgcctcagttgaacaggcgacccaaaactttctggagaaaggggagcagattgccaaggagagccaggacctgaaagaagagctggttgccgctgtagaggacgtccggaagcagggagaaacaatgcgcattgcctcctctgaattcgcagatgatccttgcagcagtgtcaaaagaggaacaatggtcagggcggccagagccctgctttctgccgtaactagattgcttattctggcagatatggccgatgtcatgaggctccttagccatctgaaaattgtcgaggaggctctcgaggctgtgaaaaacgctaccaacgaacaggacctcgctaaccgtttcaaagaattcgggaaggaaatggttaaacttaattacgttgctgccaggcgccagcaggagcttaaggatccacactgtcgggacgaaatggcagcagcccggggggcactgaaaaaaaacgcaacaatgctgtacaccgctagtcaggcattcttacgccatcctgacgttgccgctacaagggcaaaccgggactatgtcttcaagcaggtgcaggaggccatagcggggatctctaatgccgcccaggcaacgtctccaaccgacgaggcaaaaggccataccggtattggagaacttgccgctgccctgaacgaattcgacaacaagattatactcgaccctatgacattctctgaagctaggttccggcctagcctggaagagagacttgagtcaatcatctcaggagccgccttgatggccgactcgtcgtgtaccagagacgatcgccgggagaggattgtcgctgaatgcaatgccgtgagacaggcccttcaagaccttctgtctgagtacatgaataacaccggacgaaaggaaaagggcgaccccctaaatattgcaatcgataagatgacgaagaagaccagagatctcaggagacaactgcgaaaggcagtgatggaccacatctctgactccttcctggagacaaatgtcccactgcttgttttaatcgaggcggcgaagagcggtaatgagaaagaagtcaaggaatacgcccaggtctttcgagagcacgctaacaaactggttgaagtggctaatcttgcttgttctatttccaataacgaggagggcgtaaaactggtacggatggccgccacgcagattgattcactctgcccacaggtgatcaacgccgcgctcacgctggccgctcgacctcagagtaaggtggctcaggacaacatggatgtcttcaaggaccaatgggagaagcaggtgcgggtgctgacagaagctgtggatgatatcacatccgtggacgacttcttaagcgtgtctgaaaaccacatcctggaggacgttaataaatgtgttattgcgctgcaggaaggtgatgttgatacactagatcgcaccgctggagctatccggggcagggccgccagggtgatccacattatcaacgccgaaatggaaaactacgaggccggtgtttataccgagaaggtgctggaggcaaccaagttgctgagcgagaccgtaatgcctcgctttgctgaacaggtggaggtggccatcgaggctctcagcgccaatgtgccccagccattcgaagaaaatgagtttattgacgcgtctaggttagtgtatgacggcgtccgtgacattcgaaaggctgtgctcatgatccgcacccccgaagagctcgaggatgattccgattttgagcaggaggactacgacgtgcgctctaggacctctgtgcaaactgaggacgatcagctgattgcaggtcaatccgccagagctatcatggcccaactgccccaagaagagaaggcaaaaatagctgagcaagttgaaatctttcaccaagagaagtccaaactcgacgccgaagttgccaagtgggacgatagcggaaacgacattattgtgttggcaaaacagatgtgcatgatcatgatggaaatgactgattttacacgtggaaagggccccctcaaaaacacctcggatgtgataaacgccgctaaaaagatcgctgaggccggatccagaatggataaactcgccagggcagtcgctgatcagtgtccagacagcgcttgtaagcaagatttactcgcttatctgcagcggattgctctgtattgtcaccaactaaatatatgttctaaagtgaaggccgaggtccagaacttgggaggcgaactgatcgtgagtggtacaggagtccaaagtacctttactaccttctacgaagtagattgcgacgtgattgatggaggccgtgctagccagcttagcacacacctcccaacatgcgccgaaggagcccccattggaagcggatcctctgacagttcaatgctggactctgctacttcgctcatccaagctgctaaaaatctgatgaatgcagtagttttaacagtcaaggcaagctatgtggcatcaactaaatatcagaaggtttatggcaccgcggcagtgaattcgccagtcgtgtcttggaaaatgaaggctccggagaagaagccattagtgaaaagagagaaaccggaggagttccagacccgtgtaagacggggctctcagaagaaacacattagtcccgttcaggccctgtcagaatttaaagcgatggatagcttttag

SEQ ID NO: 181845 - DNA, 354 bp, synthetic construct
  misc_feature 1..354: note = Description of Artificial Sequence: Synthetic coding sequence
  source 1..354: mol_type = other DNA
atgaccagcgccaccagccccatcatcctgaagtgggaccccaagtccctagaaatccgaacactgaccgtggaacgattgttagagccacttgtcacccaggtgaccactctggttaacacatctaacaaaggtccctctggtaagaaaaagggacggagtaagaaagcccacgtgctcgctgccagtgtcgaacaggccacacaaaactttcttgaaaaaggcgaacaaatagccaaagaatctcaggatctcaaggaagagcttgttgcggccgtggaagacgtaagaaagcaaggagagacaatgagaatagcgagtagtgagttcgctgacgatccctgtagctcctag

SEQ ID NO: 181846 - DNA, 201 bp, synthetic construct
  misc_feature 1..201: note = Description of Artificial Sequence: Synthetic coding sequence
  source 1..201: mol_type = other DNA
atgaccagcgccaccagccccatcatcctgaagtgggaccccaagtcgctagaaatacggaccctcaccgtggaaagactgcttgagcctctagtgacacaggttacaactctggtcaatactagtaacaagggcccaagtgggaagaaaaagggccggtctaagaaagcacatgttctggcagcttcggtagaacaatag

SEQ ID NO: 181847 - DNA, 2718 bp, synthetic construct
  misc_feature 1..2718: note = Description of Artificial Sequence: Synthetic coding sequence
  source 1..2718: mol_type = other DNA
atgaccagcgccaccagccccatcatcctgaagtgggaccccaagtccctagagatccggacccttacggttgaacgcctccttgagccccttgttacccaggtgacaacgttagtcaacacatctaataaagggcctagtggtaaaaagaagggcagaagtaaaaaagctcacgttctggcagccagcgtggagcaggccacccaaaatttcctagaaaaaggcgaacagattgctaaggagagccaagacctcaaggaggagctggtagcagccgtcgaagacgtcaggaagcagggcgaaacaatgcgtatcgcaagttccgaattcgcggacgatccctgcagtagtgtcaagagggggaccatggtacgggccgcccgggcactcctttctgccgttacccgactcctgattctcgcggatatggcagacgtgatgcgtcttctcagccatctaaaaatagtggaagaggctctggaagctgttaagaacgccactaatgagcaggatctggccaaccgattcaaagaatttggcaaagaaatggtgaagcttaactatgttgctgcccggcgccagcaggaattgaaagacccccattgtcgcgacgaaatggcagcagcccggggcgccttgaagaagaacgccacgatgctatacacagccagtcaagccttcttacgtcaccccgatgtcgccgccactcgtgctaatcgcgactacgttttcaaacaagttcaggaagccatcgccggaatcagtaacgcagcccaggcaacctcccctacagatgaagctaaaggccacacagggataggtgaacttgccgcagctctgaacgaattcgacaataaaataatactagaccccatgacatttagtgaggccagattccgcccctccctggaggaacggctggagagcatcatatcaggcgccgctctcatggccgattcaagctgcacccgggacgatagacgtgaacggatcgtggccgaatgcaacgcagtgcgacaggccctccaggatctgctgtccgagtacatgaataacaccggaagaaaggaaaaaggcgatccactcaacatcgctattgataagatgaccaagaaaacaagggacctgcgccgccagctacgcaaagccgtaatggatcatatatctgactctttcctggagaccaacgtgcccctgttggtcctcatcgaagctgccaagtccgggaatgagaaagaagttaaggagtacgctcaggtctttagggaacatgcgaataagctggttgaagtggcaaatctggcttgcagtatttctaacaacgaggagggcgtgaagctggtcaggatggctgccacacaaatcgattccctgtgcccacaggtgatcaatgcagctcttaccctggctgctagaccccagtcgaaggtcgcccaagacaacatggacgtcttcaaggaccaatgggagaagcaagtgcgtgtcctcaccgaggctgtggatgacatcacaagtgtcgatgactttctgtcagtatcagaaaaccatatcttggaggacgtgaacaaatgtgtcatagctcttcaggagggggatgttgacactttagatagaaccgccggtgcaattcgcggtcgagccgcccgcgttatccatatcattaatgctgagatggagaactacgaggccggcgtgtacactgagaaagtgctggaggccaccaagttactgagtgaaaccgttatgcctaggttcgcagagcaggtcgaggttgccatcgaggctcttagcgcaaacgtgccccagccctttgaggagaatgagttcattgatgctagccgacttgtttatgacggggtacgtgacatacgcaaggcagtccttatgataaggacaccagaagagctggaagatgatagcgatttcgaacaggaggattacgacgttcggagccggacctccgttcaaacagaagatgatcagctcatcgccggacagagtgccagagccatcatggcacagctgccccaggaagagaaagccaaaattgcggaacaagttgagatcttccaccaggagaaatcaaaactggatgctgaagtggcgaaatgggacgattccggtaacgacattatcgtcctagccaagcagatgtgcatgattatgatggaaatgaccgatttcaccaggggcaagggccctctcaagaacacgtcagatgtgattaatgccgcaaaaaaaatcgccgaagctggaagcagaatggacaaactggcccgagctgtggccgatcagtgccccgattccgcatgcaagcaggatctgctcgcctacttacaaagaatcgcactctattgtcaccagttaaatatctgtagcaaggtgaaggcggaggtgcagaatctaggcggcgaactgatcgtgtctggacttgactccgccacttccctgatccaggccgccaagaatcttatgaatgctgtggtcctaaccgtgaaagcttcgtatgtggctagcacaaaataccaaaaagtgtacggcactgccgcagtgaactccccagtggtgtcttggaagatgaaggcccctgaaaagaaacccttagttaagcgggaaaaaccggaggagttccaaacgcgggtacggcggggttcgcagaaaaaacatatttcccctgtacaagctctctccgaatttaaggccatggactcattctag

SEQ ID NO: 181848 - DNA, 2718 bp, synthetic construct
  misc_feature 1..2718: note = Description of Artificial Sequence: Synthetic coding sequence
  source 1..2718: mol_type = other DNA
atgaccagcgccaccagccccatcatcctgaagtgggaccccaagtcactcgagatcaggaccctgactgtcgagaggctgctagagccactagtaactcaggtcacaactcttgtgaacacatcaaacaaaggcccctccggcaagaaaaagggtagatccaagaaggcgcacgttttggccgcttccgttgagcaggctactcagaatttcctggagaagggagagcagatcgcaaaagagtcacaggatcttaaggaggagctggtggcagctgtggaggatgtacgtaaacagggtgaaactatgcggattgcaagctcggagttcgctgatgacccctgctcatccgtaaagcgcggtacaatggtgagggccgcgagagctttgctgagcgcagtaaccaggcttctgatcctcgcagacatggcagatgtcatgaggctcttgagtcacctgaagatagtcgaagaggctctggaggccgttaagaatgccactaacgagcaggatctcgcaaataggttcaaggagtttggaaaggaaatggtcaagcttaactatgtggctgcacggcgacagcaggagctgaaggacccgcattgcagggatgagatggcagcagcaaggggcgcgctcaaaaagaatgcgaccatgctgtatacagcgtctcaagcctttctccgccaccctgatgttgctgcaactcgagctaatcgtgattatgtgttcaaacaggtccaagaggctatcgccggcatctccaacgccgcccaagctaccagccccaccgatgaggccaaggggcatactggcattggagaattagccgctgcactgaatgagttcgacaataagatcattttggaccctatgactttttctgaagcaagatttaggccttcactggaagagcggcttgagagcattatttcaggcgcggctctaatggcagattcatcatgtaccagagacgatagacgtgagcggatcgtggcggagtgcaatgcagtaagacaggccctgcaagatcttttgtcagagtatatgaacaataccggtcgtaaggagaaaggagacccccttaatattgccattgataaaatgactaagaaaacccgcgatctgagaaggcagcttaggaaggctgtgatggaccacattagcgatagcttcctggaaacgaacgtaccccttctagtgctcatcgaggcagctaaaagcggaaacgaaaaggaggtcaaggaatacgcccaagtatttcgggaacacgctaacaaactggtggaggtggcaaatctcgcttgtagtatcagtaataatgaggaaggcgtaaaactggttcgcatggccgctactcaaattgattcactgtgccctcaagtgataaacgctgcattgactctggccgcacggccccagtcaaaagtggcccaggataacatggacgtgttcaaggaccagtgggagaaacaagtgagagtactcacggaagcagtggatgacattactagcgtagacgattttctgtccgtgtcagaaaatcatatacttgaagacgttaataaatgcgtgatagcccttcaggagggcgacgttgacaccttagaccgcacagcaggcgcaatcagaggcagagctgctcgtgtcatccatattattaacgcagaaatggaaaactacgaggcaggcgtgtacacggaaaaagtgcttgaggcaactaagcttctgtctgaaacagtgatgccccgttttgccgaacaggtcgaagtcgcgatcgaagccttatctgctaatgtgccgcaaccttttgaggaaaatgagttcatcgatgctagccgcctggtgtatgacggggtccgcgacattcgcaaagccgttttgatgatccgcacccccgaggaactggaggacgactctgacttcgagcaggaagactatgatgtgcgcagtagaacgtcagttcaaactgaggacgaccagctcatcgctggtcagagcgccagggccatcatggcccagctgccacaagaggagaaagccaagattgccgagcaggttgaaattttccatcaagagaaatcgaagttagacgctgaggtcgccaagtgggacgacagtggcaacgacattatagtcctggctaaacagatgtgcatgatcatgatggaaatgacagactttactaggggcaaaggaccgctcaagaatacaagcgacgtcatcaacgcagcaaagaaaattgcagaggccggatctcgcatggacaagttggcccgcgcagtcgcagatcaatgtccagatagcgcatgtaaacaggacctgctggcttatctccagcgtatcgcgctgtactgtcaccaactgaatatatgtagtaaggtcaaggctgaagtccagaacctgggaggcgagctcattgtctccgggctggattcagctacgtccttaatacaggccgccaagaaccttatgaacgctgttgttcttaccgtgaaagcttcttacgtcgcttctacaaagtaccagaaagtttacgggactgccgctgtgaatagtcccgtggtctcttggaagatgaaggctccggaaaagaagcctctagtgaaacgagagaagcccgaggagttccagacaagagtccggagaggctcccaaaagaaacacatatcccccgtacaagccctctccgagtttaaggccatggactcattctag

SEQ ID NO: 181849 - DNA, 2583 bp, synthetic construct
  misc_feature 1..2583: note = Description of Artificial Sequence: Synthetic coding sequence
  source 1..2583: mol_type = other DNA
atgaccagcgccaccagccccatcatcctgaagtgggaccccaagtcactggaaatccgtaccctcacagtagagagattgctggaacccctcgttacacaagtcaccacactcgtgaacaccagtaataaaggtccatctggcaagaagaagggtagatccaaaaaagcacacgttctcgccgcatccgtggagcaggcgacccagaactttctcgaaaagggggagcagattgcaaaggaaagccaggacctcaaggaggaactggttgctgccgtcgaggacgtgcgcaagcagggagagaccatgaggatagcttcatctgagtttgccgacgatccctgttccagcgtgaagcgtggaacaatggtccgtgccgctagagccctgttatccgccgtaaccagactcctcatcttggccgacatggcagatgttatgagacttttatcacacctgaaaatcgtagaagaagcactcgaggccgtcaaaaacgctactaacgagcaggatttggctaatcggttcaaggagtttggcaaagagatggtcaaacttaattacgtggccgcccggaggcagcaagagctcaaggaccctcactgtagagacgaaatggccgcagcccgaggggcactgaagaaaaatgctacaatgctctacactgcctctcaggcgtttctgaggcatcccgatgttgccgctactagagccaaccgagattatgtattcaagcaagtacaggaggctattgcgggcatctccaacgcagcccaggccacttcccccacagatgaagcgaagggccatacaggtatcggggagctggctgccgcgcttaatgaatttgacaacaagatcattctggatcccatgacgttctccgaagctcgtttccgccctagtcttgaagaacggctggagtctattatctcaggcgcggcactaatggctgattccagttgtactagggacgaccgccgggagcgcattgtagcggagtgcaacgccgtgcgtcaggccctccaggacttactgtccgagtacatgaataacacaggcagaaaggagaagggggatcctctcaacatcgctatagacaaaatgaccaagaagacaagggacttgcgacgccagttgaggaaggccgtcatggatcatatctctgattcatttctggaaaccaacgttcctcttcttgtgctcatagaagcggctaagagtggaaacgagaaagaagtgaaagaatacgcgcaggtgtttagggagcatgccaataagctagtggaggttgcaaacttagcctgcagcatctccaacaacgaggaaggggtcaagctggtgagaatggccgcaacccaaattgattcattgtgtccacaagttatcaatgccgcgctgacgttagctgcccgccctcaatctaaggtcgcccaagataatatggatgtatttaaagatcagtgggagaaacaggttcgggtccttacggaagcagtggatgacatcacgtctgtcgacgatttcctgtcagtaagtgagaatcatattctggaggatgttaataagtgtgtgattgcattgcaggagggagatgtggacactttagacaggactgccggtgcaatcagaggacgcgcagccagggtgatccacattattaatgccgagatggagaactatgaggcaggtgtgtacacggagaaggtcctcgaggctactaaactcctgtccgaaaccgtaatgcctcggttcgcagagcaggtggaggtcgcaatcgaggctctcagcgctaacgtgcctcagcccttcgaggagaatgagttcatcgacgccagtagactggtgtacgacggggtaagagacatacggaaagcagtgctgatgatccgcacgcctgaggaactggaagacgactctgattttgagcaagaggactatgacgtccgctctcggacctccgttcagaccgaagacgatcagctcatcgcgggccagagcgccagggcaatcatggcgcagctgccccaggaagagaaggccaaaatcgctgagcaagtggaaattttccaccaagagaagagtaaactggatgcagaagtggcaaagtgggacgactcaggcaacgatatcatcgtcctggccaaacagatgtgtatgatcatgatggagatgactgacttcacccgaggcaaagggcctttgaaaaatacgagtgacgtgattaacgccgccaaaaagatagccgaggcggggagtcgtatggacaagctggctagagccgtagctgatcaactcgattcagccacgtcccttattcaggctgctaagaacctgatgaatgccgtcgtcttgacagtaaaggcgagctacgttgcctcaactaagtaccagaaggtctacggcactgcggccgtgaactcgcccgtcgtctcctggaagatgaaagccccagagaagaaacccttggtcaaacgtgagaaacccgaggaattccaaacacgggtccgacgggggtcacagaaaaagcatatttccccagtacaagctctcagtgaatttaaggctatggattcattctag

SEQ ID NO: 181850 - DNA, 2718 bp, synthetic construct
  misc_feature 1..2718: note = Description of Artificial Sequence: Synthetic coding sequence
  source 1..2718: mol_type = other DNA
atgaccagcgccaccagccccatcatcctgaagtgggaccccaagtcactggagattaggacactgaccgtggaacgcctgcttgagcctctggtaacacaggtcaccactctggtcaacacctctaataagggtccctcaggaaaaaaaaagggccggtctaaaaaggcccacgtcttagccgcttcagtggagcaggctactcaaaactttctggaaaaaggcgagcagattgcaaaggagagtcaggatctgaaggaagagctcgtggctgccgtggaagacgtcaggaaacaaggtgaaactatgaggattgcctcctctgaattcgctgatgacccatgctcatccgtcaagcggggcaccatggtgagagcggccagagcactcctgagtgctgtgacaagattgcttatcctcgcggatatggccgatgtaatgaggttactctcacacctgaagattgtagaggaagcactcgaggctgtaaagaacgcgactaacgaacaggatttggcaaatcggttcaaggagtttgggaaagagatggtcaaactcaactatgtggccgcaagacgccagcaggaactgaaggacccacactgccgcgacgaaatggcggccgccagaggcgctttgaagaaaaatgctactatgctatacacagcctcccaggcttttcttcgccatcctgacgtcgccgcaactagagccaaccgggactatgtgtttaagcaggtgcaggaagccatcgccggcatatccaatgctgcccaagcaactagtccgacagatgaggccaaaggccacactggaatcggtgagctggctgccgcactaaacgagtttgataataaaatcatcctggaccctatgacattctcggaggcgagattcagacctagcctggaggagcgcctggagtccataattagcggggcagcgctaatggccgattcctcttgcacgcgcgacgaccgtcgggagaggattgtggccgaatgcaatgcggtgagacaagccctacaggatctattatcagaatatatgaataacactggccgaaaagagaagggggatcctctaaatattgcaatcgacaagatgaccaagaaaacacgcgatctgcggcgccagttgaggaaggcagtcatggaccacatcagtgactcatttttagaaactaacgtcccgcttctggtgctgattgaggccgccaagagtggtaatgagaaagaggtgaaagaatacgctcaagtattcagagaacacgcgaataagctagttgaggtcgccaacctggcctgctccatttctaacaatgaggagggggtcaaactggtgcggatggccgccacacagatcgattccttgtgccctcaagttattaatgccgccttaacactggccgcccgtccacagtctaaagtggcgcaggataacatggatgttttcaaggatcagtgggagaaacaagtcagagtcttaactgaggcggttgacgatatcacttccgtggacgatttcctgtccgtgtcggaaaaccacatactggaggatgtcaacaaatgcgtgatcgctcttcaggaaggcgacgtggataccctagataggacagcgggcgcaatacgcggccgggccgctcgagtgattcacatcattaatgccgagatggagaactacgaggctggggtctacaccgagaaggttctggaggctaccaagctgctctccgagacagtaatgcccaggttcgccgagcaggtcgaagtagctatagaggctctgtccgctaacgtgccccaaccattcgaagagaatgaattcattgacgcaagcagactggtttacgacggggttcgggatattcggaaggctgtcctgatgatcaggacacctgaagaactagaggacgacagcgacttcgagcaagaagattacgacgtgaggtcacgcacatcagtccagacggaagacgatcagttaatcgccgggcaatcagcccgagccattatggcccaacttccgcaggaggaaaaggccaagattgccgagcaagtggagatcttccatcaggaaaagagcaaactggatgccgaagtagcgaagtgggacgactctggcaacgatataatcgttcttgcaaaacagatgtgcatgattatgatggagatgactgactttactaggggaaagggcccattgaagaatacaagtgacgtgatcaacgctgctaaaaagattgccgaagccggatctcgcatggataagctggcaagagccgtggctgatcagtgccctgatagcgcctgtaagcaagatctcctggcctatctgcaaaggatcgccttatactgccatcaactgaatatttgttcaaaagtaaaggcagaagtgcaaaatctcgggggggagttgatcgtttccggtctcgacagcgcaacaagtttaatccaggctgccaagaacctgatgaacgcggttgtgctcaccgtaaaagcctcttatgtcgcatcaactaaatatcagaaggtatacggtacagccgcagtgaattctcctgtggtttcgtggaagatgaaggcgcctgaaaaaaagcccctcgtgaagagggagaaacctgaggaattccaaacccgggttaggcggggaagccagaagaagcatatttcccccgtgcaagccctgagcgagttcaaagccatggacagcttttag

SEQ ID NO: 181851 - DNA, 582 bp, synthetic construct
  misc_feature 1..582: note = Description of Artificial Sequence: Synthetic coding sequence
  source 1..582: mol_type = other DNA
atgagcgccgagacccccatcaccctgaacatcgacccccaggacctccaggtgcagacctttaccgtcgaaaagctactggagcccctaatcatccaagtgaccacattggtgaattgtcctcaaaacccgagctccagaaagaagggtcgttcaaaacgggcctccgtcttgctagcttccgtggaggaagcaacttggaatctcttagacaaaggcgaaaaaatcgcgcaggaagccactgtcctgaaggatgaactgactgccagtctggaggaagttaggaaagagtccgaggccctcaaagtgagcgctgaaagatttaccgacgacccatgtttcctgccaaagagagaggccgtcgtgcaggccgcccgggctctgctcgccgcagtaacaagactcctgattctggctgacatgatagatgtgatgtgcctcctgcagcacgtctcggctttccaaagaacatttgaatccctgaagaatgtagccaacaagagtgacctgcaaaaaacatatcagaagctgggcaaagaactggagaacctcgattatctggcattcaaacggcagcagtag

SEQ ID NO: 181852 - DNA, 705 bp, synthetic construct
  misc_feature 1..705: note = Description of Artificial Sequence: Synthetic coding sequence
  source 1..705: mol_type = other DNA
atgacccagctgcccgaggccgagaaggagaagatcgccgagcaggttgctgactttaaaaaagttaagtcaaaattggacgctgaaattgagatctgggacgacacctccaatgatattattgtgctggcaaaaaacatgtgcatgattatgatggaaatgaccgattttactagaggcaagggccccctcaaacacacaaccgacgtgatctatgcggccaaaatgatttctgagagtggaagcagaatggacgtcctcgcccgccagattgctaatcaatgtcctgacccgtcatgtaaacaggacttgctggcatatttggagcagattaaattttactcccatcagttaaaaatttgcagccaagtcaaggctgagattcaaaatctgggaggcgagctcataatgagcgccctggatagcgtgactagtctaatccaggcggccaaaaacctcatgaatgccgtcgtgcagacagtgaagatgagctatattgcatctacaaagattattcggatccaatccccagccggccccagacatccagtggtgatgtggaggatgaaagccccagccaagaagccattaataaagcgcgaaaagcccgaagagacctgcgcagcagttcggcgtgggagcgcaaaaaagaaaattcaccctttacaggtgatgtccgaattccggggacggcagatatattag

SEQ ID NO: 181853 - DNA, 2688 bp, synthetic construct
  misc_feature 1..2688: note = Description of Artificial Sequence: Synthetic coding sequence
  source 1..2688: mol_type = other DNA
atgagcgccgagacccccatcaccctgaacatcgacccccaggacctgcaggtgcagactttcaccgtggagaagttacttgaaccactcataattcaggtgaccacactggtgaattgtccacagaaccccagctccaggaagaagggccgctcaaaacgagcatctgtcctgcttgcgtccgtcgaggaggcaacatggaatctactggacaaaggcgagaagattgcccaggaggcaacagttctgaaggacgaattgaccgcctctctcgaggaggtgcgcaaggagtctgaagctctgaaagtcagcgctgaacgtttcaccgatgatccctgcttccttccaaaacgggaagccgtcgtccaggctgcacgggctctcctggcagccgtgactcggttgttaattttggccgatatgatcgacgtgatgtgcctcttgcagcacgtgtccgctttccagcgaacctttgagagcttgaaaaacgtagctaacaagagcgacttacagaagacctaccagaaactgggtaaagagttagagaaccttgactacctggctttcaaacgacagcaggacctgaaatcacctaatcaaagagacgagattgccggtgccagagctagcctgaaggagaactccccactgctacacagcatttgcagtgcctgcctcgagcactctgacgtcgcttctctgaaggcctcgaaggacacagtgtgcgaggaaatccagaatgccctaaatgttatttctaacgcatcgcaagggatccagaatatgacaaccccacctgagccgcaggcggccactctgggcagcgcccttgacgaacttgagaatctcattgtcctgaatccattaaccgttacagaagaggagatacggccatcccttgaaaagagactggaagccatcatctcaggagctgcccttttggcagactcgtcctgcacgcgagacttacacagggagcgcattatagccgaatgtaatgcgattaggcaggcactgcaggatctcctttcagaatacatgaataacgcagggaagaaggagcgctcaaacaccttgaacatcgcactcgacaacatgtgtaagaagacacgtgacctgaggagacagcttcggaaagccattattgatcatgtgagtgactcttttctagacaccaccgtaccactgctggttctaatcgaggcagccaaaaacggtagagaaaaggagattaaggagtatgcagcaatttttcacgaacatacctctaggctggtagaagtggctaacctcgcttgctcaatgtccacgaacgaagatgggattaagatcgtaaaaattgcagccaaccaccttgagacattgtgcccacagatcattaacgccgcccttgcactcgcggcccgacctaagagtcaggcggtgaagaataccatggagatgtataagcgcacctgggaaaaccacattcatgttctcacagaagccgttgatgatattacatccatagacgacttcctcgcagtgtcagaaagtcacatcctggaagatgtgaataagtgcataatcgctttacgggaccaggatgcggacaatttagacagagctgccggtgcaattcgggggcgcgccgcccgcgtggcccacatcgtgacaggagagatggacagttacgagccaggagcctacacggaaggcgtgatgagaaatgtcaactttctgactagtaccgtaattcctgagttcgtcactcaagttaatgtcgccttggaggcgctctcaaagagcagcttgaacgtgctcgacgataaccagtttgtggacatttcaaagaagatatacgacactatccacgacataaggtgtagcgttatgatgataaggactccagaggaactggaagacgtgtccgacctggaagaagagcacgaagtacggagtcacactagtattcaaacggaaggcaagacagatcgtgcgaagatgacacagctacccgaggcagagaaagaaaaaattgccgagcaggtcgcagactttaagaaggtcaagagcaagctagacgctgagatagagatctgggatgacacctctaatgatataatcgtgctcgccaaaaacatgtgcatgatcatgatggagatgactgacttcacacgcggcaaaggacccctgaaacacaccactgacgtgatctacgctgcgaagatgattagcgagtctggatccagaatggatgtcttagccaggcagattgccaaccagtgccccgacccgagttgcaagcaagaccttctagcatacctcgagcagatcaaattttattcccaccaactcaagatatgcagtcaagtgaaggccgagatacagaacctcggcggcgagctcataatgtccgctttggacagcgttactagcctgatccaggccgcaaagaatctgatgaacgccgtggttcagactgtgaagatgtcttacatcgccagcactaagataattaggattcagagccctgctggtcccaggcacccagtcgtcatgtggaggatgaaagcgcctgccaagaagcctctgataaagagggagaaacccgaggaaacatgcgcagcagtccgacggggatccgccaaaaagaagatacatcccctgcaggtaatgagtgagtttaggggccgtcagatctactag

SEQ ID NO: 181854 - DNA, 2688 bp, synthetic construct
  misc_feature 1..2688: note = Description of Artificial Sequence: Synthetic coding sequence
  source 1..2688: mol_type = other DNA
atgagcgccgagacccccatcaccctgaacatcgacccccaggacctccaggtccaaacgttcacagtcgagaagctgttagagccgttgataatccaggtgacgacactggtgaactgcccgcagaaccccagctctcggaagaaaggcaggagcaaacgggcttctgtgctactagcttcagtcgaggaagcgacttggaacctgctggataaaggggagaaaattgcccaagaagcaactgtcttaaaggacgagcttacagctagcctggaggaggtacggaaagagtccgaggcactgaaggtttctgctgaacggttcacggacgatccatgttttctaccaaaacgcgaggctgtcgtccaagccgcccgggctcttctggctgcagtcacacggttgctcatcctggcagacatgatcgacgtaatgtgcctactgcagcatgtgagcgccttccagagaaccttcgagtccctgaaaaatgtggcaaataaatcagatctgcaaaaaacctaccaaaagctcggtaaggagcttgaaaacctagactatttggcattcaaacggcagcaggaccttaagtctcccaatcaaagggatgaaatagccggggcccgtgccagcctgaaggagaatagcccgctgttgcactcgatctgtagtgcatgcctcgaacatagcgatgtggcgtctctgaaggcctcaaaagacaccgtatgtgaagagatccaaaacgcccttaatgtgattagtaacgcttctcaagggatacagaacatgacaaccccacctgagccccaggccgcaacgctcggttctgccttggatgaactggaaaatctcatcgtacttaatcccttgactgtgacagaggaagagatacgcccctccctggaaaagcggctcgaggcaataatctccggtgccgctcttttggccgattcgtcgtgtacacgcgacctgcatagggagagaatcattgccgagtgcaatgccattcgacaggccctgcaggaccttttatcagagtacatgaacaatgccgggaaaaaggaacggagtaatactctgaacatcgctctggacaacatgtgcaagaagacgcgcgatctccgccgccagctgaggaaagcaatcatagatcatgtatccgacagtttccttgatacaacagttccattgcttgtcctcatcgaagccgccaaaaacgggagagagaaggagatcaaggagtacgctgcaatcttccacgaacacacaagtcggctcgtggaggtagcgaacctggcatgttccatgtcgacgaatgaggacggaattaagattgtgaagatcgccgccaatcacctcgagaccttatgtccccagattattaacgccgccctcgctttggctgcgcgacccaaaagccaggccgtcaagaatactatggaaatgtacaagaggacatgggaaaatcatatccacgtcttgacagaggctgtagacgatattacgtccatcgacgactttctggctgtttcggaatcccatattctggaagatgtaaataagtgtataattgcgctgcgggaccaggacgctgataatttagatcgcgctgccggggccatcaggggccgcgccgccagagttgcgcacattgtgacaggcgagatggactcttacgaacccggggcttacacggaaggcgtgatgcgaaacgtaaacttcctgacttcaacagtcatccccgagtttgtgacccaagttaatgtggccttagaggccttgagcaagtcttctctgaacgttttagatgacaaccagtttgttgacatatctaagaagatttatgataccatacacgacattcgctgctctgtgatgatgatccgcacccccgaggaattggaggatgtaagcgatctcgaggaggaacatgaagtcagatcccacacttccatacaaactgaaggcaaaacagatcgtgcaaaaatgactcaactgccagaagctgagaaggagaagatcgccgagcaggtggccgattttaagaaagtaaagtccaaactggacgctgaaattgagatctgggatgacaccagcaatgacatcatcgtgctggccaagaatatgtgcatgatcatgatggagatgaccgacttcacaagaggcaagggcccgctgaagcatactacagatgtgatctacgccgcgaagatgatctccgaatcgggttctaggatggacgtgctggctcggcagattgccaaccagtgtccagatccaagctgcaagcaggatctgctcgcgtatctcgagcagattaagttctactcacaccagctgaagatttgttctcaagttaaggccgaaatccagaatttagggggggaactcataatgagtgcgctggactcagtaacgtccctgattcaggccgccaagaatctgatgaatgccgtggtccaaactgtgaaaatgagttatatagcatccaccaaaatcataaggatccaatcccccgctggtccccgacatccagtggtgatgtggcggatgaaagcccctgccaagaaacctcttattaagagagagaagcccgaggaaacctgcgctgccgtgagacgaggaagcgcgaagaagaaaattcatcccctgcaggtgatgtccgagtttcgcggacgacaaatctattag

SEQ ID NO: 181855 - DNA, 1131 bp, synthetic construct
  misc_feature 1..1131: note = Description of Artificial Sequence: Synthetic coding sequence
  source 1..1131: mol_type = other DNA
atgagcgccgagacccccatcaccctgaacatcgacccccaggacctgcaggtgcaaacgttcacagtggaaaagctgttggagccgttgatcattcaggttactactctagtgaactgccctcagaatcctagctcaagaaagaagggccgatctaagagagcgtctgtcttgctagcgtctgtggaggaagcaacctggaatctgctggataagggagaaaagatcgcacaggaagctaccgtccttaaagacgagttgacagcttctctggaagaggtccgtaaggaatcagaagccctcaaagtttcagcagagaggtttacagatgatccatgtttcctgcctaaacgggaagctgtggtgcaggccgcccgggccctcctggctgcagtaacccgcctgttgatcctggcagacatgatagatgtgatgtgcctgcttcaacacgtgagtgcattccaacggacattcgagagtttgaagaatgtcgcaaataagagcgacctgcaaaagacatatcagaagcttggcaaggaattagagaacctggactatctcgctttcaaacgtcagcaggatctaaaaagtcctaatcagcgggacgagatagctggggctcgggcatcccttaaggagaattcacccctgctgcattctatatgtagcgcatgcttagaacactctgatgtagcgtccctgaaagcttccaaggacacagtatgtgaggaaatacaaaatgcattaaatgtgattagcaatgcctcccaggggatccaaaatatgactacaccacccgaacctcaagcagctacactcggatctgccttagatgagcttgagaacctgatcgtgctgaatcccctcaccgtaacggaagaagaaattcgcccgtccctggaaaagaggctcgaagccattatatcaggcgctgccttgttggctgactcctcctgcaccagagacctccatcgggaacgcattatcgctgagtgtaacgcaatccgccaggcactgcaggatttactcagcgagtatatgaacaacctgtgtaaccaaaagagcgatcttggcctgacaggtgttaagatcaagcttttagaggagtgtattatcttttggtccctgtag

SEQ ID NO: 181856 - DNA, 582 bp, synthetic construct
  misc_feature 1..582: note = Description of Artificial Sequence: Synthetic coding sequence
  source 1..582: mol_type = other DNA
atgagcgccgagacccccatcaccctgaacatcgacccccaggacctgcaggtgcagactttcaccgttgaaaaactgctggaacctctcattatacaggtgactaccctcgtcaactgcccacaaaaccccagttcccggaaaaaaggtagaagtaagagagcctccgtactgctcgcgtcagttgaggaagctacctggaacctgcttgacaagggggagaagatcgcacaggaggctacagtgcttaaggacgaactgactgcttccctggaagaagtgcgcaaggaaagcgaagcgctgaaggttagtgccgagcgatttaccgacgacccatgcttcctgccaaaacgagaggcggtggtgcaagccgccagagcgctgctggcagccgtaacccgccttctcattttagccgacatgatcgacgtaatgtgcttgctgcagcatgtgtctgccttccagcgcacattcgaaagtttaaagaacgtggctaacaaaagcgacctccagaaaacttatcaaaagctgggtaaggaattggagaatctggattacctagccttcaaaagacagcagtag

SEQ ID NO: 181857 - DNA, 1131 bp, synthetic construct
  misc_feature 1..1131: note = Description of Artificial Sequence: Synthetic coding sequence
  source 1..1131: mol_type = other DNA
atgagcgccgagacccccatcaccctgaacatcgacccccaggacctgcaggtccagacctttacagtggagaaactactggaacccctgattatccaggtgactaccctggtcaactgtcctcagaatccaagcagtagaaagaagggaaggagtaaaagagcatccgttctgctggcctccgtggaggaggcaacctggaatctcctcgacaaaggggagaaaattgcccaggaagccaccgtgcttaaagacgagcttacagcttcgctggaagaggtgagaaaggagtcagaagcactcaaagtctccgctgaacgattcactgacgacccctgtttcctgcctaaaagagaggcagtagtccaggctgctcgcgccctgctcgcggccgtgacccggctgctaatcctggctgacatgattgatgtgatgtgtctcctccaacacgtctctgccttccagcggacctttgagtcccttaagaatgttgctaacaaatcagacctacagaagacctatcagaagctgggcaaggagttggagaatctggattatctggcattcaagcggcaacaggacctgaagagcccgaatcaacgggacgagatcgccggagcaagagcaagccttaaggaaaacagtccattactgcactccatttgcagcgcctgccttgaacactccgatgtggccagtctaaaggctagcaaagacacagtctgcgaggaaatccagaacgccttgaacgtgatcagtaacgcctcacaggggatacagaacatgactactccgcctgagccacaagctgctacgctcggaagcgcactcgatgaattggagaacttgatcgtcctgaatccactgaccgtgaccgaagaagagattagaccaagcctcgaaaaacgtctcgaagccataatttctggcgccgccctgctcgcagattcttcctgtaccagggacctgcaccgagagcggatcattgccgagtgtaacgctatccggcaggccctgcaggatcttttgtcagagtacatgaataatctctgtaatcagaaatctgatttaggcctcacaggtgtgaaaataaaattactcgaggagtgtatcattttttggtcgttatag

SEQ ID NO: 181858 - DNA, 2205 bp, synthetic construct
  misc_feature 1..2205: note = Description of Artificial Sequence: Synthetic coding sequence
  source 1..2205: mol_type = other DNA
atggccgccagccccggccccgccggcgtgggcggcgccggcgccgtgtatggatcaggctccagcggtttcgccctggacagcggcttagaaatcaagacaaggtccgtcgaacagacattactccccctagtgtctcaaattaccactctgatcaaccacaaagataatacgaaaaagtccgataaaactctgcaggccatccagagggttgggcaggcagtaaacctggccgtgggtagattcgtgaaagtcggcgaagcaatcgccaatgagaactgggatctgaaggaagaaattaacattgcatgcatagaagcgaagcaagctggggaaacaatcgcagcgctgactgatatcaccaatttgaaccacttggaaagcgacggtcaaatcacaattttcacagataagactggcgtaatcaaagctgcacgtctgctgttaagttccgtcacaaaagtgttgctcttagctgacagggtggtaattaaacagatcatcacctcgcggaataaggtgctggcaaccatggagcgcctggaaaaggtgaattcttttcaggagttcgtccagatcttctctcagtttgggaacgaaatggttgagttcgcgcatctgtcaggcgatagacagaacgatctgaaagatgagaaaaaaaaagcgaaaatggccgctgccagggcagtattagaaaagtgtaccatgatgttactgaccgcgtctaagacttgcttacggcatccaaactgtgagtccgcacacaagaataaggaaggcgtattcgatcgcatgaaagtagctctagacaaggttatcgagatagtgacagattgcaagcccaatggtgagacagatatctcttccatttccatatttacaggcatcaaggagttcaagatgaacattgaagccctgagggagaacctgtattttcaatcaaaggagaacctgagcgtcacactagaggtgatcctggagcgtatggaggattttaccgattcagcatacacaagccacgagcacagggagcggattctagagcttagtacacaggcccgcatggagctccagcagcttatttcggtgtggatacaggctcagtctaagaaaacaaagtccattgctgaagaactggaactgagtattctgaaaattagccattcattgaatgagctgaaaaaagaactgcacagtaccgcaacacagctcgccgcggacctcctcaagtaccatgccgatcatgtcgtcctaaaagcactcaaactaacaggtgtcgagggaaacctggaagctttggccgagtatgcctgcaagctgagtgagcaaaaggagcaattggtcgagacgtgccgcctgctgcggcatatttctggcacagagcctttggaaatcacatgtatccatgctgaggagacgttccaagtgactggccagcagattatcagcgccgctgagacacttaccctccatccatcgagtaaaatcgcaaaagaaaatctggatgtgttctgcgaggcctgggaatcccagatatctgacatgagcaccctgttaagggagattaacgatgtgttcgaagggcgacgcggcgaaaagtatgggtacctaagtctccccaaaccaatgaagaataacgcaaacctgaagagtctcaagcccgataaaccggactctgaagagcaagctaagatcgccaagctgggtctgaagctcggcctactgacttccgacgcagactgtgaaatcgagaaatgggaagaccaggaaaatgagatcgttcagtacggacgcaatatgagctcgatggcatattcattatatttgttcaccaggggcgagggacccctgaagacctcacaggatttgatccaccaattggaggtatttgctgccgaaggcctcaaactgacttcctctgtccaggcgttcagtaaacaactgaaggatgacgataagctcatgctgctacttgaaatcaataaactgattcccttatgccaccaactgcagacagttactaaaacatctctccagaataaagttttcttgaaggtggataaatgcatcacaaaaactcggtccatgatggctctgctggtacagctcctctcactgtgttacaaattactcaagaagctgcagatggaaaacaatggttgggtctctgtcacgaataaggacaccatggactcaaaaacttag

SEQ ID NO: 181859 - DNA, 1953 bp, synthetic construct
  misc_feature 1..1953: note = Description of Artificial Sequence: Synthetic coding sequence
  source 1..1953: mol_type = other DNA
atggccgccagccccggccccgccggcgtgggcggcgccggcgccgtttacggctccggcagctcaggtttcgctcttgacagtggcctggagatcaaaacacgatcggtggagcaaacgttgctgcccctggtgagccagataaccaccctgatcaaccataaggacaatacaaaaaaatcagataagaccctccaggcaatccaaagagtgggacaggctgttaatttagccgtggggcggtttgtgaaagtcggcgaagctatcgcaaatgagaattgggaccttaaggaggagattaacattgcctgtatagaggccaagcaggctggggagactatagctgcgctgacagatataaccaaccttaaccacctggagtcggatggccagattacaatctttaccgataaaactggagttatcaaggctgctaggcttcttctgagttccgtgacaaaggtgctgttattagcagatcgggtcgtgattaagcagataatcaccagccggaacaaagtgctagccacaatggagcgattggagaaagtaaactcctttcaagagtttgttcagatcttctcccagttcggtaacgagatggtagaattcgctcacctgtccggagaccgccagaacgatctcaaggacgaaaagaaaaaagctaagatggccgctgcccgtgcagttctagagaagtgtacaatgatgctactaactgcctccaagacttgccttcgacatccaaactgtgagtcagcacataaaaacaaggagggcgtcttcgataggatgaaggtcgctctggataaagtgatcgaaattgtgacggactgtaaacccaatggggagactgatatttccagcatttctatatttacaggaataaaggagtttaagatgaatatcgaggctttgcgcgagaacctgtattttcagagtaaggaaaaccttagtgtcacattggaagtgatactggaacgtatggaagactttacagacagcgcctatacttctcatgaacaccgtgagaggattcttgaactgagcacccaggcccgcatggagctgcaacagcttatttctgtgtggatacaggcgcagagcaaaaaaacgaaatctatcgccgaagaattggaattgagcatcctgaagatcagtcactcacttaatgaattaaagaaagaaatcatctctgccgcagaaaccctaactctccacccaagtagcaagattgccaaggagaatctggatgtcttttgcgaggcttgggaatctcagatatccgatatgtctacactgttgcgggagataaatgatgtgttcgagggccgacgcggggagaagtacggctatttatctctcccaaagcctatgaagaacaacgcaaacctgaaatcactaaagcccgacaagccagatagtgaagagcaggctaagatcgccaagctcgggctaaagctgggcctgctgacatctgacgccgattgcgaaattgaaaagtgggaggaccaagagaatgaaattgtgcaatacggacgaaatatgagtagtatggcatattcgctttacctctttaccagaggggagggtccactgaaaacctcccaggacctaatccatcagctggaggtgtttgccgccgaaggattgaaactgaccagtagcgtgcaggcattcagtaaacaacttaaagacgatgataagctgatgcttcttctggaaataaacaaactcattcccctttgccatcaactccagacagtgacaaagacaagtctccagaataaggtgtttctgaaagttgacaaatgtattaccaagaccaggtccatgatggcactgctggttcaactgctgagtctgtgctataaattgctcaaaaaactccaaatggagaataatggatgggtgtcagtcacaaataaggacacaatggatagcaaaacctag

SEQ ID NO: 181860 - DNA, 552 bp, synthetic construct
  misc_feature 1..552: note = Description of Artificial Sequence: Synthetic coding sequence
  source 1..552: mol_type = other DNA
atggccgccagccccggccccgccggcgtgggcggcgccggcgccgtgtatggttccggctcgtcgggcttcgcgttggattcgggactcgagattaagacaaggagcgtagagcaaaccctgctgccactggtatcccagattactactttgatcaaccataaggacaacacaaaaaaaagcgacaagactctgcaggctatccaacgcgttggccaggcagttaacctggcagttgggaggttcgtgaaggtgggggaggccatagctaacgagaattgggatctcaaagaggaaataaacatcgcgtgcattgaagccaaacaggccggcgagaccattgccgccctgactgatattaccaacttgaaccacctagagtccgacggccaaatcactattttcaccgacaagactggcgtgattaaggcagccagactacttctgagttccgttacaaaagttctactgctcgcggacagagttgtaatcaaacagataatcacatcccgcaacaagcgtctcaccatctacaatctgcgccactcgtag

SEQ ID NO: 181861 - DNA, 408 bp, synthetic construct
  misc_feature 1..408: note = Description of Artificial Sequence: Synthetic coding sequence
  source 1..408: mol_type = other DNA
atgagcagcatggcctacagcctgtacctgttcacccggggcgagggccccctcaagacatctcaggacctcattcatcagctggaggtgttcgctgccgagggtctgaagctgacgagctcggtccaggcctttagcaaacaacttaaagacgatgataagctaatgctgttactggaaatcaataagctgattcccctttgtcaccagctgcagactgtgactaagaccagcctgcaaaacaaagtgtttctgaaagtcgataaatgcatcactaaaactcgctccatgatggcactgcttgttcagctactgagcctatgctataagctgctaaaaaaacttcagatggaaaataacggctgggtgagcgtgaccaacaaggatactatggattcaaagacatag

SEQ ID NO: 181862 - DNA, 2157 bp, synthetic construct
  misc_feature 1..2157: note = Description of Artificial Sequence: Synthetic coding sequence
  source 1..2157: mol_type = other DNA
atggccgccagccccggccccgccggcgtgggcggcgccggcgccgtgtacggctctggaagcagcggttttgcactggactctggacttgagatcaagacaagaagtgtggagcagacactcctgccactggtatcacagattacaacattgatcaatcacaaggataacaccaaaaaatctgacaagaccctgcaggctatccagcgggtcggtcaggcagttaacctcgcagtggggcgctttgtcaaggtgggcgaggccatagctaacgagaactgggatctgaaggaagagatcaatatagcgtgcatcgaagcaaaacaggctggtgagacaatcgctgccttgactgatattactaacctgaaccacctggagtccgacggccagatcacgatttttaccgacaaaacaggagtcattaaagctgcacggttgttgttgtcttctgtcacaaaggttctgttactggcagatagggtcgtgattaaacagattattacaagccgcaacaaagttctcgctactatggaacggctggagaaagtcaattcatttcaggagttcgtgcagatttttagccagttcgggaatgagatggtggaatttgcgcacctcagcggtgatcggcagaacgacctgaaagacgagaagaagaaagcaaaaatggccgcagccagggctgtgttggaaaagtgtaccatgatgctgcttaccgcctcaaaaacatgcttgcggcatcctaactgtgagagcgcccataaaaacaaggagggggtttttgatcggatgaaggtcgccctcgacaaagtaatcgaaattgtcaccgattgcaagcccaatggcgagacggatatctcttcaatttccatcttcacaggaatcaaagaattcaaaatgaacatcgaagcactgagggaaaacttgtattttcagtccaaagagaacttgtccgttaccctcgaggtgatcttggaaagaatggaggacttcaccgatagtgcttacacgagccacgagcatagagagcggatcctagagttatcaacccaggcgcgcatggagctgcagcagttgattagtgtctggatccaggcacagtcaaaaaaaactaaatccattgcagaagagttggagctctctattctcaaaatttctcacagcctgaatgagcttaagaaggaactgcacagcaccgcaacccagttagccgccgacctgttgaagtatcacgccgatcatgtggttctgaaagctttgaagctgacaggcgtcgagggcaatcttgaagcactcgctgagtatgcctgcaaactgtctgaacagaaggagcagctggtcgaaacttgcaggctcctgagacacatcagtgggactgagccactcgagataacgtgtatccatgctgaggagacattccaggtaacaggacagcaaatcatttcagccgccgaaaccctcactcttcatccttcgtcgaaaatcgcgaaagaaaacctggatgtcttttgtgaagcgtgggagagtcaaatcagtgatatgagtaccttactgcgcgagatcaatgatgtcttcgaggggcgccggggggaaaagtatgggtatctgtcgctcccgaagcctatgaagaataacgctaatctgaaaagcttgaaacccgacaagcctgactcggaggagcaggcgaaaattgccaaattggggctcaaactgggcctgctgacatctgacgccgactgtgagattgagaagtgggaagatcaggagaacgagattgtgcagtatgggcgcaacatgtcgtccatggcctattctctatatctgtttaccaggggagagggtcccctaaaaacctctcaggacttgatccaccaactggaagtgttcgctgccgaggggctcaaactaacctcttcggtgcaagcattcagtaagcagctgaaggacgacgacaagctaatgcttttgctggaaatcaacaagctgattccgctctgtcaccagcttcaaacagtgaccaagacctctctgcagaacaaggtctttttaaaggtcgataagtgcattacaaagacacggtcaatgatggcccttctcgtgcagcttttgtctctttgctacaagttgctgaaaaaatccgagacgcgctactag

SEQ ID NO: 181863 - DNA, 2802 bp, synthetic construct
  misc_feature 1..2802: note = Description of Artificial Sequence: Synthetic coding sequence
  source 1..2802: mol_type = other DNA
atggacgacagcgaggtggagagcaccgccagcatcctggccagcgtgaaggagcaggaggcccaattcgaaaagctgacaagagcactggaagaggagaggagacatgtgtccgcacaactggaacgagtcagggtcagccctcaggatgcaaatccgttaatggcaaacgggactctgactagaagacaccagaatggtaggtttgttggcgatgcggatttggaacgccagaagttctcagaccttaagctgaacggaccccaggaccattcccatctgctgtattcaaccatccctcgcatgcaggaaccaggtcaaattgtggagacgtataccgaggaagaccctgagggcgccatgagcgtggtcagcgttgaaacttcagatgacggtactacgcggaggactgagaccacagtgaaaaaagttgtgaaaacggtgacgacacgaacagtccagccggtggcaatgggccccgacgggctgcccgtcgacgcatcaagcgtgtctaataactacattcagacgctggggcgagacttccggaaaaatggaaacggaggacccggtccatatgtcggtcaagccgggacagctactctgccacgcaattttcactacccacccgacggctattcccgccactacgaagacggctaccccggaggatcggacaactatggctcactctcaagggtgacacgtatcgaagagcggtaccggccctctatggaagggtaccgagcaccaagccgccaggatgtgtatggcccccagccacaagtacgcgttgggggtagctccgttgatctccaccgtttccatcccgagccatacgggctcgaggacgaccaaaggtcgatgggttacgatgacctggattacgggatgatgagcgactatggaacagccaggaggactggaactcctagtgatcctagacgacggctgaggagttatgaggatatgatcggcgaggaagtccctagcgaccagtattactgggcccccctggctcagcatgagagagggtcccttgctagcctggactctttgcgaaagggtggtccaccaccccctaattggagacagcccgaattgcctgaggtgattgcgatgctgggtttccgcctggatgccgtgaagagtaatgccgctgcctacttgcagcacctgtgttatcgtaacgacaaggtgaagacagatgttcgcaaactgaaggggattcctgtcctggttggcctcctagatcaccccaaaaaggaggtgcatctcggcgcctgtggcgccctgaagaatatctctttcggccgcgaccaggacaacaagatcgctatcaaaaactgtgacggggttcctgcactggtgagacttctgaggaaggcaagagacatggatctcaccgaggttattacagggaccctctggaacctctcttcccatgactcgatcaaaatggagatagtggatcacgccctccacgccttgactgacgaagtgatcattcctcattccggctgggagcgcgaacccaatgaggattgtaaaccgcgtcatattgaatgggagtcagtcctcactaacaccgctgggtgtctgcgtaatgtaagcagcgagagatccgaggcaagacgaaaactgagagagtgcgatggcctcgtggacgcactgattttcatcgtacaggccgagattggacagaaagactccgacagtaagctggtagagaactgcgtgtgcttgttgcggaacttgagttatcaggtacatagggagattccacaggccgagcgataccaggaagccgccccgaacgtggcaaacaatacaggaccccacgccgcttcttgttttggcgccaaaaaggggaaggggaagaagcccatcgaagaccctgccaacgatacagtcgatttcccgaagcggacatcccctgcgagggggtatgaactgctttttcaaccagaagttgtccggatttatatctccctcttgaaggaatcaaaaaccccagcaatcctcgaggcgagtgccggcgctatccagaacctgtgcgccggcagatggacctatggccgctacatacgatctgccttgaggcaggagaaagccctgagtgccattgcagacttattaacgaatgagcacgagagggtggtcaaagccgcctccggggccctgcgcaatctcgccgttgacgctcggaataaggaactcatcggcaaacatgctatccccaatcttgttaagaatcttcctgggggccagcagaactcgtcatggaattttagtgaggatacagtgatttccatcttgaacacaatcaacgaagtgattgccgagaacttagaggctgcaaaaaagcttcgagagacgcagggtatcgagaagctggttctcattaacaaaagtggcaatagaagcgagaaggaggtccgtgccgccgcattagttcttcaaacaatctgggggtacaaagaactccggaaaccccttgagaaggagggttggaagaaatccgactttcaggtgaatctcaataatgcctccagaagccagagttcgcactcatacgacgattcaaccttacctctgatagacagaaaccaaaagtcggataaaaaaccggatcgcgaagaaatccagatgtccaacatgggctccaataccaagtccttagataataattacagcacccccaatgaaagaggggatcacaaccggaccctggatcggagtggtgatctgggtgacatggaacctctaaaaggcactaccccacttatgcagaagatctag

SEQ ID NO: 181864 - DNA, 2844 bp, synthetic construct
  misc_feature 1..2844: note = Description of Artificial Sequence: Synthetic coding sequence
  source 1..2844: mol_type = other DNA
atggacgacagcgaggtggagagcaccgccagcatcctggccagcgttaaggaacaagaagctcagttcgaaaagctgaccagggccctcgaggaggagcgcaggcatgtgagtgcccagcttgagcgcgtgcgggtgtctcctcaagatgctaatccgctgatggcaaacggtacactgacacggcgccaccaaaacggcaggttcgtcggcgacgcagatctggagcgccagaagttttctgaccttaaactgaacgggccccaagaccatagtcatctgctgtacagcacaatccccaggatgcaggaaccagggcagatagtggagacgtacacagaggaggaccccgagggagcgatgagtgtggtgtctgttgagacctccgacgatgggactacgcggcgcaccgaaaccaccgtgaagaaagtggtgaagacagttacaactaggacggtccagccagtagctatgggtcctgacggtcttccagtggacgccagtagtgtgagcaataactacatccagacccttggacgtgactttcgcaagaacggtaacgggggaccagggccatatgttggtcaagcgggaaccgctacactgccccgaaatttccactatcctcccgatgggtattcccggcactatgaagatggttaccccggcgggagcgacaactacggttccctgagtagggtgactaggattgaagagcgctatcgaccttcaatggaaggctatcgagcacctagcaggcaggacgtatatggccctcagcctcaagtacgcgttgggggaagctcagtggacctgcatcgcttccaccctgaaccttatggattggaagacgatcagaggagcatgggctacgatgatcttgactatgggatgatgtctgactatgggaccgctagaagaaccggcacaccctcagacccaagacgcagactgaggtcctacgaagacatgatcggagaggaagtgccatctgatcaatactattgggcacccctagcccagcacgagcgcggcagtttggcctcattggacagcctaagaaagggggggcccccgcctcctaactggcggcagcctgagctgccagaagtgattgcgatgctgggttttcgtttggatgccgttaagtctaatgctgcagcatacctgcaacatctgtgttacagaaacgacaaggtgaaaaccgatgtgcgaaagcttaaaggcattccagtcctcgtcggattgcttgaccaccctaaaaaggaggtccacctaggcgcgtgcggcgccttgaagaacatctccttcggtcgcgaccaggataacaagatcgctattaagaactgtgacggagtacccgccctggtgaggctcttgcgaaaagcccgcgacatggatctcactgaggtcatcaccggaactctgtggaatctgagcagtcatgattccatcaagatggagatcgtcgaccatgcgctacacgccctgacagatgaggtgataatccctcactcagggtgggagagagagcccaacgaggattgcaagcccagacacattgagtgggaatccgtacttactaacaccgctggatgtctgcggaatgtatcttccgaaaggagtgaggcgcggagaaagttaagagaatgcgatggactggtggatgcactgatttttattgtgcaggccgagataggacaaaaagacagcgactccaaacttgtcgaaaattgcgtttgcctgttgagaaacttgtcttaccaggtgcatcgcgaaattccgcaggctgagcgctatcaagaggcagcaccgaacgtcgccaataatacagggcctcacgctgcttcctgcttcggcgcaaaaaagggcaaggacgaatggttttctagaggcaagaagcccattgaggaccctgccaacgatactgtagatttcccaaaacgcacctcccctgctaggggctatgagctcttattccaacctgaagtagtgcggatttatatcagtctcctgaaggaatctaagaccccggccatcttagaggcatctgcgggagctatccagaatctgtgtgcaggacgttggacatacggacggtatattaggagtgcactccggcaggagaaagctctaagtgcaatcgcagatctactcaccaatgagcacgaacgcgtcgtcaaagctgcgagcggggccctcaggaatttggcagtggatgcaagaaataaggagctcattggcaaacatgcaattcctaacctcgtgaaaaaccttcctggcggccaacagaacagctcctggaactttagcgaagatacagttatcagcatacttaacaccattaatgaagttatagctgagaatctcgaagcggccaaaaaattgagagaaacacagggaattgaaaagttagtgctaatcaacaagtccggtaaccgcagcgagaaagaggtccgcgcagcagcactggtgctacagactatatgggggtacaaagaactccggaagcctctggaaaaagagggatggaaaaagagcgatttccaggtcaacctgaacaatgcatcgagatctcagtcttctcactcgtacgacgactccactctgcctttgattgataggaaccaaaagtctgacaacaactactccaccccaaatgagcgcggggaccacaaccggactttggatagatcaggggacctgggcgacatggagcctcttaaaggaactactcctctgatgcaggacgagggccaggaatctctggaagaggaactggatgtgcttgtactcgacgatgaaggaggacaggtctcctacccgtcaatgcagaagatctag

SEQ ID NO: 181865 - DNA, 2889 bp, synthetic construct
  misc_feature 1..2889: note = Description of Artificial Sequence: Synthetic coding sequence
  source 1..2889: mol_type = other DNA
atggacgacagcgaggtggagagcaccgccagcatcctggccagcgtcaaggagcaggaagcacagtttgagaagcttacgcgcgcactggaggaagagcgaagacacgtctcggctcagctcgaacgggtcagggttagtccgcaggacgcaaatccgttgatggccaatggcacactgactaggcggcaccaaaatgggcgattcgtaggagacgcggatcttgagaggcaaaaatttagcgatctcaagctcaatggccctcaggatcattcacacttactctactccactattcccagaatgcaggaacccggccagattgtggaaacttacaccgaggaggatccggaaggcgctatgtcggtagtgtctgtagaaacctccgacgatgggaccacccgacgcaccgagaccaccgttaagaaggtcgtaaaaacagtgactactcggacggtgcaacctgtggcaatgggtcccgacggcctgcctgttgacgcgagttctgtgtcgaacaattacattcaaactcttgggcgtgattttaggaaaaacggaaatggcggacctggtccctacgtgggacaggcaggaacagcaactcttccaaggaatttccattatccaccggacggttattcaagacactatgaagatggctatcccggggggtcagacaattatggctctttgagccgggtgacgcgaatagaggagcggtaccgcccaagtatggagggctatagggctccaagtagacaagatgtatacgggcctcaacctcaggttcgtgtggggggctcttctgtggacctgcacaggttccaccccgagccgtatggactcgaagacgatcaaagaagcatgggctatgatgatctcgactacggcatgatgagcgactacggaactgctaggaggactggcacaccaagtgacccccgacgtcgtttgaggtcttatgaggatatgatcggcgaggaggtcccctccgaccagtactactgggcacccctcgcacagcacgagcgaggcagtctagcatcacttgacagcttgcggaaaggaggccctcctcccccgaattggcggcagcccgaactgccagaggtaatcgccatgctgggcttccgtctggacgccgtgaaaagcaacgccgctgcatatctacagcacctgtgctaccgtaatgataaagtgaagaccgacgtgcggaagctgaagggtatcccagttctggtggggctgctcgatcatcctaaaaaagaggttcacctgggagcttgcggtgccctgaaaaatatctcattcggaagagaccaggacaataagatcgcaatcaaaaactgtgatggggtaccagccctggtcaggctgttaagaaaagcgagggacatggacctgaccgaagtcatcaccgggacactgtggaacttgtcctctcacgattcaattaagatggagattgttgatcatgcgctgcatgcgcttacagacgaagttataatcccccactcaggctgggagagggagccgaatgaggattgcaaaccacgtcacattgagtgggagagcgttctgaccaacacagccggttgcttgaggaatgtgagtagtgaaaggtccgaggcgaggcgcaagctgcgggaatgtgacgggctcgtggacgccctgatctttattgtgcaagctgagataggtcagaaggactctgacagcaagctggtggagaattgcgtctgcctcctgcggaacctgtcttatcaggttcacagagagattcctcaggccgagcgttatcaggaagcggctccaaatgttgccaataacactgggcctcatgctgcctcttgctttggggctaagaaaggaaaggggaaaaagcctatagaggatcccgctaatgatacagtggacttcccaaagaggacaagcccagcacgggggtatgaactgctttttcagccggaggtggtcaggatatatatttctctgctcaaggagagcaaaacccctgcaatccttgaggcatccgccggggccatccaaaacctgtgcgccggcagatggacgtatggcaggtatatcagaagtgctctgaggcaggagaaagccctgagtgctattgcggacttgcttacgaatgaacacgagagggtggttaaggccgcttcaggtgcactgagaaatctcgccgtcgacgcgcgtaataaagaactgattgggaagcacgctattcccaatctagtgaaaaacctgccaggtggacagcagaatagtagttggaatttctccgaggatacagtgatttccatcctaaacacgataaatgaggtaatcgccgagaacttggaagccgccaagaagcttcgcgagactcaaggcatcgagaagttggtgctgatcaataagtccggcaatcggtcagagaaagaggtgagagcagcggctcttgtgctccaaactatctggggttataaggagctgaggaaacctctagaaaaggagggatggaagaaatcagattttcaggtcaatctgaataacgcatcaagatctcagagcagtcacagctacgacgattcaaccctgccgctgatcgaccgcaatcagaagtcggataaaaagcctgatagggaggaaattcagatgtctaacatggggtccaacaccaagagcctcgacaataattacagcaccccaaatgaacgcggggatcacaaccggaccctggatcggtccggggacctcggagatatggaacccttgaaggggactacgcccctcatgcaggatgaggggcaggaatcactcgaggaagagctggacgttcttgtgctcgatgacgagggaggacaggtgagctaccccagtatgcagaaaatttag

SEQ ID NO: 181866 - DNA, 2826 bp, synthetic construct
  misc_feature 1..2826: note = Description of Artificial Sequence: Synthetic coding sequence
  source 1..2826: mol_type = other DNA
atggacgacagcgaggtggagagcaccgccagcatcctggccagcgttaaagaacaggaggcccagttcgaaaaactaacacgagcactggaggaagagcggcggcatgtgagcgcccagttggaacgtgtgagagttagcccccaggacgcaaatcccctgatggctaatggcaccctgacccggaggcaccagaacggaaggtttgttggagacgccgacctggagcgacagaagtttagcgatctaaaactgaacgggccccaggatcactcccatcttctatactcaaccatacccagaatgcaggagccaggccagatcgtagagacctacacagaggaggatcccgagggggccatgtctgtagttagtgtcgagacctccgatgacgggactacaagaagaaccgaaacaacagtcaagaaggtggtcaaaactgttactacacgcactgtacagcccgtggcaatgggtcccgacggccttcccgttgacgcttctagcgtctccaacaactacatccaaaccctgggccgcgatttccgcaagaatgggaacggaggacccgggccctacgttgggcaggcaggtacggccaccctgcctaggaactttcattatcctccagacggctactctaggcactatgaagacgggtaccctggtggatctgacaactatgggagcctgagtcgggtgaccaggatcgaagagagatatcggccaagcatggaggggtatcgggcgcctagccgccaagacgtgtacggacctcaacctcaggtcagagtgggcggcagttccgtggacctgcaccgttttcatcccgagccttatggcttggaggatgaccaacgctcaatgggctatgacgatcttgattatggcatgatgagtgactacggcaccgcccgacgcactggcaccccctccgatcctcgcagacgtctccggtcatacgaagacatgattggtgaagaggtgccttccgaccagtattactgggctcccctcgcacagcatgagcgtgggagcctagcctcacttgattccctgcggaagggtggcccccctcctcccaattggaggcagcctgagctgccagaggtgatcgccatgcttgggttcaggctggacgcagtgaaaagcaatgctgccgcctatctacaacacttatgttataggaatgacaaggtgaagacggatgtgcgaaagctaaaggggatccccgtgctggtcgggttattagaccatcccaagaaagaggtacacctgggtgcctgtggggcactgaaaaatatctcttttggacgcgaccaagataacaaaattgccattaagaattgcgatggagtgccagccctggtgaggctgctgagaaaggcgcgcgatatggacctgactgaagtaattaccggaaccctgtggaacttgagcagccacgatagcattaagatggaaattgttgatcacgcactccatgccttgactgacgaagtgatcatcccccattccggctgggaaagggaacctaatgaggactgtaagcccagacatatcgagtgggagtccgtcttaacgaacaccgctggctgtctgaggaatgtgagttctgaacgctccgaggcccgtaggaagctgcgggaatgtgacggcctggtggacgccctgatcttcatcgtgcaggccgagatcggccaaaaagattcggattccaagctggtagagaactgtgtttgtttgttgaggaatctgtcctatcaggtgcacagggaaattcctcaggctgaacgttatcaggaagccgcccctaacgtggcaaataataccgggccgcacgctgcttcctgtttcggcgcgaaaaagggcaagggaaagaagcccatcgaggatcctgccaacgacacagttgattttccaaagagaacctctcctgcccggggatacgagttactgttccagcctgaagtggtccgcatctatatcagcctcctgaaagagagtaaaacgcctgctatcctagaagccagcgcgggcgccatacagaatctctgcgcggggcgctggacatacggcaggtatattcgctcagctcttaggcaggagaaagcactgtccgctattgcagacctgttaaccaacgaacacgaaagggtggtcaaagcagccagcggtgccttacggaacctggcggtggacgctcgcaataaagaattaattggcaaacatgccatccctaacctcgttaagaatctccccgggggccagcagaattcaagttggaacttctctgaagataccgtgatcagtatactcaacacaattaacgaagttattgctgagaaccttgaggcggccaagaaactccgtgaaacacagggaattgagaaactagtgttgatcaacaagagcgggaaccgatcagaaaaggaagtgcgtgcagcggccctggttctgcagactatctggggatataaggaactgagaaaacctctcgagaaagaaggctggaagaagtcagattttcaggtgaacttaaataacgcaagtagatcccagagctctcactcttacgatgacagtactcttcctctgatcgataggaaccaaaaatccgacaataattactccacccctaatgagaggggggatcataaccggacactggacagaagtggggatctcggagacatggaaccgctgaaaggaaccacacctctgatgcaggatgaggggcaggaaagtctagaggaggagctggacgttttggttctcgacgatgagggtgggcaagtgtcctaccctagcatgcagaaaatctag

SEQ ID NO: 181867 - DNA, 2802 bp, synthetic construct
  misc_feature 1..2802: note = Description of Artificial Sequence: Synthetic coding sequence
  source 1..2802: mol_type = other DNA
atggacgacagcgaggtggagagcaccgccagcatcctggccagcgtgaaggaacaggaggcacagttcgagaagctgaccagagcactggaagaagagagaagacatgttagcgcacagctcgagcgtgtgagagtcagtccccaggatgctaatccactgatggcaaacgggaccttgactcggaggcaccaaaatggacgattcgttggcgacgccgacctggagagacagaagttttccgacttaaaattaaacgggcctcaagatcactcccatctgctctactctactatcccccgaatgcaggaacctggccaaatcgtcgagacctacacagaggaggatcctgagggcgccatgtctgtagtgtcagtggagacatctgacgatggcacgactaggcgcaccgaaaccacagtgaagaaggtggtgaagactgttacaacccggacagtacaaccggtggcaatgggcccagatggactccctgtagacgcctcaagcgtctccaacaattatatccagactctggggagagatttcaggaaaaatggcaacggtggaccgggcccttacgtcggccaagccggcacagccacgctgccacggaacttccactaccccccagacggttactcaaggcactatgaggatggctatcctgggggtagcgacaactatgggagcctgtctcgcgtgacacgaatcgaagagaggtaccggccctccatggaggggtatcgcgcccccagccgacaggatgtctatggcccccaaccacaggtgagagtaggcggatcctctgttgatctgcacaggtttcaccccgagccatatggcctcgaagacgaccagcggtccatggggtatgacgatctggattatggcatgatgagcgattatgggacggcaaggcgcacgggtactccctcagatcctaggaggaggctgaggagctacgaggatatgatcggcgaagaggtcccctcagaccagtattactgggcccccctggcacagcatgagcgaggctcgctcgcgagtctcgacagtctgcgaaaagggggcccacccccacccaactggcgccagccagagcttccagaagtgatcgccatgctgggctttagactggatgccgtcaagagtaacgcagcagcctacctgcagcatctgtgttatcggaatgataaagtcaagacggacgttcggaaactgaaagggattccggtactcgtggggctgcttgatcaccctaagaaggaggtgcacctaggtgcatgcggggcgctgaagaatatatcctttggtcgggaccaggataataaaatcgctatcaaaaactgtgacggggttccggccctggtgaggctgctgagaaaggcgcgggacatggacctaacagaggtgattacaggcaccctgtggaacctttcaagccacgacagcatcaagatggagattgttgatcatgccctgcatgcactcacagacgaggtaatcatcccacatagcggatgggaacgtgaacctaatgaggactgcaaaccacgtcacattgagtgggagtcagttttgaccaatacagctggttgtctccggaatgtgtccagcgagaggtcagaggccagacgcaaactacgtgagtgtgatgggctcgtggatgcactgatcttcatcgtccaggccgaaattgggcagaaagattccgacagcaagctcgttgagaactgtgtgtgcctgttaagaaacttgagctaccaggtgcacagggaaatcccccaggctgagcgttatcaggaggccgcacccaatgttgctaacaataccggtccacacgcagccagctgtttcggggcaaaaaaaggaaagggtaagaagcccatcgaggacccggcaaatgatacagtggatttccccaaaagaacttctcccgcccgcgggtacgagctcttattccagccagaagttgtcaggatctatattagcttgcttaaggaatcgaagacccccgccattttggaagcctcggcaggggccatccaaaatctgtgcgcgggaaggtggacttatggccgatatatacgctccgcattgagacaggaaaaagccctgtcagctatagccgacctgcttactaacgaacacgaaagggtcgtgaaggccgcttcaggagctctccggaatctggccgtggacgccaggaataaagaactcattggtaaacacgccattccaaatctggtgaaaaatctgcctgggggtcagcaaaactcaagttggaacttctcggaggatactgtcatctctatacttaataccatcaatgaggtgattgccgagaacctagaagccgccaagaaactgcgagagactcagggaatcgagaagctggtgttaataaacaagagcggcaataggagcgagaaggaggtaagggctgccgctcttgtcctgcagacaatatgggggtataaagagctgcgaaagcctctcgagaaggaggggtggaagaagtctgactttcaagtcaacttaaataatgcgagtaggtctcaaagttcacatagttatgatgattctacgttaccattaatcgaccgcaaccagaagagtgacaagaagccggatcgagaagaaattcagatgtcaaacatggggtccaatacaaaatcactagacaacaattatagcacacctaacgaaagaggtgaccacaacaggaccttagatcggagcggggacctcggcgatatggaacctctgaagggaaccactcctttgatgcaaaagatctag

SEQ ID NO: 181868 - DNA, 2817 bp, synthetic construct
  misc_feature 1..2817: note = Description of Artificial Sequence: Synthetic coding sequence
  source 1..2817: mol_type = other DNA
atggacgacagcgaggtggagagcaccgccagcatcctggccagcgttaaggaacaagaagcccagtttgaaaagctgacacgcgccttagaggaggaacgtcgtcacgtaagcgcgcaactcgaacgtgtcagggtgtctcctcaggatgcaaatccactcatggccaatggaactctaactcgccgccatcagaatgggagattcgtgggtgacgctgatttagaaagacagaaattttccgacttaaagctaaatggcccccaggatcatagccatctgctgtattcaacaatccctcgaatgcaggaacctggccagattgtcgagacatatacagaggaggaccctgaaggggcgatgtccgttgtgtctgtggagacatctgacgatgggaccactagacggacagaaaccaccgtgaaaaaagttgttaaaactgtgactacccggaccgtccagcctgtcgcaatgggccccgacggactccctgtagacgcttcttccgtttcaaacaattacatccaaaccctcggacgggacttccgaaagaatggcaacggaggtccagggccgtatgtgggtcaggcggggaccgctacattacctagaaactttcattatccgccggacggctactctcgtcattacgaagacggataccctggcggatcagataactatggttctctctcgcgggtgacaaggatagaagagagatatagacccagcatggaggggtatcgggctccatctcgccaggatgtttatggccctcagccccaggtgagggtgggtggttcaagcgttgacttacatcgcttccaccccgagccctatgggctggaagatgaccagcgctccatgggatacgacgacctggactacggcatgatgtcagattatggaacggccagacggacaggtacaccttctgaccctcggcgtaggctgagatcctacgaggatatgatcggggaagaggtcccctcggaccagtattactgggccccccttgcgcagcacgagagagggtcattggccagcctcgactctttgcggaagggaggcccgcctccccccaattggcgccagccagagctgccagaggttatcgcgatgcttggctttcggctggacgcagtcaagagcaatgctgcagcctacctgcaacacctgtgctacaggaacgataaagtgaaaaccgacgtgagaaaactgaaggggatcccagtgctcgttgggttgctcgaccaccccaaaaaggaggtacaccttggtgcctgcggggcccttaagaatatcagctttggacgagaccaggacaataagatcgctatcaagaactgtgacggggtgcccgctctcgtgaggctactcaggaaggctcgcgacatggatctaacagaggtgattactgggacgctgtggaatctgtcaagccacgattccatcaaaatggagattgtggaccatgccttgcatgccctgacggatgaagttattatccctcatagtgggtgggagagggagcctaacgaagattgtaagccaagacacattgaatgggagtcggtgctgacgaacaccgcgggctgtttgcggaatgtcagtagcgaacggtcggaagcccggcgaaagctccgtgagtgtgacggcctggtggacgctctgatcttcattgttcaagccgagattgggcaaaaagactcagattcaaaactggtggagaattgcgtctgcctgcttcgcaacttgagttatcaggtgcacagggaaatcccccaggctgagcggtatcaagaggctgcgcctaacgttgccaacaatacgggacctcatgccgcaagttgttttggagctaaaaaaggcaaggatgaatggttcagcagaggaaagaagcccattgaagaccccgccaatgacacagtggacttccccaagaggactagccccgcaaggggctatgaactgttattccagcccgaagttgtgcgaatttacatctccttactcaaggaaagtaagacacctgccatcctggaggcgtctgccggagctattcagaacctgtgcgcaggacgctggacatacggtagatacattcgctctgcgcttagacaggaaaaagccctttccgccattgcagacctcctgacaaacgagcatgaaagagtggtcaaagctgcctccggggcactgcggaatctcgctgtagatgctcgaaacaaggagctgattggaaagcacgcaatccctaatctggttaaaaacttgccaggagggcagcagaatagcagctggaatttctctgaagataccgttatctcgatactgaacaccattaatgaggtgatagctgagaatctggaggctgcaaaaaaactcagagagacccaaggtattgagaagttggtgctgatcaacaagtcggggaatcggtctgagaaggaggtcagagccgcagcccttgtgctgcagaccatctggggctataaagaactgcggaagcccctcgaaaaagaggggtggaaaaaatccgattttcaagtgaatctgaataatgctagccgctctcagtcgtctcacagttatgatgatagcacactgcccctcatagatcggaaccaaaaatctgataagaaacccgacagagaagagatccagatgtcaaacatgggctcaaacaccaagtctttggataacaactactctactcccaacgaacgcggagatcacaaccggacactggaccggagcggagatctcggcgacatggaacccttaaaggggacgacaccactaatgaagatctag

SEQ ID NO: 181869 - DNA, 2907 bp, synthetic construct
  misc_feature 1..2907: note = Description of Artificial Sequence: Synthetic coding sequence
  source 1..2907: mol_type = other DNA
atggacgacagcgaggtggagagcaccgccagcatcctggccagcgtgaaggagcaggaagctcagtttgaaaagctcacccgcgctctggaggaggagaggcggcacgtgagcgcccagttggagcgcgtccgagtgtccccgcaggacgctaacccccttatggccaacggcacgctgacacgtaggcatcagaatggacgattcgtcggtgatgctgacctggaaagacagaagttttctgatctcaaactaaatgggcctcaagaccattcccacctgctctattctacaattcctaggatgcaggagccgggccaaatcgtcgagacatataccgaggaagacccagagggggctatgtctgtcgtctctgtggaaacgtccgacgacggtacaacccgcaggacagaaacaaccgtgaagaaggtggtaaagactgtgactacccgtaccgttcagccagtggcaatgggtcctgacggccttcccgtcgatgcctcgtccgttagtaacaattatattcagacgttgggacgggactttcgcaaaaacggcaatggcggccccggaccctatgtagggcaggcaggcacagccacgcttccgcgaaatttccattatccccccgacggatatagtcggcactatgaggatggatatccgggagggtcagacaactacggaagtctgtctcgggtaacaaggatcgaggaacggtatagaccctccatggaaggttacagagctccttcccgccaagacgtttatggcccccaaccgcaggttcgtgtcgggggctcttcagtggacctgcatcgttttcatcctgaaccctacggccttgaggacgatcagagatctatgggatacgatgatctggactacgggatgatgtccgactacggcaccgcccgccgcaccgggacgccctcagacccacggcgccggctccgatcttacgaagatatgattggtgaagaggttccaagtgaccagtattactgggccccactcgcccaacatgagcggggtagcctggcgagtctcgactctcttcgcaaaggaggaccccctcccccaaattggcgccaacccgaactgccagaagtgattgctatgctcggtttccggctggacgccgtgaagagtaacgcagcggcgtacctccagcatctgtgctacaggaatgacaaggtgaaaacagacgtgcgcaaactgaagggcatccccgtcttggtgggactcctggatcaccctaagaaagaggtgcatctcggtgcctgcggagcgcttaaaaacatttcctttggaagggatcaggacaataagatagctattaagaattgtgacggcgtgcccgccctggtacgcctgctaagaaaggcccgagacatggacctcacagaagtgataaccgggacattatggaacctttctagccacgacagcatcaagatggaaatcgtagaccacgcactgcatgctcttaccgatgaggtaattatcccccactccgggtgggaacgcgagcccaatgaggattgtaaaccccgtcacatcgaatgggagagcgtgcttacgaatacagcaggttgcctccgcaacgtttcaagcgagcggtctgaagcccgacgaaaattaagggagtgtgacggtctggtcgatgctctaatattcatcgtgcaggctgaaattgggcagaaggattcggattccaagctggtagagaattgtgtttgtcttctgaggaatctgagttatcaagtccatcgggaaattccccaggccgaacgataccaagaggccgctccaaatgtagcgaataataccggcccacacgccgcttcatgcttcggggctaaaaagggaaaggatgaatggttctctcggggcaagaagccaatcgaggacccagctaatgacacagtggactttccaaagaggacatcaccagctcgtgggtatgaacttctgttccaacctgaggttgtgcgaatttacataagcctgctgaaggagtcaaagactcccgccatcctggaagcctctgcgggggccattcagaacctttgcgccggacggtggacatatggtcgctatatccgttctgccctgcgccaggagaaggccctgagcgctattgcagacttgctaaccaacgagcatgaacgggtggtcaaggcagcatctggggcactgcgcaaccttgcagtggacgcgagaaacaaggaacttatcggtaaacacgcaattcccaatctagtgaagaacctcccaggggggcagcagaattcttcctggaatttctctgaggatactgtgatttccattctgaacaccatcaacgaagtgattgcagagaatttggaggcagccaagaaattaagagagacacaagggatagagaaattagtcctgattaataaatcgggcaataggtccgagaaagaagtgagggccgcagctctggtcctccagaccatctgggggtataaggagctgcgaaagccactcgaaaaagaaggatggaaaaagagcgattttcaggttaatcttaataatgcaagcaggtcgcagtcatcccatagctacgatgactccactctgcctttaatcgaccggaaccagaaaagcgacaagaagccagatagagaggagattcaaatgagtaatatgggaagcaatactaagagcctggataataactactctacacccaacgagaggggtgaccacaaccgtaccctcgacaggagcggcgatttgggggatatggagcctctaaagggaaccacgccgctcatgcaggacgaaggacaagagagtcttgaggaagaactggatgtgttggtgttggacgatgagggcgggcaggttagctatccctctatgcagaagatctag

SEQ ID NO: 181870 - DNA, 2604 bp, synthetic construct
  misc_feature 1..2604: note = Description of Artificial Sequence: Synthetic coding sequence
  source 1..2604: mol_type = other DNA
atgcaggagcccggccagatcgtggagacctacaccgaggaggacccagagggggcaatgtcggtggtttctgttgagacgtcagacgatgggactacgcggagaactgaaaccactgtcaagaaggtcgtaaagaccgtcaccacccgaactgtgcagcctgtagcgatgggtccagacggcctgccggtcgacgccagttccgtctctaataattacatccagacactcggcagagatttcaggaaaaatgggaacggtggacctggaccatatgtggggcaggcgggaaccgccaccctgccaagaaatttccactatccacccgatgggtattctagacactatgaagatggatatccaggtggatccgataattacggctctctgtcaagagtgacgcgtatcgaggagcgttaccgtccctcaatggaaggctatagagcacctagtcgacaggacgtatatgggccacagccacaggttcgggttggaggatcctcagtggacctgcaccggttccacccggaaccatatgggctggaagacgatcaaaggagcatgggctacgatgatctagactacggaatgatgtccgactatggaacagcaagaagaacaggcactccctctgatccacgccggaggttgagatcatacgaggacatgattggggaggaggtgcccagtgaccagtattattgggccccactcgcacaacacgaacgagggtccttagcttccctcgattcactccggaaggggggccccccccctcctaattggcggcagccagaattgcccgaagtgattgccatgctagggtttcgcctggacgcagttaaatccaatgctgccgcctatctccaacatctctgctacagaaacgataaggtgaaaacagatgtgagaaagttaaagggaattcctgtgctggtgggtttgctggatcatccgaaaaaggaagtccacctgggtgcctgtggcgccctgaaaaatatctctttcggacgcgaccaggacaataagattgcaattaagaactgcgacggggtgccagctctggtgagactgctaaggaaggccagagatatggatctcaccgaggtgataaccggaacactgtggaatctgtcctcccacgacagtattaagatggagatagtcgatcacgcactgcacgcgcttactgacgaggtaataataccacacagcggatgggagcgcgagcccaatgaggattgcaaaccgagacatatagagtgggaaagcgtcctgacgaataccgcaggctgccttagaaatgtgagttccgagcggagcgaggcgcgccggaaattacgggagtgcgatgggctggtggatgccctaattttcatcgtgcaggccgagatcggacaaaaagacagtgacagtaagctagtcgagaactgcgtgtgtctgctgcggaacctgtcttaccaagtacaccgcgagatccctcaggcagagagataccaggaggcggcacctaacgtggctaataacactggcccccacgccgcctcttgctttggggctaagaaaggcaaggacgaatggttcagcagaggcaagaaacctattgaggacccggccaacgatacggttgattttccgaagcgaacgtcacctgctcgcggttatgagctgttattccagccagaagttgtgcggatctacatctctctcctcaaagagagcaaaacgccagctatcttagaggcaagcgcaggcgctatccaaaacctgtgcgcggggcggtggacgtacgggaggtatataaggagcgcgctgaggcaagagaaagctttgtctgcgatcgcagatttgttgacgaacgagcatgaaagggtagtgaaggctgcatcaggggcactgcgcaacttagctgtggacgctcgcaataaggaattgattggcaagcacgccataccaaatctggtcaagaacctgcctggaggccagcagaactctagctggaacttcagtgaagacacggtgatcagcatcctcaataccattaacgaggttatagccgagaatctcgaggctgccaaaaagctgagagaaactcaggggatcgagaaattggtgctcatcaacaaatctggtaatagaagtgagaaagaagtgcgcgccgccgccctggtcctacagactatatggggctacaaagagctgagaaagccactggaaaaagaaggctggaagaaatctgatttccaggtgaatctgaacaacgcctctcgaagccagtcaagtcacagctacgacgattctacactgccccttatcgatcgcaaccagaaaagtgataagaaaccagatagggaggaaatacagatgtccaacatgggatctaacaccaagagcctagataacaactacagtacccctaacgaaagaggggatcacaatagaaccctcgacaggagcggtgacctcggggacatggagccgttgaagggaacaacacccttgatgcaagacgagggacaggaatctctcgaggaggaactcgacgtactcgtgcttgatgacgaaggcggccaggtgtcatacccttcaatgcagaaaatctag

SEQ ID NO: 181871 - DNA, 2499 bp, synthetic construct
  misc_feature 1..2499: note = Description of Artificial Sequence: Synthetic coding sequence
  source 1..2499: mol_type = other DNA
atgcaggagcccggccagatcgtggagacctacaccgaggaggacccggagggggctatgtctgtggtctctgttgagacaagtgatgatgggactacgcgaaggactgagacaacagtcaaaaaggtggtaaaaactgtgaccacacgaaccgtacaacccgttgcgatgggacccgatggactgcccgtagacgccagttcagtgtctaataactatatacagacactcggacgcgacttccgcaagaatgggaacggtggccctgggccctatgtaggacaggctggaactgccacactgcccagaaatttccactatcctccagacgggtactcaagacactacgaggacgggtaccctggagggtctgacaactacggcagcctcagccgggtgactaggattgaggaacgataccggccctccatggaggggtaccgtgccccctccaggcaggatgtctacggtccacagcctcaggtccgggtagggggctcttccgtggatcttcatcgctttcatcctgagccatacggtctcgaggatgaccagagatccatgggctacgatgacttggattatgggatgatgtctgattatggtaccgcccggcgcaccggcacaccgagtgaccccaggagaaggctccggtcctacgaggacatgatcggggaagaggtgccttccgaccaatactattgggcccctctggcccagcacgagagaggctccttggcgagcttagactctctccggaagggaggacccccaccccctaattggagacagcccgagttacctgaggtgatcgccatgctgggctttagactggacgccgtgaagtcaaacgcagccgcttatttgcagcacctgtgttatagaaacgataaagtaaagaccgatgtgcgaaagctgaaaggcattcctgtgctggtcgggctgctggaccacccaaagaaagaggtgcaccttggggcatgtggcgcactcaaaaatatatcatttgggcgagatcaggacaacaagatagccataaagaactgtgatggcgtaccggccttggttcggttgctcaggaaagcccgagacatggacctgaccgaagtgattacaggtacactttggaatctctcctcgcacgacagcattaagatggaaatcgtggatcacgcactgcatgctctcactgatgaggtgatcataccccattctggatgggaaagggagccaaatgaagactgtaagccgcgacatatcgagtgggagtctgtgctcactaacaccgcgggttgtctccgtaatgtcagcagtgaacgcagcgaagcccggcgcaaattacgggaatgtgatggactggtcgatgccctgatttttatagtgcaggcagaaatcggacagaaagattcagattccaagctggtggaaaattgcgtgtgcctccttagaaacctgagttatcaggttcacagagagatcccccaagcagaacggtatcaggaggccgccccgaacgtggcaaataacacaggaccccacgcagcttcgtgtttcggtgctaagaaaggtaaggggaaaaagccgatcgaggaccccgccaacgatacagtggatttcccaaaaaggacaagtcctgcaagaggttatgagctactcttccagccggaggtggtcagaatttacatatctcttttgaaggagtcaaagacacccgctattctcgaggcttctgctggagccattcaaaacctttgtgcaggccggtggacatacgggaggtatatccgatctgccttgaggcaggaaaaagctctttccgctattgcggacctccttaccaacgaacacgagcgcgtggtgaaagccgcatccggcgccctcaggaatcttgccgtggacgccagaaacaaagagctgatcggaaagcacgcgatacccaatctcgtgaagaaccttcccggaggtcaacagaattcaagttggaatttttccgaggatacagtgatcagcattttgaacacgatcaacgaagtcatcgctgaaaacctggaggccgcaaaaaaactgagagaaacacaagggatcgagaaactggtcctgataaacaaatccgggaatagatcagagaaggaagtacgagccgctgcacttgtcctccaaactatttggggctacaaagaactaagaaagcctctcgagaaagaaggttggaagaagtctgacttccaggtcaatcttaacaatgcatcgcgatctcagagcagtcacagttatgatgacagcactctgccgctgatcgataggaaccagaaatcagacaagaagcccgacagggaggagattcagatgtcaaatatgggctccaatacaaaaagtctggataataattattcaacccctaatgaaaggggggaccacaataggacccttgatagaagcggggatctaggcgacatggagccgttaaagggaacaacgcccctcatgcaaaaaatttag

SEQ ID NO: 181872 - DNA, 2802 bp, synthetic construct
  misc_feature 1..2802: note = Description of Artificial Sequence: Synthetic coding sequence
  source 1..2802: mol_type = other DNA
atggacgacagcgaggtggagagcaccgccagcatcctggccagcgtcaaggagcaggaggcccaatttgagaagcttacccgcgccctggaggaagaacggcgccacgtgtccgctcagcttgaaagagtgagagtttcacctcaggacgctaatcccctgatggctaatgggacattgacaaggagacaccagaacgggcggttcgtcggagatgccgacttggagcgacaaaagttttcggacctgaaactgaacgggccacaagatcactctcatttgttgtacagcaccatcccgcggatgcaggagcctggccagattgtggagacttacacggaggaagatccggagggtgccatgtctgtggtctcagttgaaacttccgacgacgggaccacgagaagaaccgagacgacagtcaagaaagtggtcaagaccgttaccaccaggacagtccaacctgtggccatgggacccgatggcctgccagttgatgctagtagtgtgtccaataattacatacagactctggggagagacttcagaaagaacggtaatggggggcctggtccgtacgtaggccaggcaggcaccgcgactctgcccaggaattttcactaccccccagacggatactcccggcactatgaagatggataccccggtggctccgacaattacgggagtctgtctcgagtcaccaggattgaggagaggtacaggcctagcatggaggggtacagggctccgagtcgacaggacgtatacggtccacagccccaagtcagggttgggggttcatccgtggatttacaccgattccatcccgagccttacggcctggaagacgaccagcgatccatgggctacgatgatttggactatggaatgatgtccgattacggcaccgcccgaagaaccggaacgccaagcgacccacgacggagactgagatcctacgaggatatgattggcgaggaggtgccctctgatcagtattattgggctcccctggcccagcacgagaggggatcgctagcctcactcgactccctgcggaagggaggaccaccgcccccaaattggcgccagcctgagttgccggaagttatcgcaatgctggggttcagactggatgccgtcaagtcaaacgccgccgcttatttacagcatctgtgttacaggaacgataaagtgaaaactgacgtccgtaaattgaaaggaatcccggtacttgtaggccttctggaccaccccaaaaaagaggttcacctcggcgcttgcggcgccctgaaaaatatatcttttggaagagatcaagacaataagatagctattaagaactgcgacggcgtgccagccctcgtgcgtctgctgcggaaggcccgtgatatggacctcacagaagttattactggtaccctctggaacctgagctcccatgactccatcaagatggagattgtcgaccatgccctgcatgcacttactgacgaagtaattataccacactccggatgggaaagagaacctaacgaggattgcaagcctcggcacatcgagtgggagtccgtgttgacaaatacggctggatgtctgcgaaatgttagtagcgagcgttcagaggctagacggaagctccgagaatgtgatggcctcgtcgatgcactcatcttcattgtccaggcagagattggccagaaggattctgactccaagctcgtcgaaaactgtgtgtgtttactccggaatctttcgtaccaggtccatagggagattcctcaggccgagcggtaccaagaagcggccccaaacgtggcaaacaataccggtccccacgctgccagttgcttcggcgccaagaagggaaaggggaagaaacctatcgaggatccggccaacgatactgtggacttccctaagcggacctctcccgcccgtgggtatgagcttctgttccagcctgaagttgttcggatttacatctccctcctaaaggagtcaaaaacccccgctattttggaagcgagtgccggcgccatccaaaatttgtgtgcgggacgatggacttacgggaggtacatcaggtccgctctccggcaggaaaaagctttgagcgccattgctgatctcctcaccaacgaacatgagcgagtcgtcaaggctgcaagcggggccctcaggaacctggctgtggacgctagaaataaggagctgatcggaaaacacgctattcccaatctggtgaagaaccttccgggtggccaacagaacagcagttggaacttttcagaggatacagtcatctctatcctaaatactatcaacgaagtgatcgccgagaatctagaagcagccaagaagctgagagagacacaagggatcgaaaagctagtgctgatcaacaaatcaggaaacaggagtgagaaggaggtgagggctgccgcgctggtgttacagaccatttggggttataaggagttgaggaagcccctcgaaaaggaaggatggaaaaaatcagattttcaggttaatctcaataacgcctcacgttcccagagcagccattcctatgacgactccacacttcctcttatcgatcgaaaccagaagtcagacaagaagcccgacagggaggaaatacagatgagtaatatggggtctaatacaaagtctttggacaataattatagcactcctaacgaaagaggtgaccacaacaggaccctcgacagatccggggatctcggagatatggaacctctgaagggcacaaccccactgatgcagaaaatctag

SEQ ID NO: 181873 - DNA, 15 bp, synthetic construct
  misc_feature 1..15: note = Description of Artificial Sequence: Synthetic coding sequence
  source 1..15: mol_type = other DNA
atggacgacagctag

SEQ ID NO: 181874 - DNA, 2802 bp, synthetic construct
  misc_feature 1..2802: note = Description of Artificial Sequence: Synthetic coding sequence
  source 1..2802: mol_type = other DNA
atggacgacagcgaggtggagagcaccgccagcatcctggccagcgtaaaagagcaagaggcccagtttgagaagctgacgcgggcactcgaggaagaacgaaggcacgtgagcgcccagctcgagcgcgtcagggtgtccccgcaggacgctaatcccctcatggcgaacggaactctcactcgcagacaccagaatggacggtttgtgggggacgccgacctcgaacgccagaaattcagcgacctcaaactcaacggtccccaagaccattcccacctgctctacagcaccatcccgcgtatgcaggagcccggccagatcgttgaaacatataccgaggaagacccagagggggccatgtctgttgtgtccgtagagacttccgacgacgggacaactagaagaaccgaaaccactgtcaaaaaggtcgtgaaaaccgtgactactcgtaccgtgcagcccgtcgctatggggccagatggccttccggtggatgcgtcctccgtttctaacaactatatacagaccctcgggcgcgacttccgaaagaacggtaatgggggaccagggccctacgtgggccaagccggcaccgccacattgccaaggaatttccactatcccccggatgggtattcccgacactatgaggacggctacccaggcggaagcgataattacggttctttgagcagggtgaccagaatcgaagaaagataccgcccatccatggaggggtaccgagcgccaagtcgacaggatgtctatggtccacagcctcaggtcagagtcggaggatcaagcgtggacctgcacaggttccatcctgaaccctacgggcttgaggacgaccaaagaagcatgggctatgacgacctggattacggaatgatgagcgattatgggaccgcccgccgcaccggaactccctcagatccaaggagaagactccggtcatatgaggatatgattggcgaagaggtgcctagcgatcagtactactgggccccattggctcagcatgaaaggggttccctggcttcacttgacagcttacgaaaaggtggccctcctccgcctaactggcgccagccagaattacctgaggtcatcgcaatgttgggttttcgactggatgcggttaagagcaacgcagcagcctaccttcaacacctctgctataggaacgacaaagtgaaaacagacgtgcggaaactcaagggtatccccgtgctggtagggctcctggaccatccaaagaaggaagttcatttgggcgcttgtggagcactaaagaacatcagctttggaagagatcaagataacaaaattgcaattaagaattgtgacggtgtccccgctctggttcgcctgctacgtaaagcaagggacatggatctgacagaggtgattaccgggacactgtggaacttatccagtcacgacagcattaagatggaaatcgtcgatcatgctctgcatgccctgacagatgaggtgataattcctcattctggttgggaacgggagccaaatgaggattgcaagccaagacacatcgaatgggaatcagtgcttaccaatactgccggttgcttgcggaacgtctccagtgaaaggagtgaggctcggcggaagctgcgcgagtgcgatggccttgttgatgctctgatttttatcgtgcaggcagaaattgggcagaaagactcagattcaaagctcgtcgagaattgtgtttgcctgctgcggaacctgagttaccaggtgcatcgggagatcccacaggcagaacggtatcaggaagcggcccccaatgtcgccaataacacgggcccacacgcagcctcctgcttcggtgccaagaaaggaaaggggaaaaaacccattgaggatcctgccaatgatacagttgatttccccaaaaggacctcccccgcaaggggttacgaactcctgttccagccagaagtggtcagaatctatatttccctcctgaaggagtccaagacccccgccatcctggaggccagtgcaggagcgatccaaaatttgtgcgcaggtcgttggacgtatgggcgttacatccgcagcgccctcagacaagagaaggctctgagtgctatcgcagatcttttaaccaatgagcatgagcgagtagtaaaggccgcttctggtgctctgcgtaacctagcagtggacgcccgaaacaaagagctgataggtaaacatgctatccctaatttagtaaagaatctgcccgggggccaacagaattcatcctggaacttttcagaagatacagttattagtattttgaataccatcaacgaagtgatcgccgaaaacctcgaggctgcaaagaaactaagggaaactcagggaatcgagaaattggtgctgattaacaagtccggaaacagaagtgagaaagaagtcagagcagctgccctcgtgctgcagaccatctggggctacaaagaactgagaaagccacttgagaaagagggatggaaaaagtccgacttccaggtgaatttgaacaacgcatcccggagccagtcctcacatagttatgatgatagcaccctacctctaatcgaccgcaaccagaaatctgataaaaaacccgaccgtgaagaaatccagatgtccaacatgggatccaatactaaaagcctcgataataattattcgactccaaatgagagaggggatcacaaccgtactctggatcgttctggcgacctgggagatatggaacccttgaaggggacaacacccctgatgcagaaaatttag

SEQ ID NO: 181875 - DNA, 1851 bp, synthetic construct
  misc_feature 1..1851: note = Description of Artificial Sequence: Synthetic coding sequence
  source 1..1851: mol_type = other DNA
atgatcggcgaggaggtgcccagcgaccagtactactgggcccccttggcccagcacgagagaggaagtctggctagcctggattcgttgcggaaaggagggcctcctcctcctaattggcgacaaccagaactaccagaagtaatagcaatgctcggcttcaggcttgatgctgtgaaatccaatgccgctgcttatttgcaacatctgtgctacaggaacgacaaggtaaagaccgacgtgcggaaactcaaagggattcctgtcctggtaggactacttgatcacccgaaaaaggaggttcacttgggcgcctgtggagcactcaaaaatataagcttcggacgggaccaggataataaaatcgcgattaaaaattgtgacggcgtaccagctctggtcagattgcttcggaaagcccgagacatggatctaactgaggttatcactgggacattgtggaatctgtctagtcatgacagcataaagatggaaatcgtggatcacgccctacacgctcttactgatgaagtaattatccctcattccggctgggagagggagcctaacgaggactgtaagcctaggcatatcgaatgggaaagcgtattgaccaacactgctggttgtctaagaaatgtttcttctgagagaagcgaagctcgccgtaagctgcgagagtgtgatggcctcgtagatgcccttatattcatcgtccaggccgaaattgggcaaaaggattctgattctaaactcgtcgaaaattgcgtatgtcttctgcgcaacctctcttaccaggtgcatcgtgaaattccccaggccgaaaggtatcaagaggcagcacctaacgtggctaataacactggtcctcacgcggcttcctgcttcggggcaaagaaggggaaggatgaatggttttcacgaggcaagaagcctattgaggacccagccaacgataccgtggactttccaaagaggacatcacctgctcgggggtacgagttgttgttccagccagaagtcgtcaggatatacattagtctcttgaaggagagtaagactcctgccattctggaagcctccgccggtgccatccaaaatctctgcgccggtcggtggacatatggccgatatatcagaagcgctctgcgtcaggagaaagcactcagcgcaatagcagatctcctgacgaatgaacatgaacgcgtggttaaagccgcttcaggtgccttgagaaacttagccgtggatgccagaaacaaagaactaatcggtaaacacgctatacccaacctggtgaagaacctgcccgggggccagcagaactcttcctggaacttctcagaggataccgtgatctcaattttaaatacaatcaatgaggtgatcgcagaaaacttagaggccgccaaaaaactccgcgagacgcagggtatcgaaaagcttgtcctgatcaacaagtctggaaatcggtcagaaaaggaagtccgcgcagccgcattagtgttgcagaccatttggggttacaaggaactccgaaaaccactggagaaagagggctggaaaaagtccgatttccaggtgaacctcaacaatgccagtcgatcccaaagtagccattcttacgatgactccacgctgccactcatcgacaggaaccagaagtctgacaagaagcccgaccgcgaggagatacaaatgtctaatatgggctccaacaccaagagtctggacaacaactattcaacccctaacgagcgtggagaccataaccgaaccctcgacaggtcaggtgacctgggagacatggaacctctgaagggtaccacgcctcttatgcagaaaatttag

SEQ ID NO: 181876 - DNA, 2727 bp, synthetic construct
  misc_feature 1..2727: note = Description of Artificial Sequence: Synthetic coding sequence
  source 1..2727: mol_type = other DNA
atggccaacggcaccctgacccggcggcaccagaacggccggttcgtgggggacgctgatctcgagcggcagaaattctctgatctgaaacttaacggccctcaggatcacagccacttgctgtacagcactattccccggatgcaggaaccgggccagatcgtggagacttacacagaggaggaccccgagggagccatgtccgttgtttcagtcgaaactagtgatgatggaactaccagaagaacagagaccacagtgaagaaggtggtcaagacagtaaccacacggaccgtgcagccagtggctatggggcctgacgggctgccagtcgacgcgtcatctgtatccaataactacatccaaaccctgggcagagactttcggaaaaatggaaacggcggcccaggaccttatgtcgggcaggcgggcaccgctacactgccaagaaacttccattatccccccgatggctactccagacactacgaggacggatatccaggaggatcagacaattacgggagcctctctagagtgacccgcatcgaggagagatacaggccaagcatggaggggtaccgtgctccaagtcgccaggacgtatacggaccgcagccccaggtgcgagtgggtggatcgtcggtagatctgcatcgctttcaccccgagccttatggccttgaagacgaccagcgctctatggggtatgatgatttggactatggaatgatgtcggattacggtaccgcgagacgcacaggcaccccaagtgatccacgaaggcggttacgctcatatgaagacatgattggcgaggaggttccgtctgaccagtattactgggccccgctggcacagcacgaacggggcagtctcgcttccctggactctctgcgcaaggggggccccccccctccaaattggaggcagcctgagcttcccgaagtcattgcaatgttgggctttcgcctggatgctgtaaaaagcaatgcggcagcatacttgcagcacttgtgctaccgcaatgataaagtgaaaacggacgttcgtaagctcaagggcattccagtgctggtgggacttctcgatcaccctaaaaaggaggtccacctcggggcctgcggcgccttaaagaatatttcctttggtcgtgaccaggataacaagatcgccatcaaaaattgtgatggcgtacccgctcttgttcggctacttcggaaagcgagagatatggacctgacagaagtgataacaggtacactgtggaatctctcatctcacgattcaatcaagatggagattgtggatcatgccctccacgccttgactgacgaagtgatcattcctcatagcggctgggagagggaaccaaacgaggattgtaaaccccgccatatcgaatgggagagcgtgttgaccaacactgcaggttgcctgcgcaacgtctcctctgaacggtcagaagcccggagaaaactccgagagtgtgatggattagtggacgctttaatatttatcgttcaggccgaaatcggtcagaaagactcagattccaaactagtggaaaattgcgtgtgtctgctgaggaatttaagttatcaggtgcacagggaaattccacaggcggagcgatatcaggaggctgctcctaatgtcgccaataacactggcccccacgcagcaagctgttttggcgccaagaaggggaaaggtaagaagccaatcgaggatcccgcaaatgacaccgtcgactttccaaaacgcaccagcccagcaagaggctatgagctattgttccaacccgaagtggtacgtatttatattagtctcctgaaggagtctaaaactcctgctattctggaagcaagtgctggggcgatacagaatctgtgcgcaggacgatggacctacggccggtacattcggtctgccctgagacaggagaaagccctgagcgccattgcagacctgttaactaatgaacatgagcgcgtggttaaggctgcaagcggagcccttaggaatttggcagttgatgcacggaacaaagagctcattggaaagcacgcgatacctaatctggttaagaatctgcccggcggtcagcagaacagttcttggaatttttccgaggacaccgtaatctctatcctgaacactataaatgaggtgattgccgaaaaccttgaggctgctaaaaagctgagagagacacagggcattgaaaagctagtgctcattaataaatcgggaaatagatcagaaaaggaagtgcgggctgcagctctcgttctacagaccatttgggggtataaggaactgcggaagcctctcgagaaggagggatggaagaaatccgactttcaggtgaatctcaacaacgcatcaagaagccagtcttctcactcctacgatgactcgaccctgccacttattgatcggaatcagaaatccgacaaaaaacccgacagagaggagatccaaatgtctaacatgggctccaacactaagtcactggataacaattactcgacccctaacgagagaggggaccacaatcgaactctcgaccgttcaggagatctgggggacatggagcctctgaaggggacaacgccattgatgcaggatgaaggacaagagagcctggaagaggaactcgacgtccttgtgctggatgatgaagggggtcaggtgtcctaccccagtatgcagaagatatag

SEQ ID NO: 181877 - DNA, 1833 bp, synthetic construct
  misc_feature 1..1833: note = Description of Artificial Sequence: Synthetic coding sequence
  source 1..1833: mol_type = other DNA
atgatcggcgaggaggtgcccagcgaccagtactactgggccccccttgcccagcatgaacgagggtcactggcatcactggattctctgagaaagggaggacctcctccccctaactggcggcaaccagaattgcctgaagtgatcgccatgctcggctttagactcgacgcggtgaaatccaatgctgccgcatatcttcagcatctatgttacagaaacgataaggttaagacagacgtgcggaagctgaagggcatccctgtcctcgtcgggttgctggaccaccccaaaaaggaggtgcatctcggagcctgcggtgctctcaagaacatctctttcggccgcgaccaggataataaaatcgcgattaagaactgcgacggagtccctgccttagttcggctcctgcgcaaagcccgcgacatggacttaacggaggttattactgggaccctctggaatctttcgtctcatgacagtattaagatggaaatcgtggatcacgccctgcatgcccttactgatgaagttattataccccatagcggctgggaacgagagcctaatgaggattgtaaacctagacacattgaatgggaatcagtgctgaccaatactgcagggtgccttcgtaacgtgtcctccgagaggtctgaagcccgaagaaagttacgcgaatgcgacggcctcgtggatgcactcatcttcattgtgcaggctgagattggacaaaaagacagcgactccaagctggtggagaactgcgtgtgcctattgagaaatctttcctatcaggtccatagggaaattccccaagccgaacgctaccaggaagccgcccctaacgtcgccaataataccgggcctcatgctgcaagctgctttggcgctaagaagggcaaaggtaaaaagccgatcgaggaccccgctaacgataccgtcgactttccaaaacgcacatccccagcccgcggctatgagctcctcttccaacccgaggtcgtaagaatctatatctctttgctcaaggaatctaaaactcccgctattctggaagccagtgccggagccatccagaatctgtgcgcagggcgctggacgtatggacgttacattaggagcgctctgagacaggaaaaggctctcagtgcaatcgcagacctgctgacaaatgaacacgagagggtagtaaaggcagcttccggggccttacgaaatctcgctgtcgacgccagaaataaggagctcatcggaaaacatgctataccaaatctcgtgaagaacttacccgggggccagcaaaacagcagctggaacttctcagaggacacagtaatatctattttgaacacaataaacgaggtgattgccgagaatctggaggccgcgaaaaaactgcgggagacgcagggtatcgagaaactggtcttaattaacaagagcggtaataggtctgagaaggaggtccgggccgcggccctggtcttacagactatctgggggtataaagaattgagaaagcctctggaaaaggagggatggaagaagtccgactttcaggttaatctcaacaatgcatcacgttcccaaagttcacactcttacgacgactccactttacctctgatagacaggaatcagaagtccgataagaagccagatcgcgaagagatccagatgagcaatatgggatcgaatacaaagagtctagataataactactctacgcccaacgagaggggcgatcacaaccgcaccttggaccggtcaggggacctgggggacatggagcccttaaaaggtaccacacccctcatgcaaaagatctag

SEQ ID NO: 181878 - DNA, 1938 bp, synthetic construct
  misc_feature 1..1938: note = Description of Artificial Sequence: Synthetic coding sequence
  source 1..1938: mol_type = other DNA
atgatcggcgaggaggtgcccagcgaccagtactactgggcccccttagcgcagcatgagagaggttcactggcatccttagattcactgaggaaaggaggtccccccccccctaattggagacagccagagcttcccgaggtgatcgctatgcttggctttaggttggatgcagtgaagtccaacgctgctgcctatcttcagcacctctgctataggaatgataaggtgaaaaccgacgttaggaaactgaagggaatcccagtcctggtcgggctgctggaccatcccaagaaagaggtgcacttaggcgcttgtggggcactcaagaacatctccttcggcagggaccaggacaataagatagccatcaaaaactgcgacggggtgccagccctcgttcgattactccgtaaggcccgagacatggacctcacagaagtgatcacaggcaccttatggaacctgtcttctcacgactcaatcaaaatggagatcgtggaccatgccctgcatgccctcacagacgaggtaatcatacctcacagtgggtgggagagagagcctaacgaggactgtaagcccaggcatatcgaatgggagtccgtacttacaaataccgccgggtgcttgagaaatgtgtcaagcgaacggtcagaagccaggcgaaaactccgagagtgtgatggcctagtcgatgccctgatttttatagtgcaggccgaaatcgggcagaaggattcggatagcaagctggtggaaaactgcgtgtgcctgttgcgtaacctgtcatatcaagtacatcgtgaaattccacaagccgagcgttatcaagaagcagcacccaatgtggcaaataacactggcccccacgctgcctcttgtttcggtgccaagaaagggaaggatgagtggttcagtcggggaaagaaacctattgaagacccagccaacgacacagtagactttcccaaacggaccagtcctgcacggggatacgaacttctctttcagcccgaagtcgttagaatctacatctccttgttgaaagaaagcaaaacacctgcaattctggaagcgtcagcaggggccatacaaaatctgtgtgccggcaggtggacatatgggaggtacattaggtcagccctcaggcaggaaaaggcactgtccgccatcgccgatctgctcacaaatgagcatgaaagagtcgtgaaggctgctagcggtgcactccgcaacctggctgttgatgctaggaataaggagctgattgggaagcacgcaatcccaaatctggtgaagaatctgcctggcggacagcagaactctagttggaactttagcgaggacaccgtgatttctatactcaacactattaatgaggtgattgccgagaatcttgaggccgctaagaagctgcgggagacccagggcatcgagaagttggttctgattaataagagtggaaatcgaagtgaaaaggaagttcgtgccgctgctctggtcctacagacaatatggggatacaaggagctgagaaagccattggaaaaggagggctggaagaaatctgattttcaggttaatctgaacaacgctagccggagccagagttcacacagctatgatgattccaccttgccactgatcgatagaaatcagaaatcagacaaaaagcctgatcgcgaagagatccaaatgtcaaacatgggatctaacactaaaagcctagataacaactactcaacacccaatgagaggggcgaccacaaccgcaccctcgaccgatccggagacttaggagacatggagccactgaaggggactacaccactaatgcaggacgaaggacaggagagcctagaggaggaactggacgtgctagttctcgatgacgaaggcggccaagtttcctacccatcgatgcagaagatatag

SEQ ID NO: 181879 - DNA, 2517 bp, synthetic construct
  misc_feature 1..2517: note = Description of Artificial Sequence: Synthetic coding sequence
  source 1..2517: mol_type = other DNA
atgcaggagcccggccagatcgtggagacctacaccgaggaggaccctgaaggggctatgtcagtcgtatcggtggaaacctcagatgacggaacgaccaggaggacggagacaaccgtgaagaaagtagtgaagactgtcaccacacgcactgtgcagccggtcgctatggggcctgatggcctcccagtggatgccagtagtgtatcaaacaactatattcagacgctgggccgggacttcaggaagaacggcaacggtggacctggaccctatgtgggtcaggctgggacagccacattacccagaaatttccattaccctccagacgggtacagccgacattatgaagacgggtacccaggtgggtccgacaattacggaagcctctcacgcgtcacccgcatagaggaacgctatagaccttctatggagggctatagagctccgtctcgtcaggatgtctatggtccacagccacaagtgagggtaggtgggtcatccgtcgatctacatagattccatcctgagccttacggattggaggacgaccagaggtctatgggctatgatgacctcgactacggtatgatgtccgactacggtaccgccaggagaaccgggacaccgtctgatccaagacggcgtctgaggtcttatgaggacatgatcggcgaggaggtgccatcagatcagtattattgggcacctctggcccagcacgaaaggggtagtttggcttccttggactcactgcgaaagggaggccccccccctcctaattggcgacaaccagagctgcctgaggtgatagcaatgctggggttcagattagacgctgttaagtccaatgccgcggcttacctgcagcatctgtgttatcgcaacgataaagtgaagaccgacgtccgcaagttgaaggggatccccgtgctggtgggtctcctcgatcaccctaaaaaggaagtgcacctgggggcttgtggcgcacttaaaaatatctcctttgggcgggaccaggacaataagatcgcaattaagaactgcgatggagttcccgctcttgtgcgcctcttacgaaaggctcgagacatggaccttactgaagtgatcaccggaactctctggaacctgtcttcccatgactccatcaagatggaaatagtcgaccacgccctccatgcacttacagacgaggtaattataccacatagcggttgggaacgcgaaccaaatgaagactgcaaacctaggcatattgaatgggaaagcgttcttactaatactgcaggttgtctgcgtaatgtttcaagcgagaggagtgaggcaaggcggaagctgagggagtgcgatggattggtcgacgcccttattttcatcgtacaggctgaaatcggccagaaggattcagactccaaactagtcgagaactgtgtgtgccttctcaggaacctcagttatcaggtccacagagagattccacaggcggagcggtatcaggaagctgcacccaatgtcgccaacaataccggtccgcatgccgcctcatgcttcggagccaagaagggcaaagacgaatggttctcccggggcaagaagccgatcgaagaccctgctaatgacactgttgactttcccaaaaggacttcccccgctcgaggatatgagctgctgttccagcccgaggttgtgcggatatacatcagtctgctgaaagaaagcaaaaccccagccattctggaggcctctgcaggcgccattcaaaacctctgcgcgggccgttggacctacggtcgctatattagaagcgccctgagacaggaaaaggccctgagcgctatcgccgatctgctcaccaacgagcacgagagggtcgttaaggcagcttctggtgcccttagaaacctggccgtggatgcccggaataaggaattgatagggaaacatgctatccctaatttggtgaagaatctgcctgggggccaacaaaatagcagctggaacttcagcgaagatactgtgatctcgattctcaatactattaacgaggtcattgctgaaaacctcgaggctgccaagaagctgcgggagacacaagggatagagaaacttgttctcatcaacaagagcggcaatcgtagtgagaaggaagttcgagccgccgctctggttctgcagacaatctggggttacaaagagctccggaaaccactcgagaaagagggttggaaaaaaagcgactttcaagttaacctcaacaacgctagccgctcgcaatcatctcacagttatgatgactcaactcttcccttgatcgatcgcaaccagaagtccgataaaaagcccgaccgcgaggaaatacagatgtcaaacatgggttctaacactaagtccttggacaacaactatagtacaccaaacgagcgcggtgatcataatcgcacactggatcggtctggcgacctgggcgatatggagccactgaaaggtactactcctcttatgcagaaaatctag

SEQ ID NO: 181880 - DNA, 2640 bp, synthetic construct
  misc_feature 1..2640: note = Description of Artificial Sequence: Synthetic coding sequence
  source 1..2640: mol_type = other DNA
atggccaacggcaccctgacccggcggcaccagaacggccggttcgtcggcgacgcggacctcgagcgccagaaatttagtgacctaaagttgaatggccctcaagaccatagtcatctgctttattcaacaattccaaggatgcaggagccaggccagattgtagagacatacactgaggaggacccagagggcgccatgtccgtcgtcagcgtggagacctcagatgatggcacaactcgccggaccgaaactacagttaagaaggtggtcaaaacagtgactacccgaaccgtccagcctgttgcaatgggacctgatgggctgcccgtggatgcttcgtccgtcagcaacaattacattcaaaccttggggcgcgactttagaaagaacggaaacgggggacccggtccctacgtgggtcaggcagggacagcaactcttccgcggaattttcattacccccccgacggttacagcagacactacgaggacggataccctggcggctccgataattacggctcattatccagggtgaccagaattgaggagcggtatcgccctagtatggagggataccgggccccatctcgtcaggacgtctacggcccccagccacaggttcgcgtcgggggctcctctgtcgatctccaccgcttccatcccgagccttatggactggaggatgaccagcggtcaatgggctacgacgacttggactacggcatgatgtccgattacggcacagctcggcgcaccggcacaccatcagaccctcggcggcggttacggtcttatgaagatatgataggtgaggaagtgccgagcgaccagtactattgggcacctcttgctcagcatgaacggggctctttggcaagtctggactcactgaggaagggaggccctccccctcccaattggcgccagcccgagcttcccgaagtgatagccatgttgggatttaggttggatgcagtgaagagtaatgctgccgcatatctccaacacctctgttataggaatgataaagttaaaactgacgtgagaaaattgaaagggattcctgtgttagtcggactgctggaccacccaaagaaagaggtccacttgggcgcctgtggcgcacttaagaatatctcttttgggagggatcaggacaacaagattgccatcaaaaactgtgatggcgtgcccgccttggtgcgcctgctccggaaggcgcgagacatggatctgacagaggtgattactgggacgctctggaacctaagctcgcatgatagcataaagatggagatagtggaccatgccctccacgccctaactgacgaggttatcattcctcatagcgggtgggaaagggaacccaacgaagactgtaagccaaggcatatcgagtgggaaagcgtgttgacaaatactgctggttgtttgcggaatgtgagctcagagcggtctgaggccaggcgcaaactgagagaatgtgacgggctcgtggacgcactcatatttatagtccaggccgagatcggtcagaaggactccgacagcaaattagtggagaattgcgtgtgtctactccgcaacttgtcttaccaggtgcatcgggagatccctcaagctgagaggtatcaggaggcagctcctaatgtggccaacaatactggcccacatgcagcctcatgctttggggcgaaaaaggggaagggcaaaaagccaattgaggatcctgccaatgacaccgtggactttccaaaacgcacctcccccgcacgaggatacgagctgctgtttcagccagaggttgtgcggatatatatcagtttgttaaaggaaagcaaaacaccagccatactggaggcgagcgcgggggcgatccaaaacctctgtgcaggtaggtggacctatggaagatatattaggagtgctctgaggcaagagaaggctttgagcgccatagctgacctgctcactaacgagcacgagagggtggtgaaggcagccagtggtgccctcaggaacctcgccgtggacgcacggaataaggaattaatcggcaaacatgctatccctaatttggtgaaaaaccttcctgggggtcaacagaacagttcctggaacttttccgaagacacggtgatttctattctcaataccattaatgaggtcatcgcagaaaacctggaggccgccaaaaagttaagggagacccagggtattgaaaagctggtactgatcaacaagtccgggaacagatctgagaaagaagtgcgcgccgcagctctcgtactgcaaaccatttgggggtataaagagctgcggaagcccctggagaaagagggctggaagaagtcagactttcaagtaaacctgaacaacgcaagccgatcacaaagttcccattcttacgacgatagcacgctgcctctgatagacaggaaccagaagtctgacaagaagcccgacagagaagaaatccagatgtcaaacatggggagcaatacgaagtcactcgacaataactactccaccccaaacgaacggggcgaccacaatcgcacacttgatagaagtggggacctaggtgacatggaacccctcaaaggaacgaccccccttatgcaaaagatatag

SEQ ID NO: 181881 - DNA, 2640 bp, synthetic construct
  misc_feature 1..2640: note = Description of Artificial Sequence: Synthetic coding sequence
  source 1..2640: mol_type = other DNA
atggccaacggcaccctgacccggcggcaccagaacggccggttcgtaggcgacgctgacctggagaggcagaaattttctgacctgaagctgaacggccctcaggaccattcccatttgctgtacagcactattccacgcatgcaagagcctggacagatcgtggagacatatacagaagaggatcccgagggagctatgagtgtagtctccgttgaaacttcagacgacggcacgactagaagaaccgagaccacggtcaagaaagtggtgaaaacggtgactacccgcaccgttcagcctgtggctatgggaccagacggcctgccagtggatgctagcagtgttagcaataattacatccagactctgggtcgggactttaggaaaaacggaaacgggggacccggcccttacgtcggccaagccgggacagccactctgcctaggaatttccactacccccctgatggctatagccggcattacgaggacggctaccccggggggagcgacaattatgggtccctgtcccgggtaaccaggatcgaggagagatacagaccctccatggaagggtatagggccccttcccggcaggacgtgtacgggcctcagccacaagtgagggtgggagggagctcggtggatctgcatcgttttcacccggagccctacgggttggaagatgaccagcgctcaatgggatatgatgacttggactatggtatgatgagcgactacgggaccgctcggcggactgggaccccatcggacccccgacgcagacttcgtagctacgaggatatgatcggcgaggaggttcctagcgatcagtattattgggccccacttgcacagcacgagcgcggtagcctggcatccctggactccttacgcaagggcggaccgcctccccctaactggcggcagcccgagttgccagaagtcatcgctatgctggggttccgccttgatgccgtgaagtcaaatgctgctgcctatctgcagcacctatgttatcggaatgataaggttaagacagacgtcaggaaactaaagggcattcccgtcttagtaggactccttgatcatcctaagaaggaggtccatcttggcgcatgcggggctttaaagaatatttccttcggccgggatcaggataataagattgccatcaagaattgcgacggcgtgcccgccctcgttcgcctgctgaggaaggcccgcgacatggatctgaccgaagtgattaccggcacgctgtggaatttgtcgtcgcatgattctatcaaaatggaaattgtcgaccacgctctgcatgcactgaccgacgaggtgataatcccacatagcgggtgggagcgggagcccaatgaggactgtaagccccggcatatcgaatgggagtccgtgttgacaaacaccgccgggtgtttgaggaatgtgtcgagtgaaaggtccgaggcaaggcggaaattaagagaatgcgacggactagttgacgctctgatatttatcgtgcaagcggaaattggacagaaagactcagacagcaagttggtggaaaactgcgtttgtcttctgagaaatctcagctaccaggttcaccgagagattcctcaagctgaacggtatcaggaggctgcgccaaatgtggccaataacaccgggccgcatgcagccagctgcttcggagccaaaaaaggaaaaggcaagaagcccatcgaagatcccgctaatgataccgtagattttccgaaaagaacctcaccagctagaggctacgaactgcttttccagcctgaagtcgtgaggatttatataagtcttctgaaagaatctaaaacccctgcgattttagaggcgtccgccggcgccattcaaaatctgtgcgccggaaggtggacatacggccggtacataagaagcgcccttaggcaggaaaaagcattaagcgccatcgctgacctgttgactaatgagcatgaacgtgtcgttaaagcagcttctggggcactgcggaatctggctgtcgacgcacgaaacaaggaattgatcggcaagcatgctattccaaacctggtgaagaatttgccaggcggccaacaaaattcatcttggaacttttccgaggacaccgtcatttcaatactcaacaccattaacgaggtaattgcagagaacctggaagcagctaagaaattacgagaaactcaggggattgagaaactggtcctcattaataaatcgggtaaccggtccgagaaggaagttcgagcagcggcactcgttctgcagaccatttgggggtacaaggagctgagaaaaccccttgaaaaggaagggtggaaaaaaagcgactttcaagtcaatctgaacaatgcaagccgctcacagagctcgcattcctatgacgatagtactttgcctctgatcgatagaaatcagaaatccgataagaaacccgaccgggaggagattcaaatgtctaatatgggcagcaacactaaaagcctggataataactacagtacccctaacgagcggggtgaccataaccgaacattggataggagcggcgacttgggagacatggaacctctgaaaggcaccacacccttgatgcagaaaatctag

SEQ ID NO: 181882 - DNA, 2499 bp, synthetic construct
  misc_feature 1..2499: note = Description of Artificial Sequence: Synthetic coding sequence
  source 1..2499: mol_type = other DNA
atgcaggagcccggccagatcgtggagacctacaccgaggaggaccctgaaggcgcaatgtcagtggtctctgtggaaacaagtgacgatggtacaactagaaggacagagacaactgtcaaaaaagtagtaaaaaccgtgactacccggaccgtgcagcccgtcgccatgggacctgatgggctacccgtcgatgcatccagcgtatccaacaattatattcagacgctgggacgggattttagaaaaaatggtaacggcggtccaggaccctatgtagggcaggcgggtaccgccacccttccgaggaattttcactaccccccggacgggtatagccgtcattacgaggacggataccccggcggcagcgataattacggttcactgtcccgcgtgacccggattgaggaaaggtaccgccctagcatggagggctaccgtgcaccttcgcgtcaagatgtctatggcccccaaccccaggtccgcgtcggaggttcatctgtggacctgcatagattccaccccgaaccgtacggacttgaagatgatcagcgctccatgggctacgacgacctggactatgggatgatgtctgactacggtactgcccgacgcacaggcaccccatcagacccaaggcggcgtctgaggtcatacgaggacatgattggggaggaggtcccatctgaccagtattactgggcacctctggcccagcacgaacgtggctctctcgcgtccctggactcgctgcggaagggcgggccacccccgcccaactggaggcagccagaactccccgaagtgattgccatgctggggttccgactggacgccgtgaagtctaatgccgccgcatatttgcaacacctctgctaccgcaatgacaaggtgaagaccgacgtccgtaaattaaagggaataccggttctggtcggcttactcgatcacccgaaaaaggaggtgcatttaggggcatgtggagctctcaagaacatcagcttcggacgtgaccaagataacaagatcgccatcaaaaattgtgacggtgtgccagccttagtcagacttctcaggaaggcaagggacatggacttaaccgaggtcatcaccggcactctttggaacctatcttctcacgatagcattaaaatggagatcgttgatcatgctctgcacgccctgaccgacgaagtcattattccccatagcggctgggagcgggaacccaatgaagactgcaagccccgccacatcgaatgggagtccgtgctgacaaatacggccggatgtctgagaaacgtttcttccgaacgaagtgaggcccgacggaagctcagagagtgtgatgggctcgtggacgcattaattttcatagtgcaggccgaaatcggccagaaggacagcgattctaaacttgtggaaaattgcgtgtgcctgctgagaaatcttagctaccaggtgcatcgggagattccgcaggccgagagatatcaggaagcagcccctaacgtcgccaataataccggcccccacgccgcaagttgtttcggagctaagaagggaaagggtaagaaacccatcgaagacccggctaatgatacagtggacttccctaagcgcacttccccagcgcgtggctatgaactactattccagcccgaagtggtaagaatctatatctccctgttaaaggagtcaaagactccagcaattctggaagcttccgccggagccatacaaaatctgtgtgcagggcggtggacctacggccgatacattcggagcgccctcaggcaggaaaaggcacttagcgcaatcgccgaccttctgacaaatgagcacgagagagtcgtaaaggcggcatccggcgctctcaggaaccttgccgtggacgcgaggaataaggagctaattggcaaacatgccattcccaaccttgtgaaaaatttgccaggcggtcagcagaattcctcctggaatttctccgaagataccgtgatttctattctcaatacgattaacgaggtgatcgctgaaaatctggaggctgctaaaaagctgcgagaaactcagggtattgagaaacttgtactgataaacaagtctggcaaccggagtgaaaaagaggttagggccgccgccctggtgctgcaaactatttggggatataaggagctgaggaagcccctggagaaggaaggctggaaaaaatccgacttccaggtgaaccttaacaatgcctctcggagtcagagctcacattcttacgacgacagtacactgccccttatcgaccgaaaccagaagtctgataaaaagccagatcgtgaagaaatccagatgtctaacatgggctcaaataccaagagtcttgacaataattacagcactccgaacgagcgcggtgaccacaacagaaccctcgaccgatcaggagatcttggggatatggaacccctgaaggggacaaccccccttatgcagaagatttag

SEQ ID NO: 181883 - DNA, 390 bp, synthetic construct
  misc_feature 1..390: note = Description of Artificial Sequence: Synthetic coding sequence
  source 1..390: mol_type = other DNA
atggccaacggcaccctgacccggcggcaccagaacggccggttcgtgggtgacgctgatctggagcggcagaagttttccgacctgaagctgaacggcccacaggaccactcccacttgctatatagtacaattccgagaatgcaggaacccggacagatcgtggaaacgtataccgaggaggaccccgagggcgccatgagcgtggtctctgttgagacaagtgatgatggcaccacgaggagaaccgaaacgacagtaaagaaagtagttaagacagtcaccactcgcaccgtgcagcccgtggcaatggggccggacggtctgcccgtagacgccagctctgttagtaacaattacatccaaactctggggagggatttccgatag

SEQ ID NO: 181884 - DNA, 2586 bp, synthetic construct
  misc_feature 1..2586: note = Description of Artificial Sequence: Synthetic coding sequence
  source 1..2586: mol_type = other DNA
atgcaggagcccggccagatcgtggagacctacaccgaggaggaccctgaaggtgccatgagcgtagtatcagtggagacgagcgacgacggcacaacacggaggacggagacaaccgtgaaaaaggtggtgaagacggtgacaacaaggacggtgcaaccagtagcaatgggaccagacggacttcccgtggacgcttccagcgtatctaataactacatacaaaccctcggaagggattttagaaaaaacggaaacggaggtcctggaccgtatgtcggacaagccgggaccgccacactccccagaaatttccactacccacccgacggctactcacggcactacgaggatggctacccaggcgggtccgataattatgggtcactcagcagggtgactcggatcgaagagcggtatagacccagtatggaaggctaccgcgccccctcgcgccaggacgtttacggaccccagcctcaagtccgagtcggagggagctccgtagacttacatcgcttccaccccgagccttatggtctggaggacgaccagcggagcatggggtatgacgacctggattacgggatgatgagcgactacggcacagccaggagaacagggaccccaagcgaccctaggagaagactgcgttcttatgaggatatgatcggggaagaagtcccctcggatcagtactattgggctcccttagcgcagcacgagcgcgggtccctcgcctcactcgactccctgcgaaagggggggcctccccctcctaactggcgccaacccgagctaccagaagtgatcgccatgttaggattccggctcgacgccgtcaagtccaatgcggcagcctacctgcagcacctgtgttatcgtaatgacaaagttaagaccgacgttcggaaactgaagggcataccggttttagtaggactgttggaccacccaaaaaaagaggtccacctgggagcctgcggagcccttaagaatatctcatttggcagggaccaggacaacaaaatcgcaataaaaaattgtgatggtgtgccagcacttgtcagactgctgaggaaggcgcgagatatggacctcaccgaggtgatcactggtacactgtggaacctgagttcccacgactccattaagatggaaatagtagatcatgctctccacgcactgactgatgaagtcatcattccacattcaggatgggagagagagcctaacgaggattgcaagcctcgtcacatagagtgggaaagcgtactgacaaataccgctgggtgtctcagaaacgtctctagcgaaagatccgaagcccggaggaagctgcgcgaatgtgacggactggttgacgcactaatctttatagttcaggccgagattgggcagaaggacagcgacagtaaactggttgagaactgcgtgtgtctgctgcgcaaccttagctatcaggtgcaccgggaaatcccccaggccgaacggtatcaggaagccgctccgaacgttgccaacaatactggcccgcacgctgcatcctgctttggggcgaaaaagggtaagggtaaaaagccgatcgaggacccggccaacgacactgtggattttcctaaacggacctctccagctcgtgggtacgaacttttgtttcagcccgaggtggttcgaatttacatatcattactcaaggagtctaagacgcctgcaatcctcgaggcctccgcaggcgccatccaaaacctgtgtgctggcaggtggacctatggcaggtatattagaagcgcgctgcgtcaggagaaagctttgagcgctatcgctgaccttcttaccaacgaacacgaacgcgtggtaaaggcagccagcggtgctcttcggaacctggctgttgacgcccgaaataaggaactcattggcaagcacgctattcctaacctagtgaagaacctgcctggtgggcagcagaactcatcatggaacttttcggaggacacggtgatatctattttgaacacaattaacgaggtgattgccgagaacctggaagcagcaaagaaacttagggagacacagggcattgagaaactcgtcctgataaacaagagcgggaaccggtctgaaaaggaggtccgggccgccgctttggtattgcaaactatatggggctataaggagctgcggaagcccctcgaaaaagaaggttggaagaaaagcgattttcaagtgaacctgaacaatgcttctagatcccagtcttctcattcttatgatgattcaaccctccccctgattgaccgaaaccaaaaaagcgacaaaaaacccgatcgtgaagaaattcagatgagtaacatggggtccaatacaaagtctctggataataattattcaactcctaacgagagaggtgatcataacaggaccctggatcgctcaggagacctgggagatatggaaccacttaaaggcacaactccactcatgcaggacgaaggccaggaatcactggaggaagagctcgacgtgctggttctggacgatgaaggaggccaggtgtcttacccttcgatgcagaagatatag

SEQ ID NO: 181885 - DNA, 2658 bp, synthetic construct
  misc_feature 1..2658: note = Description of Artificial Sequence: Synthetic coding sequence
  source 1..2658: mol_type = other DNA
atggccaacggcaccctgacccggcggcaccagaacggccggttcgtaggggatgccgatttggagagacagaaattcagcgacttgaaactgaatggacctcaagaccactcacaccttctgtattcaactatacccaggatgcaagagccaggccagatcgtggaaacatacacagaggaggatccagaaggggctatgagcgtagtcagtgtggagacttctgacgatggcactacccgacgcacggagacaaccgtcaaaaaggttgtgaaaaccgtcacgacacgaactgtgcaaccagttgccatgggaccagatgggttaccagtggacgcctctagcgttagtaacaattatatacagactcttggacgtgacttccggaagaacgggaacggtggacctgggccgtacgtaggccaagccggaaccgcaactttgccaaggaacttccattatccaccagacggatactctcgccactacgaggacggctacccaggaggctccgacaactatggtagcttgagccgagtaacccggatcgaggagcgataccggccttccatggagggctatagagccccatccagacaggatgtgtacggtcctcagccccaggtgagagtcggcggaagctctgtcgacctgcacagattccatccagaaccatatggcctcgaggatgatcaacgcagtatggggtacgatgaccttgactacggtatgatgagtgactacgggaccgcaaggaggactgggactccgtctgaccctaggcgccgcctccggtcatacgaagatatgattggagaggaagttccttcagatcagtattattgggctccactggctcaacatgagcgcgggagcctagcatcactagacagtctacgcaaagggggtcctccccctcctaactggcggcagcccgagttgcccgaagttatagcgatgctggggttcaggctggacgcagtaaagtcaaacgctgctgcgtacctgcagcacctgtgttaccgcaacgacaaggtgaagaccgacgtgcggaaactgaaaggcatcccagttctggtggggctgttggatcatcccaaaaaggaagtccatttgggggcctgcggagctctgaagaatatttcatttggtcgcgaccaggacaacaaaatagccatcaagaattgtgacggagtacccgctctggtgcgacttctgcggaaagccagagacatggatctgactgaggtaattacaggtacgctgtggaatttgtcttctcacgacagcataaagatggaaattgtggaccatgcgctccatgccctgacagatgaggtgataattccacacagcgggtgggaacgcgagcccaatgaagactgtaagcctagacacatagagtgggagagcgttttgacaaacacagctggctgcctgagaaatgtgtcctccgagagatctgaggctcggagaaagctgagggaatgcgatgggttggtcgacgccttgattttcatcgtacaggccgagataggccagaaggattccgattctaaactcgtggagaactgcgtgtgcctcctaaggaatctgtcttaccaagtccacagggaaatccctcaggcagaacgatatcaggaagcggctccaaacgtggccaataataccggtcctcacgcagcaagctgttttggagccaaaaagggaaaggacgagtggttctcacgtgggaagaagccaattgaggaccccgcaaacgatacagtcgactttcctaaacggacgtccccggcccgcggttatgaactgctatttcagcctgaggtggtcagaatttatatctccctgttaaaggagtcaaaaaccccagcaatactggaagccagcgcgggcgcaattcaaaatctctgtgccggccggtggacttatggccgatatatccggtctgcactgaggcaggagaaagctctctctgcaatcgcagatctcctaacaaacgagcacgagcgggttgtcaaggccgcatcaggggccttgcggaacctcgccgtggacgctagaaataaggagctgatcggtaagcatgccatccctaacctggtcaaaaacctccccggaggccaacagaacagttcttggaatttctccgaggacaccgttatctctatcctgaacaccataaacgaggtgattgcagagaacctcgaagcagcaaagaaactgagggagacccaagggatcgagaagctagtactgatcaacaagagtggcaaccggtccgagaaggaggtcagggcagcagcccttgttctgcaaaccatttggggatataaagagctgaggaagcccctagaaaaggaaggctggaagaagagcgatttccaggtgaatctgaataatgctagccggagtcagtcctcccactcctatgatgactccactctgcctcttatcgacaggaatcagaagtcagataagaaaccagatagggaggaaatccagatgtctaatatggggtccaacacaaaatccctggacaataactatagcacccctaacgagcgaggggaccataacagaactttggaccggtctggtgatctgggcgacatggagcccctcaaaggcaccactcccttgatgcaaaagatctag

SEQ ID NO: 181886 - DNA, 1920 bp, synthetic construct
  misc_feature 1..1920: note = Description of Artificial Sequence: Synthetic coding sequence
  source 1..1920: mol_type = other DNA
atgatcggcgaggaggtgcccagcgaccagtactactgggcccccttagctcagcacgagcggggatctctggcctctctcgactccctgcgaaaaggcgggccaccacctcccaattggcgacaacccgagctgccggaggtgatcgccatgcttggcttcaggctggatgccgtcaagtccaatgccgcggcatatctgcagcatctttgctataggaatgataaggtcaaaacggatgtgcgcaaactcaaagggatcccggtgctggtcggacttttggatcatccgaagaaggaggtccacctcggcgcttgcggcgccctgaaaaacatctcatttggtagagaccaggataacaaaattgcaatcaagaactgtgatggcgtgcccgcactcgtcaggctgctcagaaaggcccgagacatggaccttacggaggtcattaccggtaccctgtggaacctcagctcacacgattccataaaaatggaaattgtcgaccacgccctgcacgctttgacagacgaagtcatcatccctcacagcggctgggagcgagaacccaatgaagattgcaagccaaggcacatcgaatgggagtccgtgctcaccaacacagccggttgtctgcggaacgtaagttccgagaggagcgaagccaggcgaaagcttcgtgaatgtgatggccttgttgatgccctcatattcatagtacaggccgagatcggtcaaaaggacagcgactctaaactggtcgagaactgcgtctgtctgctccggaacctgagctatcaggtgcatcgggaaatcccacaggcagaaaggtaccaagaagccgcacctaatgtggcaaataataccggtccacacgccgctagttgttttggggctaagaagggcaaagggaagaaaccaatcgaagaccctgcgaacgatactgtcgatttccccaaacgaacgagtcccgctagaggatatgagctgctgttccagcctgaggtagttcggatttatatctcactactgaaggagtctaaaacccccgccatcttggaggctagcgctggcgccatccagaacctgtgtgctggacgctggacatacggccggtatatccgcagcgctcttagacaagagaaggctttgtccgccatcgccgaccttctcactaatgagcatgaaagagtggtcaaggcagcctccggcgcactgaggaacctggctgtggatgccagaaataaggagcttatcggcaaacacgccattccgaacctggtgaagaacctgcccggcggccagcagaactctagctggaacttcagcgaagacaccgttatttctatccttaacacaattaacgaggtaatagccgagaaccttgaagcagccaagaagctgcgtgaaacccagggaatcgagaaactagtgttgatcaacaaatctggaaatagatctgagaaagaagtccgcgccgctgccctggtgcttcagaccatctggggctataaggagcttaggaagccactggagaaggaagggtggaaaaagtccgactttcaggttaatcttaataacgcttctcgctcccagagctcacatagctacgatgactctaccttacctttgattgatcggaatcagaagagtgataaaaaacccgatcgcgaagagatccagatgtccaatatgggaagcaataccaagtctttggataacaactactccacccctaacgaacggggcgaccacaataggactttggaccgcagtggcgacctcggagatatggaacccctcaaagggacaacacccctcatgcaagatgagggacaagaaagcctggaagaagaactcgacgtcctggtgctggatgacgaaggcgggcaggtttcctatccctcaatgcagaaaatatag

SEQ ID NO: 181887 - DNA, 2499 bp, synthetic construct
  misc_feature 1..2499: note = Description of Artificial Sequence: Synthetic coding sequence
  source 1..2499: mol_type = other DNA
atgcaggagcccggccagatcgtggagacctacaccgaggaggacccggaaggtgccatgtccgtggtgtctgtggagaccagcgatgacggtacaacccgaaggactgaaaccacagtcaagaaagtggttaaaacagttacgaccaggacggtgcagcctgttgccatgggccctgatgggctgcctgtggacgcttccagcgtgagcaacaattacattcagaccctaggcagagattttcgcaagaacggaaacggtggcccaggcccctatgtcggccaggctgggacggcaacgttgccgaggaatttccactatcctccagacgggtacagcagacattatgaggacgggtatcctggagggtccgataactacggaagcttgagccgcgtgactcgcatcgaagagcggtaccggccttccatggaaggataccgcgctccatcaagacaggatgtgtatggaccacagcctcaggtgcgcgtgggcggaagttccgttgaccttcatagatttcacccagagccttatggcctggaggacgatcagcggtccatggggtatgatgacctggattacggcatgatgagcgattatggtaccgccagacggacgggaacaccatcggacccaaggaggcggctgagaagttacgaggatatgatcggtgaggaagttccaagtgaccagtattattgggcacctctcgcgcagcatgaacgaggatccctagcaagcctcgatagtctgaggaagggcggtccccctccccctaattggagacaaccggaacttcctgaagtgattgcgatgttgggatttcgactcgacgccgtcaagtctaacgcagcagcctatctgcagcatctttgttataggaacgataaggttaaaaccgacgttcgcaagcttaaaggcatccccgtgctggtggggctgctggatcatccaaagaaggaagttcatctgggggcttgtggtgcccttaaaaatataagcttcggacgcgatcaagacaacaaaatagctataaagaattgcgacggagtgcccgctctagtgcggctgctgcggaaggcccgggatatggacctgacagaagtgattacgggcactctgtggaacctcagctcccatgattccataaagatggagatcgtagaccacgctttgcacgcccttactgatgaagtgatcatccctcattcaggatgggagcgcgaacccaacgaagattgtaagccaaggcacatagaatgggaatctgtgctgacaaataccgcagggtgtctccggaatgtatcctccgaacgcagtgaagcgcgccgcaaactccgcgagtgtgatgggctggtggatgcgcttatctttatcgttcaggccgagatcgggcaaaaagactcggactcgaaattagtggaaaattgcgtctgcctcctgcgtaacctatcataccaggtgcaccgcgagattccacaggccgagcgatatcaggaagcagcgccaaacgtagcaaataataccggtccacatgccgccagctgcttcggggcaaaaaaggggaaaggtaagaaacccattgaggacccagctaatgacaccgtggatttccccaagcggacttctcccgcacgtggatacgaactactcttccagcctgaagtggtgcgaatctatattagtctcttgaaagagagtaaaacgcccgctattttggaggcatcggccggcgccatacaaaatctgtgcgcaggaagatggacttacggccgctacattaggtccgctttgcgacaagaaaaagcactttccgcaattgcagatcttctcaccaacgagcacgagcgtgtcgttaaagctgcctccggagccctccggaacctggcagtggatgcgcgtaacaaggagttaatcggcaaacacgcaatccctaatctcgtgaagaatctgccagggggccagcagaacagttcctggaacttctctgaggacaccgtgatctctatcctcaatactatcaacgaggtaattgccgaaaacctggaagccgcaaagaagctgagggagacgcagggcatcgaaaagctggtattaataaataaatccggtaaccggtccgagaaggaagtgcgcgccgccgccctcgtgcttcagactatttggggatacaaggaactgcgaaagccgcttgaaaaagaaggctggaagaaatccgacttccaggtgaacctcaacaatgccagtagaagtcagtcatctcatagctatgatgactccactctgcctctcattgataggaatcagaaaagtgataagaagccagatagggaagaaattcagatgtccaatatgggttccaacaccaagtccctcgacaataattactccactcctaacgagcgcggtgaccataacaggacactggacagatcaggtgacttgggcgacatggagcccctcaaaggaaccacccctcttatgcagaagatctag

SEQ ID NO: 181888 - DNA, 2499 bp, synthetic construct
  misc_feature 1..2499: note = Description of Artificial Sequence: Synthetic coding sequence
  source 1..2499: mol_type = other DNA
atgcaggagcccggccagatcgtggagacctacaccgaggaggacccagagggcgccatgtctgtagtgtctgttgagacctctgacgatgggaccactcgaaggaccgaaacaaccgtgaaaaaagtcgtaaagacagtgaccacgaggacagtgcagcctgtagccatggggccggatgggctgcctgttgatgctagctctgttagcaataactacatccagacgctgggtcgagactttaggaaaaatggtaatggggggcccggcccttatgtcggccaagcgggtaccgctacccttccgcgcaatttccactatccacctgacgggtacagcaggcattatgaagatgggtatcctggaggaagtgacaattatggttcgctgagtagagtgacaaggatagaggagcgctacagaccttccatggagggctatcgggcgccgagtcgccaagatgtttacggaccccagccccaggtacgtgtgggcggctcctcagtggacctgcacagattccaccccgaaccctacggcctggaggacgatcaacggtctatgggatatgatgacttggattatggcatgatgagtgactatggtaccgctcgacgcactggaaccccctccgatccacgccgcagactacgaagttatgaagatatgattggggaggaagtaccttctgaccaatactattgggcccccctggctcagcatgagagaggcagtcttgcatccctcgatagtcttagaaagggaggacccccacctcccaattggcgtcaaccggaattaccagaggtcatcgcaatgttggggtttaggttagatgcagtcaaatcaaacgccgccgcctatcttcagcacctgtgctatcggaacgacaaagtgaaaaccgatgtcagaaaactcaaaggcatacctgttctggtgggcctgttagaccacccaaagaaggaagttcatctaggcgcctgtggagccctgaagaatatcagcttcggcagggaccaagacaataaaatagccatcaaaaactgcgatggcgtgcctgctctggtgcggttgttgcgcaaagcaagagatatggacctgaccgaggtaatcactgggacattgtggaatttgagcagtcatgactctatcaaaatggagatagtggaccacgcactgcacgctcttactgacgaagttatcatccctcattcgggttgggaacgggaacctaatgaggattgtaaaccacgacacattgagtgggaatcagtcctgactaataccgcagggtgtctgcgcaacgtgtcttcagaacggagcgaagccaggaggaagctgcgggagtgtgacgggttagtggacgcattaatcttcatcgtccaagccgagatcggccagaaagattccgacagtaaactggtcgagaactgtgtttgtcttctcagaaacctcagctatcaggtccatagggagatccctcaagccgagagataccaggaagccgcccctaacgtcgcaaataacactggaccgcacgctgccagctgcttcggagccaaaaagggcaagggcaagaagcctatagaagaccccgccaatgacacagttgatttccctaagcgcacaagtcccgcccggggctacgagctcctgtttcagcccgaggttgtccggatatacatatcattattgaaggagagcaagacacctgctatcctcgaagccagcgctggagctatccagaacctctgtgcaggaagatggacctacggccgttacatcagatctgcgcttaggcaggagaaagccctatctgcgattgccgacttgttaaccaacgaacatgagagagtggttaaggccgcctctggagcactgcgcaacctggccgtcgacgcgcgaaataaggagcttataggcaaacacgctattcctaatctggtgaaaaacctgcctggcggacagcagaacagcagttggaacttttccgaggacacggttatcagcatactgaatacaatcaacgaggtaatcgcagagaacctggaagcggccaaaaagctgcgtgaaacccaagggatagaaaagctggtactgattaataagtcagggaatcgatcggaaaaggaagtgagggcggccgccctggtgctgcaaactatctggggatacaaagagctgcgaaaacctctcgagaaagagggatggaagaagtctgactttcaggtcaatcttaacaatgcaagccgtagccagagcagccactcttacgacgatagcacactgcctctgatagacagaaaccagaaatccgataaaaaacccgaccgtgaagaaatccaaatgtccaatatgggcagtaacaccaaatccctggacaataactacagcacaccaaacgaacggggcgaccacaacaggacacttgaccgaagcggcgatctgggggacatggagcctctcaaagggactactcccttaatgcagaagatttag

SEQ ID NO: 181889 - DNA, 2640 bp, synthetic construct
  misc_feature 1..2640: note = Description of Artificial Sequence: Synthetic coding sequence
  source 1..2640: mol_type = other DNA
atggccaacggcaccctgacccggcggcaccagaacggccggttcgtcggggacgcggatctggaacgacagaagttctccgacctcaaactgaacggcccccaggaccactcccacctcctgtattctactattccccgcatgcaggaaccggggcagattgtggagacttatactgaagaggatccggaaggggctatgagcgtggtctccgttgagacttctgacgacggcacaactcgaaggaccgagacgacagtaaaaaaggtggtgaaaacagtgacaacgcgcacggtgcaaccagtggccatgggtcctgacgggctgcctgtggacgcaagcagtgtgagtaataactacatccagaccctggggcgggatttcaggaaaaatggaaacggcggacctgggccatatgtgggccaggctgggaccgcaacacttccaagaaacttccactacccacctgatggttactctaggcattatgaggatggataccctgggggttcggacaactatggaagtctgtcgcgagtgactcgaatagaagagcggtacaggccgtctatggaggggtacagggctccatctcgccaggatgtttatggccctcagccccaggtacgtgtcggcggttcctccgtcgacctgcatagatttcatccagaaccttacgggctggaagatgaccagaggtccatggggtacgacgatctggactacggaatgatgtcagactacggaacagctcgaagaactggcacaccttccgatccacggagaagactaaggtcatacgaagatatgattggggaggaggtaccgtctgatcaatattattgggcaccgctggctcaacacgagcggggatccctggcctccctggacagccttcggaaggggggcccgcccccaccaaactggcgccaacccgagttgccagaggttatcgcaatgctgggattccgcttggacgctgtcaagtccaacgccgccgcttacttacaacatctgtgttatcgcaatgataaggtgaaaaccgatgtcagaaagctgaagggtatacctgtgctggtggggcttttggatcaccctaaaaaagaagtgcaccttggcgcgtgtggcgctctgaaaaatatcagcttcggcagggatcaggataataaaatcgcgattaagaattgcgatggtgtgccagctctcgtgcgcctgctcagaaaggctagggacatggatcttaccgaggtcataacgggaactttatggaacctctcctcccacgatagtatcaagatggagatcgtcgatcacgccttgcatgctctaaccgacgaagtgatcattccccactctgggtgggaacgggagccaaacgaggattgcaagccaagacacattgaatgggagtccgtacttaccaacaccgccggctgtcttcggaatgtgtcgtcagagcggagtgaggccaggcgaaaacttcgcgagtgtgacgggttggttgacgcgctgattttcatcgtgcaagcggagatcgggcagaaggactctgactctaaattagtcgaaaattgtgtgtgtctcctccgcaaccttagctaccaagtacaccgtgagatacctcaggccgaaaggtatcaggaggcggcccccaatgtcgctaacaataccggcccccatgcagcgtcatgctttggagcaaaaaagggaaaaggcaagaagcctattgaggatccagccaatgacaccgttgatttcccaaaacgcacgagtccagcccgaggctacgagctcctgttccagccagaggttgtcaggatttatatcagcttgctcaaagaaagtaaaacaccggctatcttagaagcgtccgctggcgccatccagaacctctgtgcaggcaggtggacttacggccggtacatcaggagtgccttacggcaggagaaggccctaagtgcgattgcggacctgctcaccaatgagcacgagcgtgtcgtgaaagccgcctccggcgccttgagaaatctggctgtggacgcgcgaaacaaggaactgattgggaagcacgcgatacccaatctcgtgaagaacttacctgggggccaacagaactcatcctggaacttcagtgaagataccgtaatcagcatcctgaacacaatcaatgaggtgatcgctgagaacttggaggcggcaaaaaagttgagagagacccagggcattgagaagctggtcctaatcaataaatctggtaataggagcgagaaggaggtccgcgccgcagccctcgtgttacagacaatctggggctataaagagctgcgaaagccactggagaaagaggggtggaagaagagcgacttccaggtgaacctgaacaatgctagcaggtcacagagcagccactcgtatgatgattctaccctgcctttgattgaccgcaaccaaaagtccgataagaaacccgatagggaagaaatccagatgagcaacatggggagtaacacaaagtctctcgataataattactctacgcctaacgagaggggcgaccacaaccggacacttgatcggagtggcgatctgggcgatatggagcccctgaaaggcacaactcccctgatgcaaaagatctag

SEQ ID NO: 181890 - DNA, 2523 bp, synthetic construct
  misc_feature 1..2523: note = Description of Artificial Sequence: Synthetic coding sequence
  source 1..2523: mol_type = other DNA
atgcaggagcccggccagatcgtggagacctacaccgaggaggacccagagggtgccatgagtgtggtgtcagtagagacctctgacgatggtaccaccagaaggaccgagaccacagttaagaaggtggtgaagacagtcacaacaagaaccgttcagcctgtcgcaatgggtccagacggacttccagtggacgcatcaagtgtgtcaaataattacattcagacattaggcagagattttcgaaagaacggcaatggcggacccggcccctacgtgggccaggctggaactgccaccttgcctaggaattttcactacccccctgacgggtacagtcggcactatgaggatggttatcccgggggttcagataattacggatctctcagtagagtgactagaatcgaggagcgctaccgtccttctatggaaggataccgggccccttcgcgtcaagacgtttatggaccacagccgcaggtacgggtgggggggagttcagttgatctgcaccgttttcatcctgagccgtacgggctcgaggacgaccagaggtccatgggatacgacgatctggactatggtatgatgtccgactacggcacagcccgcaggaccggcacacccagtgatccacgacggcgcctgaggtcctacgaagatatgataggtgaggaggtgccttctgaccagtattactgggcacctctggctcaacacgagagggggtccctagctagtttggactcgttgaggaaagggggtcctcccccaccaaactggagacagcccgaactgcctgaggtcatcgcgatgcttggctttcgattggacgccgttaaatctaatgcagcagcctatctgcagcacctgtgctaccggaatgataaggtcaagacagacgttcggaagctgaagggaatcccagtattggtcggtctcctcgatcaccctaagaaggaggtgcacctgggtgcatgcggcgccctgaagaacatctccttcggcagggatcaagataataagatcgccatcaagaattgtgacggggtccccgccctcgtgcgcctgctgaggaaagcccgtgatatggacctcacagaggtcattacaggcacactgtggaatctgagttcccacgacagcatcaagatggagatcgtggatcatgctctgcacgccttgaccgacgaagtgataattccacattccggctgggaacgagagccgaacgaggactgcaagcccaggcatatagaatgggaatccgttctgacgaatacagcgggatgtctgcggaatgtcagcagtgagagaagcgaagccaggaggaagcttcgtgagtgcgacggcttagtcgatgcactgatatttattgttcaagctgagataggccagaaggatagtgattccaaactcgtggagaattgtgtttgtctgctgcgtaacctgtcatatcaggtgcacagagaaatccctcaagccgaacggtaccaggaagctgctccgaatgtggcaaacaacacaggtccacacgccgcctcttgcttcggcgccaagaaaggtaagggcaagaagcctatcgaggatcctgctaacgacacagtcgacttccccaagaggactagtccagctagagggtatgaactgctgtttcagccagaagtggtgcggatttatatttccctcctgaaagagtccaagacgccggctatcctggaggcctctgccggagccatacagaatttgtgtgccggacggtggacctatggtcgctacatccggagcgcacttagacaggagaaggctctgtccgctatcgcagacttgctgactaatgaacacgagagagtcgtcaaggccgcatcgggggcccttagaaacctggccgtggacgctaggaataaagagctcatcggcaagcacgctattccaaatctagtgaaaaatctccccggcggacagcagaacagctcttggaatttcagtgaagacacagtcatatcgattttaaacaccattaatgaggtcattgccgaaaacctggaagccgccaagaagctgcgggagacgcagggcattgaaaaattggttctcattaataaatccggcaacagaagtgaaaaagaggtgagggccgctgctctagtgctgcaaaccatatgggggtacaaagaactgcgtaagccgttagagaaagaaggatggaaaaagtcggatttccaggtcaacctaaacaacgcatcgcgctctcagtcaagccacagctatgacgatagcacgctcccattgattgatcggaatcagaaaagcgataataactactctaccccaaatgagagaggagaccataacaggacactggatagaagcggcgacctaggcgatatggaacctttaaaaggcacaacacccctgatgcaggatgaagggcaggagtccctggaagaagagctagatgtcttagtactggatgatgaggggggtcaggtgtcataccccagcatgcagaaaatctag

SEQ ID NO: 181891 - DNA, 2745 bp, synthetic construct
  misc_feature 1..2745: note = Description of Artificial Sequence: Synthetic coding sequence
  source 1..2745: mol_type = other DNA
atggccaacggcaccctgacccggcggcaccagaacggccggttcgtcggggatgcggacctggaacgccagaagttttcagaccttaagctgaatgggcctcaggaccattcccatttactgtactcaacgatccctagaatgcaggagcccggacaaatcgtcgaaacctataccgaggaggatcccgagggagctatgagcgtcgtcagcgtggaaacctccgatgacggaacaactaggcgcacggagaccacagtgaagaaagtggtgaagaccgtgacgactcgcacagtccagccagtcgctatgggacctgacggcttacccgttgatgcgtcctcagtgtccaataactatatccaaacccttggccgcgatttccgcaagaacggcaacggcggaccggggccttacgtggggcaggcaggaaccgccacactgcctcgcaattttcactatccgccagatggctactctcgccattacgaagacggctaccctggcggtagcgataactatggatccctgtccagggtgaccaggattgaggaaaggtacaggcctagcatggaaggctaccgggctccgagccgccaggacgtatacggcccgcagcctcaggttagggttgggggatcatcagttgatctgcatcggtttcaccccgagccctacggcctggaggacgatcaacgttccatgggttatgacgatttagactatggcatgatgagcgactatggaaccgctcgtcgaactggtacaccttctgatcccaggcgaagactgcgctcttacgaagacatgataggagaggaggttccatcagatcaatattactgggcacctctggcacagcatgagcggggttccttggccagtctggactctctgcgaaagggtggtccccctccaccaaactggagacagcccgaacttccagaagtcatagccatgcttgggtttcggcttgatgccgtgaaaagcaatgcagctgcatacctccaacatttatgctatcggaacgataaggttaaaacagacgtccgtaagctcaagggaatccccgtgctggtgggcctgctggaccaccctaagaaagaggttcatctcggagcctgcggcgctttgaagaacatcagtttcggtagggaccaggataataagatcgccattaaaaattgcgatggcgtgcccgctcttgtcaggctgctgagaaaagccagagacatggacttgaccgaagtcattacgggtactctgtggaatttgtccagccatgactctataaaaatggagatcgtcgaccatgccctgcatgcattgactgacgaggtaatcatcccccatagcgggtgggaaagagagcccaacgaagattgcaaacctaggcacatcgaatgggagtcagtcctaactaacacagctggatgtttaagaaacgtttccagtgagcgctcagaagcgcgtcgcaagctgagggagtgcgatggacttgttgatgccctcatcttcatcgtgcaggcagagataggccagaaggacagtgattctaagctcgtggaaaattgcgtttgtcttctccgtaatctttcctatcaggtgcaccgagaaattccccaggctgagcggtaccaagaagctgctcctaatgtggccaataatactggccctcacgctgcctcttgcttcggcgccaagaagggcaaggacgagtggttctcccgggggaagaagcccattgaagatcccgcaaacgataccgtcgattttccaaaacgcacaagtccagcacgcggttacgagcttctcttccagcccgaagtggtgcgaatctatatctcactgctcaaagagagcaaaacgcccgctattctcgaagcaagcgcaggggcaatccagaatctgtgcgcggggcggtggacctacgggcggtatatccgatccgctttgcgtcaagagaaggccttgagcgctattgctgatctattgactaacgagcacgaacgggtagtcaaggccgcctcaggcgccctccgcaacctcgctgtggacgcccggaataaagagctcataggcaagcacgccatccccaacctcgtaaaaaatctgcctggtggacaacagaacagctcctggaacttttccgaagacacagttatcagtatcctaaacaccattaatgaagtaatagctgaaaatctggaggccgccaagaaactgcgggagacccagggtatcgaaaaactcgtcctaatcaacaagtcaggcaaccgcagtgagaaagaggtgagggctgccgctctggtgttgcagacgatctggggatataaggagctgagaaagccattggaaaaagaaggatggaaaaagtcagatttccaggtcaaccttaataacgctagtcggtctcagagcagccacagctatgacgattccacgttgcccctgattgacaggaaccagaaatcagacaagaagcccgatcgggaagaaattcagatgtccaacatgggcagtaatacgaaatccctggacaacaactactctacccctaacgagagaggagaccataaccgaaccttggataggtcgggggatcttggcgatatggagcctttgaaaggcactactcctctgatgcaagacgagggccaggaaagcttggaagaggaactggatgtgcttgtcctggacgacgagggcgggcaggtgtcttatcctagtatgcagaagatctag

SEQ ID NO: 181892 - DNA, 381 bp, synthetic construct
  misc_feature 1..381: note = Description of Artificial Sequence: Synthetic coding sequence
  source 1..381: mol_type = other DNA
atgatcggcgaggaggtgcccagcgaccagtactactgggcccccttggcccaacacgagagaggcagtctcgcctcccttgattctcttcggaaagggggaccgcccccccccaactggaggcagcccgagctccctgaagtgatcgctatgctggggtttcgactggatgccgtaaagtcaaatgccgcagcttacctccagcacctgtgctatcggaatgataaggtgaaaaccgatgttagaaaactcaaaggaatcccagtactcgtggggctgctggatcatccgaaaaaggaggtccatttgggcgcctgcggagcattgaagaatatctcattcgggcgggaccaagataacaagatagccataaagaattag

SEQ ID NO: 181893 - DNA, 2640 bp, synthetic construct
  misc_feature 1..2640: note = Description of Artificial Sequence: Synthetic coding sequence
  source 1..2640: mol_type = other DNA
atggccaacggcaccctgacccggcggcaccagaacggccggttcgtcggggacgctgaccttgaaagacagaagttctctgacctgaagctgaatgggcctcaggatcatagccacctgctgtactccacaatcccccgcatgcaggaaccggggcagatcgtggaaacctacaccgaggaggaccccgaaggcgcaatgagcgtggtcagtgtcgaaactagcgacgatgggaccaccaggaggactgagacaacagtgaagaaggtcgtcaagaccgtgacaactcgcaccgtgcaaccagtggccatggggcctgatggtctccccgttgatgcaagttccgtctctaataactacattcagactctggggagagactttcggaagaacggaaatgggggccctggaccgtatgtagggcaggcagggacagccacactgccccgcaacttccattaccctccagacggttattctcggcattacgaagacggatatcccggcggcagcgataactatggtagcttatctcgcgtaaccagaatcgaagaacggtacaggccttcaatggaaggttacagagccccctctcgtcaggacgtgtacggcccccagcctcaggttcgggtgggcggaagctccgtcgacctccatcggtttcacccggagccctacgggcttgaggacgatcagcggagtatgggttatgacgacctggactacgggatgatgagtgactacggaaccgctaggagaactgggaccccatcagacccacgccgacggttgcgctcatacgaggacatgattggggaggaggtccctagtgatcaatattactgggctcctcttgctcagcatgagcgtgggtcccttgccagccttgattccctacgaaaggggggccctcctccccccaactggcggcaaccagagctgcccgaggtgatcgcgatgctgggctttcgcctggacgctgtaaagtccaacgctgccgcgtacttacagcacctatgttaccgcaacgacaaggtaaaaaccgacgttaggaaactcaagggtattccggtgttagtgggtctactcgaccatcctaagaaggaggtccacctgggtgcttgcggcgcactcaagaacatctcctttgggcgggaccaggataataaaattgcaataaagaactgtgatggcgtgccggctctggtgcggctcctgagaaaggccagggatatggacctcaccgaagtgataaccggcaccttatggaacttgagcagccacgattctattaaaatggagatcgtggatcacgccctgcacgccctgaccgacgaagtaattattccgcacagtgggtgggaaagagagccaaatgaagactgcaagccacgtcatatcgaatgggagagcgttctgactaatacggctggatgtctgagaaacgtctctagtgagaggtccgaagcgaggcggaaactgcgcgagtgcgacggccttgtggacgcccttattttcatcgtccaggccgaaattggccagaaggactcagactcaaagctggtcgaaaactgtgtatgtttacttcgcaatctgtcatatcaagtacacagagaaataccccaagcggagcggtatcaagaagccgccccaaatgtggccaacaacactggcccacatgccgctagctgttttggggcgaagaaaggaaagggcaagaagcctatcgaagatcctgcaaatgataccgtagacttccctaagagaactagcccagccaggggatatgaactgctgtttcagcccgaggtggtaagaatctatataagtttgcttaaagagtccaaaaccccagcaattctggaggccagcgcaggtgctatccagaacttgtgtgctggcaggtggacatacggccgttacattcggtccgccttgaggcaggagaaagcactgtcggctatagccgatctgcttaccaacgagcacgaacgggtcgtcaaggcagcttccggtgcacttaggaacctcgcggtggacgctaggaacaaggaactgatcggaaagcatgctattcctaatctggttaagaatttgccgggagggcagcaaaactcttcttggaatttctccgaggatacagtgatctccatattaaacaccattaacgaggtgatcgccgaaaatttggaggctgcgaagaagttgcgcgaaacccagggaatagaaaagctggttctgatcaacaagtctggaaatagatctgaaaaagaggtaagggcagcggcattagtcctccagaccatctgggggtacaaggagctgcgcaaaccactcgaaaaagagggctggaagaaatctgactttcaggtaaacctgaacaacgcatctcgcagtcaaagctctcatagttacgacgattcgacactgcctttgatcgaccgtaatcaaaagagcgacaaaaaaccagatcgggaggagatccagatgagcaatatgggatcaaatacaaaatctctcgacaacaactacagcacccccaatgagagaggagatcacaatagaacactagacagatccggagaccttggcgacatggagcctctgaagggcacaacccccttaatgcaaaaaatatag

SEQ ID NO: 181894 - DNA, 3678 bp, synthetic construct
  misc_feature 1..3678: note = Description of Artificial Sequence: Synthetic coding sequence
  source 1..3678: mol_type = other DNA
atgttcgcccggaagccccccggcgccgcccccctgggcgccatgccagtcccggaccagccttcatccgccagcgaaaagactagctcactgtcgccagggctgaacacctccaacggcgacggttcagagaccgagaccacgagtgccatccttgcaagcgttaaggaacaggaacttcagtttgagaggctgactcgagagctggaagcagaacggcagatcgttgcaagtcagctcgaacgatgcaagctgggatccgaaaccggctctatgtcaagcatgtcgtcagcggaggagcagtttcaatggcaatctcaggacggccaaaaagatatagaagatgagttaacgaccgggttagaactggtggatagttgcatcaggtcgctgcaagagagcggtattctggaccctcaggattactctacaggggaacgtccatctctgctcagccagagcgccctccagctaaatagcaagcccgagggctctttccagtacccagccagttatcacagtaaccaaacactcgcgcttggcgagacgacacccagccagcttccggctagaggaacacaggcaagagcaaccggccagagcttcagtcagggcactactagccgggccggtcacttggctggccccgagcccgccccaccaccaccgcctcccccgagggaaccatttgcaccttcactgggcagcgcctttcacctgcccgatgcacctcccgccgccgctgctgcagcgctgtactattcctctagcacactgcctgcgccacctcgcgggggaagtccgctggctgccccacaggggggttcccccacaaaactccagcgtggcgggagtgctccagagggggcgacttacgctgcaccaagggggagcagccctaagcagtcaccatcccggctcgccaagtcttatagtaccagttctcccattaacatcgtggtgtcctccgccggactgtctcccatccgcgttacgagtccaccgaccgtgcaatctacaatctcgtcaagccccatacaccagctctcctccacaatcggtacttatgctacactgtcccctactaagaggctggttcacgcttccgaacagtacagcaagcatagccaggagttgtacgccaccgccactcttcaacgtccaggcagcctggccgctggatcccgggctagctattcctcccagcatgggcatctggggcctgagctgagagctctgcaatccccagaacaccatatcgacccgatctatgaggacagggtgtatcagaagcctcccatgcgctctctgtctcagtcacagggtgatcccctacctcccgcccacacagggacttatcgcacaagtactgctcccagctccccaggtgtggacagcgtaccccttcagcggacggggtcacaacatgggccacaaaatgccgcagccgcaacatttcagagagctagctacgctgccgggccagcctccaactacgccgatccctatcgtcagctccagtactgcccaagtgttgagagcccgtattccaagtcgggcccagcactgccccccgaaggaaccttggcgaggagcccgtctattgacagcattcagaaagatcctagagaattcggatggagggaccccgagctgccagaagtgatccagatgctgcagcaccagttcccatccgtgcagagcaacgccgcagcatacctccaacacctgtgttttggcgacaataagatcaaagctgaaattagaaggcagggaggtattcaactgctggtggacctccttgatcatcgcatgaccgaagttcataggtcagcatgtggagcgctgaggaacctcgtctatggtaaggccaatgacgataacaaaatagcactcaaaaactgtggagggatcccagcactagtgagactgctgaggaagaccacagacctggagatccgtgaactggtgactggtgtcctgtggaatctgtcctcatgcgatgcccttaaaatgcctatcatccaggacgccttggctgtcctgactaatgcagtcatcattccgcactccggttgggaaaatagccccctgcaggatgatcgaaagatacagcttcacagctcgcaggttctccgaaatgccaccgggtgccttcggaacgtgagcagcgcaggtgaagaggctcgcagaaggatgagagaatgtgacgggcttaccgacgctctgttgtatgttattcagtcagccttaggctcttctgaaatcgattccaagacagttgaaaactgtgtctgtattctgcggaacctgtcatacagattggccgcagagaccagtcagggacagcacatgggaacagatgagcttgacggcctgctgtgtggggaagctaatggcaaagacgccgagtccagcgggtgctggggcaaaaaaaagaaaaagaaaaagtctcaagatcagtgggatggtgtcggtccacttccagactgcgccgagcccccaaagggtatacagatgttatggcatcctagtattgttaagccttacctgactttattgtccgaatgcagtaatccagataccctggaaggagcagccggcgccctgcagaatctcgccgcagggagttggaaatggtccgtgtacatccgagcggccgtgaggaaggagaaggggctgcctatcctcgtggaactactgaggattgataatgaccgagtcgtgtgcgctgtggctacagctctacggaatatggcactggacgtacggaacaaagaattgattgggaaatatgctatgcgggatctggtgcaccggctcccaggaggcaataactctaacaacaccgcctccaaggcaatgtctgacgacacagtgactgcggtttgttgtactctgcacgaggtgattaccaaaaatatggagaacgcaaaagccctacgggacgccggaggtatcgaaaaactggttggcatttccaaaagtaaaggcgacaagcattccccaaaagtcgtgaaggccgcgtcccaagtgctcaattcaatgtggcagtacagagatctcaggagtttgtataagaaagatggctggagccagtatcatttcgtggcctcctcctcgacaatcgaacgtgatagacaaaggccctacagctcttctcggaccccctccatttccccagtacgagtgtccccgaataatagaagcgcttcggcacctgctagcccacgggaaatgatcagcctcaaggagagaaagaccgactacgaatgcacaggcagcaatgctacctaccacggcgctaagggggagcacaccagccgcaaggacgccatgacagcacagaacaccggcatcagtactctatacagaaacagttacggcgcccctgccgaagatattaagcacaatcaagtttcagcacagcccgtgccacaggaaccgtcacgtaaggattatgagacctaccaaccattccagaatagtacaaggaactacgacgaaagtttttttgaggatcaggtgcaccaccgacctcctgctagcgagtacaccatgcatttagggctcaagagtaccggtaactacgtcgatttctatagcgcagcgcggccttactccgagctaaactatgagacttcccattaccctgccagcccagactcctgggtgtag

SEQ ID NO: 181895 - DNA, 3504 bp, synthetic construct
  misc_feature 1..3504: note = Description of Artificial Sequence: Synthetic coding sequence
  source 1..3504: mol_type = other DNA
atgttcgcccggaagccccccggcgccgcccccctgggcgccatgcccgtacccgatcagcccagctccgcctcagagaagaccagttcattatcaccagggctgaatactagtaatggagacggaagcgaaacggaaaccacaagtgctatcctggcgtcagtcaaggaacaggagttgcagttcgaacgcctgacccgggagttagaagccgaaaggcagatcgtcgcttcacaattggagaggtgcaagctcggtagtgagacaggttccatgtcctccatgtcatcagccgaagagcagtttcagtggcagtctcaggatggccagaaggacatcgaagacgagctaaccacaggtctagagctagtcgattcatgcatcaggtccctgcaggaatcgggcattctggatccgcaggactattcaaccggcgagcgccctagcttactctcgcaatcagctctgcagctcaattcgaaaccggagggctcctttcagtatcccgcaagctaccactcaaaccagaccctggcattgggggagaccactccctctcagcttcccgcccgcggaacacaggcccgggctacagggcaatctttttctcaaggtacaacatcccgggctggtcacctagccggccctgagcccgccccgccaccaccaccgccccctcgggagcccttcgctccatccctgggtagcgcgttccacctgcctgacgcacctcctgccgccgccgccgcagcactctattactctagttccacactccctgctccacctcgaggggggtcaccgcttgctgctccacagggaggcagcccgactaaactgcagcggggaggcagtgctccggagggggccacctatgctgccccgcggggcagtagcccaaaacaatcaccctcacgactcgccaagtcttactcaacttcctcccctatcaacattgtcgtgtccagtgcaggtctgtctcctatcagggtgacatcaccgcctactgtgcaaagtacgattagcagcagccctatccaccagttgagttcaaccattggtacgtatgcaacactctcacccacaaagcgtctggttcacgcaagtgaacagtattctaaacacagccaggagctgtacgctactgcaacacttcaaagacccggctcccttgcagccgggtcaagagcatcatactcctcccagcacggccatttaggtcccgaactgcgcgcccttcagagccccgagcaccacattgacccgatctacgaagaccgagtttaccagaaacctcctatgcgatctctgagccagagtcaaggggaccccctacctccggcacatactggtacttacaggacatctactgctccatccagccccggggtagacagcgtcccgttgcagcgtactgggtcccagcacgggccccagaatgccgccgcagctacctttcagcgggcctcatatgcggccgggcccgcttccaactacgccgacccttaccggcagcttcagtactgtccatcagtggagtcgccatattcaaagtccgggccggccctgcctcccgagggtaccctggctcgctcacccagtatagattccatacagaaagacccccgcgaattcggatggagagaccccgagttacccgaggtgatccagatgctacagcaccagtttccttctgtgcaatcaaatgcagccgcctacctgcagcacctgtgtttcggtgacaacaagatcaaagctgaaatacggcggcaaggcggaattcagttacttgtggacctcctcgatcacaggatgaccgaagtacataggtctgcatgcggcgccctgagaaacctagtatatggcaaggccaatgatgacaataagattgccctgaaaaactgcggtggcatccctgcactggtccggttattgcgaaagactactgatctggaaatccgggaattggtgaccggagtgttgtggaacctcagcagttgtgacgcacttaaaatgcccatcatccaggacgcccttgctgtgttaaccaacgccgtaattatacctcattctgggtgggaaaactcccccctccaggatgaccgcaaaatacagttgcatagctcacaggtgctgcgaaacgcgactggatgcttgagaaacgtgtcgtctgccggtgaagaagcgcggcgcagaatgcgcgagtgcgatggacttaccgatgccctgctttatgttattcaatctgccctcgggagtagcgagatagactccaaaaccgtggagaactgcgtgtgcatcttgcgaaacctgtcatacagacttgctgcggaaacttctcaagggcagcacatgggaacagatgaactggatgggctcctctgcggtgaagccaacgggaaagacgctgaaagctcgggctgctggggaaagaagaaaaagaagaaaaaaagccaggaccagtggtctgtgtacatcagagcagccgtgaggaaagagaaggggttaccaattttggtggagctgctgcggatcgataatgacagggtggtgtgtgccgttgcgactgcactgcggaatatggcgctcgacgtaaggaataaagagttgatcggtaaatatgcaatgagagatcttgttcacaggctacccggtgggaataattccaataacactgctagcaaggcgatgtccgacgatacagttactgcagtgtgctgtaccctgcacgaagtgataaccaagaatatggaaaacgccaaagcactccgagacgctggaggcattgaaaagctggttggcatctcaaagtcgaagggcgacaaacatagtcccaaggtggtcaaagcggcaagtcaggtactgaactctatgtggcaatacagagacctgagatccctgtataaaaaggatggctggagtcaatatcatttcgtagccagctcctcaaccattgagagagatagacaaaggccctacagcagttcacgcacaccttccatcagcccagttcgtgtgtcgcccaataaccgcagcgcctccgcacctgcttcacccagggagatgatttcgttaaaagagaggaagaccgattacgagtgcaccgggtccaatgcaacctaccacggcgccaagggcgagcacacgtccagaaaggatgcaatgactgcccagaatactggtattagcaccctctatcgcaattcatatggcgccccagctgaagacattaagcacaaccaggtgagcgcgcagcctgtcccccaggagccatcgcgaaaggactatgaaacgtaccagccatttcaaaattcaacgagaaattatgatgagtcctttttcgaagatcaggttcaccacaggcctcctgccagcgaatacaccatgcacctgggcctgaaaagcacagggaactatgtggacttttacagcgccgcacgcccttattccgagcttaattatgagacttcacactaccctgcgtcccccgatagttgggtgtag

SEQ ID NO: 181896 - DNA, 2379 bp, synthetic construct
  misc_feature 1..2379: note = Description of Artificial Sequence: Synthetic coding sequence
  source 1..2379: mol_type = other DNA
atgcggagcctgagccagagccagggcgaccccctgccccccgcccacacaggcacctatagaacttcaacagccccgagctctcccggcgtcgactcggtgccactccaacgtacagggtcccagcacggtcctcagaatgccgcagcggccacattccagagggcaagctacgccgctggacctgccagtaactacgcggacccatatagacagttgcagtactgtccatctgtggagagtccctatagtaaaagtgggcccgcattgccgcctgaaggaaccctggcacgcagtcctagcatcgattccatccagaaggaccccagagaattcgggtggagagatcccgagctgccggaggtgatccagatgcttcagcatcaatttccaagcgtgcagtccaatgcggcagcatatcttcaacacctttgttttggcgacaacaaaatcaaagcagagatccggaggcaggggggaatccagctgctggtggatctgttggaccatcggatgacagaagtgcataggtctgcgtgcggcgcactcagaaaccttgtttatggaaaggccaacgacgataacaagattgctctgaagaactgcggaggcattcccgccctcgttagactgctccggaagactactgaccttgagatcagagagttagtaacaggggtcctatggaatctcagctcgtgtgacgccctaaagatgcccattatccaggacgctctagctgtcctaacaaacgccgtgattatccctcacagcggctgggaaaactcacccttgcaagatgatcggaaaatacaactgcactcatcccaggttctccggaacgctaccggatgcttgcgaaacgtgtcctctgccggagaggaggcccgcagaaggatgcgtgaatgcgatggcctaaccgatgccttactgtatgtcatacagagcgctctggggtcctccgagatcgacagtaaaactgttgagaactgtgtttgcatcctcaggaacctttcttaccggctggcagctgagaccagccaggggcagcacatgggcaccgatgaacttgatggcctgttgtgcggggaagccaatggcaaggatgcggaatccagcggttgctggggcaaaaaaaaaaaaaagaagaaatcacaagatcagtgggatggggtggggcccctgcccgattgcgccgagccccccaaaggcatccaaatgctctggcatccctcaattgtgaaaccctacctcactctgctcagtgagtgctccaatcctgatacgctggagggggcagccggagctctgcagaatctggccgctggttcgtggaagtggtctgtttatatccgcgcagctgtgagaaaagagaaggggctgccaatcttggttgagctcctgcgtatcgacaacgatcgcgtggtttgtgccgttgccaccgctctccgcaacatggccttggatgtacgcaacaaggaattgattggcaagtatgctatgcgcgacctggtgcaccgccttcctggcggcaacaactcaaacaacaccgcgtctaaggccatgtcggacgacactgtcaccgcggtctgttgcaccttacatgaggtgatcacaaagaatatggaaaatgctaaggctttgcgagacgctggagggatcgagaaacttgtgggtatatccaaatcaaaaggagacaaacatagcccgaaggttgtgaaggccgcctctcaggtcctgaactcaatgtggcaatatagggatctaaggtctctctataagaaagacgggtggtcgcagtaccacttcgttgcttcttcctcaaccattgagagagatcgtcagagaccctattcatcgtcacgtaccccctctatctctccagtacgagtatcacctaacaacagaagtgctagcgcacccgcctccccgcgagagatgatctcgttgaaagagcggaaaaccgactatgaatgcaccgggtccaacgccacatatcatggggcaaaaggagagcacacatcaagaaaggacgcaatgaccgctcagaacacaggcattagtacgctttatcgcaacagctatggtgcccccgccgaggacatcaaacataatcaggtgtccgcacagcctgtgccacaggagcccagccgaaaggattatgaaacataccaaccattccagaattccacaaggaattatgacgagtctttctttgaagaccaggtgcatcaccgtcctcccgcgagcgaatacaccatgcatctgggcctcaaatctactggcaactatgtggacttttactcagccgccagaccatattcagaactgaattacgagacttcccattatcccgcctcgccagattcatgggtctag

SEQ ID NO: 181897 - DNA, 2667 bp, synthetic construct
  misc_feature 1..2667: note = Description of Artificial Sequence: Synthetic coding sequence
  source 1..2667: mol_type = other DNA
atgagcagcatgagcagcgccgaggagcagttccagtggcagagccaagacggacagaaagacattgaagacgaactcacaacggggctggaacttgtcgattcctgcattaggtctctgcaggaatccggaattctggacccacaggattatagcactggagaaactggaagccgggcttcatacagttctcaacatggacatctaggtcccgagctgcgggcacttcagagccctgagcatcacatcgatccaatttacgaggaccgggtctatcagaaacccccgatgcgcagcctgagccagagccagggggatcccctgcccccagctcatacaggaacatatcgaacttctactgccccatcatcccctggagtggacagtgtcccattgcagcgaacaggttcacaacacgggcctcagaacgccgccgccgccacatttcaaagagcctcatatgcagccggccctgcctcgaactatgctgatccctaccggcaattgcagtactgtccatccgtggaatctccttattccaagagtggacctgcgctaccccctgaaggtaccttagcacgcagtccttctatcgactcaattcagaaagatccccgcgagttcggatggcgcgaccctgagctgcccgaggtgatacagatgttgcagcaccagtttcccagcgtgcaatccaacgccgcggcctatctgcagcacctgtgcttcggagacaataagatcaaagcagaaatacgacgtcagggaggaattcagttgttagtggacctgcttgatcaccgcatgactgaagtgcaccgcagcgcctgtggggctctgaggaaccttgtttatggcaaggcaaatgacgacaataagatagctctgaaaaactgtggaggcatccccgccctggtgcggctcctgaggaaaactacagacctggaaatcagggagctggttactggcgtgctttggaacctgagttcctgcgatgcactaaagatgccaattatccaagatgctctcgccgtactgaccaacgctgtgatcatccctcattctggatgggaaaattccccccttcaggatgatagaaaaattcagctgcactcttctcaggttctaagaaacgcaaccgggtgcctgcgcaacgtatcaagcgccggagaggaggcgaggcgaagaatgagggaatgcgacggactaaccgacgcactgctgtacgtgatacagagtgcacttgggtcatcagagatcgatagtaaaaccgtggaaaattgtgtatgcattctaaggaatctgagctataggctcgcggccgaaacctcgcaaggccagcatatgggcacggatgagctcgatggattgctttgcggcgaagctaatggcaaagacgctgaaagcagcgggtgctggggtaagaagaagaaaaaaaagaagagtcaggatcagtgggatggggtcgggcccctgcccgactgcgccgaaccacctaagggaattcagatgctttggcacccatctattgtcaaaccgtatctcacacttctgtcagagtgctcaaacccagacaccttggagggagccgccggggcactgcagaacctcgcagctggcagttggaagtggtcggtgtacattcgagccgccgtccgcaaggaaaaaggcttaccaattctcgttgagttgctgcgtatagataatgatagggttgtgtgcgcagttgccacagcactgcgcaatatggcactcgacgtcagaaacaaagaactgatcgggaaatacgccatgagggatctggttcacagacttccaggcggaaacaattctaacaacacagcatctaaagcaatgagtgatgacacagtaacggcagtttgctgcactctgcacgaagtgattactaagaacatggaaaacgcaaaagctcttagagatgcgggtgggatcgaaaagttggtgggaatttcgaaatctaaaggagacaagcattcccctaaggtcgtgaaggcagcctctcaagtgctcaacagcatgtggcagtaccgcgatctgcgcagcctgtacaaaaaagacggttggtctcagtatcactttgtcgcaagtagcagcaccatcgaaagggatcgacagagaccatacagcagttcaaggactccctcgattagccccgtgagggtttcacccaacaatcgctcagcctccgcccccgcctccccaagggaaatgatcagcttgaaggaaagaaaaaccgactacgagtgtacaggctctaacgctacttatcatggagctaagggggagcataccagccgtaaggatgctatgacggcccagaataccggcatcagtacgctgtaccggaatagctacggagctcctgcagaagacattaagcacaaccaggtgtcagcacagcctgtccctcaagagcctagtaggaaggattacgaaacttaccagccatttcagaattcgaccaggaattatgacgagagcttttttgaagatcaggtccatcatcgtccaccagcctccgagtacactatgcatctgggtttgaagagcaccggcaactacgtcgacttttatagcgcagcccggccgtatagtgagctgaactacgaaacttcccactatccggcttcacccgattcctgggtgtag

SEQ ID NO: 181898 - DNA, 546 bp, synthetic construct
  misc_feature 1..546: note = Description of Artificial Sequence: Synthetic coding sequence
  source 1..546: mol_type = other DNA
atgagcagcatgagcagcgccgaggagcagttccagtggcagagccaagatggccagaaagacatagaagacgaacttacaacaggacttgaacttgtagactcttgcattagatccctgcaggaaagcggcatccttgatccacaggactatagtaccggcgagcggccctctctactttcccaatctgccctgcagctgaatagcaaacccgaagggagcttccagtatccagcctcttaccactccaaccagaccctggccctcggcgagacgacaccctctcagttgcccgcccgaggcacacaagcgcgggccaccggtcagtcatttagccaggggacaactagccgcgcaggccaccttgccggacccgagccagctcccccgccccctcctcccccacgcgagccattcgctccttcgctggggtctgcctttcacttgcctgatgcaccacccgcagcagcagctgccgcattgtactactcatcaagtaccctccccgctccacctcgaggcgggagcccacttgctgcaccctag

SEQ ID NO: 181899 - DNA, 963 bp, synthetic construct
  misc_feature 1..963: note = Description of Artificial Sequence: Synthetic coding sequence
  source 1..963: mol_type = other DNA
atgaccgtgtggtgcgccgtggccaccgccctgcggaacatggccctggatgtaagaaacaaggagttgatcggtaagtacgcaatgagggatctcgtgcataggctgcctgggggaaacaattctaacaataccgcatctaaggcaatgagcgatgatacagtgacggctgtgtgttgtacacttcatgaagtgatcacaaaaaatatggagaacgcgaaggcactcagagatgcaggaggcattgaaaaactggtaggaatcagcaagtctaagggggataaacacagtcccaaggttgtaaaggcggcaagccaggtgctgaatagcatgtggcagtaccgggatttacggagcctctataaaaaagatggttggtcccagtaccacttcgtggctagtagttctacgatcgaacgagaccgacaaagaccttacagctcatcacggactcctagcatctcacccgtgcgggtgagcccaaacaatcgttctgcctcagctcctgcatcccctagagagatgatcagcctgaaagaaaggaagacagattatgagtgtaccgggtcgaacgccacctaccacggggctaaaggtgaacacacatcaagaaaggatgctatgaccgcgcaaaacacaggtataagtacattgtaccgaaactcctatggggcccctgcagaagacataaagcataatcaggtaagtgcccaaccagttccacaagaaccttctcgaaaagattacgagacttatcagccattccagaacagcacccgaaattatgacgaaagcttctttgaagatcaggtacaccacagaccccctgcttccgagtatacgatgcacttgggcctgaagtccaccggaaactatgtagatttttactccgctgcgaggccttattcagagctgaactacgagacatcgcactatccagcaagccctgattcttgggtgtag

SEQ ID NO: 181900 - DNA, 246 bp, synthetic construct
  misc_feature 1..246: note = Description of Artificial Sequence: Synthetic coding sequence
  source 1..246: mol_type = other DNA
atgaaccgggagggcgcccccggcaagagccccgaggagatgtacatccagcaaaaagtgcgcgtgctactcatgctgagaaagatgggctctaatctcacagccagtgaggaggaatttctgcgtacttacgccggtgttgtcaacagccaactttcccaacttccaccacactccattgaccagggtgctgaggacgtagtcatggccttcagcagaagcgagaccgaagatagacggcagtag

SEQ ID NO: 181901 - DNA, 246 bp, synthetic construct
  misc_feature 1..246: note = Description of Artificial Sequence: Synthetic coding sequence
  source 1..246: mol_type = other DNA
atgaaccgggagggcgcccccggcaagagccccgaggagatgtacattcaacagaaggtaagggtgttacttatgctcaggaagatggggtcaaacttaaccgcatccgaagaggagtttctacggacatacgccggtgtggtgaatagccagctgtcacaattgcctccacatagtatcgatcagggtgccgaggatgtggtcatggctttcagtcggtcagagaccgaagatcgccgacagtag

SEQ ID NO: 181902 - DNA, 246 bp, synthetic construct
  misc_feature 1..246: note = Description of Artificial Sequence: Synthetic coding sequence
  source 1..246: mol_type = other DNA
atgaaccgggagggcgcccccggcaagagccccgaggagatgtacatccaacagaaggtgagagtcctcctaatgctgagaaagatggggagcaacctgaccgcatccgaggaagagttcctgcgcacctatgctggcgtggtgaactcccagcttagccagctgcctcctcactcaatagaccagggggctgaggacgtggtgatggctttctctcgctccgaaacggaggaccgtcgacagtag

SEQ ID NO: 181903 - DNA, 246 bp, synthetic construct
  misc_feature 1..246: note = Description of Artificial Sequence: Synthetic coding sequence
  source 1..246: mol_type = other DNA
atgaaccgggagggcgcccccggcaagagccccgaggagatgtacatccagcaaaaggtgagggtactgcttatgctgcgaaaaatgggtagtaatctcactgcttccgaggaagagttcctcagaacatacgccggtgtggttaactcccagctaagtcagctccccccgcattctattgatcaaggcgccgaggacgtcgtcatggctttcagcagatctgaaaccgaggatagacgccagtag

SEQ ID NO: 181904 - DNA, 246 bp, synthetic construct
  misc_feature 1..246: note = Description of Artificial Sequence: Synthetic coding sequence
  source 1..246: mol_type = other DNA
atgaaccgggagggcgcccccggcaagagccccgaggagatgtacattcaacagaaagtgagggtactcttaatgctaagaaagatgggctccaacctcaccgcttccgaggaggagttcctgaggacctacgccggcgtcgtgaactctcagttatcacagcttcctccgcattcgatcgaccagggagctgaagatgtggttatggccttttctcgtagcgagaccgaagatagacgccagtag

SEQ ID NO: 181905 - DNA, 1692 bp, synthetic construct
  misc_feature 1..1692: note = Description of Artificial Sequence: Synthetic coding sequence
  source 1..1692: mol_type = other DNA
atggacgtgggcgagctgctgagctaccagcccaaccggggcaccaaacgacctcgcgacgacgaggaggaggagcagaagatgcggagaaaacaaacaggcacgcgggaacgggggcgatacagagaggaagagatgacagttgtagaggaagcagacgatgacaaaaagaggctccttcagataattgatcgggatggtgaggaggaagaggaggaggaggaacccctcgatgagtctagcgtgaagaagatgatcttgaccttcgagaagaggtcctacaagaaccaggaactgcggattaagtttcctgacaatccagagaagtttatggagagtgagctggacttgaacgacattatccaggaaatgcacgtggtggccacaatgcctgacctatatcacctgctggtggagctgaatgccgttcaaagcctcctggggctactaggacatgataacaccgatgtgtccattgccgtagtggacttgttgcaagagctgacagacatcgatacactccatgagtccgaagaaggtgccgaggtgctcatcgacgcactggtagatggccaggtggttgctctcctggtgcagaacttagaacgactcgacgagtctgtcaaagaagaagcagatggagtgcataataccttggcaattgttgagaatatggccgaatttcggcctgagatgtgtacagagggcgcacaacaaggactactgcaatggcttcttaagagactcaaggccaaaatgccctttgacgccaacaagttgtactgttccgaagtgctcgcaatcttactacaggataatgatgagaatcgagaactcctgggggaattagacggcatagacgtgctcctccagcagctcagcgtcttcaagcggcataacccaagtaccgccgaggagcaggaaatgatggagaacctatttgactctctatgcagttgcctcatgctgagctctaacagagaacggttcctgaagggagaggggttacagctcatgaacctaatgttgagagagaaaaaaatcagtagatcctcagctttgaaggtactcgaccacgcgatgatcggccccgagggaaccgataactgccataaattcgtcgacattcttggcttgcgaaccattttcccactctttatgaaatcaccaaggaaaatcaaaaaggtcggcaccacagaaaaggagcatgaagagcacgtttgcagcatcttggcatctctccttaggaatctgcggggacaacagcgaaccaggctgttgaacaagttcaccgaaaacgactctgagaaggtcgataggttgatggaactgcacttcaaatatctaggagctatgcaagtggctgacaagaaaatcgaaggcgagaagcacgatatggtcagacgtggcgagattatcgacaatgatactgaggaagagttctatctgcggcgcctcgacgccgggctgttcgttttacagcacatctgctacatcatggccgagatttgcaacgcgaatgttccgcagattaggcagcgagttcaccagatcctgaacatgcggggttcttccattaagatcgtccggcacatcattaaagaatacgcagagaacattggagacgggagatcacccgagtttagagagaacgagcagaagaggattttgggcctactggaaaatttttag

SEQ ID NO: 181906 - DNA, 1611 bp, synthetic construct
  misc_feature 1..1611: note = Description of Artificial Sequence: Synthetic coding sequence
  source 1..1611: mol_type = other DNA
atgcggcggaagcagaccggcacccgggagcggggccggtaccgggaggaagagatgaccgtggtggaggaagccgacgacgacaaaaagaggcttttgcaaattatcgacagagacggagaagaggaagaagaagaggaagagcccctggacgagagcagtgttaaaaaaatgatcttgaccttcgaaaagcggagctacaaaaatcaggaactgagaatcaagttccccgataacccagaaaagttcatggagtcagaactggatttgaatgatatcatccaagagatgcacgtggttgccacaatgcccgacttgtatcatctattggtggaattaaatgctgtccaaagtctgttgggcttactgggacacgacaacactgatgttagcattgcggttgtcgacctgctgcaggagttaacagatatcgacacactccatgagtccgaagagggggcggaggtgttgattgatgcgctggtggacggacaggtggtggctctgctcgttcagaacctggagcggcttgatgaatcagtgaaggaagaagctgacggggtgcataatacccttgcaatcgtggagaatatggcagagtttcgacccgagatgtgtaccgagggcgctcagcagggcctgctgcagtggctgctgaaaaggttgaaagcaaagatgccgttcgatgcaaataagctctattgctctgaggtcctggccattttgctgcaggataacgatgagaatcgtgaacttttaggtgagctggatggtattgacgtgttgcttcagcagttgtctgtttttaaaaggcataaccccagtactgctgaagagcaagaaatgatggaaaatctgttcgactccttgtgttcttgcctgatgctatctagcaacagggagcgctttctgaaaggagaggggctgcaactgatgaaccttatgttgcgggagaaaaagatttctcggtcatccgcactaaaggtcctcgaccacgcgatgatcgggcctgagggtaccgacaattgccacaagtttgtggacatcctaggactgaggacgatcttcccactcttcatgaaaagtccaaggaaaatcaagaaggtgggcactacagagaaggagcacgaagagcacgtctgttcaattttggctagcttactgagaaatctaagaggacagcaacggacacgtctgctgaacaagtttactgaaaacgattcagagaaagttgacaggctcatggaacttcactttaagtatctcggcgccatgcaggtcgcggataagaaaatcgagggtgaaaagcacgatatggtgaggaggggagaaattattgacaacgacacagaagaagagttctatctgagaagactggacgctgggttgtttgtgctacagcacatctgctacattatggccgaaatctgcaatgcgaatgtgccacaaatacggcaaagagtccatcagatcctgaacatgcgaggatcatctatcaaaatcgtgaggcacatcataaaggaatacgctgagaatattggtgacggacggtctcccgagttccgggaaaatgagcagaagcgcatccttgggctgctggaaaacttctag

SEQ ID NO: 181907 - DNA, 501 bp, synthetic construct
  misc_feature 1..501: note = Description of Artificial Sequence: Synthetic coding sequence
  source 1..501: mol_type = other DNA
atgcggcggaagcagaccggcacccgggagcggggccggtaccgggaggaagaaatgaccgtggttgaggaagctgatgatgacaagaaaaggttgcttcaaatcatcgaccgagatggggaggaagaggaagaggaggaagagccgctggacgaaagcagcgttaaaaaaatgatcctgacatttgagaaacgctcctataagaatcaggaactccggatcaagttcccagacaaccccgaaaaattcatggaatccgagctggatctgaacgatataattcaggaaatgcatgtggtcgccaccatgcctgatctctatcaccttctggtagagctgaatgccgtccaaagcctacttggtctgctgggccatgacaatactgacgtgagcattgccgtggtagacctgctgcaggaactcacagacattgatacactgcacgagtctgaagaaggagctgaagtgctgattgacgcactcgtggatgggcaggtgtag

SEQ ID NO: 181908 - DNA, 1443 bp, synthetic construct
  misc_feature 1..1443: note = Description of Artificial Sequence: Synthetic coding sequence
  source 1..1443: mol_type = other DNA
atgatccgggccgcccccccccccctgttcctgctgctgctgctgttgctgctcctggtgagctgggccagtaggggcgaggcagcccctgaccaggatgagatacagcgcctcccaggtctggccaaacagccctcctttcgacagtacagcggctatttgaaaggaagcgggagtaagcatttgcattattggttcgttgaaagtcagaaggacccagagaactcacccgtcgtcctgtggctaaacggcggccctggctgttcttcccttgacggcctcctcacggaacacggcccatttctcgttcagcctgatggggtcacccttgaatataacccatactcctggaatctcattgcaaatgtgctgtacttagagtcgccagccggggtgggattttcatacagtgatgacaagttctatgcgactaatgacactgaggtggcgcagagcaattttgaagcattgcaggatttctttcggctgtttcccgagtacaaaaataataagctgtttttaacaggagagtcttatgcaggcatctacatcccgacgctcgccgtgctcgtgatgcaggacccttccatgaatttgcagggactggccgtgggaaatggtctaagttcctacgagcagaatgataactccctggtctactttgcctactaccatgggcttctcgggaacagactgtggtcgagcctgcaaactcattgttgttcgcagaacaaatgcaatttctatgacaacaaggatctggaatgcgttacgaacttgcaagaagtggcaaggatcgtgggaaactcaggactcaatatctacaacctgtacgccccctgtgccggtggcgtcccctctcatttccgctacgagaaagatacagtggtcgttcaggacctaggcaatatctttaccaggctgcccttgaagagaatgtggcaccaggccctcttgcggtcaggcgacaaggtgcgcatggaccccccatgcactaataccacagccgcttccacctatctcaacaatccctatgttagaaaagcactgaatattccagagcagttgccccagtgggacatgtgcaatttcctcgtgaaccttcaatatcgccgcctgtacagatcaatgaactcacagtatttgaagctgctttcttcacagaaatatcagattctgctgtataatggcgatgttgatatggcctgtaatttcatgggcgacgagtggttcgtggactctcttaaccagaagatggaggtccaacgacgaccttggctggttaagtatggagactctggagagcagatcgcaggtttcgtgaaggagttcagccatatagcttttcttactatcaaaggggctggacacatggttccaacagataagccactggctgctttcacaatgtttagccgattcttgaataagcagccatactag

SEQ ID NO: 181909 - DNA, 1446 bp, synthetic construct
  misc_feature 1..1446: note = Description of Artificial Sequence: Synthetic coding sequence
  source 1..1446: mol_type = other DNA
atgaccagcagcccccgggccccccccggcgagcagggccggggcggagcagaaatgatacgggccgctcccccgcctctatttttgctactactgctgttgcttctcctggtctcatgggctagcaggggagaggccgctcctgatcaggacgagatacagcggctgccaggccttgcaaagcaacctagttttaggcagtacagcggctacctgaaggggtctggaagcaagcatctgcattattggtttgttgagagccaaaaggatccagaaaacagcccagtggtgctgtggcttaatggcggccctggttgcagtagtctggatggacttcttacggaacacgggccctttctgattgccaacgtgctgtacctggagtccccagctggcgtcgggtttagttacagcgacgacaagttctatgccacaaatgacacagaggtagcccagtcaaatttcgaagccctgcaggactttttccgactatttccagaatataaaaataataaacttttcctgactggtgagtcgtacgctgggatctatatccctactctggcagttctggtgatgcaggacccatccatgaaccttcagggcttggcggtgggaaacggactgtcctcctatgaacagaatgataattcacttgtatacttcgcttactaccacggtttactcggcaataggttgtggagctccttacagacacactgctgctcccaaaataaatgcaacttctatgacaataaggacctagagtgcgtgaccaaccttcaagaggtcgccagaatcgtgggaaattcaggcttgaatatatataacctttatgcgccatgcgcggggggcgtgcctagtcattttagatacgaaaaagacaccgtggtagtccaggatctgggaaatatctttacccgcttacctcttaagcggatgtggcatcaggccctgctccgatccggcgataaggtccggatggatcctccatgcacaaatacaacagctgcaagcacatatctcaacaatccatatgtccgtaaagcgctgaatattccagaacagctgcctcagtgggatatgtgtaactttcttgtcaacctccaatatcgtcgtttgtatagatccatgaactcacagtacctcaagctcctgtccagtcagaaatatcaaattctgctttacaacggcgatgtggatatggcctgtaacttcatgggagatgagtggtttgtggattcactgaaccagaaaatggaagtccagagaaggccatggctggtaaagtacggggattcgggggagcagattgccggattcgtcaaggagttctcacatattgcattcctcacaataaaaggcgccgggcacatggtaccaaccgacaaacctttggcagcgttcaccatgttttcaaggttccttaacaagcagccctactag

SEQ ID NO: 181910 - DNA, 870 bp, synthetic construct
  misc_feature 1..870: note = Description of Artificial Sequence: Synthetic coding sequence
  source 1..870: mol_type = other DNA
atgatccgggccgcccccccccccctgttcctgctgctgctgctgctcctgcttttggttagttgggcctctaggggcgaggccgccccggatcaagatgagatccagcggttacctgggctcgctaagcagccaagcttccgccagtacagtggctatttaaagggctccggcagcaaacacctgcactactggttcgtggagtcgcaaaaggatccagaaaactctcccgtggttctctggctgaacggaggcccaggatgctcatccttagacggactcctgacagaacatggaccatttctggtacaaccggacggcgttactctcgagtataatccatactcttggaatctcatcgccaatgtactgtacctcgaaagccccgctggcgttgggtttagctattccgacgacaagttctacgctaccaacgacactgaggttgctcagagcaatttcgaggctctgcaagacttttttagacttttccctgaatataaaaacaacaagctgttcctcacaggcgagtcatatgcgggtatttacattccaaccttggccgtgttagttatgcaggatccctccatgaacctgcaagggctcgctgtggggaatggtctgtctagttatgagcagaacgataactccctggtgtacttcgcctattatcatggactgctgggaaacaggctctggtcatctcttcaaactcattgttgcagtcaaaacaagtgcaacttctacgacaataaagacctggaatgtgtcacgaatttgcaggaggtggcacgcattgtggggaactcaggtttgaacatctacaatctctatgccccttgtgccgggggggtgccatcacatttttag

SEQ ID NO: 181911 - DNA, 1497 bp, synthetic construct
  misc_feature 1..1497: note = Description of Artificial Sequence: Synthetic coding sequence
  source 1..1497: mol_type = other DNA
atgaccagcagcccccgggccccccccggcgagcagggccggggcggcgctgaaatgattcgggcagcccctccgccgctttttctcttgctgctactgctgcttctgctggtctcgtgggccagcagaggggaggccgccccagatcaggatgagatccagaggctgcccggtcttgctaagcagcccagcttcaggcaatatagcgggtacctgaaaggaagcggatccaaacacctgcattactggttcgtggaatcccagaaagatccggagaactcccccgtggtactctggcttaacggcgggccaggttgctcctccctggacggcctgctaaccgagcatggtccgtttctggtgcaacccgacggagtgacactcgagtataatccttattcctggaatctgatcgccaacgtgctgtacctagaaagcccagctggagtggggtttagttacagtgacgataagttctacgccacaaatgatactgaggtggcccagagcaattttgaggcattgcaagacttttttcggttattcccagagtataagaacaataaactgttcctcacgggtgagagttacgctgggatatacattccaaccctcgccgtgctggttatgcaggaccccagcatgaatctgcagggtctggctgtcgggaacggactgtcatcttatgaacagaacgacaactccttggtgtatttcgcttactaccatggtctgcttggaaataggttgtggagttctttgcagacccattgttgcagtcaaaataaatgtaacttttatgataataaagatctagagtgcgtgacaaatttgcaggaagtggctcgaatcgtaggcaactctggcctcaacatatacaatctgtacgccccatgtgctgggggcgttccttctcactttcgatatgaaaaagataccgtcgtcgtccaggatttgggtaacattttcacgaggctgccactgaaacggatgtggcatcaggccctactccggtctggcgataaggttcgcatggaccccccttgcactaacactacagccgcatctacttacttaaacaatccttatgttcgcaaagcactgaatatcccggaacagctaccccagtgggacatgtgcaacttcctggtgaacttacagtacaggagactctatcgcagcatgaattctcaatacctcaaattgttatcatctcagaagtaccagatacttttgtataatggagatgtggacatggcctgcaatttcatgggcgacgagtggtttgtggattccctgaatcagaagatggaggtgcagcggcgtccttggctcgtgaaatacggcgacagtggggaacagattgcaggctttgtgaaagaattttcgcacatcgctttcctgacaattaagggcgccggtcatatggtgccaaccgataagcccctcgcagcttttaccatgtttagcaggttcctcaataaacaaccttattag

SEQ ID NO: 181912 - DNA, 1038 bp, synthetic construct
  misc_feature 1..1038: note = Description of Artificial Sequence: Synthetic coding sequence
  source 1..1038: mol_type = other DNA
atgatccgggccgcccccccccccctgttcctgctgctgctgctgcttcttttgctggtgtcttgggcaagcaggggcgaggctgccccggatcaggatgagattcagcgcctcccgggtctagcaaagcagccctccttccggcagtattctgggtatcttaaggggagtgggtcgaaacatctccattattggttcgtggaaagtcagaaggatccagagaactcccccgtggtcttgtggttgaacggcgggcctggctgcagcagccttgacggcctgttgaccgagcatggcccctttctaatcgccaacgttctctacttagaatccccagcgggcgtagggttttcctactcagatgataaattctacgccactaacgataccgaggttgcgcagtccaattttgaagcactgcaagatttctttaggttatttcccgaatacaagaataacaagctttttctgaccggcgagtcatacgcaggaatttatatccccactctggctgtgcttgtgatgcaggatccctctatgaatctacaggggctggccgtgggtaatggactcagcagctacgaacagaacgacaacagcctcgtgtatttcgcatactaccacggtcttctgggcaatcgactgtggtcgtctttgcagacacattgctgcagtcagaataagtgtaatttttacgataataaggatctggaatgtgtcaccaacctccaggaagtagcccggatcgttgggaatagtggtcttaatatctacaatctgtacgcgccctgcgcaggcggagtgccctctcattttcgctacgaaaaagataccgtggttgttcaagatctgggaaacattttcactagactgccgctaaagcggatgtggcatcaggcactgctgagatctggggacaaggttcggatggacccaccatgcactaacaccactgcagccagcacttacctcaacaatccatatgtcagaaaagcgctaaacattcccgaacagctcccacaatgggacatgtgctag

SEQ ID NO: 181913 - DNA, 1149 bp, synthetic construct
  misc_feature 1..1149: note = Description of Artificial Sequence: Synthetic coding sequence
  source 1..1149: mol_type = other DNA
atgatgttccccggcctgctggccccccccgccggctaccccagccttctgcgaccgactccaaccctgacattaccccaatcgctccagtctgccttctcgggccacagctcatttttggtggaggacctgatcagaatcagccgaccccccgcttaccttcctaggtcagtcccaacggcaagcatgtcgccccctcgtcaaggcgcgcccacagccttaaccgatacaggtgcttctgacctgggcagccccggacccggctctcgacgaggcggatcccctcctacagccttttctccagcatctgagaccaccttcctgaaattcggggtgaacgccatcctgagcagtggccctaggacagagacgagccctgccctcctacagtccgtgcctccgaaaacgtttgcttttccctactttgaaggttcctttcagccattcatccgcagctcttactttcctgctagttcttccgttgtgccaattcccggcacgttttcttggcccctggccgcccgcgggaagcctcgcaggggtatgctgcgacgggcggtgttttcagacgtgcaacgcaaggcccttgagaagatgttccagaaacaaaaatatatcagcaagccagacaggaagaaattggctgccaagctaggattaaaggactctcaggatactgcaaggaggaccgagcccgcccccgatagtacccctagaccaagggcctctccaggtgcccccgatctgacctctgccagcccctttttttcgcccgcaggaacattccaggtaaagatctggtttcagaataggagaatgaagtggaggaactcaaaggagagggaattgcttagttctggtggatgcagggaacagacgttacccactaagcttaatccacatcctgacctcagtgacgtggggcagaagggcccagggaatgaagaggaggaagagggacctggatctccttcacacagactggcgtatcacgcttcctccgatccacagcacctcagagatccccgtctgccaggtcccctaccaccatcccccgcccacagctcatcgcctggaaagccgtccgatttctcagactctgaggaagaggaggagggggaagagcaggaagagatcaccgtatcttag

SEQ ID NO: 181914 - DNA, 1341 bp, synthetic construct
  misc_feature 1..1341: note = Description of Artificial Sequence: Synthetic coding sequence
  source 1..1341: mol_type = other DNA
atgggcgccggccccagctgcgacacccccgccaactgcacctaccttgatctcctggggacctgggtgtttcaagtaggatcatccggaagccagagggatgtcaactgttcagtgatgggcccacaggagaagaaagttgtggtgtatcttcagaaactcgatacggcatatgatgacctaggtaatagcgggcatttcacgattatttataatcagggctttgaaatcgttttgaatgattataaatggttcgccttctttaagtataaagaggagggcagcaaggtcaccacatattgcaacgagacgatgactgggtgggtgcacgatgtgcttggccgcaattgggcatgttttacgggtaaaaaagttggtacggcttcagaaaacgtgtatgtcaacatagcccacctgaagaattcccaggaaaagtatagtaatcggctctacaagtatgaccataattttgtgaaagccattaatgcaatccagaaatcttggaccgcaaccacctacatggagtacgaaaccttgaccctgggcgatatgattagaagatcaggcggccactccagaaagatccctcggcccaaacccgctccgctgacagccgaaattcagcaaaagatcctacatctgccaactagttgggactggagaaatgtgcacgggatcaattttgtgtcgcctgtccgcaatcaggctagttgtggctcctgctatagtttcgccagcatggggatgctggaggctcgcatcaggattctcactaacaacagccagacccctattttaagcccacaagaagtcgtctcttgctcccagtacgcgcagggttgcgagggtggtttcccctatctgatcgcgggcaaatatgctcaggatttcgggctggttgaggaagcttgtttcccatacacgggcacagacagcccgtgtaagatgaaagaagattgttttcgatattattcttctgagtaccattatgtcggtggattctatggaggttgcaatgaagctctaatgaagcttgagttagtgcaccacggtccgatggccgtggccttcgaggtttatgacgacttcctgcactataagaagggcatttatcaccacactggactacgagatccttttaatcccttcgaattgacaaaccatgcagttttgctggtggggtacggaacagatagcgcctctggaatggattactggatcgtaaaaaactcttggggaactggatggggtgaaaatggatacttcaggattaggagggggacagacgagtgtgctattgagtcaatagccgttgcggccactccaatcccaaagctgtag

SEQ ID NO: 181915 - DNA, 414 bp, synthetic construct
  misc_feature 1..414: note = Description of Artificial Sequence: Synthetic coding sequence
  source 1..414: mol_type = other DNA
atgggcgccggccccagcctgctgctggccgccctgctgctgctgctctccggagacggggccgtgagatgtgatacccctgctaattgcacttaccttgatctcctcggtacatgggtgtttcaagtgggttcctccgggtcacagcgggacgtaaattgttcggtgatgggcccgcaagaaaagaaagtcgtggtgtatctccaaaagctagacaccgcatacgatgacctaggaaacagcggacacttcactatcatatacaaccagggattcgaaattgttctgaacgattacaagtggtttgctttcttcaaagacgtgacagatttcatcagccacctttttatgcaactgggcaccgtcggcatttatgacctgccacacctgcgtaataaactggtgatcaaatag

SEQ ID NO: 181916 - DNA, 426 bp, synthetic construct
  misc_feature 1..426: note = Description of Artificial Sequence: Synthetic coding sequence
  source 1..426: mol_type = other DNA
atgggcgccggccccagcctgctgctggccgccctgctgctgctgctgtccggagacggagcagttcgctgtgatacgccagccaactgcacatacctagatctgcttgggacctgggtgtttcaggttggctccagcgggtcgcagagggacgtgaactgcagcgtcatgggcccgcaggagaaaaaggttgtggtctatttgcagaaattggacacggcttacgatgatctggggaattccggacacttcacaataatttataaccagggattcgaaatcgtgcttaatgattacaagtggttcgcattttttaaagatgtcactgactttatttcacacttatttatgcagcttggcacggtcgggatttacgacctccctcatctgcgcaacaaacttgccatgaatcgcagatggggatag

SEQ ID NO: 181917 - DNA, 1191 bp, synthetic construct
  misc_feature 1..1191: note = Description of Artificial Sequence: Synthetic coding sequence
  source 1..1191: mol_type = other DNA
atgaagaccctgctgctgctgctgctggtgctgctggagctgggcgaggctcagggatcccttcatagagttcctcttcggaggcacccatccctgaagaaaaagttgcgcgctcggagccagttgtcagagttttggaagagccacaatttggacatgatacaattcacggagagctgctccatggatcagtcagccaaagagccactgatcaactacttggacatggagtatttcggcactataagtataggttccccccctcagaacttcaccgttatcttcgatactggatcatccaacctatgggtgccgtccgtatactgcacttcccccgcatgtaagacacactcgagatttcaacccagccagagctctacctatagccagccagggcagagctttagcatccaatatggaaccggaagtcttagcggtattattggagctgaccaggtgtcagtagagggactgacggtggtcggccagcagtttggggagtcggtaactgagcccggacaaaccttcgtagatgctgagtttgacggaatccttggtcttggttacccttcgctggccgtgggcggcgtaaccccagtttttgacaacatgatggcacagaacttggtcgatcttccaatgttctctgtctacatgagcagtaatcccgagggtggggccggctctgaactgatattcggcggctacgaccactcccatttctctgggagcttgaactgggtgcctgtgaccaagcaggcttactggcagatcgcactggacaatatacaagtgggtggcactgtgatgttttgttcagaggggtgtcaggccatagtggacacggggacgtcactcattaccgggcccagtgacaagattaaacaattgcaaaacgctattggagccgcacccgtggacggagaatatgcagtggagtgtgccaatctaaatgttatgcctgatgtgacctttaccataaacggagtaccctacacattgtcgcccacagcctacacattgcttgattttgtcgatggtatgcagttctgttcatccgggtttcagggcctggatatccaccctccagcagggccattatggattctgggcgacgtcttcattcgccagttttactctgtttttgatcggggaaataatagagtgggactcgcacccgctgtgccctag

SEQ ID NO: 181918 - DNA, 1092 bp, synthetic construct
  misc_feature 1..1092: note = Description of Artificial Sequence: Synthetic coding sequence
  source 1..1092: mol_type = other DNA
atgaagaccctgctgctgctgctgctggtgctgctggagctgggcgaggctcagggaagcttacaccgcgtccctcttcgccggcacccctccctgaaaaaaaagctgcgagcaaggtctcagctctctgagttttggaagtcccataatctggatatgattcaatttacagaatcctgttcaatggatcagagtgccaaggaaccgctgattaattacctggacatggagtatttcggaacaatctccattggatctcctccgcagaacttcactgttatcttcgataccgggagcagcaacctttgggtcccttccgtttattgcacctctccagcgtgtaaaacacactcccgattccaaccatcccagagcagcacctatagtcagcccggccagagctttagcattcaatacggcacgggctcattgtctgggatcattggtgctgaccaagtcagcgtcgagggattaacggtggtgggtcaacaattcggcgagagcgtgactgagccgggccagacttttgtcgacgctgagttcgatggtatcctagggcttggctatcctagcctcgctgtgggcggtgtgacacctgtgttcgacaatatgatggctcagaaccttgtggacctgcccatgttcagtgtctacatgagttcaaacccggagggcggagctggatccgagctgatctttgggggatatgatcacagtcatttctcagggtcgctgaattgggtgcccgtgacgaagcaggcttattggcagattgcattagataacatgctgtggtctgttcccacattgacttcttgccgcatgtcaccctcacctcttacagagtcaccaattccatccgcccagctgcctactccctactggacctcatggatggagtgcagctccgcggccgtggcctttaaggatctgacatccactctgcaattaggcccctccgggagttgggggatgtcaagctttgacagtttcactcaatccctaacagtcggtataaccgtctgggattggccccagcagtcccctaaggagggaccttgcgtctgtgcctgtttgtctgacagaccctag

SEQ ID NO: 181919 - DNA, 1206 bp, synthetic construct
  misc_feature 1..1206: note = Description of Artificial Sequence: Synthetic coding sequence
  source 1..1206: mol_type = other DNA
atgaagaccctgctgctgctgctgctggtgctgctggagctgggcgaggcccagggatctttgcaccgggttcctctgcgtaggcacccaagcttgaagaaaaagctgcgggcccgctcacagctttctgagttctggaaatctcataatctcgatatgatacaatttactgaaagctgcagcatggatcagagcgccaaggaacccctgattaattatctcgacatggagtacttcggaaccatatccattgggtctccaccccagaactttactgttatcttcgacaccggctctagtaacctgtgggtaccaagtgtgtattgcaccagccctgcctgcaaaactcacagtagatttcaaccgtcccagagcagcacctactcccagccagggcaaagcttttccatccaatatggaactggctcattatctggaataattggcgcagaccaagtgagcgccttctcctatcaggtggagggcctgacagttgtggggcagcagtttggtgaaagcgtcactgagccagggcagactttcgtggatgctgagttcgacggcattcttggcctgggctacccatcactggcggtcggcggagtgacccctgtgttcgacaacatgatggcacagaatctggtcgaccttccaatgttcagtgtgtacatgagtagtaatcccgagggcggggccggctctgagctgatttttggcggttacgaccatagccactttagcggctcactgaactgggtaccagtcaccaaacaggcatactggcaaattgcactggacaacattcaggtcggtggaacagttatgttctgttcagaagggtgccaggccatcgtggacactggaacatcacttatcacaggaccaagcgataaaattaagcagcttcagaacgctattggcgccgcgcctgttgacggggagtatgccgtcgagtgcgcgaatttgaacgtgatgcctgatgtgacgttcacaatcaacggggtgccttacactctctctccaaccgcatataccctgctggactttgtcgatgggatgcagttctgctctagcggattccaaggattagacattcatcctcctgccgggcctctgtggatcctgggagacgtatttatccgccagttctacagcgtgttcgaccgcggaaataacagggtaggcttggcaccagctgtcccatag

SEQ ID NO: 181920 - DNA, 867 bp, synthetic construct
  misc_feature 1..867: note = Description of Artificial Sequence: Synthetic coding sequence
  source 1..867: mol_type = other DNA
atggagtacttcggcaccatcagcatcggcagccccccccagaactttaccgttatcttcgacaccggatcttccaacctgtgggtaccaagcgtgtactgcacatcccccgcctgtaagactcattcgagattccagcctagtcagtcttcaacatactctcaacctgggcagtcattctcaattcagtacggaacagggagtctgtccggaataatcggggccgatcaggtgtccgtcgagggcctgaccgtggtgggacagcagtttggggaatccgtgactgagccaggacagacttttgtggatgctgagtttgacggcatcctgggtctgggttatccttccttggctgtcggtggcgtgacccctgtgttcgacaatatgatggctcagaacttagtcgacctgcccatgttttctgtttacatgtccagcaatcctgaaggcggggctgggagtgaattgatttttgggggctacgatcactctcacttttccggatcactgaactgggtacctgttacgaagcaggcttattggcaaatcgccttagataacatgctttggtccgtgcctactctcacatcttgccgaatgagtccatccccgctgactgagagcccaataccgagcgctcagcttcccaccccttattggacctcttggatggagtgcagttcagctgctgtagcttttaaagacttaacgagcactctccagctggggcctagtggcagttggggcatgtcttcattcgatagctttacccaatctctaaccgtcggtatcaccgtgtgggactggcctcagcaaagtccgaaggagggcccctgcgtctgtgcctgcctgagcgacagaccatag

SEQ ID NO: 181921 - DNA, 1455 bp, synthetic construct
  misc_feature 1..1455: note = Description of Artificial Sequence: Synthetic coding sequence
  source 1..1455: mol_type = other DNA
atggccccctggctgcagctgctgagcctgctgggcctgctgcccggggcagtggctgcccccgctcagcccagggctgcatcatttcaggcgtgggggccgccaagccctgaactgttggctcctactcgattcgccctggaaatgttcaatagaggccgcgccgcagggacccgcgctgtgctcggcctggttcgaggaagagtaagacgggcaggtcagggatctctttatagccttgaggccacactcgaggaacccccttgcaatgatcccatggtgtgtcggctgccggtgtcaaagaagactcttctctgttcctttcaggtgctcgatgaattaggacggcatgtgctcttgaggaaagactgtggcccagtggataccaaggtccccggcgctggcgaacccaaatcagccttcactcagggttccgccatgatttcttcactctctcagaatcacccagataaccggaacgagactttcagcagtgtgatttcactgttgaacgaagatcctctgtcccaagacttgccggtcaaaatggccagtatattcaagaacttcgttattacatacaatcggacgtatgagtccaaagaggaggcccgctggagactctctgttttcgttaacaatatggtcagagcccagaagattcaagccctggacagaggcactgcacagtatggggtgacaaagttctctgaccttacagaggaagagttccggacgatctatcttaatacactgctgaggaaagagcctggtaacaagatgaagcaggccaagagcgttggtgatctggcccctccagaatgggactggcggagtaagggagccgtgactaaggtgaaggaccaagggatgtgcggatcttgctgggccttttcagtgaccggcaatgtggaaggccaatggttcctgaaccaaggaaccctgctcagcttatccgagcaggagttgctggactgcgataaaatggacaaggcttgtatgggcggacttcctagcaacgcctattcggcaatcaagaacctgggcggcttggagactgaggatgattattcttaccaggggcatatgcagtcctgcaatttcagcgccgaaaaagctaaagtatacatcaacgattccgtggagttaagtcaaaatgagcagaaactcgccgcctggctggcaaagaggggccccattagcgtggccattaatgcctttggtatgcagttctaccggcacggaatttccagacccttgaggcccctctgcagcccatggctcatcgaccatgctgtgctgcttgtgggttatggcaacaggagcgatgtgccattctgggctatcaagaactcatgggggaccgactggggggaaaagggttactattacctgcacagagggagcggagcatgtggagtcaatacgatggcatcatctgctgtcgtggattag

SEQ ID NO: 181922 - DNA, 675 bp, synthetic construct
  misc_feature 1..675: note = Description of Artificial Sequence: Synthetic coding sequence
  source 1..675: mol_type = other DNA
atggccgccgccgtgccccagcgggcctggaccgtggagcagctgagatccgagcaattacccaagaaggatatcataaagttcctgcaggagcatggatccgacagtttcctggcagagcacaaactgctcgggaatataaagaacgtggcgaagactgccaataaggaccatctggtaaccgcttataaccacctcttcgagaccaagagatttaagggtaccgagagcattagtaaggtgagtgagcaggtgaagaatgtcaagttaaatgaggacaagccgaaagaaacgaaatccgaggagaccctggatgagggcccgcccaagtacactaagtccgtgttgaagaagggcgataaaacaaacttccccaagaagggagatgtggtgcattgctggtatacaggcacgctccaggacggcacagtattcgacaccaacatccaaaccagcgccaagaaaaagaagaacgctaaacccctgtccttcaaggtgggagtgggaaaggttatccggggctgggacgaagctttgctgacgatgtccaaaggcgaaaaggcccgattagaaatcgaaccggagtgggcatatgggaaaaaagggcagcctgatgccaaaattcctccgaacgccaagctcacatttgaggtggaattggtggacatcgattag

SEQ ID NO: 181923 - DNA, 801 bp, synthetic construct
  misc_feature 1..801: note = Description of Artificial Sequence: Synthetic coding sequence
  source 1..801: mol_type = other DNA
atgagcagcgtgttcggcaagccccgggccggcagcggcccccagtctgcccctttggaggtcaacttggccattttagggcgcaggggagccgggaaaagtgctctcactgtcaagtttctcacgaagagattcatcagcgagtacgaccccaacctcgaagatacgtacagcagtgaggagactgtcgatcaccaaccagtccacctccgggtcatggatacagcagatctggacactcctcgaaactgtgaaagatacttaaattgggcccatgcttttctcgttgtatattctgtcgacagccgacagtccttcgactccagctcttcttacttggagctacttgccctgcacgccaaagagacacagaggagtattccagctctcctcctgggcaataagctggacatggcccagtacaggcaggtgacaaaagcggagggggtcgctttggctggtagatttggttgtctcttctttgaagtatctgcctgtttagatttcgagcacgtccagcatgtgttccatgaggctgtacgggaggcccgcagagagctggagaagagcccccttacccgacctttgtttataagcgaggagagggctctgccacatcaggcaccactcacagcaaggcatggactggcctcctgcaccttcaatacgcttagcaccataaatttgaaggaaatgcccactgtggcacaggctaaactcgtcaccgtaaaatccagcagagcacagtccaaaaggaaagcccccaccctgacgcttctcaaagggtttaagatcttctag

SEQ ID NO: 181924 - DNA, 972 bp, synthetic construct
  misc_feature 1..972: note = Description of Artificial Sequence: Synthetic coding sequence
  source 1..972: mol_type = other DNA
atgtgggccaccctgcccctgctgtgcgccgccgagctgtgcgtgaatagtctagaaaaatttcattttaagtcatggatgtcaaaacaccgaaagacatattcaaccgaggaataccaccatcgcctgcaaactttcgcttctaattggcgcaaaatcaacgcccacaataatggcaatcatacgttcaaaatggcccttaatcagttttcagacatgagcttcgccgagattaagcacaagtacctgtggtccgaaccgcagaactgtagcgcaacaaagtctaactatttaaggggaaccggaccttacccgcctagcgtcgactggcggaagaagggaaactttgttagccctgtcaagaatcagggagcttgtgggagctgctggaccttttcgacaactggcgctcttgagtctgctatagcaattgcaaccggcaagatgctttccttggcggagcaacaactcgtagactgcgcacaggatttcaacaatcatggctgccagggaggcctgccctcccaagcgtttgaatatatcctgtacaacaagggtataatgggcgaggacacgtacccttaccaagggaaagacggctactgtaagtttcagccggggaaagccattgggttcgtgaaggatgtggctaacataacgatctacgatgaagaggcgatggtcgaagctgttgccctgtacaaccccgtgtcctttgcttttgaggtgactcaggacttcatgatgtatcgcaccggaatctattcctcaacaagctgccacaaaacacctgacaaggttaaccacgcggtcctggcagtcggatatggtgagaaaaacgggattccatattggatcgtgaaaaacagctgggggccccaatggggtatgaatggctactttctgattgaacgcggaaagaacatgtgcggattggctgcctgcgccagctatccgatcccacttgtgtag

SEQ ID NO: 181925 - DNA, 621 bp, synthetic construct
  misc_feature 1..621: note = Description of Artificial Sequence: Synthetic coding sequence
  source 1..621: mol_type = other DNA
atgtgggccaccctgcccctgctgtgcgccggcgcctggctgctgggggttccagtatgtggggctgcagaactgtgtgttaactcattggaaaagtttcacttcaagagttggatgtctaagcatcgcaagacctacagcactgaggagtatcaccaccggctacagaccttcgcctccaactggcggaaaatcaatgcccataacaacggaaaccacacatttaagatggcactgaatcagttctcggacatgagttttgccgagatcaagcacaaatatctctggtcagagccacagaactgttcagctaccaagtcgaactacctgcgcgggaccggaccctacccaccctcagtggactggaggaaaaaagggaatttcgtgtctccggtgaagaaccaagtatgcttagccattagtattctctcactgcagaatggccataccccacgccaatatacacggaaaaacaattccaaaggtcctcagaaccaccacaaacacatcccagcgtctgtttcctcccggcatctgagccccggcagaccctcactccctcagctcagagaaatctgcgagggcaaacgcctcggagaggcctcggtcaatttgggatag

SEQ ID NO: 181926 - DNA, 990 bp, synthetic construct
  misc_feature 1..990: note = Description of Artificial Sequence: Synthetic coding sequence
  source 1..990: mol_type = other DNA
atgtggggcctgaaggtgctgctgctgcccgtggtgagcttcgccttgtaccccgaagaaattttggacacgcactgggagctgtggaaaaagacccacaggaaacaatataataacaaggtggatgagatctcaaggcgacttatatgggagaagaacctgaagtacatctccatacataatctcgaagcctcactaggggtgcacacttacgagctagctatgaatcatctcggggacatgacctctgaggaggtggtgcaaaagatgaccggcctcaaggttccacttagtcacagccggtctaacgatactctgtacatacctgagtgggagggtagggcacccgattcggtcgactatcgtaagaagggttacgtgacacctgttaaaaaccaaggccaatgtggatcctgttgggcttttagtagtgtgggtgcactcgagggccagcttaaaaaaaagactggaaaactgctgaacttgtctccacagaacctggtggattgcgtgtcagaaaatgatggctgcggcggtggatacatgacaaatgcattccagtatgtccagaagaaccgaggcattgattccgaggacgcgtacccttatgtcggccaggaagaatcttgtatgtataacccaacaggcaaagccgctaagtgccgcgggtatcgcgagatcccagagggcaatgagaaggcccttaaacgtgcagtagctagagtcggtcccgtttctgtcgcgatcgatgcaagcttgacttcgttccagttctacagcaaaggagtgtactatgacgaaagctgtaattcggacaatctgaatcacgccgtcctggccgttgggtacggcattcaaaagggaaataaacactggatcatcaagaattcatggggggagaactgggggaataagggctatatattaatggcgcggaacaagaacaacgcatgcggaattgccaaccttgccagctttccaaaaatgtag

SEQ ID NO: 181927 - DNA, 777 bp, synthetic construct
  misc_feature 1..777: note = Description of Artificial Sequence: Synthetic coding sequence
  source 1..777: mol_type = other DNA
atgcacaaggagaacgaggagatctacaacgtgagcgagaaccggaaacactgccctatatttccatgtcccctgctgactaggagtggaaaagtacctgagttcaggcatgaacgcgaggaacgccttgaggaaatgatcaggcgacagaatctcgacgggaacttgtcatttgttatgtgggggctaaaagtcctgctgcttccggttgtgtcttttgcactctacccagaggaaatcctggacacgcactgggagctgtggaaaaagacgcataggaagcaatacaataacaaagtagatgaaatatcccgcaggttgatatgggagaaaaacctcaagtatatatctattcacaatttggaagccagcctcggcgtacacacctatgagctcgcgatgaaccacctgggagacatgacatccgaggaggtagttcagaagatgactggcctgaaggtccctctgtcccacagtcgctcaaacgatactctgtatattcctgagtgggagggtcgtgcccctgattcagttgattaccggaaaaagggctacgttactccagtgaaaaatcaaggtcaatgcggatcttgttgggcctttagttccgtgggagctcttgaaggtcagcttaagaagaagactggcaagctgttaaacctgtcgcctcagaatttggtagattgcgtctccgagaatgacggttgtggaggggggtacatgaccaatgccttccagtatgtgcagaaaaatcgaggaattgacagtgaggactag

SEQ ID NO: 181928 - DNA, 1005 bp, synthetic construct
  misc_feature 1..1005: note = Description of Artificial Sequence: Synthetic coding sequence
  source 1..1005: mol_type = other DNA
atgaacctgagcctggtgctggccgccttctgcctgggcatcgcctcagcagtgccgaaattcgaccagaacctagatactaagtggtatcagtggaaagctacacatcgacgcctctatggggcaaatgaggaagggtggagaagagccgtctgggaaaaaaacatgaagatgatcgaactgcacaatggagaatattcccaaggaaagcatggcttcaccatggcaatgaacgcctttggagacatgaccaatgaagagttccgccagatgatgggctgtttcagaaaccagaaatttcgcaaaggcaaagtattccgggagccacttttccttgacctgccaaagtctgtggactggcggaagaagggatacgtgaccccagtaaaaaatcagaaacaatgcggttcatgctgggcatttagcgctactggcgcactggaaggccaaatgttcaggaagaccggcaagctggtgtccctttctgaacagaacctggtggattgtagtagaccccaggggaatcagggttgcaatggcgggttcatggccagagcattccaatatgtgaaggaaaacggtgggctggactccgaagaaagttacccctatgttgccgtggacgagatctgtaagtaccgtcccgaaaactctgtggcaaatgacaccggattcactgtggttgccccagggaaagagaaagcactgatgaaagcggtggccaccgtaggccccatttcagtggcgatggacgccggacattcatcatttcagttctataagtccgggatctacttcgaaccagactgctcatctaaaaacttagatcacggcgtattggtcgtgggatatggtttcgagggcgccaactcaaacaacagtaagtattggctggtaaagaatagctggggtcccgaatggggttccaatggatatgttaagatagccaaggataagaacaatcactgtgggatcgctacagcagcttcctaccctaatgtgtag

SEQ ID NO: 181929 - DNA, 1005 bp, synthetic construct
  misc_feature 1..1005: note = Description of Artificial Sequence: Synthetic coding sequence
  source 1..1005: mol_type = other DNA
atgaacctgagcctggtgctggccgccttctgcctgggcatcgcctcagcggtgcctaagtttgaccaaaacctggatactaagtggtatcagtggaaagcaacccataggagactatacggagctaacgaagagggatggcgtagggcggtctgggaaaagaacatgaagatgattgagctacacaacggcgagtactcacagggtaaacatggatttaccatggcgatgaatgcctttggagacatgaccaacgaggagtttaggcagatgatgggatgctttcggaatcagaaatttagaaaaggtaaggtctttagggaacctctgttcctggatctgcctaaaagcgtggactggcgaaagaagggctacgtaaccccggtgaaaaaccagaagcaatgcggctcatgctgggctttcagtgctactggagctctggaaggccagatgtttaggaaaactggtaagctcgtgtctctgtcggagcagaacctggtcgactgctcccgccctcagggcaatcagggatgcaacggaggcttcatggcgagggccttccaatatgttaaagagaatggtggactggattcggaagaatcctatccttatgtggcagtagatgagatttgtaagtacaggccagaaaattctgtggctaatgataccggtttcaccgtcgttgccccagggaaagagaaggcccttatgaaggccgtcgctaccgtcggcccaatctccgtagcgatggatgctgggcacagttcttttcaattctataagagtggcatatacttcgaacctgattgcagctccaagaatcttgaccacggcgtgttggtagtaggttatggcttcgagggggctaactctaacaatagcaagtactggctggtaaagaattcctggggacctgaatggggcagcaatggttatgtgaagattgcaaaagacaaaaataatcattgtggcatcgcaaccgccgcaagttaccctaacgtctag

SEQ ID NO: 181930 - DNA, 996 bp, synthetic construct
  misc_feature 1..996: note = Description of Artificial Sequence: Synthetic coding sequence
  source 1..996: mol_type = other DNA
atgaagcggctggtgtgcgtgctgctggtgtgcagcagcgccgtggcacagctccacaaggatccaaccctggatcaccattggcacctgtggaagaagacatatggaaagcaatataaggagaagaatgaagaggcggtgagaagattaatctgggaaaagaacttgaagtttgtgatgctgcataatttagagcattccatggggatgcattcttacgacctgggtatgaaccacctgggtgacatgacgtccgaagaggttatgtccctgatgagctcacttcgggtcccaagccagtggcagcgaaacataacgtacaaatctaaccctaataggatcttgcccgatagtgttgattggagagaaaaaggctgcgtcacggaagtaaagtatcaaggttcttgtggtgcctgctgggcctttagcgcagtgggggcattggaggcccaactgaagttaaagaccgggaagctggtgagcctttccgcccaaaacctcgtggactgcagcactgaaaagtacgggaataaggggtgtaatggcgggttcatgacaactgctttccaatatatcatcgataataaagggattgactccgatgcttcatatccgtacaaggcgatggaccagaaatgccagtatgattctaaataccgcgctgccacatgcagcaaatacactgagcttccgtatgggcgggaagacgttttaaaagaggcggtcgcaaacaaaggccccgtatccgttggggtggacgctagacacccatcatttttcctgtatcgcagcggcgtctactatgagccctcttgtacgcagaatgtgaaccacggcgttctggtggtcggctatggagatcttaatggcaaggaatattggctggtgaagaactcttggggccataattttggcgaggagggctacatcaggatggctaggaataaaggcaatcactgtggaattgctagtttcccgtcttaccccgagatttag

SEQ ID NO: 181931 - DNA, 846 bp, synthetic construct
  misc_feature 1..846: note = Description of Artificial Sequence: Synthetic coding sequence
  source 1..846: mol_type = other DNA
atgaagcggctggtgtgcgtgctgctggtgtgcagcagcgccgtggcccagctgcacaaggaccctacattggaccatcattggcacttgtggaagaagacctatggcaagcagtataaagagaaaaacgaagaagccgtaagaagacttatctgggaaaagaacctgaagtttgtgatgcttcataacttggaacatagcatgggcatgcattcatatgacctcgggatgaatcatttaggagacatgggctcctgcggggcctgctgggcattctctgccgtgggggctctcgaggcccagttaaagcttaagactgggaagctcgtcagcctgtcagcacagaatctggttgactgcagcacagaaaagtatggaaataagggctgcaatggaggcttcatgacaactgcattccaatacattatagataataaaggcattgactccgatgcctcatatccttacaaggccatggatcaaaagtgccaatacgatagtaaatacagagccgctacatgttccaaatataccgagctgccatacgggcgggaagatgtgctcaaggaagccgtggcaaataagggacctgtttcagtgggagtggacgcaaggcacccttccttcttcttgtatcgctcgggagtctattacgaacctagctgcacacagaacgtgaaccatggggtccttgttgtaggttacggagacctcaacggaaaggaatactggctggtgaagaattcctgggggcacaactttggggaggaagggtacatacgcatggctcggaataagggcaaccactgtggcattgccagtttcccgtcatacccggaaatctag

SEQ ID NO: 181932 - DNA, 1131 bp, synthetic construct
  misc_feature 1..1131: note = Description of Artificial Sequence: Synthetic coding sequence
  source 1..1131: mol_type = other DNA
atggccctgaccgcccaccccagctgcctgctggccctgctggtggctggcttggctcagggcattaggggtcctcttcgcgcccaggacctagggccacagcctctggagctaaaggaggctttcaagcttttccaaatacagtttaatcgctcctacttgtcaccagaggaacatgcccacagactcgacattttcgcccataatctagcccaagctcagagacttcaggaagaggacctcggtacagccgagtttggggtcacacccttcagcgacttgactgaagaagagttcggccagctctatggctaccggcgagcggccgggggagtaccttcaatgggcagagaaataaggtcagaggaacctgaggaatccgtacctttctcatgtgactggagaaaggtggcttctgcgatttctcctattaaagaccaaaagaattgcaactgctgttgggctatggcagccgccggaaacatcgaaaccttgtggcgcatcagcttttgggatttcgttgatgtttcagtacaagagctgctggattgtggaaggtgcggagatggatgtcacggtggctttgtttgggacgccttcatcactgtgctgaacaactccggtcttgcctctgaaaaggactatccctttcaaggcaaagttagagcccaccggtgtcatccaaagaagtaccagaaagttgcgtggattcaggactttattatgctgcaaaacaacgagcacagaattgctcagtacctggcaacatacggacctattaccgtaaccatcaacatgaagcctctgcagttatacagaaagggcgtgatcaaagctactcccacgacctgtgacccacagctggtcgatcactctgttctcctggttgggttcggatcagtaaagtcggaagaaggtatatgggcggagactgtctcatcccagtcacaaccccagccgccccacccgaccccttattggatacttaaaaacagttggggggcacagtggggcgagaagggctactttagactccaccggggatctaacacctgcggaatcaccaaatttccgttgaccgctcgggtgcaaaaaccagacatgaagccaagagtttcttgtcctccctag

SEQ ID NO: 181933 - DNA, 2679 bp, synthetic construct
  misc_feature 1..2679: note = Description of Artificial Sequence: Synthetic coding sequence
  source 1..2679: mol_type = other DNA
atgaccgaccccttctgcgtgggcggccggcggctgcccggcagcagtaagtccggacccggaaaagatggatctaggaaggaggtccgtctgcctatgcttcacgatccccctaaaatgggtatgcccgtggtcaggggcggccagaccgttcctggccaggctccgctgtgcttcgacccaggtagccctgcctccgataagaccgaagggaaaaagaagggaagacccaaggcggagaatcaggccctgcgtgacattcccctgtccttaatgaacgactggaaggatgaattcaaggcacacagccgagtgaaatgtccgaatagcggctgttggcttgagttcccctccatttacggactcaagtatcattatcagcggtgtcagggcggagctatctctgacaggctggcctttccctgcccattttgtgaggccgcatttacctcaaaaacccagctagaaaaacaccgcatttggaatcatatggaccgcccactgcccgcctctaagcccgggccaatctcccgacccgtgactatttccagaccggtgggcgtgagcaagccaattggggtctccaagcctgtcaccatcggaaaaccagttggggtgagcaagcccattggcatcagcaagccagtcagcgtcggtagaccgatgccagttaccaaggccataccagtaactcggccagtgcctgttacaaagcctgtcactgttagcagacctatgccagtcaccaaagctatgccagtgacgaagccgatcactgtgactaagtcagtgcctgtgacaaagcccgtgccggttacaaaaccgataaccgtgactaagcttgtgaccgtcacaaagcccgtgccagtgactaagccggtcaccgtctccagaccgattgtggtaagtaagcccgtgaccgtctctcggcctattgccatctccagacacacaccgccgtgtaaaatggtcttactgacacggtctgagaataaagccccgcgcgctacaggaagaaattctgggaaaaagcgagccgccgacagcctagatacatgtcctatacctcccaagcaggccagaccagagaacggggaatacggaccttccagcatgggccagagctccgccttccaactgtccgctgatacctcttccggctcgctgtcccccggatcccggccttccggcggaatggaggctttgaaagcagctggccctgcatctccacccgaggaggatcctgaacgcacgaaacacaggagaaagcagaaaacacccaagaagtttaccggggagcagcctagtatttctggcacgttcggactcaagggcctcgtgaaggcggaggataaggcacgcgtgcatcgcagcaagaaacaagaagggcccgggcccgaggatgctcgaaagaaagttccagcagccccaattactgtgagcaaggaggcccccgcacctgttgcccatcctgcccccggcggcccagaggagcagtggcagcgcgctatacatgagcgaggcgaagcggtgtgccccacttgtaacgtggttacccggaagacactggtggggctgaagaagcacatggaggtgtgtcagaaactgcaggacgcactcaaatgtcagcactgccggaaacaatttaaatccaaagccgggcttaattatcacaccatggccgaacatagcgctaagcccagtgacgcggaagcctcggaaggaggggaacaggaagagagggagaggcttagaaaagtcctgaagcagatgggcaggctccgatgtccccaggaaggctgcggagctgccttttccagcctgatgggctatcagtaccatcagaggcgatgtggaaagccgccatgtgaagtggattcgccatcttttccgtgcacccattgtggaaaaacctacaggtctaaggccggccacgattatcatgtgcggagcgaacatactgcgcctcctccggaggagccaaccgataagtcccccgaagcagaggatccccttggcgtagaaagaaccccctctggccgcgtgcggcgaacatccgctcaggttgccgtgttccacctgcaggaaattgctgaggacgagctcgctcgtgactggactaagcggcgcatgaaagacgatctggttccagagaccgcaagactcaactacactcgtcctggtttgccgaccctaaatcctcaactcctggaagcgtggaagaatgaagtcaaggaaaagggacacgtgaattgtccaaatgattgctgtgaagccatctactcgagcgtgtccggactgaaagcacatctcgcgagctgcagcaaaggtgcacacttggctggtaagtaccgctgtctcctctgtcctaaggaattcagctccgaaagcggtgtgaagtatcatatcttgaaaacacatgccgaaaactggtttcgaacgagtgccgatcccccaccaaagcaccgcagccaggactcgctagtcccaaagaaggagaagaaaaaaaatctcgccgggggcaagaaacgcgggcgcaagccgaaagagagaactcccgaagaacctgtggccaagctgcccccacgcagagatgattggcctccggggtgcagagataaaggcgctcgtggcagcaccggccggaaggtcggtgttagcaaggccccggaaaaatag

SEQ ID NO: 181934 - DNA, 2343 bp, synthetic construct
  misc_feature 1..2343: note = Description of Artificial Sequence: Synthetic coding sequence
  source 1..2343: mol_type = other DNA
atggaccagaacagcgtgcccgagaaggcccagaacgaggccgacaccaacaatgccgatcggtttttcaggagtcatagttccccccctcatcaccgccctggacactcgagagcgctccatcactacgaactccatcaccacggagtcccacaccagcggggagagtcacatcacccccccgaattccaggacttccacgatcaagctctgtctagtcacgttcaccagtcgcaccaccattcagaagccaggaaccacggcagggcccacggcccaaccggattcggcctggccccatcccaaggtgccgttccttcccatcgctcctatggcgaagattatcatgatgagctgcagcgtgacggccggagacatcatgacgggtctcaatatgggggtttccatcagcaaagtgacagccattatcaccggggctcccatcacggacggccccagtatctcggggagaatctgtcacattattcttctggtgtcccacatcacggcgaggccagccaccatggggggagttatctgccccacggaccaaacccatacagtgagtcgtttcaccacagcgaggcttctcatctgtccggcctgcagcacgatgaaagccaacatcaccaggttccgcaccgcgggtggcctcaccaccaccaggtgcatcaccacggcagaagccgtcaccatgaagctcaccagcacgggaagagcccgcaccacggcgaaactattagccctcactcttccgtggggagttaccaacgcggtatctctgactaccattccgaatatcaccagggtgatcatcaccctagcgaatatcatcacggggatcatccccaccacactcagcaccactaccaccaaacgcatagacaccgggactaccaccagcatcaggaccaccacggggcatatcacagtagctatctgcacggcgattacgtgcagtcaacttcacaactgagtattcctcacacctctcggtccctgatccacgacgcaccaggccccgcagcctcaagaaccggggtctttccgtatcacgtggcacatccaagggggtcggcccattcaatgacaaggtcttcatcgacgatccgaagccgagtcacgcagatgtcaaagaaggtccatacccaggatataagcactaaacactccgaagactggggaaaggaagaaggtcagttccagaagagaaaaacaggacgactgcagaggacccgcaagaaggggcacagcaccaacctgttccaatggctctgggagaagctcacattcctaatccaaggctttagggaaatgatccgaaatctaacccagagtctggctttcgaaactttcattttctttgttgtctgcttgaataccgttatgctagtggctcagacttttgctgaggttgagatcaggggcgaatggtacttcatggctctggatagcatttttttctgcatctacgtggtagaagcactcctgaagataattgccctgggcctgtcttactttttcgatttttggaacaaccttgactttttcattatggccatggcagtcttagacttcctgctgatgcagactcattccttcgctatctatcaccagtccctcttcaggatcctgaaggtgtttaagtcactgcgggccctgcgggctatccgcgtacttagacgcctcagcttcctgacttctgtacaggaagtcacagggacactggggcagagtctgcctagcatcgccgccattcttatcctgatgttcacttgcctttttctgttttccgcagtgcttagggccttgttcaggaaatcggatcccaagcgattccaaaacatatttacaaccatcttcactctcttcactctgctcaccctggatgattggagcttgatctatatggactccagggcacagggagcatggtatatcatacccatcctggttatatatattattatccagtatttcatcttcctgaatttggtgatcactgtactcgtcgactcctttcaaaccgcactgttcaaggggctggaaaaggctaagcaggaacgagccgcccgcatccaggaaaaacttctggaggattcactcaccgaattaagggctgcagagcctaaggaagtagcttccgaaggtaccatgctcaagaggctgatcgagaagaagttcggaaccatgacagaaaagcagcaggagctactattccactacctgcagctggtggcttcagtggaacaggagcaacagaagttccgctctcaggcggctgtgattgacgaaattgtggacaccacttttgaagccggagaggaagattttaggaattag

SEQ ID NO: 181935 - DNA, 1197 bp, synthetic construct
  misc_feature 1..1197: note = Description of Artificial Sequence: Synthetic coding sequence
  source 1..1197: mol_type = other DNA
atgagccagcaccggcaccagcggcacagccgggtgatcagcagctcaccagtggacactacttcggtgggattttgtcccacctttaaaaagtttaaacgcaatgacgatgaatgtcgcgccttcgttaagcgcgtgatcatgtccaggttctttaaaatcattatgatttccacagttaccagtaacgcattctttatggcactgtggacttcatacgacataaggtatcgtctgttccgactgctggagtttagcgagatcttcttcgtcagcatctgcacttcagagctgagtatgaaggtgtatgtggacccgatcaattactggaagaacggctataacctgttggacgtgatcattattatcgttatgtttctgccctatgccctgagacagctcatggggaagcagtttacatacctgtacattgcggacgggatgcagtcgctccggattctgaagctgattggctactcccaggggatccgcaccttgattacagccgtgggacagacagtttacactgtggcctccgtgctcctgcttttgtttctcctgatgtacatcttcgctattctagggttttgcctcttcggcagccccgacaatggagaccacgataactgggggaatctggccgcagccttcttcactttgttctctttggccacagtcgatggttggacagacctccaaaagcagttggacaaccgagagttcgcacttagcagagcctttaccattatcttcattctgctcgcaagtttcatttttctgaacatgtttgtgggggttatgattatgcacacggaagacagtatacgtaaattcgaaagggagctgatgctggagcagcaagaaatgttgatgggcgagaagcaggtgattctccagcgtcagcaggaagaaatcagtagactgatgcacatacagaagaacgctgactgtacctcatttagcgaactggtggagaactttaagaagaccctatctcacaccgaccccatggttctcgacgacttcgggacaagtcttccgttcattgatatatactttagcaccctggattatcaggatacaactgttcataaactacaggaactgtactacgaaatcgtgcacgttctgtcgctgatgttagaggacctccctcaggaaaagccccaatccctggagaaggtggacgaaaaatag

SEQ ID NO: 181936 - DNA, 1419 bp, synthetic construct
  misc_feature 1..1419: note = Description of Artificial Sequence: Synthetic coding sequence
  source 1..1419: mol_type = other DNA
atgcgggacaacgagaaggcctggtggcagcagtggaccagccacaccgggctcgaaggctggggaggtacccaggaagatcggatgggcttcggaggggcagttgcagcacttcgtggccggccttcccccctccaaagtaccatccatgaatcgtacggtaggcctgaggaacaggtgcttatcaatcgacaggagatcaccaataaagccgacgcttgggacatgcaggagttcatcacacacatgtatattaagcagttgcttaggcacccggcattccagctccttctggcattgctgctcgtgattaatgctataacaattgcccttcggacgaacagctacctcgaccaaaaacattatgaattgttcagcactattgacgacatcgtgctgacaattcttctctgcgaagtgctgctaggctggctcaatgggttctggatcttctggaaggatggatggaacatcttgaatttcattatcgtgttcatcctccttttgcggttctttatcaatgaaataaatatccccagcattaattatacgctgagagctctgcgattagtgcatgtgtgtatggccgtcgagcccctcgcacgtattatacgggtgatcctacagtctgtgcccgacatggccaacattatggtgttgattctgttttttatgctcgtgttttccgtcttcggagtgaccctgtttggcgcatttgtcccgaagcacttccagaatatccaagtggccctctacacgctcttcatctgcattacacaagatggatgggtcgacatctattcggattttcagacagaaaaaagggaatacgctatggagatcggtggcgctatatacttcacaatttttataacaattggagcgttcatcgggattaacttgttcgtcattgttgtaaccacaaatttagaacaaatgatgaaggcgggggaacagggtcagcagcagcggatcacattttctgaaactggcgccgaggaggaggaggaaaatgaccagcttcccctcgtccactgcgtggttgctcggagtgagaaatctggcttactccaggaaccattggcgggcgggccgctctcaaacctgagcgagaacacatgcgataatttttgcctggtgctagaggccatccaggagaaccttcgtcaatacaaagaaattcgagatgagttgaacatgattgtggaggaggtgcgtgcgatcaggtttaaccaggagcaggagtccgaagtgcttaaccggaggagcagcacttccgggagtttggagaccacgagcagtaaggacatcaggcagatgtcacagcaacaagatctgctcagtgcactggtgagcatggaaaaagtccacgactcgtcctctcagattctgttgaaaaaacacaagtccagccactag

SEQ ID NO: 181937 - DNA, 3351 bp, synthetic construct
  misc_feature 1..3351: note = Description of Artificial Sequence: Synthetic coding sequence
  source 1..3351: mol_type = other DNA
atggagagccccctgatctacgtgagcgtgctgctgctgaacatcttcgagtttagtagcggcattgtttacaacaaggatgatacggagaaaaggttcgcttgctccaacaaggggtttcctcaagagaacgagatcatcaagctttacctttttctagagaaccttaaaatccagtgtttcttccaaacagaaaacgaaattgcatcgaaggctatgctgagcgtgttcacttccggtggcctcgccccctccctcggcatcatgaattccacctacaacgggatctttcacttcaacttgacccttttcagcgatcgcattctatggctggttgatattccacgtgagaacatcactcagagcaccgatatcgccgccgtggaggaatggctggtcaggatcacactgcaccacggtctgaacatatacgcgacagaggggaccctgctggacgtcattcgagaacccatcctacagtggacaccgggggacgttatcccggagagcgaaataagcaagctgtatccccatgtggtggaccttaaagtgacaaagtgtccctgtgccaacgacgtagctctcctcggcttcatagtcgacaccatcgtggacggtgtgtacattggtataacatttgggggattctggcatgactacgatacgacgtggttcaatatgacgcagacaatttacagccaacttcaggaggaatacgaggatctgagcctcgtagacatggtgcttacgaaccactttctggtgatccttactagcctcggcctcttcgtatccgaggatctccgttacccttctagacatagtcttagcttcagtcgggccgacttctgcgggtttgaaagagttgattacgtgaaaggtaagctgtggtacaatgaacggtgctttgcaaacagggagcacttcgaagtggactatgtgacagtgaccttcgagcggaatcggacgttatccgaaagtagctcttgcttttattcacaggagccatttctcgagtgggtcccctgcctcccacatatctttaaagggataaagatttttccaacagtgctcactttcctagttgatcaggaaagaggcacgggggtatacctcttctataacaaggtacggaaaactgccattgctagcgtcagtaccctgagaaataacgaacccaacagccagagtaagtttcccattttccgattccccagttccttcagttcaccagtaggcatggtgttccacccgcgatcacatttcctttatgcgtacgggaaccagatctggctatcagtcgacggtggtaacacttttcagcttattgcaaatttccatgatgatatcattaaaaagacattccactcattctatactagcgccattaccttcgtaagccagaggggcaaagtttacagcaccaaggctgggatggggcggtattctgccgttggctcggtcaccgaacggatcttcactctttactatgatcatctgggatttctacataagctcactctggggcgcttcgaagccagcggaccaccgactgcatttggtaacagtagaaacttgtttggacagccaccagacatgggcttcgagacagccttggccccgcagcatacttctctagacgaaataatattcttcgcttacgtgcctgaaaacgagccacaggagacaatttacagcaagaagtttggcaatatccattacggaaaggtcattcatagcgggaaaactggacgcgcatatatcaggaaggttctccagcacacaacaccgaaaggttttctttcctctgtgattgctgagatgaaagaaccctttgggcttgaggaagtgaatgagagttcgtgcttatctagcagcctactgattaataaagctggcaacgtttacaaactgactttagactcccaggtggtgcaagctctgttcgaggatacagatattgagaaaacagttgtcttgccaggatatagtagctttctgatcacttctattcttgataacaagaatgcactggccattgcgaccatgcctgagtcggctcctaataacatgacgttcttgaagtccacctggttcctctacaattttggccagcggaacgggagaacttggaagatttattctaaaccatgcaattactggttccaacacgacgactctccgtccctcaatattgtgaagtacatcgatctcggcaactcttatgtcctgaaagcaaaggttatcagaaacgctaaaggctttagaatgttagagatcccactgctcaccgtgttcgttggaaaccccaacctccttgaggtgaccgcagaggtcaccttcgatgatacagacagttacgtgatcaccatttccgccgcatcaaaggtgctgcatcaaggcagtacctcacttgctttcatcatgtggtcggccagtaccgagtgtttcgtgacaactatggtgcctaccctgaagtcgtcctgtagttacctcaggagcatgcatcacataccatccaagtttataccgtttgaggattggattagcggagtacacaaagatagccagggtttcaacctcattaagaccctgcccattaactatagacctcccagcaatatgggcattgccatccctctgaccgacaatttctatcacgcggacccttccaaaccgatccctcgaaacatgtttcacatgagcaaaaagactggcaaatttaagcagtgcgcaaacgtatccacaagggaggaatgtaattgcactaaggaccagaaatttagtcatgccgtagccttttcggactgccgggagaaagtgccacgttttaagtttccgattacccagtatcctgtatccctagaaattataaatgaagatggcagagtcccgctgcaatccccttatctagttaccgtgaccgaagtgaatatgcgccataattggaaattgaagcatacagtccctgaaaacatcaaacggatgaagcagctggtggagccgatcctgggggccgccgtgtacaaccctagcggactcaatcttagtatcaagggaagtgagcttttccacttcagggtgaccgttatcagcggtgtaactttctgtaacttgatagaggagttccagatttatgtggatgaagcccccctacctttccctggacatactctaattgcagtggcaacggcggtggtcctgggcggcctcatttttattgcttttatgttccaactgcaaggcatccatccctggcggacgttccagcggtggattagacgcaaccaggaaaagtttagctccattagtctcagcgagctgatccataggtctaagtctgaagagtag

SEQ ID NO: 181938 - DNA, 225 bp, synthetic construct
  misc_feature 1..225: note = Description of Artificial Sequence: Synthetic coding sequence
  source 1..225: mol_type = other DNA
atggagagccccctgatctacgtgagcgtgctgctgctgaacatcttcgaattctcaagcggaattgtctataacaaagacgacaccgaaaagcgatttgcttgctccaataaagggtttcctcaggagaatgaaattatcaaattatacttatttttggaaaaccttaaaatccaatgttttttccagacagaaaatgagattgcgagtaaggcgatgctctag

SEQ ID NO: 181939 - DNA, 303 bp, synthetic construct
  misc_feature 1..303: note = Description of Artificial Sequence: Synthetic coding sequence
  source 1..303: mol_type = other DNA
atggagagccccctgatctacgtgagcgtgctgctgctgaacatctttgagttcagctccggcatcgtatataacaaagatgataccgagaaacgctttgcttgctctaacaaaggtttcccccaggagaatgaaatcattaagctgtacctttttctggaaaatctgaaaatacagtgcttttttcagaccgaaaacgaaatcgcctctaaagctatgcttagtgtttttacttctggaggtctagccccatctttgggaattatgaactccacctataatggaatcttccacttcaattag

SEQ ID NO: 181940 - DNA, 225 bp, synthetic construct
  misc_feature 1..225: note = Description of Artificial Sequence: Synthetic coding sequence
  source 1..225: mol_type = other DNA
atggagagccccctgatctacgtgagcgtgctgctgctgaacatcttcgaatttagctcagggatcgtctataataaagacgatactgaaaaaaggttcgcttgcagtaataagggatttcctcaagaaaacgaaattattaaactctacctcttcctagagaacctgaagatccagtgctttttccagaccgagaacgagattgcaagcaaagcaatgttgtag

SEQ ID NO: 181941 - DNA, 795 bp, synthetic construct
  misc_feature 1..795: note = Description of Artificial Sequence: Synthetic coding sequence
  source 1..795: mol_type = other DNA
atgcacaaccccgacggcagcgccagccccaccgccgaccccggcagcgaactgcagaccctcgggcaggccgcccgccggccacccccaccgcgagcaggacacgatgctccccgcagaaccagaccttcagcgcgaaagccgttatcctgtttttctcgaagacctatgccaaccagggagcctcctaagacaagaggttctagaggacacttgcacacacaccccccgggacccggtcctcctctgcagggactcgcaccaaggggtttgaagacatccgcccccaggcccccttgccaaccgcagcctgggccacacaaagctaaaaccaaaaaaatcgtatttgaagacgaactgttgagccaagctctgctgggggcaaagaaacccataggcgcaatcccaaagggacacaagcctaggccgcatcctgtcccggattacgaactgaagtaccctcccgttagtagtgagagagagcgttcccggtacgtggctgtgtttcaggaccagtacggcgagttcttagaactgcagcatgaagtcggctgtgcccaagcaaagcttagacagttggaggctttgcttagctcactgcctccacctcaaagtcagaaggaggcccaggtggccgcgagggtttggcgcgaattcgagatgaagagaatggacccagggtttctggataagcaagcgagatgtcattacctgaaaggcaaacttcgacaccttaagacacaaatacagaagttcgacgaccagggtgatagcgaagggtctgtgtacttttag

SEQ ID NO: 181942 - DNA, 3480 bp, synthetic construct
  misc_feature 1..3480: note = Description of Artificial Sequence: Synthetic coding sequence
  source 1..3480: mol_type = other DNA
atgtgcggccccgccatgttccccgccggccccccctggccccgggtgagagtcgtccaggtactatgggccctgttggccgtcttactcgccagctggcggctctgggccattaaagactttcaggagtgtacatggcaggtggtactgaatgaattcaaaagggttggtgaaagtggcgtgtccgactctttctttgagcaggagcccgttgacaccgtgagtagcctgtttcacatgcttgtggatagtcccatcgacccatccgaaaagtacctggggttcccgtattatctgaagattaactactcatgtgaggagaagccgtcagaggacctggtgaggatgggacacctcaccggactcaagcctctcgtgctggtcacttttcagtcccctgttaatttctatcggtggaagatcgagcagttacaaattcagatggaggctgcacccttccgctctaaagagccctgtatggccgaggaagtatgttccatgagttggtacacaccgatgccgatcaagaaaggttccgtggttatgagagtcgatatttcctctaatggactgggtacattcattccagacaagcggttccaaatgaatatcaacgggttcttgaagcgggacagggataataacatccagtttaccgtgggcgaagaactgttcaacctaatgcctcaatactttgttggagtgtctagtaggcctctgtggcatactgttgaccagagtcccgtccttatcctgggtgggatccccaacgaaaaatacgttctgatgacagacaccagctttaaagacttcagcctggtcgagctgagtatcgactcttgttgggttggatccttttactgtccccactctggcttcactgcgacaatctacgacaccatagcgacagagtctaccctgttcatcaggcagaatcagctggtatattatttcactgggacctacaccacactgtacgagaggaaccggggttctggcagctggattagagttctagctagcgaatgcataaaaaagctatgtccggtttactttcattctaatgggtccgagtacatcatggccctaactacagggaagcacgagggatatgtccactttggcaccatccgtgacgggcaagtgagtttcgagatgctacctaggcagtggagtgtatgcgaacaaatcggcgttacgacctgcagtatcatctggtcagaatacatcgccggcgagtataccctgttgctactggtcgaatcagggtatggcaatgcttctaagagattccaggtggtgagctataatacggcttcggatgacctggaattactgtaccatataccagagttcattcccgaggcccgtggcctggagttcctgatgatcctcgggacagaatcttatacttccaccgctatggcccctaagggaatcttttgtaacccatacaataacttgatttttatctggggaaacttcttgctgcagagcagcaacaaggagaacttcatctacctggctgactttccaaaagagctgagtatcaagtatatggccagaagtttccgcggtgccgtcgccattgtgacggagacagaagagatttggtatctgctggaaggctcctatagggtgtatcagctctttccaagtaaggggtggcaagtgcacataagcctgaaactgatgcagcagtcttccctgtatgcgtctaacgagacgatgctgaccctcttttatgaggatagcaaattgtaccagctcgtctatttgatgaataatcagaaggggcagctggtgaaaaggctggtgccagttgagcaacttctcatgtaccagcagcatacttctcactacgatctggagagaaaaggcggatatctgatgttgagcttcatagatttctgtccattttccgtcatgcggcttagatccctaccttcacctcagaggtataccaggcaggagagatatcgggcaagacccccccgtgtattagagcgaagtggattccacaacgaaaactcattggccatttaccaggggctggtatactatctcctgtggctccattccgtgtatgacaagccatatgctgaccctgttcatgatccaacttggcgctggtgggcgaataataagcaggatcaggattactactttttcctggcaagcaattggcgatcagcagggggggtttctattgaaatggattcttacgagaaaatctataacctcgaaagtgcatatgaattacccgagcgaatctttctcgacaaagggacagaatattcttttgccatattccttagcgctcagggccattcctttaggactcagtcagagttggggactgctttccaacttcattcccaggtagacgtcggtgtggtgctcgctgatcccggctgtatagaagcatccgttaaacaggaggtcctcataaatagaaactccgtgctctttagtatcactttaaaagataagaagttatgttacgaccagggcatttcaggtcaccacctgatggagacatctatgacagtaaacgtagtgggatcaagtggcctctgtttccaagagacacacctgggtccacacatgcagggcaacttgatggtgcccgtattcatcggttgccctcctggtaaacggctggccttcgacatcacttacacactggagtatagccgactgaaaaacaaacattatttcgactgtgttaatgtgaatcctgagatgccatgctttctgtttcgagacattttttacccattttttctgatccaggatcttgttactggcgactccgggtccttccaaggttcttacgtgttgctggttgtggggggaggacctactctagacagtttgaaggattacagcgaagatgagatatacagattcaactcacctttagataagaccaattctctgatttggactacacgaactacacgaactactaaggactcagccttccacatcatgagccatgaaagccctggaatagaatggctgtgtctggagaatgccccatgttatgataatgtgcctcagggcatttttgccccagaattttttttcaaggttctcgtgtctaatcgaggcgtggacaccagtacatattgcaactaccagctcacattcctcctgcacatacatggcttaccactatcgcctaagagagcccttttcataatcatggttagcgcctccgtgtttgtcgggctggtgatcttctatattgccttctgtttgctttggcctctggtggtgaagggttgcactatgatcagatggaaaataaacaacctaatagccagtgagtcatattacacgtatgcctctatttccggtatctcgtcaatgccttctctgagacactcccgtatggggtctatgttctcttcacggatgacggaggatagggccgaacctaaggaggcagtggaaagacagctgatgacatag

SEQ ID NO: 181943 - DNA, 3480 bp, synthetic construct
  misc_feature 1..3480: note = Description of Artificial Sequence: Synthetic coding sequence
  source 1..3480: mol_type = other DNA
atgtgcggccccgccatgttccccgccggccccccctggccccgggtcagggtcgtccaggtgctttgggcgcttctcgcggtcttattggcctcttggcggttgtgggctatcaaggactttcaggagtgcacctggcaagtcgtgcttaatgagttcaagcgcgtcggggagtccggcgtaagcgacagctttttcgagcaagaaccggtcgataccgtttcttcgcttttccatatgctggtggactctccaatcgaccctagtgaaaagtatctgggattcccttattatctgaagattaactatagttgtgaagaaaaaccgtctgaggatctggtccggatgggtcacttaaccggactgaaaccactcgttctggtcactttccaatccccagtgaatttctatcgttggaagatcgagcagctccagattcagatggaggctgcgccgttccgctctaaggaaccttgtatggccgaggaagtttgttctatgtcttggtatacacctatgcccataaagaaggggagcgtagtcatgcgagtcgatatctcgagcaatgggctgggaacattcatcccggacaagcggttccagatgaacattaacgggtttcttaagcgcgatcgggataataacatacaatttacagtcggtgaggaattatttaaccttatgcctcaatatttcgtaggggtgtcttcacggcccctatggcacaccgtagatcaatcaccagtgctaattcttggtggtatccccaacgagaagtatgtgctgatgacggacacctccttcaaggactttagcctggttgaattatccattgattcttgctgggttgggtcattttactgcccccattcaggtttcacagcgacaatctacgacacgatcgcgacggagagtactctgttcattagacagaaccaactcgtgtattattttacaggcacctataccactttgtacgaacgcaacagggggtccggaagttggatacgcgtgctcgccagtgaatgcataaagaagttgtgtcccgtatatttccattccaacgggtccgagtacatcatggcccttaccacaggaaagcacgaaggttacgttcactttggcactattagagacggccaggtgtctttcgagatgcttccgcgccagtggagtgtctgtgagcagattggcgtgactacatgttctattatttggtccgagtatattgcaggcgagtacaccctgcttctcctcgtggagtcaggttatggtaacgcctcaaaacgcttccaggtggtttcctataatacagcaagtgatgaccttgaactgctttatcatattccagagtttataccggaagctagggggctggagtttctcatgatcctgggaacagagtcctacacctctactgccatggctcccaagggcatcttctgtaacccttataataacctaattttcatctggggcaacttcctcctccagagctcaaataaagagaatttcatttaccttgctgacttccccaaagaactttcaatcaagtacatggcaagatcctttcggggcgccgtggccatagtgacagagacggaggagatctggtacctactggaaggaagttaccgcgtgtatcaactctttccctctaaagggtggcaagtgcacatttccctgaagcttatgcagcaatcatccctgtacgctagcaatgaaacgatgttaacactcttctacgaagatagtaaactgtaccaactggtttatttgatgaataatcagaagggccagctggttaagagactagtccctgtggagcagctcctgatgtatcaacaacacacttcacattacgatctggagcggaagggggggtatttaatgctgagtttcattgacttctgtccattttcagtgatgaggctcagaagtctcccttctccccaacgatatacacgtcaagaacgttatcgggcgcgcccacccagagtgctggaacggtctggtttccacaatgaaaatagcctagccatttatcaggggttggtgtactaccttctttggcttcactccgtgtacgataagccttacgccgatccagttcatgatccaacgtggagatggtgggccaataacaaacaagatcaggattattactttttcctcgccagcaattggcgcagtgcaggtggggtttctattgagatggactcttacgaaaagatctataacctggagtccgcttatgagctcccggagcgcatatttctagacaaggggacggagtattcatttgccatctttctcagtgcacagggacacagttttagaacgcaatccgagctgggtacggcttttcagctgcattcgcaagttgacgtgggcgtagtgttagcagatcctggatgcatcgaggcatcggttaagcaggaggtcctgattaaccggaactcagtcctattctccattacccttaaggacaaaaagctgtgttacgaccaagggatttcagggcaccatctgatggagacctccatgactgtgaacgtagtcgggtccagcggcctctgctttcaggagacacatttaggcccacatatgcaggggaacctgatggtccctgtgttcattggctgccccccaggaaaacgcctggcctttgatataacttacaccttggaatacagtagacttaagaacaaacactatttcgactgcgtgaacgttaacccagaaatgccctgctttctgttccgcgatattttttatccattttttctcatccaggatctggtgaccggggatagcggctctttccaaggctcctatgtattgctcgtagtggggggaggacccactctggatagcctcaaggactatagtgaagacgagatttaccgatttaatagtcccctggataagacgaacagtctgatttggaccactcgtaccactcgaacaaccaaggatagcgcatttcacatcatgagccacgagtcacctggcatcgagtggctttgtctggaaaacgccccctgctatgacaacgtgccacagggaatttttgcccccgagttctttttcaaagtgcttgtgagcaaccggggtgtagatacaagcacttactgcaattaccagttgacctttctgctgcatattcatggtctgccactaagccctaaacgggctctgttcattataatggtgtctgccagtgtctttgtggggctcgtgatattctatatagccttttgtttgctgtggccccttgtggttaagggctgtaccatgataagatggaagattaataacctcattgcttccgagagctactatacatacgcctccattagcggcatcagcagcatgccttcactacgccatagccgaatgggatccatgttttcctctagaatgacagaagatagagccgagcctaaagaagcagtcgagcgccagctgatgacctag

SEQ ID NO: 181944 - DNA, 1983 bp, synthetic construct
  misc_feature 1..1983: note = Description of Artificial Sequence: Synthetic coding sequence
  source 1..1983: mol_type = other DNA
atggacgtgctggtgagcgagtgcagcgcccggctgctgcagcaggaagaagagatcaaaagcttgaccgctgagattgacagactgaagaattgtggctgtctcggggcttcccccaatcttgagcagctccaggaagaaaacctgaagctgaaatacagactcaatattctacggaagtcactgcaagcggagaggaataaaccgactaaaaacatgattaacatcatctcaaggttgcaagaagtgttcggacacgcgataaaagccgcctacccggatctggaaaacccaccgttgctggtgactccctcccagcaagccaagtttggcgactatcaatgtaactcagcgatggggatttctcagatgcttaaaacgaaagaacaaaaagtcaaccctagagagattgctgaaaatatcaccaaacaccttcctgataacgaatgtatcgagaaggttgaaatcgctgggccgggcttcattaatgttcacctccggaaggactttgtgagtgagcagctgaccagcttgctggtgaacggagtgcagctccccgccctcggggaaaacaagaaggtcatcgtggatttcagcagccccaacatcgctaaagagatgcacgttggccacctgaggtccaccatcatcggggagagcatctccaggctcttcgaattcgcgggctatgacgtcttgaggctaaaccacgttggggactggggaacccagttcggaatgttgatagcccatctccaggacaaattcccagattatttaactgtgagtcctccgatcggggacctccaagtgttttacaaagaatctaagaagcgcttcgacacagaggaggagttcaagaagagagcctaccagtgtgtggtgctgttgcagggcaaaaaccccgatatcactaaagcctggaagctgatctgcgacgtgtccagacaggagctcaacaagatatatgacgccctcgacgtctctctgatcgaaaggggagagagcttttaccaggataggatgaacgacattgttaaggagttcgaggatcgcggcttcgtgcaggtggatgatggaaggaagattgtctttgtccccggctgttcaatcccgcttacaattgtgaagagcgatggagggtatacctacgacacctcagatctggccgccattaaacaaaggctgttcgaagagaaggctgacatgatcatttatgtggttgacaatggccagtccgtccatttccagactattttcgcagccgctcaaatgatcggctggtatgatcctaaagtgacgcgcgtcttccatgctggattcggggtcgtgttgggcgaagacaaaaaaaagtttaaaacccgttccggagagactgtacgacttatggatctgctgggagagggcctcaaaagatccatggataaactgaaagaaaaagagcgtgacaaagttttgaccgctgaagaacttaacgctgcacagacatccgtggcttacggatgcattaaatacgctgatctgtcgcacaataggctaaatgactatatcttttccttcgacaagatgctcgacgatagaggcaacactgctgcttacctcctctatgcctttacccggatccgttctattgcacggctggcaaatatcgacgaagaaatgctgcaaaaagcagcccgagagaccaagatcctcctcgatcacgagaaagagtggaagctgggaaggtgcattctccgattccctgagatcctccagaagattctcgacgatcttttcctgcatacactgtgcgactacatttacgaactcgccacagcctttacagaattctatgactcctgctactgcgtggagaaggatcgtcagacagggaagatattgaaggtcaatatgtggaggatgctgctgtgcgaggccgtggcggctgtcatggctaagggctttgatatcctgggcattaaaccggtccagaggatgtag

SEQ ID NO: 181945 - DNA, 465 bp, synthetic construct
  misc_feature 1..465: note = Description of Artificial Sequence: Synthetic coding sequence
  source 1..465: mol_type = other DNA
atgtgctggacccggatccggcccggcacccccagcagccccggcgcacaaaggcccactccgtacgaatggatgagaaggagcgtggctgccggcggcggaggtggttctggtaaaaccagaactaaagacaagtacagagtggtttacacggaccaccagcgcttggagctggaaaaagaattccactatagcaggtacataaccataaggcgtaaatctgaactggctgccaatctaggactgaccgagcgtcaggtaaagatctggtttcagaataggcgcgctaaggagcgaaaggtcaacaagaaaaagcagcagcaacaacagccgcctcagcccccaatggcacatgacatcacagccacccccgccggcccaagcctcggtggcctgtgcccttctaatacatcacttctcgccacgtccagccctatgccagtaaaagaggagttcctcccctag

SEQ ID NO: 181946 - DNA, 183 bp, synthetic construct
  misc_feature 1..183: note = Description of Artificial Sequence: Synthetic coding sequence
  source 1..183: mol_type = other DNA
atgcggggcggcccccggggccaccacgtgtgcggcctgtgcgccggccagggttttgccagagtgccacgccctagccaggccagccaaccgcgaccaggccctgcatctctgtgtccatcaaatactagcttgctcgctacatcttcacccatgcccgttaaggaagaattcctgccatag

SEQ ID NO: 181947 - DNA, 942 bp, synthetic construct
  misc_feature 1..942: note = Description of Artificial Sequence: Synthetic coding sequence
  source 1..942: mol_type = other DNA
atgtacgtgagctacctgctggacaaggacgtgagcatgtacccctcgtccgtgagacactcaggagggctgaatctagcaccccagaattttgtgtcgcccccccagtatcccgattacggtggatatcacgtggccgcagccgctgcagcagccgcaaatctggattctgcacaaagtccggggccatcttggcctgccgcttacggggccccacttcgagaggactggaatggatacgctcctgggggcgccgccgcagctgccaatgcggttgctcatggattgaatggtgggtctccagccgcagcaatgggatacagcagcccagctgattaccacccccatcatcaccctcaccaccatccccatcaccctgccgccgctcccagttgtgcctctggtctgctccagaccctcaacccgggcccaccagggccagcagcaaccgcggctgccgagcaattatcccccggcgggcaaagaaggaatctttgcgaatggatgcgcaagcccgcacagcaaagcctcgggtctcaggtcaaaacacgcaccaaggataagtacagggtcgtgtatacagaccaccagcggctggaactggagaaggagttccattactccaggtacattactattcgcaggaaggccgaattggccgccactttaggcctgtcagagcgccaagtcaaaatctggttccaaaaccggcgcgctaaagaaaggaagatcaataagaagaaactgcagcagcagcagcagcagcagccccctcaaccgcccccacccccccctcagcctcctcaaccgcagcctggaccactcagatcagtgcccgaacccctgtcccccgtcagctccttgcaggcatcggtccccggctcggtccctggagtgctggggcctacgggcggtgtgctgaatccaactgtgactcagtag

SEQ ID NO: 181948 - DNA, 855 bp, synthetic construct
  misc_feature 1..855: note = Description of Artificial Sequence: Synthetic coding sequence
  source 1..855: mol_type = other DNA
atgtacggcagctgcctgctggagaaggaggccggcatgtaccccggcacgctgatgtcacccggcggcgacggcactgccgggactgggggaacaggtggggggggcagccctatgcccgctagcaacttcgccgctgcccctgcattcagccattatatgggctaccctcacatgcccagcatggatccccattggccatccttgggagtctggggttcaccttactcccccccccgggaagactggagtgtgtatcccggacctagtagcacaatgggcaccgtccccgtgaatgatgtaacgtcaagccctgccgcattctgcagcaccgactactcaaacctcgggcctgtgggcgggggaacaagcggttcaagccttcccggacaggctggcgggtcgctagtgcctaccgacgcgggtgctgccaaagcatcctcacccagtaggtcgcgacactcaccctacgcttggatgaggaagacagtccaggtgaccggaaagacccgcactaaagagaagtatcgagtggtgtatacagatcaccagcggctggagttagagaaggagttccattgcaatcgctacatcacaatccaacggaagagcgagttagcagtcaatctgggactttctgagcgacaggtcaagatttggttccaaaatagaagggcaaaggagagaaagatgatcaagaaaaaaatcagccagttcgagaattccggaggaagcgtccagagtgacagtgatagcatctcacccggcgagctgccgaacacattttttaccactccctccgctgtgaggggcttccaacctatagagatccagcaagtcattgtgtcggagtag

SEQ ID NO: 181949 - DNA, 456 bp, synthetic construct
  misc_feature 1..456: note = Description of Artificial Sequence: Synthetic coding sequence
  source 1..456: mol_type = other DNA
atgatggccgaggagcacaccgacctggaggcccagatcgtgaaggatatccattgcaaggagattgacttggtaaatagagatcctaaaaacatcaacgaggatattgtgaaagtcgacttcgaggatgtcatcgctgaacctgtgggaacttattcgtttgacggggtgtggaaagtgtcctatacgacatttaccgtgtccaaatattggtgctaccgtctcctctcaacactactgggagttcccctcgccctcctgtgggggttcctttttgcatgcatcagcttttgccacatctgggccgtggtaccatgcatcaagtcctatcttattgagattcagtgtatttcccacatttattcactgtgtatccgcaccttttgcaatcccctgtttgctgccctcggtcaagtgtgttcaagtatcaaggtcgtccttcggaaagaggtgtag

SEQ ID NO: 181950 - DNA, 456 bp, synthetic construct
  misc_feature 1..456: note = Description of Artificial Sequence: Synthetic coding sequence
  source 1..456: mol_type = other DNA
atgatggccgaggagcacaccgacctggaggcccagatcgtgaaggatatccactgtaaggagatcgacctcgtgaaccgtgacccaaaaaacataaacgaggatatcgttaaagtggactttgaggatgtcatcgccgagcctgtcggcacctatagcttcgacggtgtctggaaggtgtcttacactacattcactgtcagcaagtattggtgctatagactcctctcaaccctcctcggggtgcctttggctcttctctggggctttcttttcgcatgcatcagtttctgccatatctgggctgtggtgccatgcatcaaatcgtacctcatcgaaatccagtgtatcagtcatatatactccttgtgcatcaggactttctgtaatcctctatttgctgccttgggtcaggtatgtagtagcattaaggtcgtactgcggaaggaagtttag

SEQ ID NO: 181951 - DNA, 813 bp, synthetic construct
  misc_feature 1..813: note = Description of Artificial Sequence: Synthetic coding sequence
  source 1..813: mol_type = other DNA
atggccgaccacatgatggccatgaaccacggccggttccccgacgggacaaatgggcttcatcaccatccagcgcaccggatgggcatgggtcagtttccctcgccgcaccaccaccagcaacagcagcctcagcatgctttcaacgcactgatgggcgagcatattcattatggcgctggtaacatgaacgcgacatcaggtataagacatgcaatgggacctggcacagttaacggcgggcaccctccttccgctctggcccccgctgcacgctttaataattcccagtttatgggacccccagtagcctcccaggggggcagtctccctgcctctatgcaactgcagaaactcaataaccagtacttcaaccaccatccctatcctcataatcattacatgcctgatctgcacccagctgcaggtcaccagatgaacggtaccaatcaacactttcgcgactgtaatcctaaacacagtggagggagcagcacccccggcggatccggcgggagcagcacacctggaggtagcggttcaagctcaggcgggggagccgggtctagcaatagcggaggcggaagtggaagcgggaatatgcccgcgtccgtcgcccacgtgcccgctgcaatgctccctcctaatgtcatcgacaccgacttcatagatgaagaggtccttatgagcctagtgattgagatgggactggatcgaataaaggaacttcccgagctgtggttgggacagaatgaattcgactttatgaccgacttcgtatgtaaacagcaaccctcgagagtctcttgctag

SEQ ID NO: 181952 - DNA, 645 bp, synthetic construct
  misc_feature 1..645: note = Description of Artificial Sequence: Synthetic coding sequence
  source 1..645: mol_type = other DNA
atggccgaccacatgatggccatgaaccacggccggttccccgacggaactaatggcttgcatcaccacccagcgcacaggatggggatgggccagttcccaagcccgcatcatcaccagcagcaacaaccccagcatgccttcaacgccctcatgggggagcatattcactatggagcaggcaacatgaacgcgaccagcgggattagacacgcaatggggccaggcaccgtcaacggcggacacccgccatcagctctggccccagcagcccggtttaacaacagccaattcatgggtccacccgtggcatcccaaggtgggtctttaccagcctctatgcagctgcaaaaactcaacaaccagtacttcaatcaccacccctacccacacaatcactacatgcccgatcttcatccggcagcgggtcatcagatgaatggcactaaccaacatttcagggattgtaatcctccaaacgtgattgatacagactttattgacgaggaggttctgatgagcctggtcatcgaaatgggcctggatcggattaaagagctgcctgaactgtggctaggacaaaatgaattcgactttatgactgattttgtttgcaaacagcaaccatcaagagtgtcatgttag

SEQ ID NO: 181953 - DNA, 813 bp, synthetic construct
  misc_feature 1..813: note = Description of Artificial Sequence: Synthetic coding sequence
  source 1..813: mol_type = other DNA
atggccgaccacatgatggccatgaaccacggccggttccccgacggtactaacgggttacatcaccacccggcccaccggatgggtatggggcagttccccagcccacaccatcatcaacagcagcagcctcagcacgctttcaacgctctcatgggagaacacattcactatggtgctggaaacatgaacgccaccagtggtatcagacatgctatgggccccggtaccgtcaatggaggccatcccccatccgctctggccccagcggccaggttcaacaatagccagtttatggggcctccggttgctagccagggcggctccctgcccgcttctatgcagctgcagaaattgaacaaccagtactttaaccaccacccgtaccctcacaaccattatatgcccgacctccatcccgctgctggccatcagatgaacggcaccaatcagcacttcagggactgcaacccgaagcactctggcggatcctcaacccccggcggctccggcgggagcagcaccccaggcgggtctggaagctcgtccggggggggagccggatcctcgaacagcggcggtggatcgggtagcggaaacatgcctgctagcgtggcccacgtgccagctgctatgttaccccctaatgtaatcgacacagacttcatcgatgaggaggtccttatgtctctcgtcattgaaatgggtttggatagaattaaagaactacccgagctctggctaggccagaacgagtttgatttcatgaccgattttgtgtgcaagcagcagccatctagggtctcatgctag

SEQ ID NO: 181954 - DNA, 813 bp, synthetic construct
  misc_feature 1..813: note = Description of Artificial Sequence: Synthetic coding sequence
  source 1..813: mol_type = other DNA
atggccgaccacatgatggccatgaaccacggccggttccccgacgggacgaatgggctgcaccatcacccagcccaccgaatgggaatgggtcagtttccctcacctcaccaccatcagcagcagcagccacagcatgccttcaacgccctgatgggagagcatattcactacggagccggaaacatgaacgcaacaagtgggattagacacgccatgggccccgggactgtgaacggaggccatccccctagcgcactggctccagctgcccggtttaacaactcccaattcatgggcccacccgtagcctcacaaggagggagtctgccggcatccatgcagttgcagaaactcaataaccaatactttaatcaccatccctatccacataaccattatatgcccgacttgcaccccgcagccggacatcagatgaacggtaccaatcagcacttccgggactgcaaccctaagcatagcggaggctcatctaccccaggtgggtcaggaggctccagcacccccggtggcagcggatcatctagcggcggcggcgccggttcttctaactcaggcggcggtagtggctccggcaatatgcccgccagcgtggctcacgtgcccgctgccatgctgccccccaatgtaattgacaccgactttatagacgaagaggtactcatgagcctggtaatagaaatgggtctggatcgcataaaggagctgcctgagctctggcttgggcaaaatgaattcgactttatgacagacttcgtttgcaaacagcagccgtctagagtctcttgctag

SEQ ID NO: 181955 - DNA, 1797 bp, synthetic construct
  misc_feature 1..1797: note = Description of Artificial Sequence: Synthetic coding sequence
  source 1..1797: mol_type = other DNA
atggagaacagcagcgccgccagcgccagcagcgaggccggcagctctcgatctcaggagattgaagagctggagagattcatagactcttatgttctggagtaccaggtacagggcctcctcgcagacaaaaccgagggggatggagagagtgaaagaacccagtcacatatttcacagtggaccgccgattgttcagagccactggatagtagttgctcatttagccgcgggcgggccccacctcagcagaatggcagcaaggacaatagtctcgatatgcttgggacagatatctgggcagccaacacattcgactcattcagtggggccacgtgggacctgcagcccgaaaagcttgattttacgcaatttcatcgaaaggtccggcacaccccgaagcaaccattacctcacatagaccgagagggatgtgggaagggcaaactggaggacggcgatgggatcaatctcaatgatatcgaaaaggtccttccagcctggcaggggtatcaccccatgccacatgaagtggagattgcccacactaaaaagttattccggagacgtcgcaatgacagacggcggcagcagcgacctccgggcggaaataagccccaacaacacggtgatcaccaaccagggtctgctaaacataatcgagaccaccaaaaatcataccaaggtgggtcagcccctcacccctcaggcagaccgactcaccacggatattcccagaatcgaaggtggcaccacggtaacatgaagcacccccctggtgacaagggcgaagccggtgcccaccggaacgccaaagagaccatgaccattgagaacccaaagcttgaagacacggctggagataccggccactcttccctcgaggctcctaggtcccccgatacgctggctccagtagcttccgaacggctgccaccacagcaatcgggtggccccgaggttgaaactaaaaggaaagattctattctccctgagcggattggggagcgccccaaaatcacattactgcagtcatctaaggataggcttcgccgacgcctcaaagaaaaggatgaagtggccgtggagactactactccccagcagaacaagatggataagcttattgagatattaaactctatgaggaataactcatctgacgtggatacgaagctgactacgttcatggaagaggcacagaattccaccaacagtgaggaaatgctgggcgagattgtgcgcacaatttaccagaaagccgtcagtgaccggtccttcgcctttacagccgccaaactgtgcgacaagatggctctgttcatggtagagggaaccaagtttcggtccttattactcaatatgttgcaaaaagactttaccgttagagaggagctgcaacagcaggacgtagagagatggctgggattcatcacttttctgtgcgaggtcttcggcaccatgcgttcttcgaccggagagccgttccgcgtgttggtttgccccatctatacttgtttgagggaactgctacagtctcaagatgtgaaagaagatgcagtgctatgctgctccatggagcttcagtctaccgggcggctgcttgaagagcagctgccggaaatgatgaccgaactgctggcctccgctagagacaaaatgttgtgcccctcggaaagcatgttgaccagatccctgctattagaagtgatagaactgcacgccaattcatggaacccacttacccctcccatcactcagtactataacagaaccattcagaagttaactgcctag

SEQ ID NO: 181956 - DNA, 1803 bp, synthetic construct
  misc_feature 1..1803: note = Description of Artificial Sequence: Synthetic coding sequence
  source 1..1803: mol_type = other DNA
atggagaacagcagcgccgccagcgccagcagcgaggccggcagctcccgttctcaggagattgaagaacttgagcgtttcatcgactcgtatgtccttgagtatcaagtacagggactgcttgctgacaagactgagggggacggtgaaagcgaaagaacccagagccacatcagccagtggacggctgattgttcggagcctctggactcctcctgctccttctcacgcggccgcgcaccccctcaacagaatggcagtaaagataattcactggatatgctcggaactgatatctgggcagccaatacattcgatagcttcagtggcgccacctgggaccttcagcctgagaaactggattttacccagttccacagaaaggttcgtcacactcctaaacaaccgctgcctcacatcgacagagaaggctgtgggaagggtaaactggaggatggagacgggatcaatctgaacgacatcgaaaaggtgctgcccgcttggcaagggtatcacccaatgccgcatgaggtggaaattgctcatactaagaagctcttcagaaggagacgaaacgacaggcggcggcagcagcgccctccaggtgggaacaaacctcagcaacatggtgatcaccagccaggatccgcaaagcataatcgggaccatcaaaaatcttatcagggcggctcagctccccacccgtccggccgtccgacccaccatggatatagccagaacagaagatggcaccatggtaatatgaaacaccctccaggggacaagggagaggccggagcacatcggaacgccaaggaaacaatgacgattgagaatcctaaactggaggacaccgcgggggacactggacatagtagtctcgaggcacccagatctcccgacacacttgcacctgtggcatcagagcggctccctccacagcaatcagggggtcccgaggtcgaaactaagagaaaagactctatcctgccagaacgaataggggagcgtcctaaaattactctgcttcagtcctccaaagatagacttcggcgccgcttgaaagagaaggtgcctgacgaggtagcagtcgagactaccactccccaacaaaataagatggataagctcattgagatcctcaatagcatgcgcaacaatagtagtgacgtcgataccaaactaacaacattcatggaggaagcccagaattccaccaacagcgaggaaatgctcggtgagatcgtccgaactatttatcagaaagccgtctccgacaggagttttgcctttaccgccgccaaattatgtgataagatggctctcttcatggtggagggaactaagtttcgctccttactcctgaacatgttgcagaaggatttcaccgtccgcgaggagctgcagcagcaagacgtcgaacggtggctcggcttcattaccttcctgtgtgaggtatttggcacaatgagatcgtctacgggggagccgttccgagtactggtgtgtcctatatatacgtgcttgcgcgagcttctgcagtcccaggacgtgaaagaggacgccgtcttatgctgctctatggaactccagtctacaggccgcctgctggaagagcaactcccagagatgatgacagagctgctggctagtgcaagggataaaatgttgtgtcccagtgagtcaatgttaacacgatcactactgctcgaggtcatcgaactgcatgcaaacagctggaatccactgaccccgcctattacccagtactataataggaccatccaaaaactgacagcctag

SEQ ID NO: 181957 - DNA, 1947 bp, synthetic construct
  misc_feature 1..1947: note = Description of Artificial Sequence: Synthetic coding sequence
  source 1..1947: mol_type = other DNA
atgggccggctgccctgcggccccctgcccggccagtggaccgccgattgctcagaaccgctcgactccagttgttccttcagtcgtggccgggcccctccacagcagaatggtagtaaggataattcattagatatgctgggcactgacatctgggccgctaacacctttgacagtttttctggtgcaacctgggatctccaacctgagaaactagattttactcagttccatcgtaaggtcaggcatacccccaagcagccactgcctcatattgacagggaaggctgcggaaaaggcaaattggaagatggcgatggtatcaatctgaacgacattgagaaggttttgccagcttggcagggttaccatcctatgcctcatgaggtcgaaatagctcacactaaaaagctgttccgcagaagaaggaatgacagacggagacagcagaggccaccgggcggaaacaaaccccagcagcacggagatcatcagcccggctctgccaaacacaaccgagaccatcaaaaaagctatcagggcggatctgccccccacccttccggtcggcctactcaccacggctatagtcagaaccgtcgatggcatcatggcaatatgaaacacccccctggtgacaagggggaagcaggcgcccatcgcaatgcaaaggagacaatgacaattgaaaatcctaaactcgaggatactgcgggcgacactgggcactcttcacttgaggcacctagatcgcccgacactctcgctcccgtcgcgtctgaaaggttacctccccagcagtctggtggtccagaggtggagacgaagagaaaggacagcattttacctgaacggattggcgaaaggcccaagatcaccctgttacaatcaagcaaagacaggctccgcagaaggttgaaggaaaaggatgaagtggctgtggagacaaccacaccacagcagaataagatggacaagctgatcgaaatcctaaattcaatgaggaacaactcatctgacgtggataccaaactcacaacctttatggaagaagcccagaacagcaccaattctgaggagatgctaggtgagatcgttcgcacgatctaccagaaggccgtctctgaccgaagcttcgcatttaccgctgcaaagttatgtgataaaatggcattattcatggttgaggggacaaaatttcgatcactactcctgaatatgcttcagaaggattttaccgtccgagaggagctccaacagcaggatgtcgagagatggctgggcttcatcacattcctgtgtgaggtgttcggcactatgcgatcttcaaccggcgagccttttagggtgctggtttgtcccatctatacttgcctgcgcgaacttctacagtcccaggacgtcaaggaggatgctgtcctctgctgcagcatggagctgcaatcaaccggaaggctgctcgaggaacagttgcctgagatgatgaccgagttgctggcctctgcccgagacaaaatgctttgtccgtccgagtcaatgcttactaggtccctcctgctcgaggtcatagaactgcacgccaactcttggaatcagggcgcttggcaggccgctcatggccaattggggccctggtgtacggggccagatgggcaagcgggaggtcagggatggccctggcgggagaaagaaatggggagaagagcgggccgggtgggcggccagtcaggcgcacgcgcatgcaagctgacgccgatcagggaagcttgtttcttttttttggttgctctggcgctcccctttttgacccccgcttcaccactccccatccgtcctatcccccacggggccctgtgcgaaggctcccaccggtgtgattctagtgaaacgctggccgctagccatgctggggccccactgggaagtgaacgcacaagcgaaggctag

SEQ ID NO: 181958 - DNA, 1077 bp, synthetic construct
  misc_feature 1..1077: note = Description of Artificial Sequence: Synthetic coding sequence
  source 1..1077: mol_type = other DNA
atggagagcgccgacttctacgaggccgagccccggccccccatgtctagccatctgcagtccccgcctcacgcaccgagctccgcggccttcggatttcccagaggcgctggccccgcccaacctcctgctccacctgccgccccagagcctctgggtggcatttgtgagcatgagaccagtatcgacatttcagcttacatagatccagccgctttcaatgatgaattcctggccgatctgttccagcacagcagacagcaggagaaagcaaaagcagctgtaggccctactgggggtggcgggggcggggacttcgattatcccggtgctcctgccggaccaggcggagcagttatgcctggaggcgcacacggtcctccgccagggtatgggtgtgcggccgctgggtaccttgacggccggcttgagcctctatacgaaagagtgggagcacccgctttacggccattggtaattaagcaggaaccacgggaagaggatgaagccaaacaactggctctggctggcctgttcccatatcaaccacctcccccaccgccaccctcacatcctcacccacacccacctccggctcacctggcggccccacaccttcaatttcaaattgctcattgcggacagactaccatgcacctccaacctgggcaccccaccccacctccaacaccagttcccagtccccaccccgcacctgctttaggggcagccggcttacccggacccggctctgccctcaagggactgggtgcagcccatcccgatctgagagctagcggcggcagcggtgccggcaaagcaaaaaagtcggtggataagaactcgaatgagtatcgcgtgcgcagagagcgaaataatatcgctgttcgtaaaagtcgggacaaagccaaacagcgcaatgtggaaactcagcaaaaggtgcttgaactcacctcagataatgaccggctgagaaagagagtagaacagttgagcagagaattggataccctccggggcatcttcagacagctccccgaatctagcctggtgaaggccatgggaaattgtgcctag

SEQ ID NO: 181959 - DNA, 810 bp, synthetic construct
  misc_feature 1..810: note = Description of Artificial Sequence: Synthetic coding sequence
  source 1..810: mol_type = other DNA
atgagcgccgccctgttcagcctggacggccccgcccggggcgccccttggcccgcggagcctgcccctttctacgaacccggacgcgccgggaaaccagggagaggagcagaacctggagcattaggagagcccggcgcagccgctcccgccatgtacgatgatgagtccgcaattgacttttcagcatacatcgacagcatggccgccgttccaactctggagctctgccacgatgagctgttcgccgacctttttaattccaatcacaaggccggcggcgctgggcccttagagctgctgcctggcgggcccgcacgaccgctgggacctggaccagccgcacccagactgttgaaacgggaacccgattggggagatggcgacgcgcccggaagtcttctgccagcccaggtggctgcctgcgcccaaaccgttgtgagccttgccgccgctggccaacctacacctcctacctcaccagaaccacccaggtcttcacctcggcagacacctgcaccagggcccgctcgagagaaatcagcaggtaagagaggaccagataggggctccccagagtatcgacagcggcgagagaggaacaacattgccgttcggaaatcccgcgacaaggcaaaacgccggaaccaggagatgcaacagaagctggtggagctttccgccgagaacgagaagttgcaccaacgcgtggagcagcttacccgtgatttggcgggcctccggcagtttttcaagcagttaccatccccccctttcctgccggccgcggggaccgccgactgtcgctag

SEQ ID NO: 181960 - DNA, 402 bp, synthetic construct
  misc_feature 1..402: note = Description of Artificial Sequence: Synthetic coding sequence
  source 1..402: mol_type = other DNA
atgagcgccgccctgttcagcctggacggccccgcccggggcgccccctggccagctgaacccgctcccttctacgagcccggccgggccggtaagccgggaaggggagccgagcccggcgcccttggagagcctggcgcagcggctccagccatgtatgatgacgagtctgctattgatttctccgcgtacattgatagcatggcagcggtccctacacttgagttgtgccacgacgagctcttcgccgacctctttaactccaatcataaggctcgggctccatgggcccgtgcactgccactgccagcgtgctctagtgcttcccctaccggcgccaccgcgacaaggcctgcccggtgttgtccacgccggtggccccgtgcacatcggccctggtag

SEQ ID NO: 181961 - DNA, 1092 bp, synthetic construct
  misc_feature 1..1092: note = Description of Artificial Sequence: Synthetic coding sequence
  source 1..1092: mol_type = other DNA
atggccagcggcgacttctgcagccccggcgagggcatggagatcttgcagcaggtctgcagcaaacagctgccaccttgcaacctgtctaaagaggacttactccagaacccctactttagtaagctgctgctgaacctctctcagcacgtggacgagtcaggtctgtctctgacactggctaaggagcaggctcaggcgtggaaagaggttcgtctgcacaagactacctggttgcgatccgaaattctgcatagagtaatccaggagctcctggtggattattatgtgaaaatacaggatacgaatgtaacctccgaagacaaaaaattccacgagactctggagcaaaggctcctggtgaccgaactcatgcgtcttttgggcccctctcaggagcgggaaattcctccgctactcggactggagaaggcagatctcctggagctgatgcccctctccgaggatttcgtttggatgagggcccggctgcagcaagaagtggaggaacagcttaagaaaaagtgcttcactctgctctgctattacgaccccaactctgacgccgattctgaaactgtgaaagcggctaaggtctggaagctggcggaagtactggtcggcgaacagcagcagtgccaagatgccaagagccagcagaaagaacagatgctactgcttgagaaaaaaagtgccgcttattcacaggtgctgctccggtgcctgaccctcctgcagagattgctccaagaacaccgcctgaagacccagtccgagctggacagaattaatgctcagtatctggaagtgaaatgcggcgcaatgatactgaaactgcgtatggaagagctgaagatcctcagcgacacctatacagttgaaaaagtggaggttcaccggctgatccgagatcgcctggagggtgcaattcacttacaggagcaggacatggagaactcacggcaggtgcttaactcttacgaggtgctcggagaggagttcgacaggttagtgaaagaatataccgtgcttaaacaggccactgagaataagcgctgggccctgcaggaatttagcaaagtgtatcggtag

SEQ ID NO: 181962 - DNA, 1359 bp, synthetic construct
  misc_feature 1..1359: note = Description of Artificial Sequence: Synthetic coding sequence
  source 1..1359: mol_type = other DNA
atgggcagcagccagagcgtggagatccccggcggcggcaccgagggttaccacgtacttagagtacaggaaaactctcccggccatcgagccggacttgagcctttcttcgattttatcgtctccatcaacgggagccggctgaacaaggataatgatacactcaaggaccttctgaaagccaatgttgaaaagccggtcaagatgctgatctattcttctaaaaccttggagctgcgagagacatcagtgacaccaagcaacctttggggcggccagggcttactcggcgtgtccatcagattctgttcattcgatggggctaacgaaaacgtgtggcatgtgctggaggtggaatccaattctcctgccgctctcgctgggctacgaccccattcagattatattattggggctgataccgtaatgaacgagagcgaggacctgttcagcctgattgagacccatgaggctaaaccgcttaaactttacgtgtacaacacagataccgacaattgtagagaggtcatcattactcccaactccgcttgggggggagagggctctctcggatgtggcatcgggtacggctacctccaccggattccaactcggcccttcgaggagggcaaaaagatttctctacccggccagatggccggaaccccaatcactcccctcaaagacggttttactgaggtgcagctttctagcgtaaacccgccctccctatctcccccagggactacaggcatcgagcagtccctgacaggcctgtctatatcttctactcctccagcagtcagctctgtgcttagtaccggcgttccaacagttcctctgctgcccccccaggttaatcagagcctgacatctgtccctcctatgaaccccgccactacgctgcccggcttgatgcccctcccagctgggctacccaacctcccaaatttgaacttaaatttgcctgctccccacataatgccaggggtcggcctgccggagctcgttaacccagggctaccccctcttccttcaatgccacctcggaacctcccaggaatcgcaccgctaccactgccaagtgaattcctgccttctttcccactcgtccccgaaagctccagcgcagctagcagcggcgagctcctttcttccttacctcctaccagtaatgctcctagcgatcctgccacaactactgctaaggccgatgcggcatcatcgttaactgtcgatgtgactcctccaactgctaaagccccgaccaccgtcgaggatagagttggggacagcacaccagtctctgaaaaaccagtctcagcagccgttgacgctaacgccagcgagagcccctag

SEQ ID NO: 181963 - DNA, 2997 bp, synthetic construct
  misc_feature 1..2997: note = Description of Artificial Sequence: Synthetic coding sequence
  source 1..2997: mol_type = other DNA
atggccgccgtgaaggagcccctggagttccacgccaagcggccctggaggccagaggaggccgtagaggaccctgatgaggaagacgaagacaacacttcggaggccgagaatgggttctccctggaagaggttctgagactgggcggtaccaaacaagattatctgatgctggcaactctggatgagaatgaggaggttattgatggtggaaagaaaggcgccattgatgacctgcagcagggcgaactggaagcattcattcagaatctgaatttggccaagtataccaaagcaagcctggttgaagaagatgagcctgcggaaaaagagaatagctccaagaaggaggtcaagatcccaaagataaataataagaacaccgccgagagccagcggaccagcgtgaacaaggtgaagaataaaaaccggcccgagccacacagtgacgagaacggcagcactactccaaaggtgaagaaggacaagcagaacatcttcgaattcttcgaaagacaaaccctcttgctgaggcctggcggcaagtggtacgacttggaatactcgaacgaatatagcttaaaaccccagccccaggacgtggtgtccaagtataaaactctggcacagaagttgtatcagcacgagatcaatctgtttaagagcaaaacgaactctcagaagggagcatcctctacctggatgaaggctattgtcagctcgggcaccttgggcgaccgaatggccgccatgatattgctaatacaagatgatgccgtacatacacttcagtttgtcgaaaccctcgtcaaccttgtcaaaaagaaaggatccaaacagcagtgtctcatggccctcgacacgtttaaggagctcctgattacggatctcctacccgacaatagaaagctgcggatttttagccagagaccatttgataaactggagcagctgtcttccggaaataaagatagccgggaccgccgtctaattctgtggtatttcgaacaccagctgaagcatctcgtggccgagttcgtgcaggtcctcgaaactctcagtcacgatacactggtgaccacgaaaaccagagccctgaccgtggctcacgagttgctgtgcaacaaaccagaggaagaaaaagccctgctggtgcaagtggtcaacaaactaggggatccacagaaccgcatagctacaaaggcatcacacctgttagaaacactcctgtgcaaacatcccaacatgaaaggagtggtaagcggagaagtggagaggctgctcttccgatcaaacatcagctcaaaagcccagtactatgccatttgcttcctaaaccagatggccctttctcacgaagagtcagagctcgcaaacaagctcattactgtctacttctgcttctttaggacttgcgtcaagaaaaaggatgttgagagcaaaatgctctccgccctccttacgggagtcaatagggcctatccatacagtcagacaggagacgataaagtgcgggagcagatcgataccttatttaaagtgttgcatatcgttaacttcaacacatctgttcaagctctgatgcttctctttcaggtgatgaacagtcaacagactatttccgacagatattatacagccctctataggaaaatgctggacccaggtctgatgacctgcagcaaacaagccatgttcctaaacctcgtatataagagtttgaaggccgacatagttctgcgacgcgtgaaagccttcgtaaagaggctgcttcaggttacctgccaacagatgccacccttcatttgcggagcgctgtatctcgtttccgagatattgaaagcgaaacccggtttgagatcccaattggatgatcacccagagagcgatgatgaagagaatttcatagacgctaacgatgacgaggacatggagaagttcaccgacgctgacaaagaaactgagatcgtcaagaagctagagacagaggagacagtgcccgagactgatgtggaaacaaagaagcctgaagtggccagttgggtgcactttgataacttgaaggggggtaaacagctaaataagtacgatccattctcacgtaacccacttttctgcggagcagagaatacctctctttgggaactcaagaagctgtccgtacacttccacccaagtgttgctctcttcgctaagacaattctgcaggggaactacatccagtactctggcgaccccctgcaggatttcactctcatgaggtttctggaccggtttgtgtaccggaaccctaaacctcacaagggcaaagagaacacagattctgtggtaatgcagcctaagcggaagcatttcatcaaagatattcgacacctgcctgtgaacagcaaggagttcctggctaaagaggaatcacagattcctgtcgatgaagtgttcttccacaggtactataagaaggtggccgtcaaggaaaaacagaagagagatgctgacgaggaatcaatagaggacgtggatgacgaggagtttgaggagctcattgacaccttcgaagatgacaactgtttttcaagcgggaaggatgacatggactttgctggcaacgtgaaaaagaggacaaaaggggccaaagacaatacgttggatgaggattcagaaggaagcgatgatgagctcggcaacttggatgacgacgaggtctccctcgggtccatggacgacgaggagttcgcagaggttgatgaggacggcggcaccttcatggatgtcttagacgacgagagtgaaagcgttcccgagctggaggtccacagcaaggtctccactaagaagtcgaagaggaagggaacggatgactttgattttgctggcagcttccaaggcccacggaaaaaaaagcggaatctcaatgactcttccctgttcgtgagtgctgaagagtttgggcacctgttggatgaaaatatgggatcaaaattcgataatatagcatag

SEQ ID NO: 181964 - DNA, 1992 bp, synthetic construct
  misc_feature 1..1992: note = Description of Artificial Sequence: Synthetic coding sequence
  source 1..1992: mol_type = other DNA
atggccgccaccgagatcagcgtgctgagcgagcagttcaccaagattaaagagctcgagctgatgccagaaaagggactgaaagaagaggaaaaggacggtgtttgtcgcgagaaggatcatcgtagcccatcagagctcgaagccgagagaacttcaggcgcatttcaggactcagtgctggaagaagaagtcgagttggtgttggctcctagcgaggagagtgagaagtacatccttaccctgcaaacagtccattttactagcgaggcagtcgagcttcaggacatgtcacttctaagcatccagcagcaggagggggtgcaagtcgttgtccagcaacccgggcctggactgctttggctggaagaaggaccacgtcagtctctgcaacaatgtgtggcaatttccatccaacaggaactgtatagcccccaggaaatggaagtgctccaattccatgccctagaggagaatgtgatggttgccagcgaagattctaagctagccgtgagcctagccgagacgacaggattaatcaaacttgaggaagagcaggaaaagaatcagctcctggccgagagaactaaagaacaactgttctttgtagagactatgtcaggagacgagaggtcagatgagatcgtcctcacagtctcgaacagtaacgttgaggaacaggaggaccaacccacagccggccaagcagacgccgagaaggcgaagagcaccaagaatcagcgcaaaaccaaaggtgcaaagggtactttccattgtgacgtgtgtatgtttacgtccagtcgaatgagttcatttaacaggcacatgaagactcacacatccgagaagccacacctttgccatctgtgtcttaaaactttccgcacagtgacattactgcgaaatcatgtgaatacccacacggggacccgcccttacaaatgtaacgattgtaatatggcatttgtgacctctggagagctggtccggcataggcggtacaagcatacccacgaaaagcctttcaagtgctctatgtgcaagtacgcaagcgtagaggcatcaaaactcaaacgacatgtaaggtcgcacacaggcgagcgcccattccagtgttgtcaatgcagctacgccagcagggacacatacaaacttaagcgtcatatgagaacccacagcggagaaaagccctatgagtgccacatctgccatacccggtttacacagtcagggacgatgaaaatccacattcttcagaagcacggcgagaatgtacccaaataccagtgtccccactgtgctacaataatcgcccgcaagtccgacctgagggtccatatgagaaatctgcatgcatacagcgcggcggaacttaagtgcaggtactgctctgccgtcttccacgaacgttatgccctaattcaacatcaaaagactcataagaatgaaaaacgatttaagtgcaaacactgctcctacgcatgcaaacaggagaggcatatgacagcgcacatccgtactcatactggcgaaaagccgttcacctgcctgagttgcaacaaatgtttcaggcaaaaacagttgctcaacgctcactttcggaaataccacgacgctaattttatccccaccgtttacaaatgctctaaatgtggcaagggcttttcgcgctggattaatttgcatcgacactcagagaaatgtggtagcggagaagctaagtctgccgcaagcggcaagggcaggcgcacccgcaagagaaagcaaaccatactaaaagaggccacaaagggtcagaaagaggctgcaaagggctggaaggaggccgctaatggagatgaagccgccgcggaagaagccagcacaaccaagggcgagcaattccctggggaaatgttccccgtggcatgcagggagaccacagcaagagtcaaagaggaggtggatgaaggggtcacttgtgaaatgctgttaaataccatggataaatag

SEQ ID NO: 181965 - DNA, 1992 bp, synthetic construct
  misc_feature 1..1992: note = Description of Artificial Sequence: Synthetic coding sequence
  source 1..1992: mol_type = other DNA
atggccgccaccgagatcagcgtgctgagcgagcagttcaccaagatcaaggaactggaactgatgcctgagaaaggcctgaaggaagaggagaaggacggtgtatgtagagaaaaagaccacaggtctcctagcgagctcgaggcagagcgcactagcggagcgtttcaggacagcgtcttggaagaggaagtggagttagtgctggcgccctcagaggaatctgagaaatatatcctcacccttcagactgttcactttaccagtgaggcagtcgagcttcaggatatgagtcttctgtcgatccagcagcaggaaggggtgcaggtcgtggtccagcaacctggccctggcttgttgtggctggaggaaggcccccgacagtccttgcagcagtgcgttgccattagcattcaacaggagttgtactccccacaggagatggaggtgctgcagtttcacgctcttgaggagaacgtgatggtggcaagcgaagattccaaactggcagtgtcactcgcagaaacaactggtctcatcaaactcgaggaggagcaggaaaagaatcaacttctcgccgagaggacaaaagagcaattattctttgtcgaaacaatgtccggcgacgagcgatcagacgagatagtcctgacggtttcgaactctaacgtcgaagagcaggaggatcagccaacagcaggacaggccgatgcagaaaaggccaagtccacaaagaatcagcgaaagactaaaggcgcaaagggcacgtttcactgcgacgtctgcatgtttacctcgagccgaatgtctagcttcaatcgtcatatgaagactcatacgtctgaaaaacctcacctatgtcatctgtgtctcaagacattccgcaccgtcactctcctgaggaatcatgtaaacacccacacggggacccggccatataaatgcaatgattgtaacatggccttcgtgacttctggggagctcgttaggcatcggcggtataagcacacacatgaaaaaccctttaaatgttctatgtgtaagtatgcatccgttgaagcatccaaacttaaaaggcacgttaggtctcacacaggcgagagaccctttcagtgttgccagtgtagctatgcttccagggatacctataagttaaaacggcacatgcggacacattcaggcgaaaaaccatatgaatgtcatatttgccatacacggttcacacagtccggaacgatgaaaatccatatcctgcagaaacacggagagaacgtgcctaaatatcaatgtccccactgtgccacaattatcgcccgtaagtccgacctgcgagtccacatgcgtaatctacacgcgtattctgccgccgaactcaagtgccgatattgctcagcagtctttcacgaacgttatgcactgatacagcaccagaaaacccacaaaaatgagaaacgatttaaatgcaaacactgttcgtacgcctgcaaacaggagaggcacatgacagctcacattcgaacacataccggggaaaagcctttcacttgtctatcgtgcaacaaatgcttccggcagaagcagctcttaaacgctcattttcggaaataccacgacgccaacttcattccaactgtgtacaaatgcagcaaatgcggtaagggattcagtcgctggatcaatctgcaccgacatagtgagaagtgcggctctggggaggcaaagtcagccgcctctggaaaaggtcgtagaaccaggaaaaggaagcagactatcctgaaggaggcaacaaaggggcagaaagaagctgcaaaaggatggaaggaagccgcaaacggcgacgaggctgctgctgaggaggcctcaactactaaaggcgagcaatttcctggtgagatgttcccagtggcttgtagagagacgaccgccagagttaaagaagaggtggatgagggggtgacctgcgagatgctcctgaataccatggacaagtag

SEQ ID NO: 181966 - DNA, 1284 bp, synthetic construct
  misc_feature 1..1284: note = Description of Artificial Sequence: Synthetic coding sequence
  source 1..1284: mol_type = other DNA
atggccgccaccgagatcagcgtgctgagcgagcagttcaccaagattaaagaactggaactcatgcccgaaaaagggttgaaagaagaggaaaaggatggcgtttgtcgcgagaaagatcaccgaagtccatccgagctcgaagctgaacgtacctcaggtgccttccaggactcagtactcgaagaggaggtggagctcgtgctggctccgagcgaagaatccgaaaagtacatcctcacattacagactgtgcactttacatccgaggctgtggaattgcaggatatgtctttactcagcattcaacaacaggagggagtccaagttgtggttcagcagccagggccagggttgttatggctcgaggaagggcctaggcagtcattgcagcagtgtgtagccatttcaattcagcaagagctgtattccccacaggagatggaggttctgcagtttcacgcccttgaagagaatgtgatggttgcaagcgaagattctaagctggcggtctccttggcggaaactacaggccttattaagctggaggaggagcaggagaagaaccaacttctcgccgaacgaaccaaagaacagctgttctttgtggaaacgatgtcgggcgacgagagaagcgacgaaattgttctgacagtgtctaacagcaacgtggaagagcaggaggaccagcctacagccggtcaagccgacgccgagaaggctaagtctacgaaaaaccagaggaagacgaagggcgcaaagggtaccttccattgcgatgtatgcatgtttacttcctcccgcatgtctagcttcaatagacacatgaaaacgcatacctccgagaagccacacctgtgccacctctgccttaagacgttcagaactgttacccttctccggaatcacgtgaatacgcacactggtacaaggccgtacaaatgtaatgattgtaacatggcatttgtcacttcaggggaactggtccggcatcgaagatacaaacacacacatgagaaaccattcaaatgcagtatgtgcaaatacgcatctgtagaagctagcaaactcaagagacacgttcggagccataccggcgaacgtccttttcagtgttgtcagtgctcctacgcttctcgtgacacttacaagctcaaacgtcatatgcggacacattctgaggccacgagcaagcgttccctccaggagatccctcggtgtaaattccatcccgattgcctccaaatgctgcaggtttggcagcggctgttcccacttgactag

SEQ ID NO: 181967 - DNA, 1722 bp, synthetic construct
  misc_feature 1..1722: note = Description of Artificial Sequence: Synthetic coding sequence
  source 1..1722: mol_type = other DNA
atggccgccaccgagatcagcgtgctgagcgagcagttcaccaagattaaggagctggaactgatgcctgaaaaggggctgaaggaggaagaaaaggacggtgtttgtagggagaaagatcaccgttcccccagtgagctcgaagcggagagaacctctggagctttccaggacagtgtcctggaagaagaagtcgaactggtgctcgctccgtctgaggaatcagaaaagtacatcctcacactgcagactgtccactttacttctgaggctgtggaactgcaggacatgagtctcctttctatccagcagcaggaaggggtacaggtcgtggttcaacagcccggccctggacttttatggctagaagagggcccccgtcaatctctgcagcagtgtgtggcaataagcatacaacaggagctctacagtcctcaggaaatggaggtattgcagtttcacgcgctcgaggagaacgtgatggttgcctcagaggactctaagctggctgtgagcttggccgaaactacagggctgattaagctcgaggaggagcaggaaaagaatcagttactcgcagagcggacgaaggaacaactgtttttcgttgaaaccatgtctggagatgaaagaagcgacgagattgttttgaccgttagtaatagcaatgtggaagaacaggaggaccagcctacagctggtcaggcggatgccgaaaaagctaagtcaaccaaaaatcagagaaagaccaaaggtgcgaagggaacattccactgcgacgtgtgtatgtttaccagttcgcgaatgtcttcttttaaccgccacatgaagacacatacctctgagaaacctcacctctgccatctgtgtctcaagacctttagaaccgtgactctcttgagaaaccacgtgaacacacacacaggaacacggccttataagtgcaacgattgcaatatggcctttgtgacgagtggagaacttgtgcgccacagaaggtacaagcacacacatgagaagccatttaagtgttccatgtgcaagtacgcatctgtggaggcctcaaagctaaaacggcacgtgcgatcccacactggtgagaggccattccagtgctgtcagtgttcgtacgcctcccgggatacctataaactgaagcgacatatgcgcacgcactctggagaaaaaccctacgagtgtcacatctgtcatactaggttcactcagagcgggaccatgaaaattcacatcctccagaagcacggcgagaacgttccgaagtaccagtgcccgcattgtgcaaccatcatcgctcggaaaagtgatctacgagtgcatatgagaaatctgcacgcttactcagctgcggaactgaagtgtcggtactgcagcgctgtcttccatgagcggtacgcgttgatccagcaccaaaagacccacaaaaatgaaaagcggttcaagtgcaagcattgcagttacgcttgtaaacaggagagacacatgaccgcacatattagaacacacactggggagaagccgttcacttgcctgagctgcaataagtgttttcgacagaaacaactgctcaacgcacactttaggaagtaccacgatgccaacttcataccgaccgtttataagtgctctaagtgcggcaaaggattttctagatggattacctctaagtggtccggcctgaagccacagacatttattacctag

SEQ ID NO: 181968 - DNA, 2103 bp, synthetic construct
  misc_feature 1..2103: note = Description of Artificial Sequence: Synthetic coding sequence
  source 1..2103: mol_type = other DNA
atggccgccaccgagatcagcgtgctgagcgagcagttcaccaagatcaaagagttagagctcatgcccgagaagggattaaaggaagaagaaaaagatggtgtgtgtagggaaaaagaccacagatcccccagtgagttggaagctgagagaacatctggcgccttccaagattcagtgctggaggaggaggtagagctcgttctcgccccctccgaggagagtgagaagtacatcctcactcttcagaccgtacacttcacctccgaggccgttgagctgcaggacatgtccctgctgagcattcagcagcaagagggcgtccaggtggtcgtccagcagccaggcccaggtctgctttggttagaagaaggaccacgccagagtctgcaacagtgtgtcgcgatctctatccagcaagaactctatagccctcaggagatggaagtcctgcagtttcatgcgctggaggagaatgtgatggtggctagtgaagactcaaagctggctgtaagtttagccgaaacaactggcttaatcaagctggaggaggaacaggaaaaaaaccagctgttggccgagcgtactaaagagcagctgttttttgtggaaactatgtctggagatgagcgatcggacgagatcgtcctgactgtgtctaactctaatgtcgaagaacaggaggatcagcccactgcagggcaagccgatgctgaaaaagctaaatctaccaaaaaccagagaaagacaaagggagccaaaggaacgtttcactgcgacgtctgcatgtttacgagctcccgcatgtcctcttttaacaggcacatgaaaacacacacttccgagaaaccgcacctgtgtcatttatgtttaaagaccttccgcaccgtgacactgttgcggaaccatgttaatacccacacaggcactagaccttacaagtgtaacgactgtaacatggcctttgtcacgtcaggcgaactcgtgcgccaccgccgctacaagcatactcatgagaaaccgtttaagtgtagcatgtgcaaatatgcctcggtggaggcttcaaaattgaaaaggcacgttcggtcccataccggggaacgtccatttcagtgctgccagtgttcttatgcaagccgcgatacatacaagctcaaacgccatatgagaacccactccggtgaaaaaccatacgagtgccatatatgccacaccagattcacccagagcggaacgatgaaaatccacatcttgcagaagcacggggagaacgtgccaaagtatcagtgccctcattgcgccaccatcatcgcaagaaaatctgacttgcgagtgcatatgagaaatctacacgcctattctgccgcggaactgaagtgcagatactgcagcgccgtctttcacgagcggtatgccctgatccagcatcaaaagacgcacaagaacgagaagcggtttaagtgcaagcattgcagttacgcatgtaagcaggagagacacatgaccgctcatataagaactcatacaggagagaaacctttcacctgtctatcatgcaataagtgtttccgccaaaagcaactgctgaacgcacactttagaaaataccacgatgcaaattttattccaactgtctacaagtgctccaaatgcggcaaaggcttcagccgatggataaatctccaccgacattctgaaaagtgtggatctggggaggctaaaagtgctgcaagtggaaaggggcgcaggactcgaaaacggaaacagactatccttaaggaggctaccaagggacaaaaggaagctgcgaaaggctggaaggaagcagccaatggagacgaggctgcggccgaagaagcctcaaccaccaagggtgagcagttcccgggggagatgtttcctgtagcatgtcgggagaccacagctagggtgaaggaggaagtcgacgagggcgtgacatgtgaaatgctgttgaacaccatggataattcggccgggtgtactggacgtatgatgctggtgtccgcctggctacttggtagaccgcaggagacctataatcaaggtaggaggaggcggggatcacggcgggtgacatggtag

SEQ ID NO: 181969 - DNA, 1356 bp, synthetic construct
  misc_feature 1..1356: note = Description of Artificial Sequence: Synthetic coding sequence
  source 1..1356: mol_type = other DNA
atggccgccaccgagatcagcgtgctgagcgagcagttcaccaagattaaggaactggagctgatgcccgaaaaaggccttaaggaagaggaaaaggatggcgtatgccgcgagaaagaccatcgaagtccgtctgagctagaggctgaacggacaagtggagcgtttcaagattccgtactggaagaagaggtggagttagttctcgccccttccgaagagagtgagaagtatatcctgaccctgcagactgttcattttactagcgaggcggtagagctccaagatatgtctcttctctccattcagcagcaagaaggtgttcaagtagtagtccagcaacctggacccggactgctctggctggaggaggggcctcgccagtctttgcagcagtgtgttgcaatcagcattcagcaggagctgtattcccctcaagagatggaggttctacagtttcacgccttagaggaaaatgtaatggtcgccagtgaggactccaagctggcggtctctcttgcagaaactaccggcttgattaaactcgaagaggaacaggagaagaatcagctgctggcggaaaggaccaaggaacagctttttttcgtagaaactatgagtggggatgagcgaagcgatgaaatcgtgttaacggtgtcaaactccaacgtggaagaacaggaggaccaacccacagcggggcaggcggacgcagagaaagctaaatccacgaaaaatcagaggaagaccaagggcgccaaggggacatttcattgtgacgtgtgcatgtttacatcaagcagaatgagttccttcaacaggcacatgaaaactcacacgagcgagaaaccacacctgtgccatctgtgtctcaagaccttccgaaccgttacactcctccggaaccacgtgaatacacacactggcactagaccttacaagtgtaacgactgcaacatggcatttgttacctctggcgagcttgtccgccaccgacggtataaacacactcacgagaagcccttcaagtgtagtatgtgcaagtatgcatccgtggaggctagcaagctaaaacgtcatgtgagatcccacactggagagcggcccttccagtgttgtcagtgtagctatgcgagcagagatacatacaaattgaagcgacacatgcgtacacactcgggcgaaaagccttatgagtgtcacatctgccacaccagatttacccagagcggcactatgaaaatacatatcctgcagaaacacggggaaaacgtccccaagtatcagtgtccccattgcgcaacaattattgcacggaaatcagatttacgctttctcggcctgcccttcccgtag

SEQ ID NO: 181970 - DNA, 1842 bp, synthetic construct
  misc_feature 1..1842: note = Description of Artificial Sequence: Synthetic coding sequence
  source 1..1842: mol_type = other DNA
atggccgccaccgagatcagcgtgctgagcgagcagttcaccaagatcaaggaattagaacttatgccagaaaaaggcctaaaggaggaggagaaagatggcgtctgtcgggaaaaagaccaccgcagtccgtccgagctggaggccgaacgcacttccggtgccttccaggacagtgtgctagaggaggaagtcgaacttgtgctggctccaagcgaggaatcggagaagtatatactcaccctgcaaacagtgcactttaccagcgaggccgtcgaacttcaggacatgtccctactgtccattcagcaacaggagggagtccaagtagtcgttcagcagccagggcctggtctgctttggctggaagaaggccctcggcagagcctgcagcaatgcgttgctatttccattcagcaggaattgtactctccgcaagaaatggaggtgctgcaattccatgccttggaagaaaatgtaatggtcgcatccgaggacagcaaactggctgtgtctctcgccgaaactacaggcctgattaagctggaagaagagcaggaaaagaatcagttattggcagagcggaccaaagaacaattgttcttcgtagagaccatgtcaggcgatgagagaagcgatgaaatcgttctgaccgtctcaaactccaatgtagaagagcaggaagaccaacccactgccggccaggcagatgctgagaaggcgaaatctaccaaaaatcagcggaaaacaaaaggcgccaagggaaccttccactgtgatgtgtgtatgtttacgtcaagccggatgtctagcttcaataggcatatgaagacccacactagcgagaagcctcacctgtgccacctttgcctgaaaactttcagaaccgtgaccctgctcaggaatcacgtaaacacgcacacaggcaccaggccttacaagtgcaacgactgtaacatggcgtttgtaacatctggcgagttagttcggcaccggcgctacaaacatacccatgagaagccatttaaatgctccatgtgtaagtatgctagcgtcgaagcaagtaagctcaagagacacgtgagaagccacacaggcgaaagaccattccaatgttgtcagtgttcttacgctagtcgggacacatataagctgaagagacacatgaggactcactcaggagtacacatgagaaacctgcacgcctactccgctgcagagcttaaatgccgttattgtagcgctgttttccacgagcgctacgccttaattcaacatcagaagacccacaagaacgagaagcggttcaaatgcaagcactgctcctacgcatgcaagcaggagaggcatatgacagctcatatccgaacgcacaccggagaaaagccgttcacttgcctctcctgcaataagtgtttccggcagaaacagttgttgaacgctcatttccggaagtatcacgacgcgaacttcattccaaccgtctacaagtgctcgaaatgtggcaaagggttttctcggtggatcaacctgcatcgtcatagcgaaaagtgcggctccggagaggccaagtcagcagccagtggcaaaggccgacggacaaggaaaagaaaacaaactatcctgaaggaggctactaaaggccagaaagaagccgccaaaggctggaaggaggccgccaatggcgacgaagccgccgcagaagaggcctccaccacaaagggggaacagtttccaggcgagatgtttcccgttgcttgtagggaaacaaccgcacgggtgaaggaagaagtggatgagggggtgacctgtgagatgcttctcaataccatggataaatag

SEQ ID NO: 181971 - DNA, 1452 bp, synthetic construct
  misc_feature 1..1452: note = Description of Artificial Sequence: Synthetic coding sequence
  source 1..1452: mol_type = other DNA
atggccgccaccgagatcagcgtgctgagcgagcagttcaccaagattaaggaactcgagctgatgcccgaaaagggtttgaaagaggaggaaaaggacggagtgtgccgggagaaggaccacagaagcccctccgagctcgaggcagaaaggacttccggagcatttcaggactctgtgcttgaggaagaggtggagttggtgctggctccctccgaggaatccgaaaaatatattttgaccttgcaaactgtacatttcactagcgaagcagtggagttacaggacatgagtctgttgagtattcaacagcaggagggcgtgcaagtggtggtccagcagccaggacctgggctgttatggttggaggaagggcctcggcagtcattacagcagtgcgtagccatcagcatccagcaagagctttactctcctcaggaaatggaggtgttacagttccacgcactcgaagaaaacgtaatggtggccagcgaggattctaaactggcggtcagtttggcagagactacaggccttatcaaattggaggaggagcaagaaaagaaccagctgctggctgagagaacgaaagaacaactgttctttgtcgagaccatgagcggcgacgaaaggtccgacgagatcgtgctgacggtctcaaactcaaacgtggaagagcaggaggaccagcccacagcaggacaagctgatgcagagaaggctaagtcgaccaaaaaccagcgtaaaacaaagggcgctaaaggcacattccattgcgatgtctgcatgttcacctcctctaggatgtccagtttcaatcggcacatgaaaactcatacaagtgagaagcctcatctgtgccacctgtgccttaaaacttttcggacagtaacacttctcaggaatcacgtcaacacacatacgggaacccgtccatacaagtgtaacgactgcaatatggccttcgtcacgagcggagaactggtgcgacatcggagatacaagcacacgcatgaaaagccatttaagtgttcaatgtgtaaatatgcatcagtggaagagagacatatgactgcgcatattaggactcacactggagaaaaaccctttacatgtctgtcgtgcaacaaatgcttcaggcagaagcagctcctgaatgcccattttaggaaatatcacgatgccaacttcattcctactgtctacaaatgttcgaaatgtggaaaggggttctcccgatggattctctgggtgggaaattcagaggtggccgagctgggcgggcctggcagtggtccattgctgcggctgcagagcggctgcccacccggactgcatcaccctaaggctggccttggcccagaggaccctctgcctggtcagctgagacacacaactgcgggtacaggtctgagctccctactgcaaggtccactgtgccgggctgcatag

SEQ ID NO: 181972 - DNA, 1998 bp, synthetic construct
  misc_feature 1..1998: note = Description of Artificial Sequence: Synthetic coding sequence
  source 1..1998: mol_type = other DNA
atggccgccaccgagatcagcgtgctgagcgagcagttcaccaagatcaaggagctggagctcatgccggagaagggtttgaaggaagaggaaaaggacggcgtttgccgtgagaaagatcatcgttcacccagcgagctggaggccgaacggacaagcggggcctttcaggatagcgtgctggaggaagaggtggagctggtgctcgcaccatcggaggagtccgagaagtacatcttgaccctgcagaccgttcactttacctcggaagccgtggagctccaggacatgagcctccttagtatccagcagcaagagggtgtgcaggtggttgttcagcaacctggtccaggcttgctttggctagaagagggtcctcgtcaaagcctgcagcagtgtgtcgccatctccatccagcaggagttgtactccccacaggagatggaggtgctgcagttccatgccctcgaggagaatgtgatggtggccagcgaggactccaagctggccgtcagtttggcagagacaactggtctcatcaagcttgaggaggagcaggagaaaaatcagctcctggctgaacgtaccaaagagcagctgttctttgtggagactatgagtggggacgagcggagcgacgaaattgtgcttactgtgagcaacagcaacgtcgaagagcaggaggaccaacccaccgcggggcaggccgacgccgaaaaggccaaatccaccaagaatcagcgcaaaactaaaggtgctaaagggacatttcattgcgacgtatgtatgttcacctcaagtcggatgtctagctttaatagacatatgaaaacgcacacctccgagaagccccacctatgccatctgtgcctcaagacctttaggaccgtgacattgttgcggaaccatgtcaatactcatactggtaccaggccttataaatgcaacgactgtaacatggcttttgtgacttccggtgaactggtgcgtcaccgtcggtataagcacacccatgaaaaaccctttaaatgctctatgtgtaagtatgcttccgttgaggcaagcaaactgaaaagacacgtccgttctcacacaggcgaaagacccttccagtgctgccagtgctcttacgcctctcgcgacacctacaaactcaaacgccatatgagaacacattctggcgaaaagccctatgaatgccacatttgtcacacgcggtttacacaaagcgggacaatgaagattcatatcctgcagaaacacggggaaaatgttcctaaataccagtgcccacactgcgctacaatcatcgccagaaagtctgaccttcgcgtccacatgcggaatctgcatgcatactctgccgctgagctcaaatgccgctactgtagcgccgtgtttcacgaacgttatgccctcattcagcaccagaaaacccataagaacgagaagcgatttaaatgcaaacattgctcctatgcttgcaaacaggagagacacatgacagcccacatcagaacccacacaggggagaaaccctttacttgcctgagctgcaacaaatgtttcaggcagaaacaactcttgaatgctcatttcaggaaatatcacgatgccaactttattcccactgtgtataaatgttctaagtgcggcaaaggcttcagcagatggattaatcttcatcgccactctgagaagtgcgggtccggggaagccaagtccgcagcttcagggaaaggacgccgaacccgaaaaaggaaacagaccatcctcaaggaagctaccaaggggcagaaagaggcagccaaaggatggaaggaagctgccaacggggatggggtgattagtgcccacaggaatctttgtctcctgggaagctccgacagccacgcctctgtgtcaggcgccggcataacagatgcaaggcaccatgcgtggctgattgtcttgctgtttcttgttgaaatggggttttaccacgtgtcccactcttag

SEQ ID NO: 181973 - DNA, 1212 bp, synthetic construct
  misc_feature 1..1212: note = Description of Artificial Sequence: Synthetic coding sequence
  source 1..1212: mol_type = other DNA
atgttcaccagcagccggatgagcagcttcaaccggcacatgaagacccatacttcagagaaaccacacctgtgtcacctttgtttgaagactttccggaccgttactctgttgcggaatcacgtgaacactcacacaggcacacggccatataagtgcaatgactgtaatatggcttttgtgaccagcggagagcttgtccgacatcgtaggtataagcatacgcacgagaagccatttaagtgtagtatgtgcaagtatgcttctgtggaagcctcgaagctcaaacggcacgtacggtctcatactggggagagaccatttcagtgttgccagtgctcctatgcctcaagagatacttataagctgaagcggcatatgaggacgcattctggagaaaaaccatatgagtgtcacatttgtcatacccgtttcactcagtccgggaccatgaagatccacatcctgcagaaacacggtgagaatgtacctaaataccaatgccctcactgtgccacgataatcgctcgcaaatcagacctgagagttcacatgagaaatctgcatgcctatagtgcggccgaattgaagtgccggtactgttccgccgtgttccacgaacggtatgcattaatccaacatcagaagacccataaaaacgagaaacgattcaaatgcaaacattgctcttatgcctgcaaacaggagagacatatgactgcacacattcgtactcacacaggagagaagccctttacctgcctctcttgcaataaatgctttcggcaaaagcaactcctgaatgctcattttagaaaatatcacgatgccaacttcatcccaacagtctacaaatgctccaaatgcgggaaagggttctctaggtggattaatctccatagacactctgaaaaatgcgggtctggagaagccaaatcagccgccagcgggaaggggcggcggaccaggaagagaaaacagacaatcctcaaagaagcaaccaaaggacaaaaggaggccgccaagggctggaaggaagccgccaacggtgatggcgtgatcagtgctcatcggaacctgtgtctgctgggctcatcagacagccatgctagcgtctccggagcgggcataacggacgcccgccaccatgcgtggctgatcgtgctgctgttccttgtggagatggggttctaccacgtcagccattcatag

SEQ ID NO: 181974 - DNA, 1269 bp, synthetic construct
  misc_feature 1..1269: note = Description of Artificial Sequence: Synthetic coding sequence
  source 1..1269: mol_type = other DNA
atgagcggcgacgagcggagcgacgagatcgtgctgaccgtgagcaactcgaatgttgaagagcaggaggatcagccgacggctggacaagcagatgccgaaaaggccaaaagcacaaagaatcaacggaagaccaagggtgcaaaagggacctttcactgcgacgtgtgtatgttcacttccagtaggatgtctagctttaatagacacatgaagacgcatacgtcagaaaagccccacctctgtcacctgtgcctcaagacgtttcggacggtaacactgttgagaaaccacgtgaatacccacactggcacacggccttacaaatgtaacgactgcaacatggcctttgtgacaagtggcgagctagtacgccacagaaggtataaacacactcacgagaagccctttaaatgcagcatgtgtaagtatgcaagcgttgaggcttctaagctaaaacgccacgtccggtcccataccggggaacggccttttcaatgctgtcagtgctcgtatgcttcaagggacacttacaagctgaagagacacatgagaacgcacagcggcgagaagccctacgagtgccatatctgtcatacccggtttacacaaagtggaacgatgaagatccatattcttcagaagcacggggaaaatgtccccaagtaccagtgccctcattgcgctacaataattgccagaaagagtgatttgagagtgcatatgcggaatctgcatgcctatagcgctgcagagctgaagtgcagatactgtagcgccgtgtttcatgagcggtatgcgctcatccagcaccaaaagacccataaaaacgaaaagcgatttaagtgtaaacactgctcttacgcttgcaaacaggagagacatatgacagcacatatacggacccacacaggcgagaaaccttttacttgtctgtcatgcaataagtgcttccgccaaaagcaactgcttaacgctcactttcggaaatatcacgatgccaacttcattccaactgtgtataagtgttccaaatgcggcaagggcttctctagatggatcctgtgggtaggcaactccgaagttgcagagctggggggtcccgggtcgggacccctgttgcggctgcagtccggctgccctccaggtctccatcacccaaaagcagggctcgggccggaggacccccttcccggtcagctcagacatactacagcaggaaccggcctgtctagtctgctgcagggccccctgtgtcgcgccgcatag

SEQ ID NO: 181975 - DNA, 1296 bp, synthetic construct
  misc_feature 1..1296: note = Description of Artificial Sequence: Synthetic coding sequence
  source 1..1296: mol_type = other DNA
atgttccacagcccccggcggctgtgcagcgccctgctgcagcgggacgcacctggcttgcgccgactgccagcccctggcctccgccgcccattgtctccaccagccgcagtccccaggcccgcttccccgcggctgttagccgccgcctctgctgcctcaggagcagccagaagttgctctcgcacagtctgcagtatggggaccggtacttccaggctctactccgcattggcaaaaactttgaactcatccgcagcctcccaacatcctgagtatctagttagcccagatccagaacatttggagccaattgatcccaaagagctgctggaagagtgcagggctgttctccatactagaccaccaaggtttcagagggacttcgtggacctgagaacagactgtccaagtactcacccccccattagggtgatgcagtggaatatactggcccaggcccttggcgagggtaaagataactttgtgcagtgtcccgtggaggctcttaagtgggaggagcgcaagtgtctcatcctggaggaaattctggcatatcaaccagatattctctgcttgcaagaggtggaccactactttgacaccttccagcccctgttgtcacgcctgggctatcagggcacattttttccgaagccatggtctccctgcttggatgtcgagcataacaacggaccagacggatgtgcgctgttcttcctccagaaccggtttaagctcgtcaattcggccaatatcagactgacggcaatgactctgaagaccaatcaggtggccatcgctcagacacttgagtgcaaggagtctggacgccagttctgcatcgcagtgacacacctgaaggctcgcaccggctgggaaagattccggagcgcacaaggctgtgacctccttcagaacctgcagaacatcactcagggcgctaaaattcccctgattgtgtgcggagacttcaatgcggagccaactgaggaggtgtataagcacttcgcatcaagctccttaaacctcaatagcgcctacaagctccttagcgctgacggacagagcgagccaccctataccacatggaagatccggacatcgggggaatgccggcacactctcgactatatctggtacagcaagcacgccctgaatgtgcgatctgctctcgatctgcttacggaggaacagatcggccctaaccgtcttccgagctttaactacccctcagaccacctttctctggtgtgcgatttttcctttacagaggagtccgacggactgagctag

SEQ ID NO: 181976 - DNA, 2133 bp, synthetic construct
  misc_feature 1..2133: note = Description of Artificial Sequence: Synthetic coding sequence
  source 1..2133: mol_type = other DNA
atgagccggagccccgacgccaaggaggaccccgtggagtgccccctgtgcatggagcccttggagattgacgatatcaacttcttcccatgcacctgtggctaccagatttgccgtttctgttggcaccggattaggacggacgagaacgggttatgtccggcttgcagaaagccatacccagaggatccggccgtgtataaacctctatcccaggaggaattgcagcgtatcaagaacgaaaagaagcagaaacaaaacgagcggaaacagaagatttctgagaacagaaaacatctcgctagcgtcagggtggtgcagaaaaatctggtgttcgtcgtgggtctgagccagcggctggccgaccccgaggtgctgaagaggccggagtattttgggaagtttgggaagattcacaaagtggtaataaataatagcacctcctacgcagggagccagggcccctcagcaagcgcctatgtgacttacattcgttccgaagacgcactgagagctattcaatgtgtgaacaacgtcgtggtcgacggccgaaccctgaaggctagtcttggaacaacaaaatattgcagctattttcttaagaacatgcagtgccccaaacccgattgcatgtacttgcatgagctcggcgacgaggcggcatcgttcaccaaagaggaaatgcaggccgggaaacatcaggagtatgagcagaaactgctccaggaactctataaattgaaccctaactttctacagttgagcaccggttccgtggacaagaataagaacaaggtaactccactgcagagccctatcgacaaaccttccgatagcctgagtattggaaacggggacaattctcagcagatttctaacagcgacacaccatctcccccaccagggttgagcaagagcaacccagtgattcccatttcttcgtctaatcactcggctaggagtcctttcgaaggcgcagtgactgagagtcagagcctgttttcagataactttcgtcaccctaatccaatccctagcggcctgcctccttttccatcgagcccccagaccagttcagattggcccacagcacccgaacctcaatcactgtttaccagcgagacaatacctgtatcaagctccaccgactggcaggcagcctttggtttcgggtccagcaagcagcccgaggatgaccttggattcgatccattcgacgtgactagaaaagcccttgcggacttgatagaaaaggagctgagcgtgcaagatcagccctctctgtctccgacaagtctacagaattctagctctcacacaacaacagctaaaggccccggttcagggttcctgcaccctgctgccgctacaaacgcgaactctctgaacagtactttcagtgtcctgccccagagattcccccagttccaacaacatagggctgtttacaactccttttctttccctggccaggcagccagatacccctggatggcattcccaagaaacagcatcatgcacctgaatcatactgcaaacccaacctcgaactctaactttttggatttaaatctcccaccgcaacataacacaggcctcgggggcattccagtggctgacaatagctcctccgtagagagtcttaatatgaaggagtggcaggacggacttagagccctcctgcccaatataaatattaatttcggaggactgcctaactcaagctcccccagcaacgctaatcactccgcaccgaccagtaacactgcgaccaccgatagtcttagctgggacagtccggggtcatggaccgaccccgctatcattacgggcatccccgccagcagcggcaatagcctggactctctgcaggacgacaaccctccccattggctgaaaagtctgcaggctctgacagaaatggatggcccctcagccgctccctcacagacccaccattccgcaccctttagcacccagataccacttcatagggcttcatggaacccctacccccccccctcgaatccatcttcattccatagtcctcctccaggtttccagacagcctttcgaccgcccagtaagacccccacagacttactgcagtcgtctaccctggatcggcactag

SEQ ID NO: 181977 - DNA, 3684 bp, synthetic construct
  misc_feature 1..3684: note = Description of Artificial Sequence: Synthetic coding sequence
  source 1..3684: mol_type = other DNA
atgacccagaaggtggaggagctgaaggagaccgtgaaggaggagttcatgccctgggttagccagtacctcgtcatgaagcgcgtgtccattgagcctaactttcattccctatactccaactttttggacacccttaagaatcctgaattcaacaaaatggtgctgaacgaaacctatcggaatatcaaagatctggacgtcaagagcctgctcctcgaggcatacgtgaagggacagcaagaactcctgtatgtcgtacccttcgtggccaaagtgctggagtcttcaattcgatctgtagttttccggccacctaacccatggacaatggccataatgaacgtcctggcggagctgcaccaggaacatgatctgaagctgaacttgaaattcgagattgaggtgttgtgtaagaaccttgccctcgacatcaacgagttaaagccgggcaatctactgaaggataaagacagactgaaaaatttggatgaacaactgtccgcccctaagaaggacgttaagcagccagaggaactgccccctatcaccaccaccacgacttctactactcccgcgacgaacacaacctgcaccgccaccgtgccacctcaaccacaatatagttatcatgatatcaacgtttatagtctggcaggtctggcacctcatataaccctgaacccaaccatccctttattccaggcgcaccctcagctcaagcaatgtgtccggcaggctatcgaacgagctgtgcaggagcttgtgcaccctgtcgtcgatcgatctattaaaatcgcaatgacaacctgtgaacagatcgtgagaaaggattttgcgctggacagcgaggagtcccggatgagaatcgcggcacatcacatgatgcgaaacctgactgcgggcatggccatgatcacttgtagagaacctctgcttatgtccatctcaactaacttgaaaaactcctttgctagcgcactgcgaaccgctagccctcagcagagagagatgatggaccaggcagcagcgcaactggctcaagacaattgcgaactagcctgttgttttatccagaagaccgcggtagagaaggctggacccgagatggataaacggttagcaacagagttcgaactccggaagcacgcgaggcaggaaggcagacggtattgtgaccccgtcgtgctgacctaccaagccgagcggatgccagagcagattcggctgaaagtggggggggtcgatcccaagcagctcgcagtgtatgaagaatttgctcgtaacgtgcccggctttctgccgacaaacgatctgagccaacccacagggtttctcgctcagccaatgaagcaggcgtgggccactgacgatgtggcacagatctatgataaatgtatcaccgagctggaacagcacctgcacgccataccacctaccctagctatgaacccacaagcgcaagcactgcgttccctgctggaggtcgttgtcctgagtcggaattcacgggatgcgatagcagctctgggactgctccaaaaggccgtagagggacttctggatgccactagcggagcagacgccgacttactcctgaggtatagagagtgccacctgctcgttcttaaggccctgcaggatgggcgcgcctatggaagtccttggtgcaacaaacaaatcacacggtgcctcattgaatgcagagatgaatataagtacaacgtggaggcagtggagttattgataaggaaccacctggtaaatatgcagcagtatgatctacacctagcacagtccatggaaaacgggctgaactacatggccgtcgcttttgctatgcagctagtgaaaatcctgcttgttgacgaacgatctgtcgcccatgtcactgaagcggatctctttcatacaatcgaaacactgatgcgcattaatgcacacagtcgcggcaatgctcccgagggcttgcctcagctgatggaagtcgtcaggagcaactacgaagccatgatagaccgcgcccatggcggtccgaactttatgatgcactctggcatcagtcaggcctctgagtacgacgatcctcctggactgagggaaaaggccgaatatctcctcagggagtgggtcaatctctaccattccgccgccgcaggccgtgatagcactaaggcattttccgccttcgtaggacagatgcaccagcagggaattctgaaaactgatgaccttattacccggttttttcgcctttgcacagaaatgtgtgtcgaaatttcttatcgtgcgcaggcagagcagcagcacaaccctgccgcgaaccccaccatgatccgggctaaatgttatcataacttggatgccttcgtacggctgatcgcccttctggtcaaacattctggagaggccaccaatactgttaccaagatcaaccttttaaacaaggtgctgggtatcgtggtgggcgtgctgttgcaagatcatgacgtgcggcaaagcgagttccagcagctcccataccaccggatcttcattatgctgctgcttgaactgaacgcgcctgaacatgtgctggagacaattaattttcagactttgacggccttttgcaacaccttccacattctccgacctacgaaggcaccaggattcgtctatgcctggctggagctgatttcccatcgcatttttatcgcaaggatgctcgctcacacacctcagcagaaaggatggcctatgtatgctcagcttctaattgacttgttcaaatatcttgcccccttcctccgcaatgtcgaacttactaaacctatgcagatcctatataagggaacccttagggttttgctcgtcttgttacacgatttccctgaattcctctgtgactaccactacggcttctgcgatgttattccgcctaattgcattcagctgagaaatctcattctcagtgcattccctcgcaacatgaggctgcctgatccattcacacctaacctgaaagtcgacatgctttctgaaatcaatattgcaccccgcatcctaactaacttcacaggagtgatgcccccccagtttaagaaggacctggactcttatctgaaaacacggtccccggtcacatttttatcagacctccgaagcaacttgcaggtttcaaacgaacctggcaacaggtataacctccaacttatcaacgcactcgtgctgtacgttggtactcaagccatcgcccacatccataacaaaggatccaccccttccatgtcaacaattacccattccgcacacatggatatttttcagaatctggcagtggatttggatacggaagggcgataccttttcttgaacgccatcgccaaccagctgcgctatccgaatagtcacacccactacttttcttgcaccatgctctacctgtttgcggaggccaatacagaagccattcaggagcagatcacacgggtcctgctggagcggctgatcgtcaaccgacctcacccctgggggctcctgattacgttcatcgagcttatcaagaatcctgcgttcaaattctggaaccacgaatttgtacattgtgctccggaaatcgagaagttgtttcagagcgtggcccagtgctgtatgggccagaaacaagcccagcaggtgatggaaggaactggcgcatcttag

SEQ ID NO: 181978 - DNA, 7131 bp, synthetic construct
  misc_feature 1..7131: note = Description of Artificial Sequence: Synthetic coding sequence
  source 1..7131: mol_type = other DNA
atgaacctggacagcctgagcctggccctgagccagatcagctacttggtcgacaacttaacgaagaaaaattatcgcgcaagccagcaagaaatacagcacatcgtgaaccggcacggcccagaggcggacaggcatctgctgcgctgtcttttctcacatgtggacttttccggggatggtaaatcctcaggtaaggatttccatcagacccagttcctgatccaggaatgtgccctcctgattacaaaaccaaattttatttcaaccctctcttacgccatcgataaccctctgcattaccaaaagtctctgaagcctgctccccaccttttcgctcagctatccaaggtcctgaaactgtctaaagtccaggaagtgatattcggcctcgcactgcttaatagttcatcctccgacttgcgagggttcgccgctcagttcatcaaacagaagctgcctgacctcctgaggagttatatcgatgccgacgtgtcaggtaatcaggaaggcgggttccaagatattgctatcgaggtgctccacctcttgctgtcacatctcttgttcggacagaagggcgccttcggggtgggtcaggaacagatcgacgccttcctaaagacgctgaggcgcgactttccccaggagaggtgtcccgttgtcctggcaccgctcctgtatcccgaaaagcgcgatatcctcatggatagaattttgccagacagcggcggggtcgccaagaccatgatggagtcttctcttgcagattttatgcaagaagtcggctatggcttttgtgcttctatcgaggagtgtaggaatatcatcgtccagtttggcgtgcgcgaggtgaccgcagcccaggtggcaagggtgctgggcatgatggcacgaacgcattcgggactgacagatggaataccactgcaatccataagcgcacctggctccgggatctggtctgatggcaaggataaatcagatggggctcaggcccatacatggaatgtcgaggtgctcattgacgttctgaaagaactgaatccttccctgaactttaaagaagtcacatacgagttagaccatccgggtttccagattcgagatagcaagggactgcacaatgtggtgtatggcatccagcgggggctgggtatggaggtctttccagtggacttgatttacaggccatggaagcacgcggagggtcagctcagctttatacaacattcactgataaatccggagatcttctgcttcgctgattatccttgtcataccgtggccacagatatcttgaaggcacctcccgaagatgacaatcgtgagatcgctacttggaaatcgctggatctgattgaatccctgctgcgtctggccgaagttggccaatacgagcaagtcaagcagctcttttctttcccaataaagcattgtcccgacatgctcgtgcttgcactcttacaaattaacacaagttggcacactctccgacacgagctcatctccaccctaatgcccatctttctcggtaatcacccaaattcagctatcatattgcattacgcctggcacgggcagggacagtctccttctattcgccaattaatcatgcatgccatggccgagtggtacatgcggggcgaacagtacgaccaggccaagctgtcacgtatactcgacgtcgcgcaggacttgaaagccttgtcgatgttgctgaatgggactccatttgcgttcgttattgatctggctgcacttgcctcacggagagaatacctgaaactggacaaatggttgactgataagatccgagaacatggcgagcctttcatacaagcttgtatgacttttctaaagagaagatgtcccagcatcttgggcggcctcgcccccgagaaggaccagccaaaatctgcccagcttcccccagaaaccctggccaccatgcttgcgtgtttgcaggcttgcgctgggagcgtgtctcaagagctgagtgagacaatactgaccatggtagctaattgttctaatgtcatgaacaaagcaagacagcccccgccgggtgtaatgccaaaggggcggcccccttccgccagcagtttggatgccatttctcctgtacagatagacccacttgcaggcatgactagcctatcgatcggcggctcagcggcccctcatacccagagtatgcagggatttcccccaaatctcggcagtgctttttctactccacagagtccagccaaggcgttccctccactttcaaccccaaatcagaccaccgctttttctggaattgggggcctctcatctcagctacctgtcgggggcctgggtacaggatccctcactgggattggcaccggggccctcggcttgcctgcagtgaataacgatccattcgtgcagcgaaaattggggactagtgggctcaaccagcctactttccagcaaagcaaaatgaaaccatcagacctgagccaggtttggcctgaggcaaatcagcacttctccaaagagatcgatgacgaggctaattcttactttcagagaatatataatcatcctccgcacccaacaatgtcagtggatgaggtgctggaaatgctgcaacggtttaaggactccaccatcaaacgggaacgggaagtgttcaattgtatgttgagaaacctattcgaagaataccgtttcttcccacagtaccccgacaaggaactccatatcactgcctgcctgtttgggggtatcattgagaaagggcttgtgacctatatggccctaggcctggctctgcggtacgttttggaggccttaagaaaacccttcgggtcaaagatgtattacttcggcatcgccgcgttagatcggttcaagaaccgacttaaggactacccacagtactgtcagcacttggcgagcatatcacactttatgcagtttcctcaccatcttcaggagtatatagaatatggtcaacaatccagggatccaccagtaaaaatgcagggctcaatcacgacacccggttctatagctcttgcacaagcgcaagcacaagcccaggtcccggccaaagctcctctggccggtcaggtaagtaccatggtgaccacctcaactactactaccgtggcgaagacagtaactgtaaccagaccaacgggggtctcttttaagaaagacgtgcctccgtcaatcaacactactaatatcgacaccttgttagtagcgactgaccagactgagcgcatcgtcgagccacccgaaaatattcaggaaaagatagcctttatctttaataacctttcgcagagcaacatgacccagaaagttgaagagttgaaggagacagttaaagaggaatttatgccctgggtgtctcaatacctggtcatgaagcgcgtgtccatcgaacctaacttccattctctgtatagcaattttttagacacccttaagaaccccgaatttaacaaaatggtcctcaatgaaacctacaggaacatcaaggtcctgctgacctccgataaggccgccgccaacttctctgatcgatcactgttgaagaatctgggacattggctgggtatgatcacgctggctaaaaacaagcctattctgcacacggatttggatgtcaagagcttgctgctggaagcctacgttaagggccagcaggagctattgtacgtcgtaccgtttgttgctaaggtcctggagagttccatccggtccgtggtgttccgaccacctaacccttggactatggccataatgaatgtgctggctgagcttcatcaggaacacgatctcaagttgaacctgaaattcgaaattgaggtcctgtgcaaaaacctcgctctggacataaatgagctgaaacctggtaacctgttaaaagacaaggacagactgaagaatctggacgaacagctctccgcacccaaaaaggatgttaaacagcccgaggaattaccccctatcactactactactacaagtaccacccccgcaacaaacacaacctgtacagcaaccgttccgcctcagccgcagtacagctatcacgacataaacgtgtattcgttagccgggctggccccccacatcacgctgaatccaacaatccctctctttcaggcgcacccccagctgaaacagtgtgtaaggcaagctattgaaagagctgtgcaggagctcgtacacccggtggttgatagatccattaaaatcgccatgaccacttgtgagcagatcgtgcgtaaggatttcgccctggactccgaagagtcaaggatgcgcattgccgctcatcacatgatgcgaaacctgaccgccggaatggcaatgattacctgccgcgagcccctgctcatgtctatcagtaccaatttgaaaaattctttcgctagtgccctgagaaccgccagtccccagcagagagagatgatggaccaggcggcagcccagttagcgcaagataactgcgaattggcatgctgtttcattcagaaaacagccgtggagaaagctggcccggaaatggacaagcggttagcgaccgagtttgaactgcgtaagcacgccagacaggagggccgccgttattgcgaccccgtggtactgacataccaggcggagaggatgcccgaacagatccgcctgaaagtaggcggcgtcgatcccaaacagctcgctgtgtacgaagaattcgccaggaacgtgccgggctttttgcctacgaatgatttatcccaaccaactggcttcttagcacagccgatgaagcaggcctgggctacagacgatgttgcccaaatttatgataagtgtataaccgagctggagcagcacctgcatgcgattcccccaacacttgccatgaaccctcaggcccaggcgttgcgcagtctgttggaggtcgttgttctgagccggaacagccgtgatgccatagcagctctcgggctcctgcagaaagctgtagaaggccttctggatgctacctcgggagctgatgccgacctattactaaggtacagagagtgtcacttgctggtgctgaaggccttgcaggacggacgggcttacggaagcccctggtgcaacaaacagataacccggtgtctgatagagtgtcgcgacgaatataagtataatgttgaagccgtggagttactgatcagaaatcacctcgtgaacatgcagcaatacgacctgcatctcgcgcaaagtatggaaaatggactaaattacatggccgtggcattcgctatgcagctcgtcaagatcctgcttgtggacgaaagatctgttgctcatgtcacagaggcagatctgttccacactatagaaacccttatgcggattaatgcacatagcagaggcaatgcccctgagggactcccgcagttgatggaggtggtgagatctaactatgaggcaatgattgatagagcacacggtgggcccaactttatgatgcactcagggatcagtcaagcaagtgagtatgatgaccccccaggcctcagggaaaaggctgagtacctgctcagggaatgggtcaatctctaccacagcgcagcggccgggagagatagtaccaaagccttttccgcttttgttgggcagatgcaccagcaaggcattctcaagaccgatgacttaattacacgtttctttaggctctgcacggagatgtgtgtagagatctcctacagagctcaggccgagcagcagcacaatccggctgccaatcctacgatgatacgcgcaaaatgttaccataaccttgacgcattcgttagactcatcgctcttttggtcaagcacagtggagaagctacaaatacagtcacaaaaatcaatttgctgaacaaagtgttgggaatcgttgtgggggtcctcctacaggatcacgatgttcggcaaagcgaatttcagcaactgccttaccatcgaattttcataatgcttttattagaactaaacgcccctgaacacgtgttggaaaccattaatttccagaccttgactgccttttgcaacacttttcatattctgcgaccaaccaaagcaccagggttcgtgtatgcatggctcgagcttatctcgcacaggatcttcattgcacgcatgttagcgcatactccccagcagaaggggtggccgatgtatgcccagcttttaatcgatttgttcaaatacctcgccccttttctcagaaacgttgaattgactaagcctatgcagattttgtataaggggacactccgcgttttgctggtacttctgcacgatttcccagaattcctttgcgactaccattacggattttgcgatgtgataccgccaaactgtatacaactcaggaacctcattctttcagcctttccacgcaatatgcgactacccgatccatttacccccaaccttaaagtcgacatgctctccgaaattaacatcgcccctaggattcttaccaacttcacaggtgtgatgccaccgcagttcaagaaggatctcgattcctacttgaagacaagatctcctgttacattcctatcggacctgcgatccaatctccaggtgtctaatgaacctggaaaccgctacaatctccagctgataaatgccttggtcctatacgtgggtacacaggcgatcgctcatatccacaataaaggaagtacaccctccatgtctaccatcacgcactcagcccacatggatatttttcagaatttggccgtggacttggatacggaaggaagatatttgtttctcaacgcaattgcaaatcagctgcgctaccctaattcccatactcattacttctcatgtactatgctataccttttcgcggaagccaacaccgaggctatccaggaacaaatcactagggtgctcctagagagattaattgtaaataggccccacccttggggattgctcattacattcattgagcttataaagaacccagcttttaaattctggaatcacgagttcgtgcattgtgcccctgagatcgagaagctgtttcagtccgttgctcagtgttgcatggggcagaagcaagcccagcaggtgatggaagggaccggggcctcatag

SEQ ID NO: 181979 - DNA, 6453 bp, synthetic construct
  misc_feature 1..6453: note = Description of Artificial Sequence: Synthetic coding sequence
  source 1..6453: mol_type = other DNA
atgaacctggacagcctgagcctggccctgagccagatcagctacctggtggacaacttaactaagaaaaactacagggcaagtcagcaggagatccagcatattgttaatagacacgggcctgaggccgatcgacacctgctgaggtgcctgtttagccatgtggacttttcgggtgacggaaaatcttctggtaaggactttcaccagacgcagttcctcattcaggagtgtgctttactgatcacaaagcccaattttatcagcactctgtcttatgccatagataatcctctccactaccaaaagtccctcaaacctgctccccacttatttgcacagctgtccaaagtcctcaagttaagtaaagtgcaggaagtcatctttgggctcgcactcctgaactcatcttccagcgatcttaggggctttgctgcccaatttatcaaacagaagctgccggatctgctgcgttcttacatcgatgctgatgtgagcggcaaccaagaggggggctttcaagatattgcaattgaggtattacaccttttattgagccacttgctcttcggccaaaagggagctttcggggtggggcaggaacagatagatgccttcttgaaaactctgcggcgtgactttcctcaggagcgatgtccggtagtgcttgcgccattgctctacccagagaagcgagacattttgatggacaggatactaccggacagcggcggcgttgccaaaacgatgatggagtcgtccctcgcggacttcatgcaagaggtgggatacggtttctgcgcatcaatcgaagagtgtcgtaatataatcgtccagtttggtgtcagagaagttacggccgctcaggtggcccgagttttaggaatgatggcccgcacccattcaggcctaacagacggcataccgctccagtcgatttcagcgcccggaagcggcatttggtcggacggcaaagataagtcagacggcgcccaagcgcatacctggaacgtggaggtgctaatcgacgtgcttaaggagcttaacccaagcctgaactttaaagaggtaacttatgagctcgaccacccaggttttcagatcagggactcgaagggactgcacaatgtggtatatggaatccaaaggggactgggaatggaggtgttccccgtggatctgatttaccggccttggaaacacgctgagggccagctaagttttattcaacactccctgataaatccagagatcttttgttttgcagactatccctgccatacagtggccacggacatcctgaaagcccccccggaggacgataaccgagaaattgcgacgtggaagtcactcgacctgatcgagtccctattgagattagctgaggtgggccagtacgaacaggtgaaacaactgttttcctttccaatcaaacactgtcccgacatgctcgtgctggctttattgcagattaacacctcatggcacactctgagacacgagctgatttccacactgatgcccatttttctgggcaaccacccaaactccgccattatcctccactacgcatggcacggtcagggacagtccccttccatcaggcagctgatcatgcatgccatggctgagtggtacatgcggggcgagcagtacgaccaggccaagttgtccagaatactggatgtcgcgcaagacctgaaggcactgtccatgctgctcaacgggacaccgtttgcctttgtcattgacctggccgcgctcgcatcgaggcgagagtacttgaaactggacaagtggttgacagacaagatcagagagcacggtgaaccctttatccaggcatgcatgaccttcttgaagcgacgctgtccatccattctaggtgggcttgctcctgaaaaggatcagccaaaatctgcccagctgcctcctgaaaccctggccacaatgctggcctgcctccaggcctgcgctggcagcgtatcacaggagttgtcggaaacaatcctcacgatggtggctaattgctctaatgtcatgaataaggcccggcagcccccaccgggagtcatgcccaaagggcgccctcccagcgccagcagcctagatgctataagccccgtgcagatcgacccactggctgggatgacctccttgtctatcggtggcagtgcagcacctcacacccagagtatgcagggatttccacccaacttgggcagtgccttttcaaccccgcaatctcctgcaaaggcctttcccccactgtccacacccaatcagaccacagccttctcaggaattggaggattgagcagtcagttacccgtcggtggtttaggcaccggttctttgaccggcattggcacaggtgcattggggttgccagctgtcaataacgacccatttgtccaaagaaaacttggaacttccgggttaaaccagcccaccttccagcagactgacctttctcaggtatggccggaagcgaatcagcacttttctaaagagattgacgatgaagccaatagctacttccagagaatatataatcacccaccacacccgactatgtcagtagacgaagtcttggagatgctgcagcggttcaaagatagcactattaaaagagagcgcgaggttttcaattgcatgctgcgaaatttgttcgaggagtaccgcttttttccacaatatccagataaggagctccatataactgcctgcttgtttggcggaatcatcgaaaagggactcgtgacctacatggctctgggtctagctcttcgatacgttctcgaagcactgcgaaaacccttcggatccaagatgtactattttggtatcgcggcccttgaccgcttcaagaacagactaaaagattatccacagtactgtcaacatcttgcatccatatctcactttatgcaatttccacaccacctacaggaatacatcgaatatggacagcagtcgagggacccccccgtaaagatgcagggatccatcacaactcccgggagcattgccctggcccaggcacaggcacaagctcaggtgcctgcaaaggctccgctggccggccaggtgtccacaatggtaacaaccagcaccacaacaacggtagcgaaaactgttaccgtaacccgccctaccggagtgtctttcaaaaaagacgtgcccccctccatcaacaccacaaatattgacactctgctggtggccaccgatcaaactgagcgcattgttgaacctccagaaaatattcaagaaaaaatcgccttcatttttaataatctctcacagagcaatatgacacaaaaggtggaggagctgaaggaaacagtgaaagaagagttcatgccgtgggtttcccagtacctggtaatgaagcgtgtgtccatcgagcccaatttccatagcctttattcgaatttcctcgacacccttaaaaatcctgaatttaataagatggtccttaatgagacatacaggaacataaaggtgctcctcacgagcgacaaagccgccgcaaatttctcagatcgcagcttgctaaagaacctggggcactggctgggcatgataacactcgccaagaataagcctattttgcacactgatctcgacgtcaaatccctactgctggaggcctatgtcaagggtcagcaggaacttctgtacgttgtgccattcgtagcaaaggtcctagagagttcgatccgctcagtcgtgtttcggccacccaatccttggacaatggccatcatgaatgttctggcggaactccaccaggagcatgatctcaagctaaatctgaagtttgagattgaggtcctgtgcaaaaatcttgctcttgacattaatgagttgaagcccggcaatctgttgaaggataaggaccgccttaagaacctggacgagcagctgagcgccccaaagaaagatgtgaagcagccagaggagttgcctcctatcacgactacaaccacatccacaacaccggccacaaatactacttgcacggctacagtgcccccacagccacaatattcataccatgatatcaatgtgtacagtctagccggcttggctccccacatcaccctcaatccgactattcctctcttccaggcccaccctcaacttaagcagtgtgtgcggcaggcgattgagagagctgtacaggagctggtgcatccagtagtggaccgaagcattaaaatcgcaatgaccacttgcgaacagatcgtccgaaaggacttcgcgctggattcagaagaatctagaatgcgcattgctgcacatcatatgatgaggaaccttaccgccggcatggccatgattacttgcagagaacctctgctcatgagcatttcaacaaacctgaaaaacagctttgctagtgctttgaggaccgcctcaccacagcaacgggaaatgatggaccaggcggccgcccaactggcccaggataactgcgaacttgcctgttgcttcattcaaaagacagccgtcgagaaagccggcccggaaatggacaagcggctagctaccgagtttgagttaaggaaacatgccagacaagagggccggcggtactgcgatccagtggtgctaacataccaggctgagaggatgcctgaacagatacgtctgaaggtggggggagtggaccccaaacagctggcagtttatgaggagtttgcacgtaatgtgccagggttcctccctacaaacgacctgagccagccaactggatttctggctcaaccgatgaagcaggcttgggccaccgacgatgtcgcccagatttacgacaaatgtatcaccgaattggagcaacacctgcacgcaattccacctactcttgccatgaaccctcaggcccaagcactgaggtcactgctcgaggttgtggtcctgagcaggaactcccgcgacgctatcgcggctctgggactgctgcaaaaggccgtcgaagggcttctggatgccaccagtggggcggacgctgacctgctgcttcgctatagagaatgtcatttgctggtcctgaaggccctgcaggatggacgcgcctatggtagcccgtggtgcaacaagcagattacaaggtgtctgattgaatgtagggacgagtacaaatacaacgtagaagcggtcgaactccttattcgtaaccacctggtgaatatgcagcagtacgatcttcatctggctcaatccatggaaaatgggctcaactacatggctgtggctttcgctatgcagctcgtcaaaatactcctggtggatgagcggtccgtggcccacgtcaccgaggccgacctgtttcacactatcgagacgctgatgcggattaatgcccactcccgagggaatgcacccgagggactgcctcagcttatggaggtcgttaggtctaattacgaagccatgatagatagagcccacggggggccaaatttcatgatgcatagcggcatttcacaggctagtgagtatgacgatccacccggtcttcgggagaaggccgaatatttactgcgcgagtgggtaaacttgtatcattccgccgcagctgggcgcgatagtaccaaggcttttagtgctttcgtcggccagatgcatcagcaaggcatactgaagactgatgatctgatcacaagatttttccgtctctgcacagaaatgtgcgtggagatctcatacagagctcaggccgagcagcagcataatcccgctgccaatccaactatgattcgagctaagtgctatcataacctcgatgcattcgtgcggcttatcgcgttgctggtgaagcacagtggcgaggccactaacaccgtcacaaagatcaatctgttgaacaaagtgctcgggattgtggttggcgttctgcttcaagaccatgatgtccggcagtctgaattccagcaactgccctaccatagaatctttatcatgctactgttggagctcaatgcacccgagcacgtcctagagacgattaacttccagaccctgaccgccttctgcaacactttccacatcctccggcctacaaaggcccctggttttgtttatgcctggctggagctaataagtcataggatttttattgcgcgcatgctggcgcataccccccaacagaagggctggccaatgtatgctcagcttctgattgatctgttcaagtaccttgctccattcctgcggaacgtcgaacttaccaaaccaatgcagatactgtataagggcactctgagagtgctcttggtcttattgcatgactttccagaatttttgtgtgattaccattacggcttttgcgatgtaatcccacctaattgtattcagttgagaaacctgatcctgtcagcctttccgaggaatatgcgcctgcctgacccttttaccccgaacctgaaggagattatgctgtag

SEQ ID NO: 181980 - DNA, 3213 bp, synthetic construct
  misc_feature 1..3213: note = Description of Artificial Sequence: Synthetic coding sequence
  source 1..3213: mol_type = other DNA
atgctgctgaacggcacccccttcgccttcgtgatcgacctggccgccctggcctctcgtagggagtacttgaaactggataagtggctgactgataagattcgcgagcacggtgaaccctttatacaagcttgcatgacctttctgaagcggaggtgccctagtatcctgggagggcttgcacccgagaaagaccagcccaagtctgctcagctcccccccgagacattagctaccatgctcgcttgcctgcaggcctgtgccgggtccgtgagtcaggagttaagcgagaccattttgaccatggttgctaactgctcaaatgtgatgaataaggcccggcagcctcccccaggagtgatgcccaaaggccgcccccctagtgccagctccctcgacgctatttcacctgtccagatagaccccctggctggcatgacttccctgtctataggaggaagcgccgccccacacacgcagtccatgcaagggtttccgccaaatctcggctccgcattcagcacgccccagtcccccgctaaagccttcccgcctctgagtacccccaatcaaacaaccgcattcagtggtatagggggattaagctcccagctgcctgtaggcggactgggcacagggagcctcaccggaatcggcaccggcgctctagggttgcctgcagtgaacaacgatccatttgtacaacgcaagttgggcacttctggcttaaaccagccaacctttcagcaaagcaaaatgaagccctctgatctgtcacaggtttggcccgaagcgaaccagcatttctcgaaggagatcgatgatgaagccaattcttacttccagaggatctataaccacccaccacatcccaccatgagtgtcgatgaggttctagaaatgttgcaaagatttaaagacagcactatcaagcgtgagcgggaggtgtttaactgtatgttgagaaatctcttcgaggagtatagatttttcccacaatacccagataaagagctgcatattactgcctgtctatttggcggcattattgaaaagggcttggtaacatacatggccctgggtctcgctctcagatatgttctggaagcattgagaaagcccttcggttctaagatgtactacttcggtatcgcggctctggaccggtttaaaaacaggttgaaggactaccctcagtattgccagcacctcgcatcgatctcacatttcatgcagttccctcaccacttgcaggaatacatcgagtacggccagcaatctcgcgacccacccgtcaagatgcaggggtccatcaccactccaggcagtattgctctagcacaggcacaagcacaggctcaggtgcccgcaaaggccccgttggccggtcaggtaagcaccatggttacaactagtactaccacaacagtcgccaagaccgtcacagtgactaggccgaccggcgtgagcttcaaaaaagatgtccccccatctatcaatacaactaatattgacactctcttagttgcaacggaccagacagagaggatcgtcgagccacctgaaaacatccaggagaaaattgcgttcatcttcaacaacctatcacagagcaatatgacccagaaggtggaggaactgaaggaaaccgttaaggaagaatttatgccctgggtgtcacagtacttagtgatgaagcgggtttccattgaacctaattttcatagtctgtactcgaatttcctggacacccttaagaatctcataacgcgctttttcagactgtgcaccgagatgtgtgtagagatttcttaccgagcgcaggccgagcagcagcataaccccgcggccaacccgaccatgatccgcgccaagtgttatcacaacctggatgctttcgtaaggctgattgcgctgctggtgaagcactccggcgaagccacgaatactgtgacaaagattaacttgctcaacaaagtgctcggcatagtcgtaggggtattgctgcaggatcatgatgtgaggcagagcgaatttcagcagctgccttatcatcggatattcataatgcttcttctggagcttaatgcaccggagcacgtcctggaaaccatcaactttcagacgctcactgctttctgtaacacattccacattctacgacctaccaaggcacccggcttcgtgtacgcctggttggagcttatatcccaccggatcttcatcgcacggatgctggcgcacaccccgcagcagaagggctggcccatgtatgcacagctgttaatcgatctgttcaagtacctggctcccttcctacggaacgttgaactgacaaagccaatgcagatcctgtacaagggaactttgcgggtcctcctggtcttattacatgacttccccgagtttctttgcgattaccactatggcttttgcgacgtgataccaccaaattgtatccagcttaggaacctgatactcagcgccttccctcggaatatgcgtctgcccgacccctttacgccgaacctcaaagtcgatatgctgtctgagatcaacattgcccctcgaatactgactaacttcaccggcgtgatgccccctcaattcaaaaaggaccttgattcctacttgaagacccgttcacctgtcacctttctgtcagacctccgatccaatcttcaggtcagcaacgagccaggcaatcgttacaacctgcagttaatcaacgccctggtgctgtatgtgggaacgcaggctattgctcacatccacaataaggggagcactcccagcatgtctacgattacacattccgctcacatggacattttccagaacctggccgtggatctcgacaccgagggccgctacctatttctgaatgcgatcgcaaatcaattgcgttaccctaactctcacacacattacttctcttgcacaatgctctacctcttcgcggaagcgaacacagaagctatccaggagcagattactagggtgctgttggaaagattaattgtgaacagaccacatccttggggtcttttaatcacttttatcgaactgatcaaaaatccggcctttaagttctggaaccatgaattcgttcattgtgcccccgagattgagaaactgttccaatctgttgctcagtgctgcatgggccagaaacaggcccagcaggtgatggagggtaccggggcctcctag

SEQ ID NO: 181981 - DNA, 4656 bp, synthetic construct
  misc_feature 1..4656: note = Description of Artificial Sequence: Synthetic coding sequence
  source 1..4656: mol_type = other DNA
atgaacctggacagcctgagcctggccctgagccagatcagctacctggtggacaatctgacaaagaaaaactaccgggcaagtcaacaggaaatccagcacatcgtgaatcggcacggaccagaggcagatcgtcatctgctgaggtgcctattttctcatgtggacttctctggtgacggtaagtcatcaggtaaggactttcaccagacccagtttctgattcaggagtgcgcattgctgattacgaaacctaactttatttccacgctgtcatacgcaatcgataatcccctccactaccaaaagtcgctgaagcctgccccacatctctttgctcagctgtctaaagttctcaaattgagcaaggttcaggaggtgatattcggcctagccctcttgaatagtagtagttccgaccttaggggcttcgccgcccagtttattaagcagaagcttcccgacctgttacggagttatattgatgccgatgtatctggtaatcaggagggaggttttcaggacatcgcaattgaggtcctgcacctgctgctctctcacctgctgttcggccagaaaggtgccttcggcgtgggccaggagcagatcgacgccttcctgaaaacactacgtcgcgatttcccacaggaaaggtgccccgttgttctggcgcctttattgtaccccgagaaacgcgacatcctaatggaccgcattctcccagatagtgggggggttgccaagaccatgatggagtcttcgctcgcggactttatgcaggaagtgggatatggcttttgtgccagtattgaggaatgtaggaatatcatcgtacaatttggcgttcgagaagtgaccgcagcccaggttgccagggtacttgggatgatggctcgcacccatagtggccttaccgatggtatccctcttcagagtatctcggcccctggaagcgggatctggagcgacggaaaggataagagcgacggggcacaggctcatacctggaatgtagaggtgctcatcgacgtgctgaaagagctgaacccttcgcttaacttcaaggaggtgacatacgaactcgatcaccctggttttcagataagagattcaaaaggactccacaacgtggtgtatggtatccaaagaggactgggcatggaagtgttccccgtcgatctgatctacagaccctggaaacatgccgaggggcagctgtcattcattcagcattccctgatcaatccagagattttctgctttgccgactatccatgccacaccgtcgctaccgatatactgaaggccccgccggaagacgataacagagaaattgccacctggaaatctcttgacctcatcgaaagcctgttacgtctcgccgaagtaggacagtacgagcaggttaaacagctgttttcgtttcccatcaagcactgtcccgacatgctggtccttgcgctcctccagattaataccagctggcatacacttaggcacgagctcatttcaacactgatgccaatctttctggggaatcacccgaatagcgctataatattgcactacgcatggcacggacagggacagtctcctagcattcgccagctgattatgcatgcaatggctgagtggtacatgaggggcgaacagtacgaccaggctaagcttagtagaatcttggatgtggcacaggacctgaaggcccttagcatgctcctcaacggcacaccctttgcattcgttatcgacctagcagccctcgcctcccgaagggagtatctgaagttggacaagtggcttacagacaaaatccgagagcacggcgaaccgtttatacaggcttgcatgacctttctgaaaaggaggtgccctagcattctgggggggctcgccccggagaaggaccagccaaaatcagcccagctgccacccgagaccctggcaactatgctggcatgtctgcaagcctgtgctggtagcgtttctcaggagttaagcgagacaatcttgactatggtggctaactgcagcaacgtgatgaacaaagccaggcagcctccacctggtgtgatgcccaaaggccggccgccctctgcatccagcctagacgccatcagccccgtccaaattgatccgcttgccggcatgaccagcctgtctatcggcggctccgctgccccacatactcagtctatgcaggggtttccccctaatctcgggtcagccttcagcacaccacagagccccgccaaagcatttcccccacttagtacccctaaccaaaccactgcttttagcggaatcggcggcctgtcttctcaacttccagtgggcggcctgggcaccggatccctgaccgggattggaacgggggcactgggtctgcccgcagtcaataatgacccctttgtccagagaaaactaggtacctccggtcttaatcagcctaccttccagcagtccaaaatgaaaccgtcagatttatcacaggtttggcctgaggcgaaccagcatttctctaaagagattgacgacgaggcaaattcttattttcagagaatctataaccaccctccccaccccactatgtccgtggatgaagtacttgagatgctccagcgattcaaagattcaaccatcaagcgggagagggaagttttcaactgcatgctgcgcaacctcttcgaggaataccgcttcttcccacaataccctgataaggaactccatattactgcttgtcttttcggaggaataatcgaaaaagggcttgttacctacatggctttgggactggctctgcgttacgttctggaagctcttaggaaaccatttggcagcaaaatgtactatttcggcatcgccgcactggacagattcaagaacaggctcaaggattatccgcagtactgccaacacctggccagcatctctcacttcatgcagttcccacatcaccttcaggagtacatcgaatacggccaacagtcccgggatcctcccgtgaaaatgcagggcagtatcacgacaccagggtcaatcgcactcgcacaagcacaagcccaggcccaagtgcctgccaaggccccgctcgcaggacaggtgtccaccatggtgaccaccagtaccacaactactgttgcaaaaacagtgaccgtgacccgcccaaccggagtgtcattcaagaaagatgtcccacccagcatcaatacgactaacattgacactctgttggtggcgaccgatcagaccgagcggattgtggagccaccagagaacatacaggagaagatcgcatttatctttaataatctgtctcagagtaacatgactcaaaaagtagaggaacttaaggaaacggtgaaagaggaattcatgccttgggtgtctcaatatctggttatgaaacgcgtctccatcgagcctaactttcatagtctttactctaattttctggacactctgaaaaacccagaattcaataagatggtcttgaacgaaacctacaggaacattaaggttctgctgaccagcgataaggccgctgccaacttcagcgatcgaagcctgctgaaaaatttggggcactggctcggaatgatcactttggccaagaacaagccaatcctccacacagacctggatgtcaaaagcctgttgctcgaggcgtatgtgaaaggacagcaggagctgttgtacgtggtgccttttgtggcgaaagtcttagagagctccatacgcagtgtggtgtttcgtccacctaatccctggacaatggcaatcatgaatgttctggcggagctgcaccaggaacacgacctcaaactgaatcttaagtttgagattgaagtgctgtgtaaaaatctggccctagacatcaacgagctgaagccaggcaaccttctcaaggacaaagatcggctgaaaaacctagatgagcagctttcagctccaaaaaaagacgttaaacaaccagaagagctgccaccaattactaccaccactacatccacaacaccagccactaacacgacatgtactgccaccgtccctccccagcctcaatacagctatcacgatattaacgtgtattccctggccgggctcgccccacacatcacccttaaccctactatcccgctgtttcaggctcatccccaacttaaacagtgcgtgcggcaggccattgaacgcgcggtccaggaactcgtacaccctgtggtggaccgaagcataaagatagcgatgacaacctgtgagcaaatcgtgcggaaagatttcgcactggattccgaagagagccgtatgagaatcgccgcccaccacatgatgcgaaacctgaccgctggcatggctatgatcacatgtcgggaaccactacttatgagtatctccacgaaccttaagaatagtttcgcctcagccttgagggtctcttggctcttcccctggtatagatacaagacctactactgcctctctgtaatcatcttcttctttgtctatatttggcattgggccttgcccctgattctgaacaatcatcacatctgcctgatgtctagcataatccttgattgcaatagcgtccgacagagcatcatgtctgtctgttttttcttcttcctcctgtactctcagcatgacgtgtag

SEQ ID NO: 181982 - DNA, 951 bp, synthetic construct
  misc_feature 1..951: note = Description of Artificial Sequence: Synthetic coding sequence
  source 1..951: mol_type = other DNA
atgctgctgctggagctgaacgcccccgagcacgtgctggagaccatcaactttcagacacttactgccttttgcaataccttccacatcctgaggcccactaaagccccaggcttcgtgtacgcctggctggagcttatcagccatcggatcttcatcgcaagaatgctagcacatactccgcaacagaaaggatggccaatgtatgcccagctgttgatagatttattcaaatatctggcacctttcctccgaaacgtcgaactgacaaaacccatgcagattctgtataaagggactctgcgtgttttgctggtgttactgcacgactttccagaattcctgtgcgactaccattacggcttttgcgatgtgattccacctaactgtattcagttaaggaatctcattctctccgctttccctagaaacatgcggcttcctgatccttttacccctaacttgaaagtggacatgctctccgagatcaacatcgccccccggattctcaccaactttacaggcgttatgccacctcagttcaagaaggacctcgactcctacctcaagaccagatcccctgtcactttcctgagcgatctgcgtagtaaccttcaagtctccaacgaacccggcaaccgctataacctccaattaatcaacgctctggtgctgtatgtgggaacccaagccatcgcccatatccacaataagggatctaccccaagtatgtccaccatcacgcacagtgcacacatggatatttttcagaacctggcagtcgacctggacaccgaaggcaggtatttgttcctgaatgctatcgccaatcagtccgggacccaaattgcaaccctcaccaccagcgtagcgccatgctgtacattcctacaaaggccaatccgaaaaccatcgaagaacaggagccaagagtttagttggaacggatag

SEQ ID NO: 181983 - DNA, 2778 bp, synthetic construct
  misc_feature 1..2778: note = Description of Artificial Sequence: Synthetic coding sequence
  source 1..2778: mol_type = other DNA
atggaccggagcggcttcggcgagatcagcagccccgtgatccgggaagcagaggtaacacggaccgcaaggaagcagagtgcgcagaagcgggtcttacttcaggctagtcaggatgaaaattttggcaataccacccctagaaaccaggtgatccctcgtacacccagttccttccgtcagccctttacacctacaagcagatccctgctgaggcaacccgacatctcttgtatcctcggaaccgggggcaagtctccacgcctgacccagagcagtggcttttttggcaatctgagtatggtgaccaatctcgatgactcaaattgggccgcagccttttcaagccagaggtctggtctgttcaccaatactgaaccccacagcatcaccgaggacgttaccataagcgccgtgatgctgcgagaggacgatccaggagaggcggcatctatgagcatgttcagtgacttcctgcaaagttttctcaagcactcttcttctactgtttttgacctggtcgaagagtacgaaaatatctgtgggagtcaagtgaacatcctcagcaaaatcgtgtcccgagctacccccggactccagaagttctcgaaaactgccagtatgctgtggctgctccagcaagaaatggtgacctggaggttactggcttcattataccgggacaggatccaatctgccctagaggaggaaagcgtgttcgccgtgacagctgtcaatgcatccgaaaaaaccgtagtggaggcactcttccaacgagacagcctggtacgccagtcccagctagtggtggactggctcgagagcatagccaaagacgaaatcggtgagtttagcgacaatattgagttttatgcaaagagcgtgtactgggagaacactctgcacaccttaaagcagcgccagcttacaagctacgtggggtccgtcagacctctcgtgactgaactggaccccgacgcacctatcaggcaaaaaatgcctctggacgatttggaccgcgaggatgaggttaggttgctcaaatacctttttacgttaataagggctgggatgaccgaggaagcccagagattgtgtaagcggtgcggccaggcatggagagccgctacattggagggatggaagctataccatgaccccaacgtaaatgggggcacagagctggagcctgttgagggcaatccgtatcggcgcatctggaagatttcctgctggcgcatggcagaggatgaactttttaaccggtacgaaagggcaatctacgccgcgctctccggcaatttgaaacagctcttgcccgtatgtgacacctgggaagacacagtgtgggcatacttccgagtcatggtagacagcttggttgagcaggaaatccagacaagtgtggctaccctggacgagactgaagagctgccgagagaatacctgggcgccaattggacacttgagaaagtgtttgaagagctgcaggctacagacaagaaaagagtcctcgaagagaatcaagaacactatcacattgtgcagaaattcctcatcctgggcgatatcgatgggctcatggacgaattttctaaatggttatctaagagcagaaacaacctgccaggacatctcttaagattcatgactcaccttattcttttctttaggacccttggactccagacaaaagaggaggtgtcaatagaggtgttgaaaacctatatccagcttctaatccgcgagaaacacaccaatctgattgccttttatacctgccacttacctcaggacctggcagtcgcccagtacgcattatttttggagtcagtgacagaattcgaacagaggcatcactgcctcgagcttgccaaggaggctgacctggatgtggccactatcactaaaacagtggtggagaacatccggaagaaagacaacggcgagttctcacatcacgatctcgcacccgcgctcgatacaggcacaacagaagaagatcggcttaaaatcgacgtgattgactggttagtcttcgaccccgcccaacgtgctgaagccctcaagcagggcaacgccatcatgcgcaagttcctggccagcaagaagcacgaagccgccaaagaagtgttcgtcaaaattccccaggactccatcgcagaaatctataaccagtgcgaagaacaaggaatggagagtcctctgccagcagaggatgacaacgctatccgggaacacctgtgcatcagggcttaccttgaggcacatgagactttcaacgagtggttcaagcatatgaatagtgtgccacagaaacccgctctgataccacagcctacatttaccgagaaagttgctcatgagcataaggaaaaaaaatacgaaatggacttcgggatttggaaggggcacttggacgccttgaccgctgacgtgaaagaaaaaatgtataatgtgttactctttgtggacggagggtggatggtggatgtccgcgaggacgctaaagaggatcacgagaggacccaccagatggtcctgttgagaaaactctgtcttcccatgctgtgcttcctgctgcacactatcttgcatagtaccggtcagtaccaagagtgcttacagctagccgacatggtatcctccgagcggcacaagctctacctggttttttcaaaggaagagttgcgtaaactcctgcagaagctgcgcgaaagctccttaatgcttctcgaccaaggccttgaccccctgggatacgaaattcagttgtag

SEQ ID NO: 181984 - DNA, 1623 bp, synthetic construct
  misc_feature 1..1623: note = Description of Artificial Sequence: Synthetic coding sequence
  source 1..1623: mol_type = other DNA
atggtgcggaccgacggccacaccctgagcgagaagcggaactaccaggtcaccaactctatgttcggcgcgagcagaaaaaaattcgtagaaggagtcgattctgattatcatgacgagaatatgtattactcccagtccagtatgttcccacatcgcagtgaaaaagatatgctcgccagcccttccaccagtggacagctttcccagttcggcgcatcattatatgggcagcagtctgccctcggactgcccatgcgcggcatgtctaataatacaccccaactaaacagatccctgagtcaagggactcagctgcccagtcacgtgacacccacaaccggggtcccaacaatgtctctgcataccccacccagtccaagtcgcggaatcctacccatgaatcctcgcaatatgatgaaccatagtcaagtgggacaaggaattggcatcccatccagaacgaatagcatgtcttcgagcggcctcggctctcccaatagaagtagcccgagcatcatctgtatgcccaagcagcaaccgtcccgccagccttttaccgtcaattcaatgtcaggcttcgggatgaatcggaatcaagcgttcggcatgaataatagcttatcaagcaatattttcaatggcaccgatggctctgagaacgtgacagggttggacctcagtgatttcccagccttggcagataggaaccgcagggagggcagtggtaatcccacccctctcataaaccccctggctggtagagctccttacgtggggatggtaaccaaacctgccaacgagcagagtcaggattttagtattcataacgaagacttcccagccctccctgggagcagttataaggatcctacttcctccaacgacgacagcaagtccaatctcaacacgtccgggaagactacatcctcaactgatgggccgaaatttcccggagacaaatcaagtaccacgcagaacaacaaccaacaaaagaagggcatccaggttctccctgacgggagagtcacgaacattcctcagggtatggtcacagaccagttcgggatgatcggacttctgacgttcatacgagctgccgaaaccgacccgggcatggtgcacctggcgctcggctccgacctgaccactctaggcctgaatttgaactccccggaaaacctctatcctaagttcgcaagcccttgggcttcctcaccatgtcgcccccaggatatcgactttcatgttccttccgagtacctcacgaacatccatatcagagataaactcgctgcaattaaactcggtcgctacggtgaagatctattattctacctgtactacatgaatggaggcgacgtgctacagctcctggctgcggtggaactctttaaccgagattggaggtaccacaaagaggaacgagtgtggatcaccagggctccaggcatggaacctaccatgaagaccaacacctatgagaggggaacttattacttcttcgattgtctcaattggcggaaggtggcaaaagaattccacttggaatatgataagctcgaggagagaccacacctccctagtacattcaattataacccagcgcaacaagcattctag

SEQ ID NO: 181985 - DNA, 78 bp, synthetic construct
  misc_feature 1..78: note = Description of Artificial Sequence: Synthetic coding sequence
  source 1..78: mol_type = other DNA
atggtgcggaccgacggccacaccctgagcgagaagcggaactaccaggttacaaatagtatgttcggagctagctag

SEQ ID NO: 181986 - DNA, 552 bp, synthetic construct
  misc_feature 1..552: note = Description of Artificial Sequence: Synthetic coding sequence
  source 1..552: mol_type = other DNA
atggtgcggaccgacggccacaccctgagcgagaagcggaactaccaagtcacaaattccatgtttggcgctagtcgcaagaagtttgttgaaggtgtggattccgattatcatgacgagaatatgtattactcccagagctctatgtttccccacagaagtgagaaagacatgctcgctagcccatccactagcgggcaactgtcacaatttggcgcctcactctacggtcagcagagtgctcttggtctccccatgagagggatgagcaacaatactcctcagctgaatcggtcactgtcacaaggcacccaactaccatctcacgtgactcccactactggggttcctactatgtccctccatacgccgcccagtccttccagagggattttacccatgaaccctagaaatatgatgaaccacagccaggtcggacaaggcattggtatcccaagtagaactaactccatgtcatcatccgggttaggttctcctaatcgttctagtcctagcataatttgtatgccaaagcagcagccgtcgaggtag

SEQ ID NO: 181987 - DNA, 1623 bp, synthetic construct
  misc_feature 1..1623: note = Description of Artificial Sequence: Synthetic coding sequence
  source 1..1623: mol_type = other DNA
atggtgcggaccgacggccacaccctgagcgagaagcggaactaccaggtgaccaactccatgttcggggcatcccggaaaaagtttgtggagggtgtggatagtgattatcatgatgagaacatgtattactcccaaagctcaatgtttccacatcgaagcgagaaggacatgctggcctcaccatctacctccggacaacttagtcagtttggcgcgtcactttatggccagcagagcgcgcttggccttccgatgcggggtatgagcaataacaccccacagctaaacagaagcctgtctcaaggtacacagttgccttcacatgttactccaacaactggagtgcctactatgtcgctccacactcctccctcaccctctagaggaatcctgccgatgaatcccaggaatatgatgaatcattctcaggtgggccaaggcatcggaatcccttcccgaacaaactcgatgtcctcctctggactgggttcccccaatcgttccagccccagcatcatctgcatgcccaagcagcagccaagtcgacaacccttcacggtcaattctatgtctggcttcggcatgaaccgcaatcaggccttcgggatgaacaattctttaagctccaatatattcaatgggactgatggctccgagaacgtgacaggtctggacctgtccgacttcccggcactggccgacaggaaccgccgggaaggaagcggcaatcctacacctctgataaacccactggccggcagagccccatacgtgggaatggtaaccaaacccgccaatgaacaatctcaggacttctcaatccacaatgaagactttccagcattgccgggatcatcgtataaagatccaacctcatcaaacgacgacagcaagagcaatctaaacactagcgggaagaccacctccagcacagacggacccaaattccccggcgataagtcttcaacaactcaaaacaacaaccaacagaagaaaggcattcaggtcttgccagacggacgggtgactaatatccctcagggcatggtgaccgaccagtttggcatgatagggctccttacattcatacgagcagctgagacagatccgggaatggttcacctcgccctgggctctgatctgacaacactcgggcttaacctcaattcccccgaaaacctgtaccctaagtttgccagcccctgggcctcctcaccttgtcgacctcaggatatcgacttccatgtgccctcggaatacctgactaatatccacatcagggacaaacttgctgccatcaaactcgggagatatggcgaggacctgctgttttacctgtattacatgaacggcggggatgtacttcagctactcgctgccgtcgaactcttcaatagagactggaggtaccacaaagaagagcgagtgtggattactcgggccccaggaatggagcctacaatgaagactaatacttatgagcgcggtacctattatttcttcgactgcctgaattggaggaaggtagcaaaggagttccatttggaatacgataagctcgaagaacggccccatttaccgagtaccttcaattataatccagctcagcaagccttctag

SEQ ID NO: 181988 - DNA, 576 bp, synthetic construct
  misc_feature 1..576: note = Description of Artificial Sequence: Synthetic coding sequence
  source 1..576: mol_type = other DNA
atggtgaccgaccagttcggcatgatcggcctgctgaccttcatcagggcagcggagacagaccctggaatggtccaccttgctctgggctctgatctaaccacactgggactgaatctaaactctcctgagaatctgtatcccaagtttgctagtccttgggcatctagtccatgccgccctcaagatattgacttccatgtgccttccgaatacttaactaatatccacatacgcgataagttagctgctattaaacttggaaggtatggcgaggatctcctgttctacttatactatatgaatggcggagacgtgttgcaactactggcagccgtcgagcttttcaacagagactggcggtatcacaaggaggagagagtttggatcacaagagccccaggcatggaacctacgatgaagacaaatacctacgaaaggggcacttactacttcttcgattgcctaaactggcggaaagtggccaaggagtttcacctcgaatatgataaactggaggagcgaccacacctgccgtcgacatttaattacaaccccgcccagcaggcattttag

SEQ ID NO: 181989 - DNA, 966 bp, synthetic construct
  misc_feature 1..966: note = Description of Artificial Sequence: Synthetic coding sequence
  source 1..966: mol_type = other DNA
atggtgcggaccgacggccacaccctgagcgagaagcggaactaccaagtaaccaactccatgtttggcgcctctcgtaaaaagtttgtggagggggtggacagcgattaccatgacgagaatatgtattacagccaatcctcaatgtttccgcatcgcagtgagaaagacatgctggcgtccccatctacgtccggacagctgagtcaattcggcgccagcctgtacggtcagcagagcgcattgggtctgccgatgcgaggcatgagtaataacacaccacaactcaatcggtccctgtctcagggaacacagctgccttcccatgttacgccaaccacgggagtgccaaccatgtccctccatactccgcccagtccgtctcgagggatcctgcccatgaaccctaggaacatgatgaatcactcgcaggttggccagggcatagggatcccgtcacggactaactccatgagcagttcgggactgggtagcccaaaccggagtagtccatctatcatctgtatgcctaagcaacaacctagcaggcagccattcactgtgaattcaatgagcggtttcggcatgaatcgaaatcaggcattcggcatgaacaacagtctgtcttccaatatcttcaacggcaccgacgggagcgagaatgtcacaggtttggatctctccgactttccggcattggccgatagaaaccgacgggaggggtcggggaacccaacccccctgattaaccctctggcaggccgcgctccttatgtgggcatggttacgaaaccggctaatgaacaatctcaggacttctcgatacacaatgaggacttccctgcgttgccaggttcctcctacaaagatcctacttcttcaaacgacgatagcaagtccaatctcaatactagtggaaaaacaacctcttcgacagacggtcccaagtttccaggtgataaatag

SEQ ID NO: 181990 - DNA, 978 bp, synthetic construct
  misc_feature 1..978: note = Description of Artificial Sequence: Synthetic coding sequence
  source 1..978: mol_type = other DNA
atgagcaccgcccgggagcagcccatcttcagcacccgggcccacgtattccaaatcgacccagctaccaagcgcaattggattccagccggcaaacatgccctgactgtgagctacttctatgacgctactaggaatgtctaccgtattatttcaatcggtggggctaaggccatcattaactccaccgtcacacccaacatgacctttacgaaaacttctcaaaagttcgggcaatgggccgatagccgtgcaaacaccgtgtatggattaggcttcgcctccgaacaacacttgacacaggttccacctagtcctctcgtgtcggccaatggtcctggtgaggaaaagctgttccgctcccagagcgcagatgctccagggcccaccgaaagagagcggttgaaaaagatgctgtccgaaggctcagttggtgaagtgcagtgggaagccgagttttttgctctgcaggactctaacaacaagctcgccggggccttaagggaagccaacgccgctgccgcccagtggaggcaacagcttgaagctcagcgcgcagaggccgagcggctgcgccagcgcgtagcagaactcgaggcgcaggccgctagcgaggtgacgcctaccggagaaaaagaaggccttggtcagggccagagcttggagcaactagaagctctggtgcagactaaggaccaggaaatccagacgttgaagagccaaaccggtggccctcgagaagcccttgaggccgccgagagagaggaaacccagcagaaagtgcaggatctggagacccgcaacgctgaactggagcaccagctaagagctatggagcggtcccttgaagaggccagggccgaacgcgaaagagcccgagcggaggtcggacgcgctgcccagctgctggacgtttctcttttcgaactgagcgagctcagggaagggctggcaaggctggccgaggcagcaccatag

SEQ ID NO: 181991 - DNA, 1716 bp, synthetic construct
  misc_feature 1..1716: note = Description of Artificial Sequence: Synthetic coding sequence
  source 1..1716: mol_type = other DNA
atgctggagaccatcctgcggatgctggacaacgacagcatcctggtggacgctatccgaaagatcaaggacgatgtcgaatactacgtcgattcatctcaggaccctgactttgaggagaatgagttcctgtacgatgatctagacctcgaggatatccctcaggctttagtcgcaacaagcccaccaagccactcccatatggaggatgaaatttttaatcagagttccagcactccgacatctaccacatcctctagtccaattcccccatcacccgccaactgtaccaccgaaaattctgaagacgacaagaaacgaggacggagtaccgattctgaggttagccagtctcctgcaaagaatggctccaagcctgtgcattcgaaccagcacccccagtctccagccgtgcctcccacctacccttctggtcctccacccgctgccagcgcgctgtctaccacgcccggaaacaatggagtgcctgcccccgccgcccctccatccgccctcgggcctaaggccagccccgcgccatcccacaattcaggaacaccggcaccctacgcccaggcagtggccccacccgccccttcaggaccttccactacgcagcctcgaccgccttctgtccagccatccgggggaggaggcggcggttccggtggcggaggatcttcctcgagctccaatagtagcgccggcggcggggccggtaagcagaacggcgctaccagctactcctcagtggtagctgactcccctgctgaagtcgccctgtcatccagtgggggtaataacgccagttcacaggccctgggtccgccgtccgggccccataacccgccaccctcgactagcaaagagccttcagctgcagcccctactggagcagggggggtggcacctggttctggaaacaacagtggcgggccctcattgctggtgcctctgcctgtgaaccctccatcatctccgaccccctccttttcagacgctaaggctgccggagcgttgttgaacgggccgcctcagttttctacggcccccgaaatcaaagctcctgagcccctgtcaagcctgaaatctatggcagagagagcggccatttcttccggaattgaggacccagtgccaacactgcatctgacagaacgtgatatcatactgtcttccactagtgctccccccgcatctgctcaacctcctctgcagctgagtgaggttaacatccctctctctctgggggtgtgtcccttggggcctgttccactgacaaaggaacagctatatcagcaggcaatggaagaagccgcctggcatcacatgcctcaccctagcgactctgaaagaattcgccagtacctcccccggaatccctgccccaccccaccttatcatcatcagatgccacctccccattctgacactgtggagttctatcagcgcctatccaccgagaccctgtttttcatcttttactatctcgagccacgggacgtgcgaacagcatgggtggattccgaggctggcccccttcggcacacctcagccccgctgcctgtcgcacactggctgacaagaggcccatctccagccctgctgcagcagccacaatcccggccgaccccactgtgcagtagcgctcactctcaggcttctttggagactacaggtgaattgagcagccccctgccaacacctctgctgtag

SEQ ID NO: 181992 - DNA, 2262 bp, synthetic construct
  misc_feature 1..2262: note = Description of Artificial Sequence: Synthetic coding sequence
  source 1..2262: mol_type = other DNA
atggccgacaagcggaagctgcagggcgagatcgaccggtgcctgaagaaggtgagtgaaggagtagagcagtttgaagacatctggcagaagctccataatgctgccaatgcaaatcaaaaagaaaagtatgaggccgacctcaaaaaggaaatcaaaaaactgcagcgcctgagggatcagatcaagacgtgggtggccagtaacgagatcaaagacaagcggcaactaatcgacaataggaagctcattgagactcagatggagcgctttaaggtcgtggagcgcgagacgaaaacgaaggcatatagtaaagagggtctaggcctggctcagaaagtcgaccccgcccagaaggagaaggaggaagtcggccagtggctgacaaatacaattgacacacttaatatgcaggtggatcaattcgagtctgaagtcgaatccctcagcgttcaaactaggaagaaaaaaggagacaaggacaagcaggacaggatcgagggtctcaaaagacatattgagaaacacaggtatcatgttcgaatgcttgagactatcctgcggatgctcgacaatgatagtatattggtagatgcgatcaggaagattaaagatgacgttgagtattacgtggatagtagtcaggatcccgatttcgaggagaacgagttcctctacgacgaccttgatctggaggatatcccacaggcactcgtcgctacatctcctccttcccatagccatatggaagacgaaatttttaaccagagttcctcaactccaactagcacaaccagctcctcaccaattccaccgtcccctgccaattgcaccaccgaaaacagtgaggatgacaagaaacggggcaggtccaccgactcggaagtctcccagagtccagcaaagaatggatcgaagcccgttcattctaaccagcacccccaatcgcccgccgtcccacctacttaccctagtggaccccctcctgccgcgtccgccctcagcactacaccgggaaataatggggtgcccgctccagccgccccaccatctgcattgggccctaaggcgagccctgctccttctcacaactcaggaacgcctgccccttacgctcaagcagtcgccccaccagccccatcaggcccaagcacaacacagcctcgtcccccatccgtccaaccctcaggcggaggcggcggcggcagtggtgggggtgggtcctcgagctctagcaacagttccgcaggcggcggagcagggaaacagaatggtgctacgtcctactctagcgtcgtcgctgactccccagcagaagtggccctgtcctcatcgggcgggaacaacgcatcaagtcaagcactggggccccctagcggcccacacaaccctcccccctccacatctaaggagccaagcgctgctgcaccaaccggggccgggggcgtggcacctgggagtggcaataatagcggtggcccctccctgttggtgcctttgcccgtcaaccccccatcctcaccgacaccctcctttagtgatgctaaagctgccggggccctcttaaacggtcccccgcaattttctactgcccccgaaattaaggcgccagagcccctgtccagtctgaagtcgatggcagagcgcgccgcaatttcgagtggcatcgaagaccccgtacctacgctgcacctcaccgagagggatatcatattgtccagcacttccgcacctcccgctagcgctcagccacctcttcagctctccgaggtgaatattccattaagcctcggcgtgtgtcctttgggaccggtgcccctgacaaaggagcagctgtaccagcaggctatggaggaagctgcctggcatcacatgccccacccctcggattcagagcggatcagacagtatctgccaagaaatccctgtccgacccccccttaccaccaccagatgccgccgccccacagtgacaccgttgagttctaccagagacttagtaccgaaacgctcttttttatcttttattatctggagggcaccaaagcccagtacctcgctgctaaggcactaaagaaacagtcctggaggttccataccaaatacatgatgtggttccagagacacgaggaacccaagaccatcactgatgagtttgagcagggaacatacatttacttcgactatgagaaatggggccagcgcaagaaggagggatttactttcgaataccggtacctcgaggatcgggacctgcagtag

SEQ ID NO: 181993 - DNA, 867 bp, synthetic construct
  misc_feature 1..867: note = Description of Artificial Sequence: Synthetic coding sequence
  source 1..867: mol_type = other DNA
tgaaaggagcccagcgccgccgcccccaccggcgccggcggcgtggcccctggaagcggcaacaacagcggggggccgtcactcctcgtacccctgcctgttaacccaccgtcaagtcctactccctcgttctcagatgccaaagccgctggagctctccttaacggccctccacagtttagtactgctcctgagataaaagcacctgagcccctctcttctcttaaatccatggcagagagggccgcaattagttccggcatcgaagatcctgtgcctactctgcatctgaccgaacgagacataatcctctcaagtactagcgctccgcccgcctcagcccagcctccgttacaactgtcggaagtgaatattcctctgtctttgggagtgtgtcccctaggcccggtccctcttacaaaggagcagctgtatcagcaggcaatggaagaggccgcgtggcatcatatgccccatccgtcagactctgaacgaattcgacagtacctccccagaaatccttgtccaacccctccttatcaccaccagatgcccccaccccatagcgacacagtcgagttttatcagaggctcagtaccgagacactgtttttcattttctattacctggaggggactaaggcccaatacctggccgccaaggcccttaagaagcagagttggaggtttcacaccaaatacatgatgtggtttcagcgtcacgaagagcccaagacgatcacagacgaatttgagcagctggcccagagtctatcgctgacgaagtatagctctctctggctgtccgcgcagcctggtactccaccatcacatccccccttaggccagctgttgggcttactgtag

SEQ ID NO: 181994 - DNA, 2304 bp, synthetic construct
  misc_feature 1..2304: note = Description of Artificial Sequence: Synthetic coding sequence
  source 1..2304: mol_type = other DNA
atgagccggagccccgacgccaaggaggaccccgtggagtgccccctgtgcatggaaccccttgaaattgacgacatcaactttttcccttgcacatgcggctaccagatttgtaggttctgttggcaccggattagaactgacgaaaacggtctgtgccctgcatgccgaaagccctaccccgaagatccagctgtatataagcccctgagccaggaagaacttcagaggatcaaaaatgagaagaaacaaaagcagaatgaacggaagcaaaagatcagcgaaaatagaaaacacttggcctctgttagagtagtacagaagaatttggtgttcgtggttggactgtcacaaaggctcgccgacccagaggtgctgaagaggcccgaatacttcgggaagtttggaaagattcataaagtggtgattaacaattctacttcctacgcaggatcccaggggccatccgcctccgcctatgtaacttacatccgatcagaagatgcgcttcgggccattcagtgcgtcaacaatgtggttgtggacggccggacactgaaggctagtctgggcactacgaagtactgctcttattttctcaaaaacatgcagtgccccaaacccgattgcatgtaccttcatgagctgggggatgaggctgcctcatttaccaaagaggaaatgcaggctggaaagcaccaggagtatgagcaaaaactgctgcaggaactttacaaattgaatcccaatttcctccagttgtcaactggtagcgtcgacaaaaataagaataaggttacacctctccagaggtacgacacccctattgataaaccatcagattccctgagtataggcaacggagacaattcacagcagataagcaattcagatacgccatcaccacctccaggactgtccaagtcaaacccggtgatccctatcagctcctccaatcacagcgcccggagcccctttgaaggggctgtcactgagtcccaatcattgttttcggataactttcgacatcctaatcctatccccagtggcttgcctccctttccaagttccccgcagacctcctctgattggcccacagctcccgaacctcagtcactcttcacctctgaaacaattcctgtctcctcaagcacagattggcaagccgctttcggatttgggtcctcgaagcagccagaagacgacctgggctttgacccgttcgacgtcactcgaaaagccctggccgatttgattgaaaaagagctaagtgttcaggatcaacccagcctttcacctacatctctccagaattcctcctcgcataccacgactgctaaagggcctggttctggttttctacatcctgccgcggctacaaatgccaatagtttaaattctacctttagtgttttgccccaaaggttccctcaatttcagcagcatcgggctgtttacaattccttctcttttccagggcaggcagcccgctatccctggatggcctttccccgcaactctataatgcaccttaaccataccgccaaccctacctccaacagtaactttctagacctgaacctgcctccccagcataatactgggctgggaggcatcccggttgcagataactcaagcagcgtcgaatccctgaatatgaaggaatggcaagacggactcagagcattactccctaacataaacattaattttggcggcctgcctaactccagtagcccctcgaatgcaaatcattccgcacctacgtctaacaccgctactacagactctctttcttgggatagtcctgggagctggactgaccctgccataattacaggtatccccgcctctagcggaaattccctcgacagcttgcaggacgacaatccacctcattggctcaagtctctccaggccctgactgagatggacggaccatcggccgctccctcccagacacaccactctgcaccattcagcactcagattcctctgcacagagcctcctggaacccttacccccctcccagtaacccctcctcattccatagcccaccaccagggatttattatcgtgtgcaacactggacagcgatccgccagcgaggcgcaactattcgaaagtgccgcatttgcccaacactttttagcccatctcagcccaccacacattcgtcattgctcatctcatacgtccttaaaaatccagtgcctgaccagtttttcttttcattgactccagacgcaatgaggtcacagggtcattaccatctcttcataaattgcaaaaatttttgttag

SEQ ID NO: 181995 - DNA, 1728 bp, synthetic construct
  misc_feature 1..1728: note = Description of Artificial Sequence: Synthetic coding sequence
  source 1..1728: mol_type = other DNA
atgagccggagccccgacgccaaggaggaccccgtggagtgccccctgtgcatggaaccattagagatcgacgatataaatttcttcccatgcacatgcggttatcagatttgtcggttttgctggcaccgcattcgtaccgatgagaacggactttgtccagcatgcagaaagccttatccagaggacccagctgtatacaaaccactgtcacaggaggaactccagagaatcaagaacgagaaaaagcaaaaacagaatgaacgcaaacagaagattagcgagaacaggaagcacttggcatctgttcgcgttgtgcagaagaatttggtattcgtggtggggctttcacaacgattagccgatcccgaggtactcaagcgtccagaatacttcggcaaattcggaaagattcacaaggtcgtgattaataatagcactagctatgctggctcacagggcccttcggcttccgcttatgtcacatacattcgctctgaagatgcattgagggcaattcagtgcgtcaacaacgtagtggtggatggccggaccctgaaggcaagcctgggcaccacaaagtattgctcatatttcttgaaaaatatgcaatgcccaaagcccgactgcatgtatctgcacgaattgggcgatgaagctgccagttttaccaaggaggagatgcaagccggcaagcatcaggaatatgaacagaaactgctacaggagctgtataaactgaacccaaactttctgcagcttagcacgggcagtgtggataagaacaaaaacaaggtcacaccactgcagcgctatgataccccaattgacaaaccgtcagacagcctgtccatagggaatggcgataacagccagcagatttctaacagcgacacaccttccccaccccccggtctgtccaaatctaatccagtgatccctataagttcaagcaaccacagtgctaggtcaccattcgagggcgccgtgacggaaagccagtcactgttctctgataatttccggcaccctaatcccatcccgtcaggcctgcctcccttcccttcctccccacagaccagctcggattggcccactgcgccagagccgcaatctctgtttaccagcgagaccatcccagtcagctcttcaacagattggcaagccgcatttggtttcggctcctctaaacagcccgaggacgatctggggtttgacccatttgacgttacccgcaaggccctcgcagatctgattgaaaaggagctatccgtacaggaccaaccttccctctcccctacatccttgcagaatagttcttctcacacgaccacagcaaagggccccggctcagggtttctgcacccggcagccgcgaccaatgctaactcgctaaacagtacctttagcgtgcttcctcagcgctttcctcagtttcagcagcatcgggccgtttataacagttttagcttccctggacaggctgcccgctacccttggatggcttttcctcgcaactccatcatgcaccttaaccacactgctaatcccacaagcaattctaactttctggacttaaatttgccgcctcagcacaatactgggctgggcgggatcccggtggctggagaggaggaagtgaaggttagcacaatgccactcagcaccagtagtcatagtttacaacagggacagcaacccacaagcctgcatactactgtagcctag

SEQ ID NO: 181996 - DNA, 1302 bp, synthetic construct
  misc_feature 1..1302: note = Description of Artificial Sequence: Synthetic coding sequence
  source 1..1302: mol_type = other DNA
atgagccggagccccgacgccaaggaggaccccgtggagtgccccctgtgtatggaacccctggaaatcgacgacattaacttttttccttgcacatgtggttatcagatctgcagattttgctggcacaggatccggactgacgagaatggcttatgtcccgcttgccggaagccgtatcccgaagatcccgcagtttacaaacctctgagccaggaagagctgcagcgcatcaagaatgagaaaaagcagaaacaaaatgagcgtaaacagaaaattagcgagaatcggaagcacctggcatccgtgcgggtggtgcaaaagaatctggtgtttgtggtgggactatcacaaagactggcagacccagaggtattaaagcgcccagaatactttggaaaatttggaaaaatacataaggtggttattaacaattcgacaagctacgcgggctcacagggcccatcagcctcagcatacgtgacatacatccgctctgaggatgccctccgggcaatccagtgcgtgaacaatgtggtcgtcgacggcagaactctgaaggccagtctgggaaccaccaagtattgtagttacttcttgaagaacatgcaatgtcccaagccagattgcatgtacctgcatgagttaggcgacgaagcggcttcctttacaaaggaggaaatgcaagctggtaagcatcaggaatatgagcaaaagctactacaggaactctacaagcttaatccgaactttttacagctgtccacagggtccgtggataagaacaagaacaaggtgacaccactgcagcgctacgacacaccgatcgataagccgagcgacagcctgagtatcgggaatggcgacaatagtcaacaaatcagcaactccgacacgccctccccaccccccggtctgtccaaatctaaccctgtaatcccgatcagttcgtctaatcacagcgcccgctctccatttgagggtgctgtgacagagagccagtccctatttagtgataatttccggcatcccaatcccatccccagcggtttgccaccgtttccctctagccctcagacttcaagtgattggcctacggcgccagagccccagagtctttttacatctgaaacaatccctgtctcttcctcaacagactggcaggcagcctttggctttgggtcttccaagcagccagaggacgatctgggcttcgacccatttgacgtcacacgtaaagctctggcggacctgacggagccaatcgaaagaaagcggctggcagtgctcaaacgcaggtag

SEQ ID NO: 181997 - DNA, 1920 bp, synthetic construct
  misc_feature 1..1920: note = Description of Artificial Sequence: Synthetic coding sequence
  source 1..1920: mol_type = other DNA
atgagccggagccccgacgccaaggaggaccccgtggagtgccccctttgcatggaacccctggagatcgacgacatcaatttttttccttgtacctgtggctatcagatttgcagattctgttggcacagaataaggaccgatgagaacggattatgccccgcatgcagaaagccctatcccgaggatcccgcagtttacaagcccctcagccaggaggaacttcaaaggattaagaatgaaaagaagcaaaagcagaacgaacgtaagcagaaaatctcagagaataggaagcacttagctagcgtgcgggtggtgcagaagaatttggtctttgtggtggggttatcacaacggctggccgacccggaagtcctgaagagacccgaatatttcgggaaatttggaaagatccataaagtggttatcaacaactccacctcatatgccggctcccaaggaccaagcgctagtgcttacgtcacctatattaggtctgaagacgccctgagagccattcaatgtgtgaacaacgttgtggtagacggcagaacactgaaagcatctctcggcactacgaagtactgtagttatttcttgaaaaatatgcaatgccctaaacccgattgcatgtacctgcacgaattgggcgatgaggcagctagcttcactaaggaggagatgcaggccggcaagcaccaagaatatgagcagaaactgttgcaggagctgtataagctgaaccctaactttttgcaactgagcactggaagcgttgataaaaacaaaaataaagtgacaccactgcaatcccctatagacaaacctagtgatagtttgtcaattggcaatggagacaacagccaacagatcagcaattcagatacaccatcccccccaccaggcttatccaagtccaaccctgtcatacctatatcttcttccaaccatagcgcccggtccccattcgagggagcggttacagagtctcagtccttgtttagtgacaatttcaggcacccgaatccaattcccagcggcttacctcccttcccttcaagcccccagacgagttctgattggcctaccgcgcctgaaccccagtccctgtttacctccgagactatcccagtgagctccagtactgattggcaggccgccttcggttttggcagctccaaacagcctgaagatgacttgggattcgaccccttcgatgtcacccgtaaggccctggcagacctcattgagaaggagctgagtgtacaggatcagcccagtctctctcctacatccctacagaattcttcctcccataccaccacagcgaagggtcctggttccggcttcttgcatcctgccgccgccaccaatgccaacagcctcaattccacctttagtgtgctgccccagcggttccctcagttccagcagcatagggccgtctacaacagtttcagtttccctggccaggctgcacgatacccctggatggcgttccctcgcaactcgatcatgcatttgaatcacacagcaaatcccaccagcaattctaattttctggatcttaacctgccgccacagcataatacaggattgggcggtataccagtggctggcatcccagcatccagcggcaacagcctggactccctgcaggatgataatccaccccactggcttaagagtctgcaggccctgaccgagatggatggtccgtcggccgcaccctcccagacacatcacagcgctcccttcagcacccagattccgctccaccgtgcctcctggaatccatatcctcccccctcgaatccaagctcatttcactcaccccccccaggcttccagacagccttccgcccgccttccaaaacacccaccgatctattgcagtcctcaaccctggatagacactag

SEQ ID NO: 181998 - DNA, 1302 bp, synthetic construct
  misc_feature 1..1302: note = Description of Artificial Sequence: Synthetic coding sequence
  source 1..1302: mol_type = other DNA
atgagccggagccccgacgccaaggaggaccccgtggagtgccccctctgcatggagcccttggagattgatgacataaactttttcccatgcacctgtggataccagatctgcaggttttgttggcatcgaatccgaactgacgagaatggtctgtgtccagcttgcaggaaaccatatcctgaggatcctgctgtctacaaaccactgtcacaggaggagctccagcgtattaaaaacgagaaaaaacagaaacagaatgagcgcaaacagaagatctctgaaaataggaaacacctggccagtgtcagagtggtgcagaaaaatctggtgtttgtcgtgggcctcagtcagagactcgctgaccccgaggtgctgaagcgtcctgaatacttcggaaagtttggcaagatccataaggtagtgatcaacaactccacaagctatgccggctcgcagggcccctccgcgtccgcctatgttacttatatccggtcggaagatgcactcagggctatccagtgtgtcaacaatgtggtggtagacggccgcactctgaaggcctcactgggcacaaccaagtactgttcttattttctgaaaaacatgcaatgccctaaacctgattgcatgtacctgcacgaactgggggatgaggccgccagcttcacaaaagaggagatgcaggctggcaaacatcaggagtacgagcagaagttgctgcaggagttatataagctgaaccccaattttttgcaactgagcactggaagtgtagataaaaataagaacaaggtcactcccttacagcggtacgacactcccatcgacaaaccctccgattcactttccatcggaaacggagataactcacaacagatttctaactcggacacccccagtccacctccaggtctctctaagtcaaacccggtgattcctatcagtagtagcaatcactccgcccgctctccctttgagggcgccgtgaccgagtcgcagagtttgttttccgacaacttccgacaccccaatccaataccatctggacttcctccttttcctagctcaccacagacatcctctgattggcctaccgcccctgaaccacagtcactgtttacctccgaaacaatacctgtgtcaagctcaacagactggcaggccgcctttgggttcggctcgagcaaacagccggaggatgacctcgggttcgacccctttgacgtgacccgcaaggccctggcggatctgactgaacctatcgagagaaagcgactggctgtgctcaagaggaggtag

SEQ ID NO: 181999 - DNA, 1929 bp, synthetic construct
  misc_feature 1..1929: note = Description of Artificial Sequence: Synthetic coding sequence
  source 1..1929: mol_type = other DNA
atgagccggagccccgacgccaaggaggaccccgtggagtgccccttgtgcatggagccactcgagattgatgacatcaacttctttccctgcacatgtgggtaccagatttgtaggttttgttggcaccgtattcgaactgacgaaaacggcctgtgtccggcttgccggaaaccctaccccgaagatcctgccgtgtacaaacccttgtctcaagaagaactgcagagaatcaagaacgagaagaaacagaagcagaacgagaggaagcagaaaatcagcgagaatcgcaagcatctggccagcgtccgtgtcgtacagaagaatctggtgttcgtagtcggtctgagtcagaggctcgccgaccccgaagtgctgaagcgtcccgaatattttggcaaattcggtaagatccacaaggtcgtgataaataactccacatcctacgccggatcccagggaccctccgcctcggcttacgttacttacatacgaagtgaagatgccctgagggccatccaatgcgttaataatgttgtggttgacgggagaactttaaaagcgtccctcgggactacaaaatattgcagttacttcctgaaaaacatgcaatgtccaaagccagattgcatgtacttgcatgagcttggcgacgaggctgcttcatttaccaaagaggaaatgcaagctggcaagcaccaggagtatgagcagaagttgctgcaggagctctacaagttgaaccccaatttcttacagctaagcacaggttccgttgacaagaacaagaacaaggtcactccactgcaaagatatgatacacccatagataaaccaagcgatagtctctcaataggaaatggcgacaactcacagcaaatatcgaattcagataccccctccccacctccgggtttaagtaagtccaaccccgttatcccaatctcctcctctaaccacagtgcccggtcccctttcgaaggtgctgtgacagagtctcagtccctgtttagtgataattttcggcatcccaaccccatcccgagcggactcccacccttcccctcaagtccacagacatcaagcgattggccgactgcccctgagccacagtccttattcacctccgaaacaatccctgttagttcctcaaccgattggcaggctgcttttggctttggcagcagcaaacaacccgaggacgacctgggctttgacccatttgacgttacccgtaaggctttggcggacttgatcgaaaaagagctgtccgtccaggaccagccttctctgagccccacaagtctgcagaattcttcctcacatactaccacagcaaagggccccggctctgggttcctacacccagcagccgcaacaaacgctaattcacttaacagtacgttttccgtcctgcctcagcgttttccccagttccagcagcaccgtgcagtttacaattcattttccttccctggacaggctgccaggtacccgtggatggcattcccaaggaactccatcatgcacctgaatcacaccgctaaccccacaagtaactctaactttcttgatctgaacctacctccacaacataacacaggcctcggcggcatcccagtcgctggcattcccgcctcaagcggcaatagtcttgactcacttcaggacgacaatccaccccactggttaaagtcgctgcaagccctgactgagatggacggccccagcgccgctccatctcaaacccaccattccgcccccttttccacacagatcccgctgcatcgcgcaagttggaacccatatccccctccaagcaatcccagctcctttcactcccctcctcccggcttccagacagccttcagacctccatctaagacaccaacagatctgctccagtcatctaccttagatcgccactag

SEQ ID NO: 182000 - DNA, 1719 bp, synthetic construct
  misc_feature 1..1719: note = Description of Artificial Sequence: Synthetic coding sequence
  source 1..1719: mol_type = other DNA
atgagccggagccccgacgccaaggaggaccccgtggagtgccccctgtgcatggagccactggaaatcgacgacattaatttttttccatgcacgtgcggatatcagatatgccgcttttgctggcaccggattcgcaccgacgagaatgggctgtgccctgcttgccgcaaaccttacccagaggatcccgcagtttataaacccctgagtcaggaggagctccaacgcataaaaaacgagaagaagcaaaagcagaacgagcgaaaacagaagatctctgagaaccgcaagcatttagccagcgtgcgcgtggtccagaaaaacttggtgtttgtcgtggggctgagccaacggctcgccgaccccgaagtcctgaagagaccagagtatttcggaaagttcggtaagatacacaaggttgtgattaacaactctaccagctatgcgggtagtcagggtcctagcgccagtgcctatgttacatatattaggtccgaagacgcacttcgagctattcagtgtgtgaataatgtagtggtggatggccgcaccttaaaggcctcgctaggaaccacaaagtattgttcttactttttgaagaacatgcagtgtccgaagcctgattgtatgtacctgcacgagctaggggatgaagctgcaagctttacgaaggaggaaatgcaggccgggaagcaccaagaatatgaacagaaattgctgcaagaactgtacaaattgaatccgaatttccttcagctctccactgggtccgtggacaaaaacaagaataaggtcaccccgttacagagccccatcgacaagccttcagactcactctctattggcaacggtgataactcccaacagatcagcaacagtgacactcctagtccacctcccggcctgtccaaatcgaaccccgtaattccaatcagctcgagcaatcatagtgctagatctccatttgagggtgcagtcacggaatcccagtcattattcagcgataatttccggcatcccaaccctatcccatctggcttgcctccgtttccctcgtcgcctcagacaagcagcgattggcctacagcccccgagcctcagtccctttttacttctgagactattcctgtctcttccagcaccgactggcaggcggcctttgggtttggctcctctaaacaaccagaagacgatcttggatttgacccatttgacgtgactaggaaggccctagccgacctgattgaaaaggagttgagtgtgcaagaccagccaagcctgtcgcctacatccctgcagaacagttcctcccatacgacaactgctaagggacccggctcgggcttcctccatccagctgccgctactaacgcgaattccctgaactccacgttctctgtactacctcagagatttccacaatttcagcagcaccgcgccgtgtacaattctttttcatttcctgggcaggccgcccggtatccctggatggcatttccaaggaattcgatcatgcacttgaatcataccgccaatcccacctctaattccaactttctcgacctgaatctgcctcctcagcataacacaggccttggcggaattccggtcgccggggaagaagaggtcaaagtttctaccatgcccctttcaacatcctcacactccttgcagcaggggcaacagcctacatccctgcatactaccgttgcgtag

SEQ ID NO: 182001 - DNA, 2142 bp, synthetic construct
  misc_feature 1..2142: note = Description of Artificial Sequence: Synthetic coding sequence
  source 1..2142: mol_type = other DNA
atgagccggagccccgacgccaaggaggaccccgtggagtgccccctgtgtatggaacctctggaaatcgatgacattaacttcttcccgtgcacatgtggctatcaaatctgtagattctgctggcatcgtataaggactgatgagaatggcttgtgtccagcatgtcgcaaaccataccccgaagatcctgccgtatacaagcctctgagccaggaggaactccagcggattaagaacgagaaaaaacagaaacaaaacgaaagaaaacagaagatttcagagaaccggaaacatctggctagtgtccgcgtcgtgcagaagaaccttgtgtttgtggtcggcttgtcccagagactggcggaccctgaagtgctgaagagacccgagtactttggaaaatttggcaagatccacaaagtggtaatcaacaattccacctcctacgccggctctcagggacctagtgcctcagcatatgtcacatatattaggtccgaggacgccctccgagcaatccagtgcgtcaataatgtggtggtcgatggccggacactgaaagcgagcctgggtacaacaaagtattgttcatattttctaaagaacatgcagtgtccaaagcctgattgtatgtacctgcacgagctgggcgatgaggcagcttctttcaccaaagaggagatgcaggctggaaaacaccaggaatacgagcagaaactccttcaggaattgtataagctaaacccgaattttctgcagttgagcacgggctcggtggataagaacaagaataaggtgactcctttgcagaggtatgacacaccaatcgacaagccatcagactcactgtctattggaaatggggacaactcacagcagatcagcaattctgacaccccaagccctccacccggactgtcaaaaagcaaccccgttattcccatatcctcttccaatcattctgcaaggtcacctttcgagggcgcagttaccgagagtcaaagccttttctccgacaatttccgccatccgaaccctattccttctggcctccctcccttcccctcttcccctcagacctcttccgactggcctacagcgccagagcctcaatctctgtttacatccgagaccattcccgtgtcgtcatccaccgactggcaggcagcattcggatttgggtcctcaaagcagccagaagatgacttaggcttcgatccattcgacgtaacgagaaaagctctcgcggatctgatcgaaaaggagctctcggtgcaagaccagccctccctgtcacccacctccctgcagaactcatcttctcacaccaccacagcgaaagggccaggaagcggtttcctgcacccagcggctgccacaaatgctaactctctgaattcaactttttcagtgcttcctcagcgcttccctcaatttcagcagcaccgggccgtctataatagtttctccttcccaggccaggccgcccggtacccctggatggcatttcccagaaattctatcatgcacctgaaccacaccgcaaatcccacttccaatagcaactttctcgacttgaacctgccgccgcaacataacactggcctgggcggcatccccgtggcagataactcttcaagcgtggagagcctcaatatgaaagaatggcaggatggccttcgggcattacttcccaatattaacataaatttcggtggcctgcccaacagctcctcccctagtaacgctaatcacagcgctcctactagcaacacagcaaccacagactcgctgtcttgggactctccgggcagttggacggaccctgcaattatcacagggatacctgcatcaagtgggaactcactggactctcttcaggatgacaacccgccccactggttgaagtccctgcaggccttgactgaaatggacgggccctccgccgcaccaagccagactcaccattcagctcctttctctacgcaaattcccctgcacagagcctcttggaatccttatcccccaccatctaacccatcttcctttcattctccgcctccagggttccagactgctttcaggccgccttccaaaacccccacagacctcctacagagcagcactctggaccgccactag

SEQ ID NO: 182002 - DNA, 1674 bp, synthetic construct
  misc_feature 1..1674: note = Description of Artificial Sequence: Synthetic coding sequence
  source 1..1674: mol_type = other DNA
atgcccaaggagaagtacgagccccccgacccccggcggatgtacaccataatgtcgagcgaggaggccgccaatggaaagaaaagccattgggccgagctggagatcagtggtaaagtgaggagcctaagcgccagcctctggagtctaactcacctcacagctctgcatctgtccgataattccttatccagaatcccatctgatattgcgaaacttcataacttggtctaccttgacctgagtagcaacaagatccgatctctaccggccgaactgggaaacatggtgagcctgcgcgagctacacctgaataacaacctgctccgcgtcctcccctttgagctcgggaagctgtttcagcttcagaccctggggttaaaagggaacccacttacgcaggatatcttgaatctgtaccaagagccggacggaactagacgccttctgaattaccttctcgataacctgtccggtacagcgaaaagaatcactacagaacagccacctcccaggtcctggattatgctgcaagagcccgataggactagacctactgcactcttcagcgtcatgtgttataatgtcttgtgcgataaatacgcaactcggcagttgtacggctattgtccaagctgggcattgaactgggactacagaaagaaggcaattattcaggagattctgtcttgcaatgcagacatcgtcagtcttcaggaagtggagactgaacagtattacagcttttttctcgtggaactaaaagagcgtgggtataacggtttcttctctccaaagtccagagctaggaccatgtctgaacaggagaggaaacacgtggatggctgcgctatattttttaaaaccgagaagtttactctggtgcagaagcatacagtcgagtttaatcagctggctatggcaaactcagaaggtagtgaggccatgctgaatcgagtgatgacgaaggataatatcggcgtggctgtgcttttagagctcaggaaggagagcatcgaaatgccttccggaaagccccacctcggcactgaaaaacagttgattctagtcgctaatgcacatatgcactgggatccagaatactccgacgtgaaactcgttcagacaatgatgtttttatcagaggtgaaaaatatcattgataaggcatccagaaatctcaagagcagcgttctgggcgagttcgggaccatccccctagtgttatgcgctgatctcaactccttacctgattctggagtcgtggaatacctgagtactggtggtgttgagaccaatcacaaggatttcaaggagctgaggtataacgagtcgttgaccaattttagctgtcatggcaaaaatggcaccactaacggcagaattactcacggcttcaagctacagtcggcctacgagagtggcttgatgccttacacaaactacacatttgattttaagggtattatcgactacatcttttattccaaaccacaattaaataccctcgggatcctaggccccctggatcatcattggctggtggagaacaacatctccgggtgccctcaccccctgataccaagtgatcatttcagcctcttcgcccagctggagctcctgcttccattcttaccccaagttaacggcattcacttacccggtcgacggtag

SEQ ID NO: 182003 - DNA, 1674 bp, synthetic construct
  misc_feature 1..1674: note = Description of Artificial Sequence: Synthetic coding sequence
  source 1..1674: mol_type = other DNA
atgcccaaggagaagtacgagccccccgacccccggcggatgtacacgattatgagctctgaagaggccgccaacggtaagaagagccactgggccgaactggagatcagcggcaaggtgagatccttatccgctagtctctggtcacttacccatctgaccgccctgcacctgtccgataattctctgtcccggataccaagcgacattgcaaagctgcacaaccttgtgtatctcgacctgtcttctaacaaaatcaggagcctccccgctgagctgggcaatatggtgagcctgcgggagctgcacctgaacaataacctgttgcgcgtcctccctttcgaactgggcaagctctttcagctgcaaactctcggcttaaaaggcaatcctctgacccaggatatcttgaatctctatcaagaacctgacggcacccgcaggctcttgaactaccttctggataacctgtctggcacagccaaacggataactacagagcaaccaccccctcgtagttggatcatgttacaggagccggaccggacgcggccaacagcactcttttcagttatgtgttacaacgtgctgtgtgataaatacgccacgaggcagctctacggctactgccctagctgggctttgaattgggactaccggaaaaaggccatcatccaggaaatcctaagctgcaatgcggatattgtgtctctacaggaagtggagaccgagcagtattacagcttctttctggtcgaattaaaggagcgaggctacaacgggtttttcagtccaaagtcacgcgcacgcacgatgagtgagcaagaacgaaagcatgttgacggatgcgccattttctttaagaccgaaaagtttacactggtccagaaacacaccgtcgagttcaaccagctcgctatggctaacagtgaaggttcagaggccatgctaaatagggtcatgacaaaggacaatattggcgtcgcagtgctgttggaactccgtaaagagagtattgagatgccctccggcaagccccatttagggactgaaaagcagcttatccttgtggcaaatgcacatatgcactgggatcctgaatactcagacgtgaagctggttcagacaatgatgtttctgagcgaagttaaaaatatcatcgacaaggcaagcagaaacctgaagtcgagcgtccttggcgaattcggcactatccctctggtgctgtgtgctgatctcaacagtcttcccgacagcggggtggtcgagtatcttagcactgggggagttgaaaccaaccacaaggattttaaagagctgagatataatgagagcctgaccaactttagctgccacgggaagaacggtacaacaaacggcagaattactcacgggttcaaactccagtctgcttatgagtctggcttaatgccttataccaattatacgttcgattttaaaggcataatcgattatatcttttactcaaagccacagctcaacaccctggggattttgggccccctggatcatcattggctggtggagaacaatatttctgggtgtccccaccctcttattccgagtgatcacttctccttgttcgcacaactcgaactccttctgccttttctgccccaggtcaacgggatccatctgcccggccgacggtag

SEQ ID NO: 182004 - DNA, 858 bp, synthetic construct
  misc_feature 1..858: note = Description of Artificial Sequence: Synthetic coding sequence
  source 1..858: mol_type = other DNA
atgcccgccgccaccgtggaccacagccagcggatctgcgaggtgtgggcctgtaatttggatgaagagatgaaaaagatccgacaggtgattcggaaatataattatgtggcaatggatacagaattccctggcgtggttgcacgccctattggcgaattccgctcgaatgccgactatcagtatcaactcctgcgctgcaacgtggacctgctgaaaatcattcagctgggtctaactttcatgaacgagcagggtgagtatccacccgggactagcacttggcagttcaattttaagtttaacttgacagaagacatgtatgcccaggattcaattgaactgctcacgacgtctggcatacagttcaagaagcatgaggaggaaggcattgaaactcagtatttcgccgagctgttgatgacgtctggcgttgtgctatgcgaaggagtgaagtggctgagcttccatagcgggtacgacttcgggtatttgataaagattctgacaaactcaaacctgcccgaggaagagctcgatttcttcgagatattgcgattgttctttccagtcatctacgacgtgaagtacctaatgaaatcttgtaagaatctgaaggggggtctgcaagaggttgccgaacagctggagctggaacgcattggccctcagcatcaggccggatctgacagtttgctaactgggatggcattcttcaaaatgcgggagatgtttttcgaagaccacatcgacgacgccaagtattgcgggcatctctatggtcttggatcaggcagctcctatgttcagaatggcacaggaaatgcgtacgaggaggaggcaaacaaacagtcctag

SEQ ID NO: 182005 - DNA, 126 bp, synthetic construct
  misc_feature 1..126: note = Description of Artificial Sequence: Synthetic coding sequence
  source 1..126: mol_type = other DNA
atgcccgccgccaccgtggaccacagccagcggatctgcgaggtgtgggcttgcaacctggacgaagaaatgaaaaaaattcggcaggtgatacgcaaatataactatgttgccatggatacctag

SEQ ID NO: 182006 - DNA, 735 bp, synthetic construct
  misc_feature 1..735: note = Description of Artificial Sequence: Synthetic coding sequence
  source 1..735: mol_type = other DNA
atgcccgccgccaccgtggaccacagccagcggatctgcgaggtgtgggcctgcaatctcgacgaggaaatgaaaaaaatccgtcaagtcatcagaaagtataattatgtcgcaatggatactgagtttccgggagttgtggctcgtccaatcggcgagttccgctccaacgcagactaccaatatcagttgctgagatgtaatgtggacctgcttaaaatcatacaactgggattgactttcatgaacgagcagggcgaatatccaccgggcaccagcacttggcagtttaactttaaattcaacctcaccgaggacatgtatgctcaggatagtatcgaacttttgaccactagcgggatccagttcaagaagcacgaagaagagggcattgaaactcagtattttgcagaattactcatgacatcgggggttgttctgtgtgaaggagtaaagtggttgagctttcatagcgggtacgatttcggatacttgatcaaaatcctcaccaattctaacctaccagaggaagaactcgatttcttcgagattctgcgattgttctttcccgtgatctatgacgtgaagtatctgatgaagtcctgcaaaaatctgaaaggtggcttgcaagaagtggcagagcagctggagctggaacggatcgggccccagcaccaggctggaagtgatagccttctcaccggcatggccttctttaagatgcgagaagtgtag

SEQ ID NO: 182007 - DNA, 444 bp, synthetic construct
  misc_feature 1..444: note = Description of Artificial Sequence: Synthetic coding sequence
  source 1..444: mol_type = other DNA
atgcccgccgccaccgtggaccacagccagcggatctgcgaggtgtgggcctgcaatcttgacgaggagatgaagaagattcgacaagtgatacgtaagtataattacgttgcaatggataccgaatttcctggggtggtggcacggcccatcggtgaatttcgctccaatgccgactatcaataccagttgctgcggtgcaatgtagatttattgaagattatccagcttggactgactttcatgaacgaacagggcgagtatccgcccgggacttcaacatggcaattcaattttaagttcaatttgacagaggatatgtacgctcaagattcaattgagttactgaccaccagcggcatccagtttaagaagcatgaagaggagggcattgaaactcaatatttcgctgagctgttgatgactagtggtgtggtcctctag

SEQ ID NO: 182008 - DNA, 879 bp, synthetic construct
  misc_feature 1..879: note = Description of Artificial Sequence: Synthetic coding sequence
  source 1..879: mol_type = other DNA
atgcccgccgccctggtggagaacagccaggtgatctgcgaggtgtgggcctctaacctggaggaagaaatgcgcaaaatcagggagattgtgctgtcctactcctacattgcgatggatacggaatttcctggagttgtagtgcggcctataggagagttccgctcaagcatcgattatcagtatcaacttctcagatgtaatgtagacctgttaaagatcattcaattgggactcacattcactaatgagaaaggcgaatacccctctgggattaacacatggcaattcaacttcaagttcaacctgaccgaagacatgtactcacaggattccatcgacttgctggctaactccggtctgcaattccagaagcacgaggaagaaggaattgatacccttcactttgccgagttactgatgacctcaggggttgtcctgtgtgacaacgtcaagtggctaagcttccacagtgggtatgactttggttatatggtgaagttgctgacggacagcagactgcccgaagaggagcacgagttctttcatatcctgaatctgtttttcccatccatttatgacgtgaagtacctcatgaagtcctgcaaaaatttaaagggcggactccaggaggtagccgaccaactggacctacagcgaatcgggcgtcagcatcaggcaggtagtgattctctattgactggtatggctttttttcggatgaaggaactgttctttgaggattccatcgacgatgcaaagtactgtgggaggttatacggactcgggactggagtggcccagaaacaaaacgaagacgtggactctgcccaggaaaaaatgtcaatcctggccatcataaacaacatgcagcagtag

SEQ ID NO: 182009 - DNA, 879 bp, synthetic construct
  misc_feature 1..879: note = Description of Artificial Sequence: Synthetic coding sequence
  source 1..879: mol_type = other DNA
atgcccgccgccctggtggagaacagccaggtgatctgcgaggtgtgggcttcaaacctggaggaagaaatgagaaaaatcagagagatcgtgctgtcttacagctatatagctatggacaccgaatttccgggcgtggtcgttagaccgattggggagtttcgctcctccatcgactatcagtaccaactgctgaggtgcaatgtggatttattgaagataatccagctcggtctcacgtttacaaacgaaaagggcgaatatccatctggaatcaatacttggcaattcaatttcaaattcaacctgacggaggatatgtattcccaggactcaatcgacctgctggccaattccggactacagttccagaagcacgaggaagaaggaatcgacactttacacttcgccgaattgcttatgacatccggggtggtcctgtgcgataacgtcaaatggttgtctttccactccgggtacgactttggatacatggtcaaactgctgaccgacagtaggctgcccgaagaggagcacgaatttttccacatactcaatttgttcttcccatctatatatgacgtcaagtacctcatgaaaagctgcaagaatttaaaaggcggcctgcaagaggtggccgaccagctggacttgcagaggataggacggcagcatcaggcaggatccgatagcctgctcaccggaatggctttcttcaggatgaaagaactgtttttcgaagacagcatcgacgacgccaagtactgcggtcggctttatggcctcggtaccggagtcgcgcagaagcaaaatgaggatgtcgacagcgcccaggagaagatgtctatcttggctatcatcaacaacatgcagcagtag

SEQ ID NO: 182010 - DNA, 357 bp, synthetic construct
  misc_feature 1..357: note = Description of Artificial Sequence: Synthetic coding sequence
  source 1..357: mol_type = other DNA
atgcccgccgccctggtggagaacagccaggtgatctgcgaggtgtgggcctcgaatctggaggaggagatgaggaagatcagagaaatcgtgctgtcgtactcctacatcgctatggatacagaatttcccggagttgtagtgagaccgattggcgaatttcgtagcagcattgattatcagtaccagttgctgaggtgtaacgtcgacctgctgaaaattatacagttgggcctcaccttcactaacgagaaaggcgagtatccatcgggaattaacacttggcagtttaacttcaagttcaacctgacggaagacatgtactcccaggacagtatcgatctgctagccaattag

SEQ ID NO: 182011 - DNA, 879 bp, synthetic construct
  misc_feature 1..879: note = Description of Artificial Sequence: Synthetic coding sequence
  source 1..879: mol_type = other DNA
atgcccgccgccctggtggagaacagccaggtgatctgcgaggtgtgggctagtaatttagaggaggagatgcgcaagataagggagatcgtcttatcctatagttacattgcaatggatacagagtttcccggggtggtcgtccgacccatcggggagtttaggagtagcattgattaccagtatcagctgttacgctgtaatgtcgacttgcttaagataatccagctcggcctgacatttacgaatgagaagggtgaatacccatctgggattaatacttggcagttcaatttcaagttcaacctcacagaagatatgtacagtcaggattccattgatttattggcaaattcaggcttacagttccagaaacacgaggaagagggaatcgacaccctacacttcgccgagctcctgatgacaagcggagtggtgctgtgcgacaacgtgaagtggctctcctttcacagcgggtacgacttcggctacatggtaaagctcctcactgatagcaggctgccagaggaagagcacgagttttttcatattctcaatcttttctttcctagcatctacgatgttaaatacttaatgaaatcttgcaagaatctcaagggagggttgcaagaggtagcggatcagctcgacctccagcggattgggcgacagcatcaagccggtagcgacagtcttctgaccggtatggctttcttccgcatgaaagaactcttttttgaagactctattgacgatgccaaatattgtgggcgtctgtacgggttaggaactggagtagctcagaaacaaaacgaggacgtggattcagcccaggaaaagatgtccatactcgctataattaataatatgcagcagtag

SEQ ID NO: 182012 - DNA, 168 bp, synthetic construct
  misc_feature 1..168: note = Description of Artificial Sequence: Synthetic coding sequence
  source 1..168: mol_type = other DNA
atgcccgccgccctggtggagaacagccaggtgatctgcgaggtgtgggcctcaaacctcgaagaagaaatgcggaaaattcgggagattgtgctgtcctatagttacattgctatggacacggaattccccggtgtggtggtgcgacctatcggcgaatttcgctag

SEQ ID NO: 182013 - DNA, 678 bp, synthetic construct
  misc_feature 1..678: note = Description of Artificial Sequence: Synthetic coding sequence
  source 1..678: mol_type = other DNA
atgcccgccgccctggtggagaacagccaggtgatctgcgaggtgtgggcatccaatcttgaggaagagatgaggaagatccgggagattgtcctgtcttacagttatattgcaatggacacagagtttcccggagtggtcgtgcggcccatcggggagttcagaagcagcattgactatcagtatcagcttcttcgatgcaatgtggacctgctgaagatcattcagttggggctgacgttcactaatgagaaaggagagtacccctccggcatcaatacctggcagtttaactttaaattcaacttgacaggatacgatttcggctacatggtgaagctgctgactgatagtcgactgccggaggaagagcatgaattcttccatattctcaatctcttcttcccctccatttatgacgtgaagtatctcatgaaatcctgtaagaacttgaaaggcggcctgcaggaggtcgcagatcagctggacctccaacggattggaagacagcatcaggctgggagcgactcgctcctgactgggatggctttcttcagaatgaaagagttattttttgaagacagtatcgacgatgcaaagtactgcggccgcctttatggcctgggcaccggcgtcgctcagaaacagaacgaggacgtagactctgcccaagagtag

SEQ ID NO: 182014 - DNA, 360 bp, synthetic construct
  misc_feature 1..360: note = Description of Artificial Sequence: Synthetic coding sequence
  source 1..360: mol_type = other DNA
atgcccgccgccctggtggagaacagccaggtgatctgcgaggtgtgggcatccaacctggaggaagagatgcgaaagataagagagattgtgctctcttatagttatattgctatggacaccgagttcccaggtgtcgtagtccgtcctatcggagaatttcgcagctccattgactaccagtaccaactgctgcggtgtaacgtcgatctgcttaagattattcagctgggactgacatttacgaatgagaagggagaatacccttctgggatcaatacttggcagtttaactttaagttcaacttaactgaggacatgtactcacaggactctattgacctactcgctaattcctag

SEQ ID NO: 182015 - DNA, 717 bp, synthetic construct
  misc_feature 1..717: note = Description of Artificial Sequence: Synthetic coding sequence
  source 1..717: mol_type = other DNA
atgcccgccgccctggtggagaacagccaggtgatctgcgaggtgtgggccagtaacctggaggaggagatgcgtaaaatcagggaaatcgttctgagctactcatacatcgccatggacactgagttcccgggagtggtggtgcgcccaatcggggaattccggtcttcaattgattaccaataccagctattaagatgcaacgtggacctcctgaagatcatacaactggggttgacattcacaaacgagaagggtgagtatccctctggtataaatacctggcagtttaactttaagtttaatttgactgggtatgattttggatatatggtaaagctattaaccgatagtagactgcctgaggaagaacatgaattcttccacattcttaacctgttttttccatccatttacgatgtgaaatacttgatgaaaagttgtaagaacctcaagggaggtctgcaggaggtggcggaccagcttgatctgcagcgcatcgggcggcaacatcaagccgggtctgactcgctgcttaccggaatggcgtttttccgtatgaaggagctctttttcgaggactcaatcgatgacgctaaatattgcggaaggctgtatggcctggggactggcgtcgcccagaagcagaatgaagacgtagacagcgcccaggaaaagatgagtatcctggccatcatcaacaatatgcaacagtag

SEQ ID NO: 182016 - DNA, 168 bp, synthetic construct
  misc_feature 1..168: note = Description of Artificial Sequence: Synthetic coding sequence
  source 1..168: mol_type = other DNA
atgcccgccgccctggtggagaacagccaggtgatctgcgaggtgtgggcctcaaatctcgaggaggagatgagaaagatacgcgagattgtgctgagctacagctatattgccatggataccgagttccccggtgttgttgtgcggccgattggggaattccgttag

SEQ ID NO: 182017 - DNA, 258 bp, synthetic construct
  misc_feature 1..258: note = Description of Artificial Sequence: Synthetic coding sequence
  source 1..258: mol_type = other DNA
atgtacagccaggacagcatcgacctgctggccaacagcggcctgcagttccagaagcacgaggaagagggaatcgacacactgcatttcgcagagcttctgatgaccagcggcgtagtactgtgtgacaacgtgaagtggctctcttttcacagcggttacgacttcggctatatggtcaagctactaactgattcacggctgcccgaagaagaacatgaattctttcatatccttaatctgtttttcccttcgtag

SEQ ID NO: 182018 - DNA, 402 bp, synthetic construct
  misc_feature 1..402: note = Description of Artificial Sequence: Synthetic coding sequence
  source 1..402: mol_type = other DNA
atgcccgccgccctggtggagaacagccaggtgatctgcgaggtgtgggcaagcaacttggaagaggagatgcgcaagatcagagagatcgtattgagctattcctacattgcaatggatacagaattccctggcgtggtagtgaggcccataggagagttccgcagttccattgattatcagtatcagttgctgcgttgcaatgttgacctcttgaagatcatccagcttgggttgactttcaccaacgaaaagggtgagtacccgtccggaatcaatacatggcaatttaattttaagtttaatctcacagaggacatgtacagccaggattctatcgatctcttggctaattctgggctgcagtttcagaaacacgaggaagagggaatcgatacctag

SEQ ID NO: 182019 - DNA, 561 bp, synthetic construct
  misc_feature 1..561: note = Description of Artificial Sequence: Synthetic coding sequence
  source 1..561: mol_type = other DNA
atgtacagccaggacagcatcgacctgctggccaacagcggcctgcagtttcagaagcacgaagaggaagggatcgatactcttcactttgccgaacttttgatgacatcaggagtcgtcttatgtgataacgtcaagtggctgagctttcactccggttatgacttcggatatatggttaagctgctcactgactctagactccctgaggaggaacatgaattcttccacattctcaatttgtttttcccctctatttatgatgtgaaatacctcatgaagagctgtaagaacctcaagggcggcctgcaggaggtggctgaccagttggatctgcagcggattggccgtcaacatcaggcaggatccgattccttgctcacggggatggcttttttccgcatgaaggaattgttttttgaggattcgattgatgacgccaaatattgcggccgcctgtatggtctcgggacaggcgtggcccaaaagcaaaacgaagacgtggactctgcccaggagaaaatgagcatcctggctataattaataatatgcagcagtag

SEQ ID NO: 182020 - DNA, 561 bp, synthetic construct
  misc_feature 1..561: note = Description of Artificial Sequence: Synthetic coding sequence
  source 1..561: mol_type = other DNA
atgtacagccaggacagcatcgacctgctggccaacagcggcctgcaattccagaaacatgaagaggaggggatcgacacgctacactttgcagaacttctcatgacatccggcgtggttctgtgtgataacgtgaaatggctgtcttttcattctggatatgattttggttatatggtcaagctcctcacggacagcaggttacccgaagaagagcacgaattttttcacatcctgaatctgttctttccctctatttacgatgtaaaatacctgatgaagtcttgcaagaaccttaaaggaggcctccaggaagttgcagaccagctagacttacagcggattggaaggcagcatcaggccggctccgactctttactgacgggaatggccttcttcaggatgaaagagctgtttttcgaggatagcatcgatgacgccaaatactgtggacggctctacgggctcggaactggtgtggcccagaagcagaatgaagacgtggactcagcccaagagaagatgagtatattagccatcataaacaacatgcagcagtag

SEQ ID NO: 182021 - DNA, 561 bp, synthetic construct
  misc_feature 1..561: note = Description of Artificial Sequence: Synthetic coding sequence
  source 1..561: mol_type = other DNA
atgtacagccaggacagcatcgacctgctggccaacagcggcctgcagtttcagaagcacgaagaggaagggatcgacactcttcatttcgctgagttgcttatgacatccggtgtggtcttatgtgacaacgttaagtggctgagctttcactccggctacgactttgggtatatggtcaagctactgactgactcccgcctgcctgaagaagagcatgagttttttcatattcttaacctgttttttccgagcatatatgatgttaagtatctcatgaagtcatgtaagaacctgaagggagggctgcaagaagttgccgaccaactggacttgcagcggataggaaggcaacaccaggccggcagcgatagcttactaaccggcatggctttcttccggatgaaagagctttttttcgaagacagtattgatgatgccaaatattgtggaaggttgtatggcctcggtactggggtggcgcaaaagcagaacgaagacgtggacagcgcccaagagaagatgtccattctcgcaattattaataatatgcagcagtag

SEQ ID NO: 182022 - DNA, 366 bp, synthetic construct
  misc_feature 1..366: note = Description of Artificial Sequence: Synthetic coding sequence
  source 1..366: mol_type = other DNA
atgcccgccgccctggtggagaacagccaggtgatctgcgaggtgtgggcttctaacttggaagaagagatgagaaagatcagggagattgtgctcagctacagctacattgccatggatacagaattccctggcgtcgtggtcaggcctattggagagttccgttcttcaatagattatcagtatcagcttcttcggtgcaatgtcgatttactgaagattattcaactcggcctcacctttaccaatgaaaaaggcgaatatccatcaggaattaacacttggcagttcaatttcaaattcaatctcaccggatacgacttcggctacatggtaaaactgctgaccgactcgagacttccctag

SEQ ID NO: 182023 - DNA, 561 bp, synthetic construct
  misc_feature 1..561: note = Description of Artificial Sequence: Synthetic coding sequence
  source 1..561: mol_type = other DNA
atgtacagccaggacagcatcgacctgctggccaacagcggcctgcagttccagaagcacgaggaggaggggatagataccctgcacttcgctgaactgctgatgacatccggggtggtactgtgtgacaacgtgaaatggctctcattccattctggctatgatttcggatacatggttaaactgctgacagactctaggctccctgaggaggaacatgagttcttccacattctaaatctgtttttccccagcatctatgatgtaaagtatctgatgaagtcatgcaagaatctgaaagggggcctgcaggaagttgctgatcagctggatttgcaacgaataggccgtcagcatcaagctgggtccgacagcctcttgacgggcatggcattcttccggatgaaagaattatttttcgaagatagcattgatgatgcaaaatactgtgggaggctgtacggcctgggcactggcgtggcgcagaaacagaacgaggacgtagactcagctcaagagaagatgtctatcctagctatcatcaataacatgcagcagtag

SEQ ID NO: 182024 - DNA, 387 bp, synthetic construct
  misc_feature 1..387: note = Description of Artificial Sequence: Synthetic coding sequence
  source 1..387: mol_type = other DNA
atggtgaagctgctgaccgacagccggctgcccgaggaggagcacgaattttttcacatactaaacctgttcttccccagcatttacgacgtgaagtacctaatgaagtcctgcaagaacttgaaagggggcctgcaggaagtggccgaccagctcgatctacagcggatcggccggcagcatcaggccggaagcgatagcctgctcactggaatggcgttcttcaggatgaaggagcttttcttcgaagattctattgacgacgccaagtactgtggtaggctgtacggactcgggaccggcgttgcacagaagcagaacgaagacgtggatagcgcccaagagaagatgtccatcctggcaataatcaataatatgcaacaatag

SEQ ID NO: 182025 - DNA, 810 bp, synthetic construct
  misc_feature 1..810: note = Description of Artificial Sequence: Synthetic coding sequence
  source 1..810: mol_type = other DNA
atgcggaagatccgggagatcgtgctgagctacagctacatcgccatggacaccgagtttcctggcgtcgtggtacgacccatcggcgaattccggtccagcatagactaccaatatcagctcctgcggtgcaacgttgatcttctgaagatcattcagctgggtctcactttcaccaacgagaaaggagagtatccctcaggcatcaacacctggcaatttaatttcaaattcaacctcacagaagacatgtactcccaggactccatagacctcctggccaattccggattgcagttccagaagcatgaggaagaggggattgatacactgcactttgctgaacttctgatgacatctggggtcgtactgtgtgataacgttaagtggctgtctttccacagcggctacgacttcgggtacatggtcaagttgctaactgactctagactccccgaagaagagcatgagttcttccacatcctgaatttgttcttcccctcaatttatgatgtgaaatacctgatgaagagctgtaagaacttgaaggggggactgcaagaagtggcagatcagctggatctccagagaattggtaggcagcatcaggccgggtccgatagtcttctgactggcatggctttctttaggatgaaggagctcttcttcgaggattccatcgacgacgcgaagtactgcggacgactgtacggcctgggaactggagtggcacagaaacaaaatgaggacgtggacagcgcacaggagaaaatgagcatcctcgccataattaacaacatgcagcagtag

SEQ ID NO: 182026 - DNA, 4338 bp, synthetic construct
  misc_feature 1..4338: note = Description of Artificial Sequence: Synthetic coding sequence
  source 1..4338: mol_type = other DNA
atgcagggcccccccctgctgaccgccgcccacctgctgtgcgtgtgtactgcagcactggcagtggctcccggcccaaggttcctggttacagctcctggaatcattaggcctggagggaatgttacaatcggcgttgaattacttgaacactgcccaagtcaggttaccgtgaaggcagaattgcttaagacagcatccaatttaacagtgagcgtactggaagccgagggcgttttcgaaaaaggatccttcaagacacttacactaccctcacttccacttaacagcgcagacgagatttatgagctgagagtgaccgggaggacgcaagatgagattcttttcagcaacagtaccagactgtctttcgaaactaagagaatctctgtctttattcagactgacaaggccctttacaaaccgaaacaggaagtaaagtttcgcatcgttacactgttttccgatttcaagccttataagacgtcgctcaatattttaattaaggaccccaagtcgaatctgatccaacaatggctaagccagcagtccgatctgggcgttatttccaagacatttcagttgtcaagccatcccattctcggagactggtctatccaggtccaggtgaatgatcagacgtactatcagtctttccaggtctcggaatatgttctgcctaaatttgaggtcacactgcagacccctctctactgttctatgaactccaaacatttaaatggcacgatcactgcgaaatatacttacgggaaacccgtgaaaggagatgtcactctgaccttcttgcccctcagtttttgggggaagaagaagaatattacaaagaccttcaagataaatggctcagccaacttttccttcaatgatgaagagatgaaaaacgtcatggactcctcgaacggtctgagcgaataccttgatctgtctagtcctggcccagtggaaatcctgactaccgtcaccgagtccgtcactgggatttccaggaatgtctctaccaacgtctttttcaaacagcacgattacatcatcgagttttttgattacactaccgtcctcaaacccagtttgaattttactgctacggtgaaggtgacacgagccgatggcaaccaacttacactggaagaacggaggaacaacgttgtgattactgtgacacagcgcaattatactgagtattggtctggaagcaactcaggcaaccaaaaaatggaagcagtacagaagatcaactacaccgtgccacagagcggcacctttaagatagaatttcctatcctggaagatagttccgagctgcagctcaaagcctattttttgggttcgaaatccagtatggctgtccactcccttttcaagtcaccgagtaaaacatacatccagcttaaaaccagagatgagaatatcaaggtcggcagcccttttgagctggtggtcagtggaaacaaacggttaaaagagcttagctatatggttgtgtctcgggggcagttagtcgccgtgggtaagcagaactccactatgttctcactgaccccagagaactcatggacaccaaaagcatgtgtgattgtctattacatcgaggatgacggcgagattatctctgatgtactgaaaatccccgttcaactggtgtttaaaaataaaattaaactgtattggtccaaagtgaaggccgagccttctgagaaagtgtccttacgcataagcgtgacgcagcctgattcaatagtggggattgtagcagtggacaaatcggtgaacctgatgaatgcatccaacgacataaccatggagaacgtggttcatgaacttgaactgtataacacgggctactacctgggaatgttcatgaactctttcgccgttttccaggagtgcgggctgtgggttctgacagacgccaatttgacaaaggattatatcgatggcgtttacgataatgctgagtatgccgagcggttcatggaggagaacgaaggacacatagtggacattcacgatttcagcctgggatctagcccacatgtcagaaagcatttcccagagacatggatttggctcgataccaacatggggtatcggatttatcaagaattcgaagtgaccgtgcccgacagtatcacttcttgggtcgcaacaggcttcgtgatttccgaggatctggggctcggcctgactacaacccccgtggaactgcaggcttttcagcctttctttatttttttgaacctgccatatagcgtgatcaggggcgaggagtttgccctggagatcaccatcttcaattacttaaaagacgctactgaagtaaaagtgattatcgagaaatccgacaagttcgacattctcatgacaagcaacgagatcaacgcgaccgggcaccagcagactttactggtgccctccgaagacggggcaactgtcctcttccctattcgacctactcatttaggtgaaattcccattacagttaccgctctttcacccacagcatccgatgccgtaacccagatgattctggtgaaagctgaaggcattgagaaatcttacagtcagtccattctgctcgatctgacagacaaccggctgcagtctacattgaaaacactgtcctttagttttcccccaaacacagtcacaggctcagagcgagtgcagatcacagcgatcggagatgtgcttggcccttctattaacggcctggcgagtctgatccgaatgccgtacggctgcggcgaacagaacatgattaatttcgcgccaaatatttatattcttgactatctcaccaaaaagaagcaactgacagacaatctgaaggagaaagccctctccttcatgcggcagggttatcagcgggagcttctgtaccagcgcgaagatggctcttttagcgcatttggaaattatgacccgagcggaagcacatggctgtccgcgtttgttctgcgatgcttcctggaagccgatccctatatcgacatcgaccagaatgtgttgcatagaacatacacttggttgaaagggcaccagaaaagcaacggggagttctgggacccgggtcgggtaatccactccgagttgcagggagggaacaaatccccagtgactctgactgcatatatagttacgtcccttcttgggtacaggaagtaccaacctaatatagatgtgcaggaatccattcattttctggagtcagagttttcaagaggcattagcgacaactatacgctggctttgataacttacgcactgtcctctgtgggctccccaaaagcaaaggaggccttgaatatgcttacctggagagccgagcaggagggcggcatgcagttctgggtaagtagtgaatctaagctgtctgactcatggcaaccgcggtccctggatatcgaagtggcggcatacgccttactgtcacatttcttacagtttcagactagtgaaggtatcccaattatgcggtggctctctcgtcagcgcaacagtcttggcgggtttgctagcacccaggacaccaccgtggcactcaaagccctgtctgaatttgcggcgctgatgaacacagagcggactaatatacaggtgacggtgacggggccctcttcaccaagtcctgtgaaatttctgatcgacacacataatcgactccttctgcagaccgcagaactcgcagtggtgcagccaaccgccgtgaacatctcagctaatggcttcggctttgccatatgtcagctgaatgtcgtctacaacgtaaaggccagcggtagctcacgtagaaggaggtcgatccaaaatcaggaggcctttgacctagacgtcgctgtgaaagagaataaggacgaccttaatcacgtggatctgaatgtgtgtacttccttctcgggtcccggccggagtggtatggcgctaatggaagttaacctcctgtcagggttcatggtgcccagtgaagccattagtctctccgaaacagtgaaaaaagtggagtacgaccacgggaagctgaacctgtatctagacagtgtaaacgagacccaattttgcgtaaacatccctgccgtcagaaatttcaaagtatctaatactcaggatgcttccgtttccatcgtagactattatgagcccagaagacaagcagtccgttcttataactccgaggtgaaactcagcagttgcgacctttgtagcgatgttcagggatgccgaccttgtgaggacggtgcgtccggaagccaccaccatagctccgtcatcttcatcttctgtttcaagttactatattttatggagttatggctgtag

SEQ ID NO: 182027 - DNA, 4107 bp, synthetic construct
  misc_feature 1..4107: note = Description of Artificial Sequence: Synthetic coding sequence
  source 1..4107: mol_type = other DNA
atgcagggcccccccctgctgaccgccgcccacctgctgtgcgtgtgtacagctgcactggccgtggcgccaggaccaaggtttcttgttaccgcgcctgggattattcgacctggcggtaacgtgacaatcggagtcgagctgctggagcattgtccatcccaggtcactgtcaaagccgagctgctgaaaactgccagcaatctgacggtgagtgtcctcgaggccgagggtgtgtttgaaaaaggcagttttaaaaccctcacactcccttctgatcccaaaagcaatctcattcagcagtggctgagccagcagagcgacctgggtgtcatttcaaagacattccaactatcctctcatccaatattaggcgattggagtatccaggttcaagtcaacgatcagacgtattaccagagtttccaggtgtcagagtacgtcttacccaagtttgaagtgaccctgcaaacacctttatactgctctatgaactccaagcacctgaacgggactatcactgctaagtacacctacggcaagcccgttaagggagatgttacactcacattccttccgctctccttttggggaaaaaaaaagaacatcacaaagacattcaagatcaacggatctgcgaacttctccttcaatgatgaggagatgaagaatgttatggattcatcaaacgggctgtccgaataccttgatctgtcgtccccgggccctgtcgaaatactgacaacagtcaccgaatccgtcacaggcatcagcagaaatgttagcaccaatgtcttcttcaagcaacacgactatatcatcgagttcttcgattataccacagtgcttaaacccagtctgaactttaccgccaccgtaaaggtgaccagagcggacggcaaccagcttactctggaagaacgcagaaacaacgtagtgataactgtgacacaacggaattataccgagtactggagcggaagcaactctggcaatcagaagatggaagcagtgcaaaaaataaattatacagtgccacaatcgggcacctttaagatagagttcccaatcctggaggactcttccgaattgcaacttaaagcgtacttcctgggatcaaagtcttcaatggccgtacattctttgtttaagtcaccctcaaaaacttacatacagttaaagactagagacgagaacatcaaagtggggagcccattcgaactggttgtctctggtaataagcgcctaaaggaattaagctacatggtcgtcagcagaggccagctcgttgctgtcggcaagcagaactccaccatgttctctctgacccctgagaattcttggacgcctaaggcgtgtgtaatcgtgtattatatcgaagacgatggagaaattatctcagacgtgcttaaaatcccagtgcagctggtgtttaagaataaaataaaactttattggtctaaagttaaggccgagcctagcgaaaaagtgagcttgcgcatcagtgtcacccagcctgatagtatagtgggcattgtagccgttgacaaaagcgtgaaccttatgaacgcatccaacgacattaccatggagaacgtcgtgcacgaactggagttgtataatacgggatactacctgggcatgttcatgaattccttcgctgtctttcaggagtgtggcttgtgggtgctgaccgatgcgaatctgactaaagattatattgacggggtctatgacaatgcagagtatgcagaacggtttatggaagagaatgaaggccacattgtggatatacacgacttttcactagggtcttccccacacgttagaaaacactttcctgaaacatggatctggctggacactaatatggggtaccgcatctatcaggagtttgaagtgaccgtgcccgattccatcacctcatgggttgccaccggcttcgtaatctctgaagatctggggttagggctaactacaacacccgtggagctgcaggccttccaaccatttttcatttttcttaacctgccctacagcgttatcaggggtgaggaattcgccctcgagatcactatttttaattatctcaaagacgctacagaagtcaaggtgattatagagaaatcagacaaatttgacatactaatgacctccaacgagataaacgctaccggccaccagcaaaccctacttgtgccatccgaggacggcgccaccgtgcttttccccatcaggcccacacatttgggggaaatccctatcaccgtgaccgcactcagtcctacagcgtccgatgccgtgacccagatgatattagtcaaggctgaaggtattgaaaagtcttactctcagtcaatacttctggacctgactgataacagactccaatcaactctgaagacattgtcattctcgttcccccccaatacagtcactgggagcgagagggtgcaaattaccgctatcggggacgttttaggaccaagcattaacgggctggcaagtcttatacgcatgccttatggatgcggcgagcagaacatgatcaactttgctccgaatatctacatcttggactatctgacgaagaagaagcagcttacagataatctcaaagagaaggccttgagttttatgcgccaaggctatcagcgagaactcctgtaccagcgcgaggatggtagcttttcagccttcggaaattacgacccaagcggaagtacctggctgagtgcttttgttctcagatgcttcctagaagctgacccctacattgacattgatcagaacgtcttacacaggacatacacttggctgaagggccaccaaaagtcaaacggagaattttgggatccgggtcgggtgatacattctgagttgcagggggggaacaagagcccagtcaccctgacggcctatattgtaacgtctctccttggttatagaaagtaccaaccaaacattgacgtgcaggagtccatacatttcttagagtccgaatttagcaggggaatttccgacaattatacgttagcactgatcacttacgccctgtcatctgtgggatctccaaaggcgaaggaggccctgaacatgctcacatggagagcggaacaagaagggggaatgcagttctgggtttcttctgagagcaaattgtccgacagctggcagccgcgtagtcttgacattgaagtagcagcgtacgcccttctatcccatttcttgcaatttcagaccagtgaaggcatcccaatcatgagatggttatctaggcagaggaattcgctcggtggattcgcctctactcaggataccacagtggcgctcaaagctctgtctgagttcgcagccctcatgaataccgagcgaactaatattcaagtcacggtcaccggcccatccagcccaagtccagtgaaatttctcatcgacacacacaatcggctcttactccagacggccgagctcgccgtcgtgcaaccaaccgccgtgaacatctcggcgaacgggttcggctttgcaatctgccaattgaatgtggtttataatgtaaaagcatccggctcatcccgccgcaggaggtcaatacaaaaccaagaggcatttgatctggacgtcgctgtgaaggaaaataaagatgatctgaaccacgtggacctcaacgtgtgcacatcattcagtggtcctggtcggagcgggatggcactgatggaggtcaatcttctgtccggcttcatggtgccctcagaagctatcagtctgagcgaaactgtaaagaaggtagagtacgatcatggcaagctcaacctgtacttggacagtgtgaatgagactcagttctgcgtgaacataccagctgtgcggaattttaaagtgtcaaacacacaggatgcctcagtcagcatagttgattactacgaacccagacggcaggccgtgcgaagttacaactctgaggtaaagttgagctcatgtgacctgtgctccgatgtgcagggttgcaggccttgcgaggacggtgcatccggcagccatcatcacagctccgtgatcttcatcttctgttttaagttgttgtactttatggaactgtggctgtag

SEQ ID NO: 182028 - DNA, 4287 bp, synthetic construct
  misc_feature 1..4287: note = Description of Artificial Sequence: Synthetic coding sequence
  source 1..4287: mol_type = other DNA
atgcagggcccccccctgctgaccgccgcccacctgctgtgcgtgtgcaccgctgccttagccgtggcacctggccccagattcctcgtcaccgcccctggcattatcaggccgggtggcaacgtgaccataggagttgagctgctggagcattgtccttcccaggttacggtaaaggcagaactgctgaagaccgcctcaaacctgaccgtgtccgtcctggaggctgaaggggtttttgagaagggctctttcaaaaccctgactctgcctagcctgcccctaaactctgccgacgaaatctatgaacttagggtcaccggtcgtactcaggacgaaatcttgttttcaaatagcactcgcctgagcttcgaaacgaagaggattagtgttttcattcaaacagataaagccttgtacaagccaaagcaagaggtgaagtttcgaattgtgacacttttttcagacttcaagccatataagacttctctgaacatcttgattaaagatcccaaaagcaacttaatccagcagtggttgagtcagcaatctgaccttggcgtgatttctaaaacattccagctctcgagtcacccgatcttgggcgattggtccatacaggtgcaggtgaatgatcagacctattatcaaagctttcaggtgtcggaatacgtcctgcctaagttcgaagttaccctgcagactccattgtattgttccatgaatagcaaacacctcaatggtactatcactgctaagtatacttatggaaaaccagtgaaaggagacgttacgctgactttcctgccattaagcttttgggggaagaaaaaaaacatcaccaagacctttaagatcaatggatccgccaactttagttttaacgacgaggagatgaaaaatgtgatggactcatcaaacggcctttcagaataccttgacctgtcctctcccgggcccgtagaaatcctgacaactgtgaccgagtccgtcactgggataagcagaaatgtctcaaccaatgtgttcttcaaacagcacgactacatcatcgaattcttcgactacaccacagtcctcaagccttctttgaactttaccgctacggtgaaggtgacccgggctgatggcaatcagcttaccctcgaggagaggagaaacaacgtagtgatcaccgttacacaacgcaactacacagagtattggagcggttccaattccggtaatcaaaagatggaagcggtgcagaagattaactacactgttcctcagtccggcacttttaagatcgaattccctattctcgaggactcctctgaactgcagctgaaggcctactttctgggatcaaagtcgtctatggctgtacacagtctgtttaagagtccaagcaagacatatatccagcttaagacacgggacgagaacattaaggtcggctccccttttgagctggttgtttccggaaataagcgtcttaaggaattatcctacatggtggtctctaggggacaactcgttgctgtgggtaagcagaatagcactatgtttagcctcactccggagaattcttggacgcccaaagcctgcgtcatcgtgtactacatagaagatgacggagagattatttcggacgtcctgaaaattccggtgcagcttgtttttaagaacaagattaagctttactggtccaaggtgaaggcagagccaagcgagaaggtttccctccgtatttctgtgacgcagcctgattccattgtgggaattgtcgccgttgataagtcggtgaacctcatgaatgcaagcaacgatattacaatggagaacgttgttcatgagctggaactctataacaccggctactacctggggatgtttatgaatagcttcgccgtcttccaggaatgtgggttgtgggtgctgactgatgctaacctgacgaaggactacattgatggagtttacgataatgccgaatatgctgagaggttcatggaggagaacgagggacacatcgtggacatccatgatttttcactggggagcagtccgcacgtgcgaaagcacttccccgagacctggatatggctcgacaccaatatgggatataggatttaccaggagtttgaggtgacggtccccgactctatcaccagctgggtggccaccgggttcgtgatttccgaggaccttggtcttggacttaccaccacgccggtcgagttgcaggcctttcagcctttcttcattttcctcaacctgccttatagcgtgattagaggggaagaattcgcactagagattacaatcttcaattatctcaaagatgctacggaggtgaaagtcattattgaaaagtctgacaagttcgatattctcatgacaagcaacgagatcaatgcaaccggccatcagcaaacgctgctcgtcccatctgaagacggcgcgaccgtactgttccctattcgacctactcatctgggggaaattcctatcactgtcaccgcactgtcacccaccgcctctgacgccgtgactcaaatgatcttagtgaaggccgagggcattgagaagtcctactcccaaagcatcctcctagacttgaccgacaatcgattgcagagcaccctgaaaacactaagtttttccttcccacctaacaccgtgaccgggtctgagcgtgtccagattactgctatcggagacgtgctggggcccagtatcaatgggctggcatccctgatacggatgccttacggatgtggcgaacagaatatgattaattttgctccaaacatttatatccttgattatcttacaaagaagaagcagctgacggataacttgaaggagaaagcactgtctttcatgcggcaagggtatcagcgggaacttctctaccagcgggaagatggaagtttctccgcatttggaaattatgacccctctggatcgacctggctttccgccttcgtcctaagatgctttcttgaggcggacccgtacatagacatcgaccagaacgtgctgcacaggacatacacatggctgaaggggcaccagaagtccaatggggagttctgggatccaggcagggtgatccacagtgaactgcagggaggcaacaaatcacctgtcacgctgaccgcctatatcgtcacaagtctactaggctatcggaaatatcagcctaacatcgatgtgcaggagtccattcacttcctggagagcgagttcagtcgggggattagcgacaattatactctagctctgataacttacgcgctatcatcggtgggtagcccaaaagctaaagaagccctgaacatgttgacctggagagctgaacaggaagggggcatgcaattttgggtgagctccgagtcaaagctaagcgactcctggcagcctcggtcgttggacatcgaagtggccgcgtatgccctgctgagccattttctgcagtttcagaccagtgaaggcatcccaatcatgcgatggttatcacgacagagaaacagtttgggaggcttcgcatcaactcaagataccactgttgctctaaaagcactgtctgagtttgctgctctgatgaataccgagaggacaaatatccaggttactgtgaccggacccagctcaccatcacctcttgccgtggttcagcccaccgccgtcaacattagcgcaaatggctttggctttgccatatgccagctaaacgttgtttacaacgtgaaggcttctggttcaagcagacgcaggaggtcaattcaaaaccaggaggcctttgaccttgatgtagcagtcaaggagaacaaagatgatttgaatcacgtcgacttaaacgtgtgtacaagctttagtggtcctgggagaagcggaatggccctgatggaggttaatttactgtcggggttcatggtgccttcagaggctattagtctgtccgagacagtcaaaaaggtggaatacgatcacggtaaacttaatctgtatttggactccgtaaacgaaacacagttttgtgttaacatccccgctgttcgaaatttcaaggtttccaacacccaagacgcttctgtctccatcgtagactattacgagccgagacggcaggccgtgcggtcttacaacagcgaggttaaattgagtagctgtgacctctgcagtgacgtgcagggttgtcggccgtgtgaggatggcgcgtctgggtcccatcaccattcgtccgttatcttcattttttgcttcaagctgctgtatttcatggagttgtggctctag

SEQ ID NO: 182029 - DNA, 762 bp, synthetic construct
  misc_feature 1..762: note = Description of Artificial Sequence: Synthetic coding sequence
  source 1..762: mol_type = other DNA
atgggcgagttcaacgagaagaagaccacctgcggcaccgtgtgcctcaagtatttactcttcacctacaactgttgcttctggctcgcaggtctagctgttatggctgtgggaatctggacacttgctctcaaatcagattacatctccctactcgcctccgggacttaccttgcgactgcttatatcctggttgtggcagggacggtggttatggtcactggcgtgttgggatgttgcgcaacattcaaagaaagacgcaatttgctgagactttatttcatcttattgctcatcattttcctgcttgagattatcgcaggtattttggcctatgcctactatcagcagttaaacacagaactgaaggagaacctcaaagatactatgactaagagatatcatcagccagggcacgaggctgtcacttccgccgtggatcaactgcagcaggaattccactgctgcggctctaacaacagtcaggattggcgcgacagtgaatggatccggtcacaggaggccggtgggcgtgtcgtcccagatagctgttgtaaaacggttgtcgccctgtgtggtcagcgagaccatgcatctaatatttacaaagtggaaggtggctgcatcacgaagcttgaaacctttatccaggagcatctgagggttataggcgccgtcggaattggaatagcttgtgtgcaggtgttcgggatgatctttacttgttgtctgtacagatcgctaaagcttgagcattactag

SEQ ID NO: 182030 - DNA, 762 bp, synthetic construct
  misc_feature 1..762: note = Description of Artificial Sequence: Synthetic coding sequence
  source 1..762: mol_type = other DNA
atgggcgagttcaacgagaagaagaccacctgcggcaccgtgtgcctaaagtatctactattcacttacaattgctgcttttggctggctgggctggctgttatggccgtggggatttggacattagcacttaaatctgactacatcagtctgctagcatccggcacctatttggcgaccgcctacattcttgtggtcgccggtactgtcgtgatggtcacaggggtgcttggctgttgcgctaccttcaaggaacgccgcaatctattgaggctgtactttattctgctcctcatcatctttttgttagagattattgccgggatccttgcttacgcctattaccaacagctgaacaccgaacttaaagaaaatcttaaagacactatgactaagcgctatcaccaacctggccacgaggcagtcaccagtgctgtcgaccagctgcagcaagaatttcattgctgtggaagtaataacagccaggactggagagacagcgagtggatacgctcccaggaggcagggggtagggttgtcccagatagctgctgtaaaaccgttgtggcgctgtgcggtcagagagaccatgcttccaatatatataaggtcgaaggcggctgtataacaaaacttgagacttttatccaagagcatctgcgcgtaattggcgccgtgggaattggtatcgcttgcgtgcaggtttttggcatgatttttacttgctgcctttataggagcctgaaactggagcactactag

SEQ ID NO: 182031 - DNA, 762 bp, synthetic construct
  misc_feature 1..762: note = Description of Artificial Sequence: Synthetic coding sequence
  source 1..762: mol_type = other DNA
atgggcgagttcaacgagaagaagaccacctgcggcaccgtgtgcctgaaataccttcttttcacatacaactgctgtttttggctggccggcctggccgtgatggctgtcggcatctggacactcgcgcttaaatcggattatatttccctattggcctccgggacttacctggctacggcatacatcctggtagtagccggaacggtggtaatggtgacaggagtcctcggttgctgcgccactttcaaggagcggcgtaacctgctgaggttatacttcattctgcttctcatcatcttcctgttggaaatcatagcaggtatccttgcgtacgcttattaccaacaactgaataccgagctaaaagagaatcttaaggataccatgaccaaaaggtatcatcagcccggccatgaagcagttacaagtgccgtggaccaattgcagcaggaatttcattgctgtgggtctaacaactcacaggactggcgcgatagcgagtggatccggagccaggaggctgggggcagggtagtcccagatagctgctgcaaaactgtggtcgctctgtgtggtcaaagagaccacgcctccaatatctataaagtagaggggggatgcatcacaaagctggagacctttattcaagaacatctgagggtgattggcgccgtgggaatcggaattgcttgtgttcaggtctttggaatgatatttacgtgctgcctgtacaggagccttaagctcgaacattactag

SEQ ID NO: 182032 - DNA, 543 bp, synthetic construct
  misc_feature 1..543: note = Description of Artificial Sequence: Synthetic coding sequence
  source 1..543: mol_type = other DNA
atgggcgagttcaacgagaagaagaccacctgcggcaccgtgtgccttaagtacctgctcttcacatacaactgctgcttctggcttgcgggacttgctgtgatggccgtcgggatctggacattggcactgaagagtgattacatatccctcctcgcctcagggacatatctggctaccgcgtatattctggtcgtggcggggaccgtggtcatggtaactggtgttctaggatgctgcgcgacattcaaggagcgtcgcaacttgctcagactgtattttatactcttgctgatcatcttcttgcttgagatcatcgccggcatcctagcatacgcctactaccagcagctcaacactgaactcaaagagaacctgaaggacaccatgaccaaacggtatcaccagcctgggcacgaagccgtgaccagcgccgtcgaccagcttcaacaagagttccactgttgcgggtccaacaactcgcaggactggagagattcggagtggatccgatcacaggaggccgggggcagagtcgtgtag

SEQ ID NO: 182033 - DNA, 240 bp, synthetic construct
  misc_feature 1..240: note = Description of Artificial Sequence: Synthetic coding sequence
  source 1..240: mol_type = other DNA
atgggcgagttcaacgagaagaagaccacctgcggcaccgtgtgcctgaagtacctgctttttacatacaattgttgtttctggctggcaggactcgcggtgatggcagtgggcatatggacccttgccttaaaaagtgattatatctcccttttggctagcggcacatatctggctaccgcctatattctggtggttgctggcactgtggttatggtaactggtgtgctgggctgttag

SEQ ID NO: 182034 - DNA, 279 bp, synthetic construct
  misc_feature 1..279: note = Description of Artificial Sequence: Synthetic coding sequence
  source 1..279: mol_type = other DNA
atgggcgagttcaacgagaagaagaccacctgcggcaccgtgtgcctcaaatacctcttgttcacatataactgttgcttttggctggccggactagctgtgatggccgttgggatctggaccctggcactgaagtctgattatatcagcctactcgcctccggaacatatcttgccactgcatacatcctggtagtagccggaacggtggtcatggttactggagtcctgggatgttgcgcaacctttaaagagcgaaggaaccttctcaggctgtag

SEQ ID NO: 182035 - DNA, 198 bp, synthetic construct
  misc_feature 1..198: note = Description of Artificial Sequence: Synthetic coding sequence
  source 1..198: mol_type = other DNA
atgggcgagttcaacgagaagaagaccacctgcggcaccgtgtgcctcaagtatcttctgtttacctataattgctgcttctggctagcaggactggccgtgatggctgtggggatatggacgctggccctgaagagtgactacatcagcctcttggctagcggaacatatctggctacggcctatatcctggtttag

SEQ ID NO: 182036 - DNA, 531 bp, synthetic construct
  misc_feature 1..531: note = Description of Artificial Sequence: Synthetic coding sequence
  source 1..531: mol_type = other DNA
atgggcgagttcaacgagaagaagaccacctgcggcaccgtgtgcttgaagtacctgttgttcacatacaattgctgcttttggctggccggcctggcagtcatggccgtgggtatctggacactcgcactcaagtcggactacatctcgctgctggcgtctggtacttacctggccaccgcctatatcctagtggtggctggtaccgtggttatggtcactggcgtactcggctgttgtgccactttcaaggaacggagaaaccttcttcgattgtactttatcctgctactaatcatattcctgctagagattattgccggaatcctggcttacgcgtattaccaacagttaaacaccgagcttaaggagaacctgaaggacaccatgactaaacgttaccaccaacccggtcatgaagccgtgaccagtgctgtggaccaactgcagcaggagttccattgctgcggttccaataacagccaggactggcgggacagcgagtggattcggtcccaagaggcagggtag

SEQ ID NO: 182037 - DNA, 543 bp, synthetic construct
  misc_feature 1..543: note = Description of Artificial Sequence: Synthetic coding sequence
  source 1..543: mol_type = other DNA
atgggcgagttcaacgagaagaagaccacctgcggcaccgtgtgcctcaagtatctgctattcacatacaattgctgcttttggctggctggtctggctgtgatggcagtagggatttggacccttgcccttaaaagcgactacatttctctgctagcgtctggcacttatcttgccacagcatacatcctggtcgtagcaggcacagtggttatggttacgggagtgcttgggtgctgcgcaaccttcaaggagagaagaaatctgctgagactgtacttcatcctgctgctcataatcttccttctggaaattatcgctggcattcttgcctatgcatactaccagcagctcaataccgaactgaaggagaacctgaaagatacaatgaccaaaaggtatcaccagcccggccacgaggcagtgacctctgccgttgatcagctgcaacaagaattccactgctgtggatccaacaattctcaggactggcgggactccgaatggatcaggtcacaggaagccggggggcgagtggtgtag

SEQ ID NO: 182038 - DNA, 273 bp, synthetic construct
  misc_feature 1..273: note = Description of Artificial Sequence: Synthetic coding sequence
  source 1..273: mol_type = other DNA
atgggcgagttcaacgagaagaagaccacctgcggcaccgtgtgcctcaagtacctgttgttcacgtacaattgctgcttttggttggcaggcttagctgtgatggccgtgggtatttggaccctggcgttgaaaagcgactacatcagtttgctcgcttcgggtacctacctcgccacagcctatatcttagttgttgccggcacagtggtgatggtgaccggggtactcggttgctgtgcaacattcaaggagcgaagaaatttgctttag

SEQ ID NO: 182039 - DNA, 513 bp, synthetic construct
  misc_feature 1..513: note = Description of Artificial Sequence: Synthetic coding sequence
  source 1..513: mol_type = other DNA
atgggcgagttcaacgagaagaagaccacctgcggcaccgtgtgcttgaagtatctgttatttacctacaattgctgcttttggctggccggtcttgctgtcatggccgtgggcatttggactctggccctcaaaagtgattatatttctctcttggccagcgggacatatctcgccacagcctacatccttgttgtcgcggggaccgtggtgatggtgaccggtgtattgggctgctgtgctaccttcaaggaaagaagaaacctcttacgcctatattttattttactgttgattatcttcctgttagagatcattgccgggatcttggcctatgcctattaccaacagctgaatacagagctgaaagagaatctcaaggacaccatgacaaaacgttatcaccagcccggccatgaggccgtgacctcagccgttgaccaactgcagcaggaattccactgctgcggtagtaacaactcacaagactggagagactctgaatggatttag

SEQ ID NO: 182040 - DNA, 762 bp, synthetic construct
  misc_feature 1..762: note = Description of Artificial Sequence: Synthetic coding sequence
  source 1..762: mol_type = other DNA
atgggcgagttcaacgagaagaagaccacctgcggcaccgtgtgcctaaagtaccttctgtttacttacaattgctgcttctggttggccgggctggcagtaatggcggtggggatctggacactcgcacttaaatccgactacattagccttcttgcctccggaacatacctggccaccgcgtacattctcgtcgtagctggtacagttgttatggtaactggtgtgctgggttgctgcgcgaccttcaaggagcgtaggaacctcctacggctgtacttcattttgctactcatcatttttctcctcgagatcattgcaggaatcctggcatatgcttactaccaacaactgaacactgaactaaaagagaatctgaaggatacgatgacgaagcggtatcaccagccagggcatgaagctgtcaccagtgctgttgaccaactgcaacaggagttccactgttgcggcagtaacaattcacaggattggcgggatagcgagtggatccggtcccaagaagccggtgggcgggtcgtgccagactcttgttgcaagaccgtagtagcactgtgtgggcagagagaccatgcaagcaatatttataaggtagaggggggatgtatcacaaaactggagactttcatacaagaacacctgcgggttataggcgccgtgggtatcgggatcgcctgtgtgcaggtgttcggtatgatcttcacatgttgtctgtacagaagtcttaaactcgagcattattag

SEQ ID NO: 182041 - DNA, 3471 bp, synthetic construct
  misc_feature 1..3471: note = Description of Artificial Sequence: Synthetic coding sequence
  source 1..3471: mol_type = other DNA
atgagcaagctgcggatggtgctgctggaggacagcggcagcgccgacttccgccgtcattttgtgaacctttccccatttaccattacggtcgtgcttctcttgtctgcttgcttcgtgacatcgagtctgggaggcacggataaagaactccgattggtggatggggagaataagtgtagtggtcgagtggaggtcaaggtgcaagaagaatgggggacggtgtgtaataatggctggtccatggaagcggtttccgtaatttgcaatcagctcggatgtccaacagccattaaagccccaggatgggcgaattccagcgctgggagcgggaggatctggatggatcatgtgtcttgtaggggtaacgagtcggctctgtgggactgtaaacatgacggatggggtaaacatagcaactgcacacatcaacaggatgcaggagttacttgctcggacgggtcaaacttggagatgaggctgacccgcggcggaaacatgtgctccggcagaatcgagattaaatttcagggcaggtggggtacagtatgtgacgacaacttcaatattgaccacgcttctgtcatctgtcggcagctcgaatgcgggtcagctgtgtctttctctggcagcagcaactttggcgagggttcagggcccatctggttcgacgatctaatctgtaatggcaatgaaagcgccttgtggaattgcaaacaccagggatggggtaaacataattgtgaccacgctgaggatgcgggtgttatctgttctaagggtgctgacctgtcattacggttggttgatggcgtaactgaatgttcagggagactcgaggtgcgcttccagggcgagtgggggaccatctgtgacgatggatgggactcttacgatgctgccgtggcctgtaagcagctgggttgcccgactgctgtgacagctataggtagagttaatgcaagcaaaggattcgggcatatctggctggattcggtgtcatgtcaagggcatgagccggcaatttggcagtgcaagcaccatgagtggggaaagcattactgcaaccacaacgaggacgctggcgtgacctgctctgacggctcagacctcgagctgcgtttgcgtggaggtggcagcaggtgtgcaggcacagtggaggtggaaattcaacgccttttgggaaaggtttgtgatagaggatggggcctgaaggaggctgatgtagtgtgtcgtcagctcggatgcggatccgccctgaaaacctcctaccaggtgtactctaagatccaggcaaccaacacatggctgttccttagttcttgtaatggtaacgagacaagcttgtgggattgtaaaaactggcagtggggcggcctcacttgcgatcattatgaggaagcgaaaatcacttgttccgcgcatcgcgagcctaggctggtgggcggcgacatcccttgttcaggcagggtcgaggtaaagcatggagacacctggggcagtatatgtgatagcgactttagcctggaagctgccagcgtcctgtgccgggaactccaatgcggcactgtagttagcatccttggaggcgcacatttcggcgagggtaatgggcaaatatgggccgaggaatttcagtgcgaaggccacgaatcgcatttgtctctctgccctgtggctcctcgaccagagggaacgtgcagtcattcgcgtgatgtgggcgtcgtttgctctagatacaccgagattcggcttgtgaatggaaagacgccctgcgaggggcgcgtcgaactcaaaaccttgggagcctggggaagtctgtgcaattcccactgggatatcgaagatgctcatgtcttgtgtcagcaactgaaatgcggcgtcgcactttcgacccctggaggcgcccgttttgggaagggtaatgggcaaatatggaggcacatgttccattgtacaggaactgagcaacacatgggcgattgtcctgttaccgctctcggggcgagcctgtgcccaagtgagcaggtggcatcagtgatatgctctggaaaccagtctcagactctctcttcatgcaattcgagcagcctgggtcctactcgcccaaccatccctgaggagtctgccgtggcctgtatagagagtggacaactgagactcgtcaatggcgggggcagatgtgccggacgagtggaaatctaccacgaaggttcctggggaaccatctgtgatgactcctgggatcttagcgacgcccatgtggtgtgcaggcaactcggatgtggggaggctatcaacgcaactgggtcagcccatttcggcgagggcaccggaccaatttggttggacgaaatgaagtgtaacgggaaggagagtaggatctggcagtgtcacagtcacggatgggggcaacaaaactgtcgtcacaaggaggatgcaggtgtgatttgttccgagttcatgtcactaaggctgacgtcggaggcctccagagaagcctgtgctggacggctggaggtgttttacaacggcgcttgggggaccgtgggaaagtcgtctatgtcggagacaactgtgggagtggtgtgcagacagcttggctgtgctgataaaggcaaaattaatcctgcctcactagacaaggccatgagcatccctatgtgggttgacaatgtacagtgccctaagggaccagataccctctggcaatgtccatccagcccctgggaaaagcgcctggccagcccatcagaggagacatggatcacttgtgacaacaagatccgtctgcaggagggacctacaagctgctctggccgggtggaaatctggcatggtggctcttgggggacagtgtgtgacgatagttgggatctggacgatgcccaggtggtttgccagcaactgggctgtggacccgccctgaaggcctttaaagaggccgaattcggacaaggcaccggaccaatctggctgaatgaggtgaaatgcaaaggaaacgagtccagtctgtgggattgccccgcccgtcggtggggacactccgagtgtggccataaggaggacgccgccgttaattgcactgatatcagcgtccaaaagacaccacagaaagctacaactggtaggtcaagccgccagtcctcttttattgctgttggcatcctgggcgttgtcctattggccatctttgttgctcttttctttctgaccaagaaaagacgtcaacgccagcgtttggccgtcagtagccgtggggagaacttggttcaccagatccagtaccgggagatgaattcatgcctgaatgcggacgatctcgatctgatgaactcaagtgagaatagtcatgagtccgctgatttcagcgcagctgagcttatttccgtctccaagttcttgcctatctccgggatggagaaagaagcaatcttatcacataccgagaaggagaacgggaacctctag

SEQ ID NO: 182042 - DNA, 3465 bp, synthetic construct
  misc_feature 1..3465: note = Description of Artificial Sequence: Synthetic coding sequence
  source 1..3465: mol_type = other DNA
atgagcaagctgcggatggtgctgctggaggacagcggcagcgccgatttcaggagacacttcgtgaatcttagccccttcacgattacagtggttctattgctatctgcctgtttcgtcacatcatctctgggtggcacagacaaagaattacgtctcgtcgacggcgaaaacaagtgcagcgggagggtggaagttaaggtgcaggaagaatggggcaccgtttgtaataatggatggtcaatggaagcagtgagtgttatatgtaaccagctgggatgccccaccgcaataaaagcaccaggatgggcgaactcctcagcagggagcgggagaatctggatggaccacgtgagctgtcgtggaaacgagtccgcactatgggactgcaagcacgatggctggggaaagcactcaaactgtacccatcagcaggacgccggcgtgacctgtagcgacgggtctaatttggagatgcgcctgacccgaggggggaatatgtgcagcggcagaattgaaattaagttccagggcaggtggggaactgtgtgcgacgataacttcaatatcgatcatgccagcgtaatatgtcgccagttggagtgtggctccgcggtttctttctccggctcctctaacttcggggaggggtctggcccaatttggttcgatgatttaatctgtaacggcaatgaatctgccttatggaactgcaagcaccagggctgggggaagcacaactgtgaccatgccgaagatgccggggtgatctgcagcaagggtgccgatctgtcactgcggttggtggatggtgtgacggaatgttccgggcggctcgaggtccgatttcagggggagtggggcaccatctgcgacgatggatgggactcatatgatgcagcggtggcctgcaagcagctgggttgcccaactgccgttactgcaattgggagagtgaatgccagtaagggctttgggcatatctggttggacagcgtgagctgccaaggccatgagcctgccatttggcagtgtaaacaccatgagtggggaaagcattactgtaaccataacgaggatgccggggtgacttgctccgatggaagtgatctcgaactcagactgaggggcggcgggagccgctgcgccgggacggtagaggtggaaatccaaagactgcttggaaaagtgtgtgatcgggggtggggactgaaggaggctgatgtggtttgccgtcaattaggctgtggctccgccctgaagacttcctaccaggtgtactcaaagatccaggctactaacacttggctcttcctgagcagctgcaatggcaatgagacctcgctttgggattgcaaaaactggcagtggggcggcctaacttgcgatcattatgaagaggcaaagattacatgttcggctcacagggaaccacgcctggtcggaggtgacattccctgtagcgggcgagtcgaggtgaaacacggggacacatggggatcaatttgtgacagcgacttctccctggaggcagctagcgtgctctgtcgagagctgcagtgtggaaccgtggtgagtatcctggggggcgcgcattttggagaggggaatggacagatatgggctgaggaattccagtgtgagggtcatgaatcccacctctccttgtgccctgtggccccaaggcccgaaggtacatgctcccactcgagagatgtgggagtggtttgctcgagcaagacgcagaagacctctctcattggctcacatacagttaagggaaccgggctgggtagccatagctgcctgttcctgaagccatgtctgctgcctggctacacagagattaggctggtgaacggtaagacaccctgcgaaggccgggttgagttgaaaactctgggcgcatggggaagtttatgcaactcccactgggatatcgaggacgcccatgttctgtgtcaacagctgaagtgcggcgttgctttgagcaccccgggcggagctaggttcggcaaggggaatggtcagatatggcgacacatgtttcattgtacaggaacagagcagcacatgggcgattgccctgtgactgcccttggagccagtctatgccctagcgaacaagtggctagcgtgatctgtagcgggaatcaatcacagacactgagctcttgcaattcatcctcactcggaccgacgagacctactatccccgaagaatctgccgttgcctgtatcgagagcggccagctgcggcttgtcaatggaggtggtcggtgcgcgggccgggtggagatctatcacgagggtagttggggaactatttgcgacgacagctgggatctgtctgacgcgcacgtagtctgtagacagttaggctgcggtgaggccatcaatgccaccggtagtgcccacttcggtgagggaaccgggcctatctggttggatgagatgaaatgtaatggcaaagaatcccgcatatggcagtgtcattcccatggttggggccaacaaaattgcaggcacaaggaggacgctggtgtgatctgttcggaattcatgagcctaaggttgacatcggaagccagccgagaggcatgcgctggacggctggaagtattttataacggcgcctggggaaccgtggggaaaagttctatgagcgagaccacagtgggggtagtttgcaggcagctcggatgcgccgacaagggaaagattaacccagccagcttggacaaggccatgagtattcctatgtgggtagataacgtacagtgtccaaagggaccggataccctatggcaatgcccgagctctccatgggagaagaggcttgcctcccccagcgaggagacgtggataacctgtgacaataagattcgcctgcaggaaggaccaacttcgtgtagcggtcgggtggaaatctggcatggaggttcatgggggaccgtgtgcgacgacagctgggacttagatgacgcgcaggtcgtctgtcagcaattgggttgcggcccagcactgaaagcttttaaggaggccgagttcggtcagggcaccgggcccatctggctgaacgaggtgaaatgcaaaggcaacgagtcttccctgtgggattgccccgcccgtcgctggggacactctgagtgcggtcacaaagaagacgcggccgtgaactgtaccgatatcagcgtccagaagacaccccagaaagctacaacaggacggtcatcgcgccagtcgagcttcatcgccgtggggattttgggagtcgttcttttagctatcttcgtcgccctcttctttctaaccaaaaaacggagacagcgccagcggctggccgtgtcctcacgcggcgaaaatctggtgcaccagatccagtacagggaaatgaattcatgcctaaacgctgatgaccttgaccttatgaacagctccggtggacactctgagcctcattag

SEQ ID NO: 182043 - DNA, 3366 bp, synthetic construct
  misc_feature 1..3366: note = Description of Artificial Sequence: Synthetic coding sequence
  source 1..3366: mol_type = other DNA
atgagcaagctgcggatggtgctgctggaggacagcggcagcgccgatttccggaggcattttgtaaatcttagtcccttcacaataacggtggttctgctacttagtgcctgtttcgtcacatcttcactgggaggaactgataaggagttacgtttggtggatggagaaaataagtgctccggacgggtggaggtgaaggtgcaggaggagtggggaaccgtgtgcaacaatggttggagtatggaagccgtgtcagtgatctgcaatcagctgggctgcccaaccgctatcaaagctccaggctgggccaattcatctgctggtagtggccgcatttggatggaccacgtctcatgtagaggcaacgagtcagccctttgggactgcaaacacgatggttggggaaagcattctaattgcactcaccagcaagacgctggggtgacatgtagtgatggttccaatttggagatgaggctcacccgaggcggcaatatgtgtagcggtcgaattgaaattaagtttcaagggcgctggggaacagtttgcgatgacaattttaacatcgatcatgcaagtgtgatctgtcgccagctcgagtgtggcagtgctgtttccttttcgggatccagcaactttggagaaggaagtggaccgatttggttcgatgaccttatctgcaacggaaacgagagtgctctatggaactgtaagcaccagggttggggaaagcataattgtgaccacgcggaggatgctggcgttatctgctcaaaaggcgccgacttgtccttgcggctggtggacggcgttaccgagtgctccggccgactcgaagtgcggttccagggtgagtgggggacaatctgcgacgatggttgggattcctacgatgcagcagtggcctgtaaacagttgggatgccccaccgcggtgacagccatcgggagagtgaatgctagcaaaggcttcgggcacatctggttagactccgtgtcttgccagggacacgagcccgccatctggcagtgtaagcaccacgagtgggggaaacactactgcaatcacaacgaagacgccggggtgacttgttcagatggttccgatctcgaactccggctcagaggcggcgggagccggtgtgccgggactgtggaagttgaaattcaaaggctgctgggcaaagtttgcgaccggggttggggtctgaaagaggccgatgtagtttgtagacagttaggatgcggaagcgccctgaagacatcctatcaggtgtactctaaaatccaagcgactaatacgtggctcttcctgagttcttgtaacggcaacgaaactagtttatgggactgcaaaaactggcaatggggaggtctgacttgtgaccactacgaggaggccaagattacttgcagtgcccatcgtgagcctcgactggtgggaggtgatataccctgttccggtcgggtggaagtcaagcacggcgatacctggggctccatctgcgatagcgatttctcattagaggcagcctccgtcttgtgtagggaacttcagtgtgggaccgtggtgagcattctgggcggggctcacttcggcgaaggtaatggccaaatctgggccgaggagttccaatgcgagggacatgaatcgcatctgtctttatgtcctgtggctccaaggccagaagggacctgctcacactccagagacgtcggcgttgtgtgttcacggtacacggaaattagactggtcaacggcaagactccatgcgagggccgcgtggaattgaaaactcttggtgcatggggcagtctgtgtaatagtcattgggatattgaggatgctcatgtgctttgccagcagttaaaatgtggggtcgcgctttcaactccaggaggcgcccggtttggcaaaggcaacggccagatttggagacacatgttccactgcactggcactgagcagcatatgggcgattgtcccgttactgcccttggggctagtttgtgtccttccgagcaggttgctagtgtgatctgtagcggcaaccagagtcagacgctcagctcgtgtaacagctcatcactcgggccgacgagaccaacaatcccagaggaatccgccgttgcctgtatagagtctgggcagctccggcttgtgaacgggggcggcaggtgtgccgggagggtggaaatttatcacgagggttcttggggaacaatctgtgatgacagctgggatttatcagacgctcacgtcgtctgtagacagcttggatgcggcgaagccataaacgccaccggatctgctcacttcggagaggggactggcccaatttggctggacgaaatgaagtgtaatggcaaggaaagtcgaatttggcagtgccattctcacggttgggggcagcagaactgccgccacaaggaagacgctggtgtgatatgttccgaatttatgtcactccgtctgactagcgaggcatcaagagaggcctgtgctgggaggctggaggtgttctacaatggcgcctgggggaccgtgggtaagtcatctatgagtgaaacaacagtgggagttgtttgccggcaactgggatgtgctgataaaggtaagatcaacccagcatccttggataaagccatgagcatccccatgtgggtcgataatgtccagtgtccgaaaggccccgacacactttggcagtgtcccagctccccctgggagaagcggctggcttctccgagtgaagaaacttggattacttgtgacaacaaaattcgcctccaggaaggaccaacaagttgtagcggacgagtggagatctggcacggcggaagctggggcacagtgtgcgacgactcttgggatctggacgatgcccaggttgtctgccagcaattgggttgcgggcctgctttgaaagcattcaaagaagccgaatttggccaagggactggccctatttggctgaacgaggtgaagtgcaaaggcaacgaatccagcctctgggactgcccagctcgtcgctgggggcatagcgagtgtggtcacaaagaagacgccgcagtgaattgcactgacattagcgttcagaagacaccccaaaaagcgaccacggggcgctcttcccgccagtcctcattcatcgctgtcgggatattaggtgtcgttttactggctattttcgtggctctcttctttctgacgaaaaagcgtaggcagcgccagaggctcgcagtgagcagccggggcgagaacctcgtccaccaaatccagtaccgggagatgaattcctgccttaacgcagatgatctagacctcatgaacagctccggaggacattccgaacctcactag

SEQ ID NO: 182044 - DNA, 555 bp, synthetic construct
  misc_feature 1..555: note = Description of Artificial Sequence: Synthetic coding sequence
  source 1..555: mol_type = other DNA
atgagccggctgagccggagcctgctgtgggccgccacctgcctgggcgttctgtgtgtgctcagtgcagataagaacaccacccagcaccccaacgtcactacattggcccccatctcaaacgttacatcggcccccgttacctcactacctctggtaaccacacccgctcctgagacgtgcgaggggcggaactcttgcgtgagctgcttcaatgtcagtgtggtgaacaccacgtgcttttggattgaatgtaaggatgaaagctactgtagccataactccactgtaagtgattgccaggtgggcaatacaaccgatttttgcagtgccaaaccaaccgtgcagcccagcccaagtaccacaagcaaaaccgtcaccacgtccggcacaaccaacaatacggttacccctactagccagccagtcagaaagtccacattcgacgcggcctccttcatcggtggaattgtccttgtcctcggtgtgcaggctgtgatattcttcctgtacaaattttgtaaatcaaaggaacgcaactaccatacactgtag

SEQ ID NO: 182045 - DNA, 594 bp, synthetic construct
  misc_feature 1..594: note = Description of Artificial Sequence: Synthetic coding sequence
  source 1..594: mol_type = other DNA
atgagccggctgagccggagcctgctgtgggccgccacctgcctgggcgtcctttgtgtgctcagtgcagacaagaacacaacccaacatcctaacgtgaccaccctggcccccatctctaatgtcacgtcggcccctgtcactagtttgccgctggtcacaacacccgctcccgagacttgcgagggcagaaactcctgcgtctcctgcttcaacgtcagcgtagtcaacaccacctgcttctggatcgaatgcaaggacgaatcctattgctcacataactccactgtgtccgattgccaggtcggtaacacgactgacttctgctcagtgagcactgcaaccccagtccctacagccaattccacagctaagcctaccgttcagccatccccaagcaccacaagcaagaccgtgaccacatccggtaccactaataacacggtgacacccacctcacagcctgtgcgaaaatccacattcgacgcagcttcattcataggcggaattgtactcgttctcggcgtgcaagcagtgattttctttctgtataagttttgcaagtccaaagagcggaactatcacactctgtag

SEQ ID NO: 182046 - DNA, 537 bp, synthetic construct
  misc_feature 1..537: note = Description of Artificial Sequence: Synthetic coding sequence
  source 1..537: mol_type = other DNA
atgagccggctgagccggagcctgctgtgggccgccacctgcctgggagtcctgtgcgtgctatcggcggataagaacacgacccagcacccaaacgttactaccctggctcccatctctaatgtgaccagcgcccctgtgacttcattacccttagttaccacacccgcccccgagacctgtgaaggcagaaattcctgtgtgtcttgtttcaacgtgtcggtggtcaacactacgtgtttctggattgaatgcaaggatgaatcttattgttcccataatagtacagtttccgattgccaagttgggaacacaacggacttctgctcggtgagcacggccaccccagtgccaacagctaattcaacagggacaactaacaacaccgtgacaccaacttcccagcccgtgagaaaatctacgtttgacgcagcctcttttataggcggcatcgtcctagtgctaggtgtacaggccgtgatctttttcctctacaagttctgcaagtccaaggagcgtaactaccatacactctag

SEQ ID NO: 182047 - DNA, 498 bp, synthetic construct
  misc_feature 1..498: note = Description of Artificial Sequence: Synthetic coding sequence
  source 1..498: mol_type = other DNA
atgagccggctgagccggagcctgctgtgggccgccacctgcctgggcgttctctgtgtgctcagcgccgacaaaaacacaacacaacatcctaacgtaacaacactggcccccatctcgaacgttacatccgcccccgttacctccctgcctctagtgaccaccccagcccctgaaacatgtgaaggcaggaactcttgtgtttcttgcttcaacgtgtccgtcgtgaacaccacctgtttctggatcgaatgcaaggacgaaagctactgttcacacaactccaccgtgtcagactgccaggtcggcaacaccactgatttttgctccggcacaacaaataatacagtaacacctacaagccagcccgtgaggaagagcacctttgatgcggcatcattcattggcgggattgttctggtgctcggcgtgcaggctgtgatatttttcctgtacaagttctgcaagtccaaggaacggaactaccacacactgtag

SEQ ID NO: 182048 - DNA, 570 bp, synthetic construct
  misc_feature 1..570: note = Description of Artificial Sequence: Synthetic coding sequence
  source 1..570: mol_type = other DNA
atgagccggctgagccggagcctgctgtgggccgccacctgcctgggcgtgctctgtgtgttatccgctgacaaaaatactacacagcaccccaatgttaccacattagctcccatctccaatgtgactagcgctcccgtgacttccttgcccctagtgaccacgccagctccagagacgtgtgaaggacgcaattcatgtgtcagctgcttcaatgtctccgtggtgaacaccacctgcttctggatcgagtgtaaggatgaatcgtactgttcccacaacagcaccgtctccgactgccaggtgggaaacaccacggatttttgcagcgtcagtactgccacacctgtccctacagccaatagtaccgcgaagccaactgttcagcccagcccttccaccacctctaagaccgtgaccacttccgggaccacaaacaataccgtcacccccacgtcccagcctgtgcgcaagtctactttcgacgcagcaagcttcattggcggcatcgtactcgtcctggagatcagatgtcacacacggaactatataccggatctgaaaaagtag

SEQ ID NO: 182049 - DNA, 474 bp, synthetic construct
  misc_feature 1..474: note = Description of Artificial Sequence: Synthetic coding sequence
  source 1..474: mol_type = other DNA
atgagccggctgagccggagcctgctgtgggccgccacctgcctgggggtcctgtgcgtactctctgccgacaagaatactacgcaacacccaaatgtgactactctggctcctatcagtaacgtcacttccgcccctgtcaccagtctgccattggtcaccacaccagcgccagagacttgtgagggtcggaattcttgtgtatcctgttttaacgtgtctgtcgttaacaccacatgcttctggatcgaatgcaaggacgagtcctactgttcccacaactcaactgtgagcgactgtcaggtaggaaacaccacagatttctgcagcgtgagtactgcaacccccgtgcccaccgctaatagtaccgccaaacctaccgtgcagccttctccttcaactacttctaagacagtgacgacaagcgaaattcgatgccataccaggaattacatcccagatttaaagaaatag

SEQ ID NO: 182050 - DNA, 747 bp, synthetic construct
  misc_feature 1..747: note = Description of Artificial Sequence: Synthetic coding sequence
  source 1..747: mol_type = other DNA
atgagcgccgtgctgctgctggccctgctgggcttcatcctgcccctgccaggcgtgcaggcactgttgtgccagtttggcaccgtgcagcacgtatggaaggtgagcgatctcccacggcaatggacacctaaaaatacatcttgtgactccgggctgggatgccaggataccctgatgctgattgagtccggccctcaagtgagtctcgttctctccaaaggttgcaccgaggccaaggaccaggagccacgggttacagagcacagaatgggtcccggactcagcttgatcagctacacatttgtttgtcgtcaagaggatttctgcaacaatctggttaacagcctgccgttgtgggcaccccaaccccccgctgaccccggctccctgcggtgcccggtatgtttgtctatggaaggatgtttagagggaaccaccgaggagatctgccctaaaggaactacacactgctacgatggacttctgcgcttgcgcggtggcgggattttctcaaatttgcgtgttcagggttgtatgcctcagcccgtctgcaatctcctgaacgggactcaggagattggacctgtgggtatgaccgagaattgtgacatgaaggatttcctgcagctcaaacccgttgggctgttagaagagcacaacgtaggtgaaaaggagcgcggtcagggacagcaccaatgtgtgcaactcgactggcaaaagcgggctgcaaccggcattttctag

SEQ ID NO: 182051 - DNA, 438 bp, synthetic construct
  misc_feature 1..438: note = Description of Artificial Sequence: Synthetic coding sequence
  source 1..438: mol_type = other DNA
atgagcgccgtgctgctgctggccctgctgggcttcatcctgcccctgcctggtgtgcaggctctcctctgtcagttcggcactgtgcagcatgtttggaaggtttcggatcttcctagacaatggacacctaagaatacaagctgtgattccggcctgggatgtcaggatacacttatgctgattgagagcggaccgcaggtgagcttggtgctttccaagggctgtactgaggccaaagatcaggagccacgtgttaccgaacatcgcatggggccaggcctctccctcatctcttacacattcgtctgtcgccaggaggacttctgtaataacctggtgaactcactcccactttgggcccctcaaccacccgctgacccaatgatgggcgctgctgaagggccattcggaaaagccgaacaggtcgactcatag

SEQ ID NO: 182052 - DNA, 438 bp, synthetic construct
  misc_feature 1..438: note = Description of Artificial Sequence: Synthetic coding sequence
  source 1..438: mol_type = other DNA
atgagcgccgtgctgctgctggccctgctgggcttcatcctgcccctgcccggggtgcaagccctgctgtgtcagttcggaactgtgcagcacgtgtggaaagtcagcgatttgcctcggcaatggacccccaagaacacttcttgtgattctgggctcgggtgtcaagatactcttatgctgatcgagtcaggacctcaagtttcacttgtcctgtctaaagggtgtacggaggcgaaagaccaggaaccacgagttacagaacacagaatggggccagggctctctttgatttcctacacattcgtgtgcagacaggaggacttttgcaacaatctggtgaactcactgccactgtgggccccgcagccccctgctgacccgatgatgggggccgccgaaggaccctttggcaaggcagaacaggttgacagctag

SEQ ID NO: 182053 - DNA, 1671 bp, synthetic construct
  misc_feature 1..1671: note = Description of Artificial Sequence: Synthetic coding sequence
  source 1..1671: mol_type = other DNA
atgccccccccccggctgctgttcttcctgctgttcctgacccccatggaggtccgcccagaggaaccgctggtggtaaaagtcgaagaaggagataacgctgtcctccagtgcctgaagggaacatctgatggacctacccagcagctgacttggagtagagagagtccgctgaagccatttttaaagttatccctcggcctgcccgggctcgggatccacatgaggccactggccatttggctgtttatcttcaacgtcagccagcagatgggcggcttttacctgtgccagccagggcccccctccgaaaaggcatggcagcccggatggacagtgaacgttgaggggagcggagagctgtttcgctggaacgtctccgatctgggcgggctcggctgcggcctcaagaatcggagtagcgaggggccctcatcaccttccggcaagctgatgagtccaaaactttacgtgtgggctaaggatcggccagagatttgggaaggagaacccccctgcctccccccacgcgacagcttaaaccaaagtctctcacaggacctaaccatggccccagggtccactctgtggctctcctgcggggtccctccagactctgtatcccgaggtcccctcagctggactcacgttcatcctaaagggccaaagagcctccttagtctagaactgaaggacgatcgacccgcgagggacatgtgggttatggagaccggcctgttgctgccccgggccacagctcaggacgctggaaagtattattgccatagggggaacctgaccatgagtttccatctggagataaccgccagaccagtcttgtggcactggctcttaaggaccggggggtggaaggtttcagctgtgacactcgcctacctcatattctgcttgtgctctttggtgggcattctccaccttcaaagggccctagtgctgaggaggaagcggaaacgcatgacagacccaacccgacggttcttcaaggtgaccccccctccaggatctggacctcagaaccagtacggcaacgtgttatcattacccacaccaactagtggactgggaagggcccagcgctgggcagcgggactgggggggactgcaccatcttacgggaacccttcttccgacgtccaggctgatggggcacttgggagtcgatctccaccaggcgtgggcccagaggaagaggagggggaaggatacgaagagcctgatagcgaggaagacagcgagttctatgaaaatgactctaatctgggtcaggatcaactctctcaggacggctccgggtacgagaatcctgaagacgaacctttaggacccgaggacgaggactccttcagcaacgcagaaagttacgagaacgaagatgaggagctgacccagccggtggcaaggaccatggactttctgtctccacacggtagtgcctgggatcctagtcgggaggctactagcctgggaagtcagtcttacgaagatatgcgagggatcttgtatgctgccccgcaactccgctctataagaggtcagcccggccccaaccacgaggaggacgcagacagttacgagaatatggataatcccgacgggccagacccggcgtggggtgggggcggaaggatggggacgtggtcaactagatag

SEQ ID NO: 182054 - DNA, 1092 bp, synthetic construct
  misc_feature 1..1092: note = Description of Artificial Sequence: Synthetic coding sequence
  source 1..1092: mol_type = other DNA
atggaggtgcggcccgaggagcccctggtggtgaaggtggaggagggggacaatgccgtcctacagtgccttaagggcactagcgacgggccaacgcagcagttgacttggagccgagagagtccattgaaaccatttctgaaactcagcctcgggctcccaggattgggcatacacatgcggccgctcggcaaatattactgccacagggggaacctcaccatgtcctttcacctggagattacagccaggccagtgctctggcactggctccttcggaccggaggctggaaagtgagcgctgttactctggcttacctgattttctgcctatgctcacttgttggcattctgcatctgcagagagcgctggtccttcgacggaaaaggaagaggatgacagaccctacccgccggttttttaaggtgacaccaccaccgggttccggaccccagaaccagtacggcaatgtgctgtcgctgcctactccaacctcaggattaggccgcgcgcagcgctgggcagctggcctgggagggacagcgcccagctacggtaacccatcaagcgatgtacaggcagatggagccctgggcagccggagcccccctggtgttggacccgaagaagaagagggtgaaggctacgaagaacctgattcagaagaggactccgaattttacgaaaacgactccaatctgggccaggaccagctctcacaggatggctcaggctatgagaaccccgaggatgagccgttgggtcccgaggacgaagattcattcagtaacgccgagagctacgaaaatgaagacgaagagttgacccagcccgtggctcggactatggacttcctgtcccctcacggctctgcatgggaccccagcagggaggctaccagcctgggatcacagtcttatgaggacatgcgcgggattctttacgccgccccacagttgaggagcatccgagggcagcctggtcccaaccatgaggaggatgctgacagctacgagaatatggacaaccccgatgggcctgatcccgcatggggaggggggggaaggatgggcacctggtcaacaaggtag

SEQ ID NO: 182055 - DNA, 1218 bp, synthetic construct
  misc_feature 1..1218: note = Description of Artificial Sequence: Synthetic coding sequence
  source 1..1218: mol_type = other DNA
atgagccccaagctgtacgtgtgggccaaggaccggcccgagatctgggagggggaaccaccatgtcttccccctagagatagtctgaatcaatcattaagccaggatctgacaatggctcccggctctacactttggttatcatgtggcgtgcctcccgattctgtgtctcgtggacctctctcttggactcacgtacaccccaaaggaccaaaatctctactctctctcgagctgaaggacgatcgtccagcgagggatatgtgggttatggaaaccggactgctgctccccagggctactgcacaagacgctgggaagtattactgccatagaggaaacctcaccatgtccttccatttggaaataaccgcccgaccggtactctggcattggctgctaaggaccggtgggtggaaagtatcagctgtcacccttgcttatctgatcttttgcctctgttcgctcgtgggcatcctccatcttcagagggctctggtgctaaggcgcaaacgcaaaaggatgactgatccaaccaggaggttctttaaggtcactccaccacctgggtctggcccgcagaaccagtacgggaatgtgctcagcctccctacccccaccagtggactgggcagggcccagaggtgggctgccggattgggaggcacagctcctagctacggaaatccgtcttctgacgtgcaagctgacggtgcgctgggcagtagatccccccctggagttggacccgaagaggaggagggtgagggctatgaagagccggacagtgaagaagatagtgagttctacgaaaacgactccaacttgggccaggaccaactgagccaagacggatcagggtatgagaacccggaagatgagcctctgggacctgaggacgaggactctttctccaacgccgagtcttatgagaacgaggatgaggagttgacacagcctgtggcgcgcactatggatttcctgagccctcacggatctgcatgggacccttccagggaagccacaagcctgggcagccagtcctatgaggacatgcgcggcatcctctacgcagcaccccagctgcgcagtattcgggggcagcctggccccaatcatgaagaagacgcagactcttacgagaacatggataaccctgacggaccagacccagcttggggtggagggggaaggatgggcacgtggagtacacgctag

SEQ ID NO: 182056 - DNA, 1674 bp, synthetic construct
  misc_feature 1..1674: note = Description of Artificial Sequence: Synthetic coding sequence
  source 1..1674: mol_type = other DNA
atgccccccccccggctgctgttcttcctgctgttcctgacccccatggaagtccggcctgaggagcccctggtggtgaaggtggaagagggtgacaacgcggtgctgcaatgcctgaaagggaccagcgatggacccacccagcagctgacatggagcagggagagtcctctgaaacccttccttaaactcagtctgggcttgccaggcctcggcatacatatgaggcctcttgcgatatggctattcatctttaacgtgagccagcagatggggggattctatctgtgccaaccggggccaccatcagagaaggcatggcagcctggctggaccgtcaatgttgaagggtcaggcgagctatttcgatggaacgtgtctgacctgggcgggctcggctgcggactcaagaacaggtccagcgaaggccctagcagcccatccggaaagctgatgtcccccaagctgtatgtgtgggccaaagataggccagaaatttgggagggcgagccaccatgcctcccgccacgcgactctctcaatcagtcactatcgcaggatctcaccatggcacccgggtccaccctctggctctcgtgcggagtccctcctgattctgtttctaggggtcccctctcatggacccacgtgcatccgaagggccctaagtcactgttatcccttgagttgaaggacgacaggcccgcccgcgacatgtgggtgatggaaacaggtctgctgctgccacgggcaacggcccaggatgcaggaaagtattactgtcatcggggcaacctcaccatgtccttccacttagagatcacggcacgtcctgttctgtggcactggctgctgcgcacaggcgggtggaaagtgagtgccgtgaccttagcttatctgatcttttgcctctgcagcctcgtgggaatattacatctgcagagagccctggtgttgcgaaggaaacggaagcgcatgacagatcccacgcgccgcttctttaaggttacaccaccgcccggatcaggcccgcagaatcaatatggcaacgtgctttccttgccgacacccacttctggcctgggcagagcccaacggtgggccgcagggctgggtgggactgctccgagctacggtaatccatcaagcgacgtgcaggctgatggggctcttggaagtagatcccctcctggtgtgggtcccgaagaggaagagggtgagggatatgaggagcccgacagcgaggaggactccgagttttatgagaacgatagcaacttagggcaggatcagctgtctcaggatggctcaggctatgaaaaccccgaggacgaacccctcgggcctgaagacgaggattccttctcgaatgctgagtcatacgagaatgaggacgaagaattaacccaaccagtagctcggactatggatttcttgagtccccatggctccgcatgggatccctcaagagaggccaccagtctcgccggctctcagtcttacgaggatatgagagggattctctacgctgcccctcaattgcgctccattcgtggccagcctggtccaaatcatgaggaggacgctgactcctacgaaaatatggataaccccgacggtcccgaccccgcttggggtgggggcggtaggatgggcacatggagtacgaggtag

SEQ ID NO: 182057 - DNA, 984 bp, synthetic construct
  misc_feature 1..984: note = Description of Artificial Sequence: Synthetic coding sequence
  source 1..984: mol_type = other DNA
atgctgttcctgctgctgcccctgctggccgtgctgcccggcgacgggaacgccgacgggcttaaggaacccctgtcatttcacgttacctggattgcttctttctacaatcatagctggaagcagaacctcgtatcagggtggctgtctgacctgcagacacatacctgggactcaaattcttctacgattgtgtttttgtgtccttggagtagaggtaattttagtaacgaggagtggaaagaactcgagaccctgtttcgcattcggaccataagaagctttgaaggtatcagaagatatgcgcacgaactacagttcgagtacccattcgaaatccaggtgacaggtggctgtgagttacattccggaaaagtgtccggaagctttctgcagctggcataccagggctccgatttcgttagttttcaaaataattcttggctcccataccccgtcgccggcaacatggccaagcacttctgtaaggtgctgaaccagaatcagcatgagaatgatattacgcacaatctcctgagtgatacatgcccacggtttattctgggactcctcgacgccgggaaagcacatttgcagcgccaagtgaagccagaagcgtggttgtcgcacggtccgagcccagggcccggtcacctgcagctggtttgccacgtctcgggtttctatcccaaacccgtgtgggtcatgtggatgaggggcgaacaggaacaacagggcacccagaggggcgatatcctcccctccgcagatggcacgtggtatctgcgcgccaccctggaggtagcagcaggtgaggctgctgacctgtcatgccgagtcaaacactccagcctggaaggccaagacatcgtcctttactgggagcatcattcgagtgtgggtttcattattctcgctgtgattgtgcctctgctgttgctgatcggactggctctgtggttccgaaagaggtgtttttgctag

SEQ ID NO: 182058 - DNA, 1002 bp, synthetic construct
  misc_feature 1..1002: note = Description of Artificial Sequence: Synthetic coding sequence
  source 1..1002: mol_type = other DNA
atgctgctgctgcccttccagctgctggccgtgctgttccccggcggcaacagtgagcacgcgtttcaaggacctacctcttttcatgttatccaaacctctagctttactaacagtacctgggcccagacacagggctccggctggttagatgatcttcagatccacggctgggactccgattcagggacagccatctttcttaagccttggtctaagggcaatttttcagataaagaggttgcagaactggaggaaatcttcagagtgtacattttcggcttcgcacgtgaagtgcaggacttcgctggggacttccaaatgaagtatccgtttgaaattcagggaatcgccggatgcgaattgcatagcggaggagccatcgtgtccttcctgagaggagccttaggcggactggattttttatcggtgaagaacgcatcgtgcgtcccctcaccggaaggcggtagccgggcccagaaattctgtgccctcattatacagtaccaaggaataatggagaccgtaagaatactactgtacgagacctgtccacgctacttgctcggggtgctcaacgccggaaaggccgacctgcagagacaggtgaagcccgaagcttggctgtcatccggcccatctcctgggcctggaagattacagctcgtttgtcacgtatccggattctacccaaagcccgtgtgggtgatgtggatgcgtggcgagcaggagcaacaggggacccagctcggagacattctccctaacgcgaactggacctggtatcttagagcaacccttgacgtggctgatggagaggcagccggcttatcttgtcgtgtgaaacattcttcattggagggtcaggatattatcctttactggcggaaccctacaagcattggatctatcgtgctggccattatcgtgccctctcttctcttgctgctttgtctagccctctggtatatgcgccggcggtcttaccagaacatcccttag

SEQ ID NO: 182059 - DNA, 741 bp, synthetic construct
  misc_feature 1..741: note = Description of Artificial Sequence: Synthetic coding sequence
  source 1..741: mol_type = other DNA
tgaagcagcttcaccaacagcacctgggcccagacccagggcagcggctggctcgacgatttacagattcacggatgggattcagactctgggacggcaatcttcctcaaaccatggagtaagggcaatttctctgataaagaagtagccgaacttgaggagatctttcgggtttatatctttggttttgcacgggaagtccaggactttgccggagatttccagatgaagtatccttttgagatccagggaatcgcgggatgtgaattacactctggtggagcaattgtatctttcctacggggggctcttggcggcctggacttcttaagcgtcaagaacgcatcttgtgtcccgtctcctgagggagggtcacgcgcccagaaattctgtgctctgattatccagtaccagggtatcatggaaacagtgaggattctcctgtacgagacctgccctcgttatttattaggtgtgctgaacgctgggaaagcagaccttcagaggcaggtgaagcccgaagcatggctgtcttcaggtccctcccctggcccggggcgtctccagctggtgtgccacgtcagtggattttatcccaagcccgtgtgggtgatgtggatgcggggcaacccaaccagcattggaagcattgtgcttgcgataattgtgccatcgcttctgcttctactgtgcctggctctgtggtatatgaggcgcagatcctatcagaatatcccttag

SEQ ID NO: 182060 - DNA, 1041 bp, synthetic construct
  misc_feature 1..1041: note = Description of Artificial Sequence: Synthetic coding sequence
  source 1..1041: mol_type = other DNA
atgctgttcctgcagttcctgctgctggccctgctgctgcccggcggggacaatgcagacgccagtcaggaacacgtgtccttccatgtgatacaaatcttcagcttcgtcaaccagtcttgggcacgcggccaaggttccggctggcttgacgaacttcaaacgcacggatgggatagtgagtctggcaccattatttttctgcataactggagcaaagggaatttcagcaacgaggagctgtcagatctggagttgctgttcaggttttacttattcggacttactagagaaattcaagaccacgccagtcaggactactccaaataccccttcgaagttcaagttaaagctggatgcgaactgcactcaggcaagagccctgaaggctttttccaggtggccttcaatggcctcgatctgctgtcctttcagaacactacctgggtgccttcccctggttgcggctctctggcccagtctgtgtgccacttactgaatcatcagtacgagggggtgaccgaaactgtttacaatctgattcgctcgacgtgccccagatttctcctcggtttactcgacgccgggaagatgtacgtccaccgacaggttaggcccgaggcttggctgtccagccgccccagcctgggaagtggccagctgttacttgtgtgtcacgctagtggattttatcctaagcctgtctgggtcacttggatgcgaaacgagcaggagcagttgggcacaaaacacggcgatatcctccctaatgcagacggtacctggtatctgcaggtgatacttgaggtggcatctgaggaacccgcgggactctcatgtagagtgcgccactcctctctgggagggcaggacattattctatactgggcccacatcagaacttcttgtgaaactctccctcccgatagcccaattgtccttcgcacacagcagccacgttctttggtgcagtactctgatgctattccttcaacgctgcacctgaactgttttagtttttgtattatcaacatctgctag

SEQ ID NO: 182061 - DNA, 1002 bp, synthetic construct
  misc_feature 1..1002: note = Description of Artificial Sequence: Synthetic coding sequence
  source 1..1002: mol_type = other DNA
atgctgttcctgcagttcctgctgctggccctgctgctgcccggcggagacaacgcggacgcctcccaggaacatgtgagcttccacgttattcaaatattcagttttgttaaccagtcctgggctcgcggccagggaagtgggtggttggatgagctgcagactcatggctgggatagtgagtccggaacaattattttcctccataactggagcaaaggcaacttctcaaacgaggagctgtcagacctggaattgctcttcagattctacctgtttggccttacgcgggagattcaggatcacgcatcccaggattacagcaagtatcctttcgaagtccaggtgaaagccggttgtgaactgcacagcggtaagtcaccggaggggttcttccaagtggctttcaacgggttggaccttttaagcttccagaacacaacatgggtacccagccccgggtgtggtagcttggctcaatcggtttgtcaccttctcaaccatcaatatgaaggggtgaccgaaaccgtgtacaatctgatcagatcaacctgtccccgcttcctgttggggttgctggatgcagggaagatgtatgtgcacaggcaagtgcgcccagaggcatggttgtcctccaggccgagcctaggatccggacagctgctgttggtttgccacgcctccggtttttaccccaagcctgtatgggtgacctggatgaggaacgagcaagagcagctcggaaccaagcacggagatattctcccgaatgccgacggcacctggtacctgcaggttatcctcgaagttgccagcgaggagcctgcggggctcagctgcagagtacggcattcatcactgggaggacaggacattatcctatactggggtcaccatttttccatgaattggatagcactggttgtcatcgtacccttagtgattctcatcgttttagtactctggttcaagaaacattgttcctaccaggatattctttag

SEQ ID NO: 182062 - DNA, 846 bp, synthetic construct
  misc_feature 1..846: note = Description of Artificial Sequence: Synthetic coding sequence
  source 1..846: mol_type = other DNA
tgattcctgcacaactggagcaagggcaacttcagcaacgaggagctctccgatctggagctcttgtttagattttacctgtttggtctgaccagagagatccaggaccatgcgagccaggattactccaagtaccccttcgaggttcaggtgaaggccgggtgcgaacttcactccggaaaaagcccagaggggtttttccaggttgcttttaatgggctcgacctgctgagtttccagaacacaacctgggtgcccagtccaggctgcgggtcccttgcccagtcagtctgccatctgctaaatcaccagtatgagggagtgacagaaaccgtgtacaaccttatacgctcaacttgcccccgatttttgctgggccttctcgatgcaggtaaaatgtacgtgcaccggcaagtgcgcccggaggcctggctaagttctcgaccttctctgggcagcggtcaactactgcttgtgtgtcatgcatcgggattctacccaaagcctgtgtgggtcacctggatgagaaacgagcaggaacagcttggcaccaaacacggagacatcctgcctaacgccgacggtacctggtatctacaggtgatcctggaggtcgcaagtgaagagcctgcgggcctctcctgccgcgtcaggcactccagtctgggaggacaagacatcatcctgtactgggcccacattagaacttcatgtgaaacccttcccccggatagtcccatcgtgctgcgaactcagcaaccgcgtagcttggtgcaatacagcgatgcaataccctccaccctgcatctgaattgcttttcattttgcatcataaatatctgctag

SEQ ID NO: 182063 - DNA, 411 bp, synthetic construct
  misc_feature 1..411: note = Description of Artificial Sequence: Synthetic coding sequence
  source 1..411: mol_type = other DNA
atgtacgtgcaccggcaggtgcggcccgaggcctggctgagcagcagacctagcctggggagtggccagctcctgctggtgtgccacgcttcaggcttttaccctaagccagtctgggtgacgtggatgagaaatgagcaggaacagctaggaacgaagcacggcgacatcctgccaaacgctgacggcacatggtacttacaggtgattctggaagtggcatccgaggaaccagctggcttaagttgcagagtgagacactcctctctaggaggccaggatatcatattgtattggggccaccatttttcaatgaactggattgcccttgtggtaattgtgccattagtgattctgatcgtgctggtcctgtggtttaaaaaacattgtagctatcaggacatattgtag

SEQ ID NO: 182064 - DNA, 1008 bp, synthetic construct
  misc_feature 1..1008: note = Description of Artificial Sequence: Synthetic coding sequence
  source 1..1008: mol_type = other DNA
atgggctgcctgctgttcctgctgctgtgggccctgctgcaggcctggggatcagccgaggttccgcaacgcctctttcccctgagatgtctgcagattagcagctttgctaactcatcctggactagaactgacggcctcgcatggcttggagagctccagactcacagctggagtaacgacagcgatactgttaggtccctaaaaccctggtctcagggcacattctctgatcagcagtgggagacccttcagcatattttcagagtgtacaggtcttccttcaccagagacgtaaaagagtttgctaagatgcttaggctgtcctatccactggagctgcaggtctccgcaggttgcgaggtccaccctggaaatgcaagtaataatttctttcacgttgcgtttcaggggaaggacatcctatctttccagggtacaagttgggagcctacccaagaggccccgctttgggtaaatctggccatccaggtgctcaatcaggacaaatggacaagggagaccgttcagtggctgttaaatggtacctgtccacagtttgtgagtggtctgctcgaaagtggcaaatcagaattgaaaaagcaggtgaagcccaaagcctggctaagcagaggaccaagcccgggtccagggcgcctgctactcgtgtgtcacgtttctggattctacccaaaacctgtgtgggtcaagtggatgcgcggggagcaagagcagcagggcacccagcccggcgatatcctgccaaatgccgacgaaacctggtatcttagagccaccctagacgtggtcgcaggcgaggccgctggcctgtcatgcagagtcaaacattctagtctggagggacaggatatcgtgctgtactggggcgggagctacaccagcatgggactgatcgccctcgccgtgctggcctgcctactcttcctgctcatcgtgggatttacttcacggttcaagcgccagacgtcctaccaaggagtgctgtag

SEQ ID NO: 182065 - DNA, 435 bp, synthetic construct
  misc_feature 1..435: note = Description of Artificial Sequence: Synthetic coding sequence
  source 1..435: mol_type = other DNA
atgctgctgctgttcctgctgttcgagggcctgtgctgccccggcgagaacaccgcggtcaaaccagaggcatggctgtcctgtggcccatcaccaggtcctggcagactgcagttggtctgtcatgtgtcgggattctatccaaaacccgtttgggtcatgtggatgcggggagggtactccatcttccttattctcatctgtctgaccgttatcgtgacattagtgattttggtggttgtcgacagccgtctgaaaaagcagtcttccaataagaatatcctgagcccacatacaccaagtcctgtgttcttgatgggagcaaacacacaggacacgaagaactcccggcaccagttttgcctcgcgcaggtatcatggatcaaaaaccgggtactgaaaaagtggaagactcgcctgaatcagctgtggtag

SEQ ID NO: 182066 - DNA, 696 bp, synthetic construct
  misc_feature 1..696: note = Description of Artificial Sequence: Synthetic coding sequence
  source 1..696: mol_type = other DNA
atgctgctgctgttcctgctgttcgagggcctgtgctgccccggcgaaaacactgctgctccccaagctctgcaatcataccatctcgctgctgaggaacagctgagttttaggatgctgcagacgagtagctttgccaatcactcatgggcccactcagaagggagtggatggcttggcgacctacaaacccacggatgggacaccgtcctcggaaccataaggttcctgaagccttggtcccacggtaacttttctaagcaggaattaaaaaatctgcagagccttttccaactttactttcattcgttcatccagattgtccaagctagcgcaggccagttccaactcgaacttaagcctgaagcctggctctcttgtggaccaagtcccggccccggcaggcttcagctggtctgccacgtgtcaggcttttaccctaagcctgtttgggtgatgtggatgcggggtggttactctatcttcctgattctaatatgcttaactgtgattgtaaccctggtgatcttggtcgtggtcgatagtagactgaaaaaacagagcccggtatttttaatgggcgctaatacgcaagacaccaaaaatagccggcaccagttttgcctggcccaggttagctggatcaaaaacagagttctaaagaaatggaaaactcgcctcaaccagctatggtag

SEQ ID NO: 182067 - DNA, 861 bp, synthetic construct
  misc_feature 1..861: note = Description of Artificial Sequence: Synthetic coding sequence
  source 1..861: mol_type = other DNA
atgctgctgctgttcctgctgttcgagggcctgtgctgccccggcgaaaatacagcagcccctcaggccctacagtcttatcacttggctgccgaggagcagctgtcatttagaatgctgcagactagcagttttgccaatcatagttgggctcattctgaaggatcaggctggctcggagacctgcagacgcacggctgggatactgtcctcgggactattcggttcctcaagccttggtcacatggcaatttcagcaaacaggaactgaagaacctgcagagccttttccaactgtactttcatagcttcatccaaatcgtccaggcctccgctgggcagtttcaactcgagctgaaaccggaggcctggctttcatgcggaccgagccccggtcctgggcgactgcagctcgtgtgtcatgtgtctggattttaccccaagcccgtttgggtgatgtggatgagaggtgagcaggaacagagggggacccagcgtggcgacgtgctgcctaatgctgacgaaacctggtacctgagagccaccttggacgtcgccgcgggggaggccgccgggctctcatgtcgggtaaaacacagtagcctgggcggtcacgacttaattattcactggggcgggtactctatcttccttatcctaatctgtctgactgtgattgttacactcgtgatactggttgttgtggactctcggctcaaaaaacagagtcccgtgtttctcatgggtgctaatacccaggacaccaaaaatagtaggcatcagttctgccttgcgcaggtttcttggatcaaaaaccgggtcctgaagaaatggaagaccaggctgaaccaattgtggtag

SEQ ID NO: 182068 - DNA, 399 bp, synthetic construct
  misc_feature 1..399: note = Description of Artificial Sequence: Synthetic coding sequence
  source 1..399: mol_type = other DNA
atgctgctgctgttcctgctgttcgagggcctgtgctgccccggcgagaatactgctgtcaagccagaggcatggttgtcatgtggtccatcaccagggccaggcaggctgcaactggtttgtcacgtgtccggattttatccaaaacctgtgtgggtaatgtggatgcgaggagggtatagtatttttctgatcttaatttgcttgacggtgatagtcacactggtgatcctggtagtggtcgatagccgactcaagaaacagagtccggtatttctgatgggggcgaatacgcaggacaccaaaaactctagacaccagttttgtctggcacaggtatcatggattaagaacagggttctgaagaagtggaagactcgcctcaatcaactatggtag

SEQ ID NO: 182069 - DNA, 1131 bp, synthetic construct
  misc_feature 1..1131: note = Description of Artificial Sequence: Synthetic coding sequence
  source 1..1131: mol_type = other DNA
atgctgctgctgttcctgctgttcgagggcctgtgctgccccggcgaaaacaccgcggctcctcaggcactgcagtcttaccacctggcagccgaagagcagttgtcgttccggatgcttcagacatcttcattcgcgaatcactcatgggcccacagcgaaggctcaggctggcttggagatttgcagacccatgggtgggacaccgtgcttgggacgatcagattcctcaaaccatggagccacggaaacttttctaaacaggaactgaaaaacttgcagtccctgtttcagttatattttcacagcttcatacaaatagtgcaggcatccgctgggcagttccagcttgagtaccctttcgaaattcagatattggccggatgcaggatgaatgcccctcagattttcttgaacatggcctaccaggggagcgactttctttcctttcagggtatttcttgggaaccctcccccggagctggcatccgggcgcaaaatatctgtaaggtattgaaccgctacctggacatcaaggagatcctgcaaagtcttctgggccatacgtgcccaagatttctggctggtctgatggaagcaggcgaatctgagttgaaaaggaaggtgaagccagaggcttggctgagttgcggccctagtcccgggcccggaagattgcagttagtctgtcacgtctccggcttctacccaaaaccagtgtgggtgatgtggatgcggggagagcaggagcagaggggcacccagcgcggtgatgttttgcctaatgccgatgagacgtggtaccttagggccaccctggatgtcgcagctggggaggccgcaggcttatcatgtcgggtgaaacacagctcgctaggcgggcacgatttaatcatccattggggcggatacagcatatttctgattttaatctgtctgactgtgatcgtgacactggtcattctggtggtcgtggattcgcgcctgaagaagcagtccccggtgttcctgatgggggcgaacacacaggacacaaagaacagccgtcaccagttttgcctggcacaggtttcctggatcaaaaaccgagtattaaagaagtggaaaacaagattaaaccagttgtggtag

SEQ ID NO: 182070 - DNA, 873 bp, synthetic construct
  misc_feature 1..873: note = Description of Artificial Sequence: Synthetic coding sequence
  source 1..873: mol_type = other DNA
atgctgctgctgttcctgctgttcgagggcctgtgctgccccggcgagaacaccgccgctccccaggccctccagtcatatcatttggccgctgaggagcagctctcttttaggatgctgcagaccagttcttttgcgaatcattcatgggcccactctgaagggtcaggatggctgggagatcttcagacccacggctgggataccgtgctcgggaccatccgattccttaagccgtggtcccacggtaatttttcaaagcaagaactgaagaacctgcaaagtctgttccaattgtattttcactcattcattcaaatagtgcaggccagtgccgggcaatttcaactggagtacccttttgagattcagatcctggctggctgcaggatgaatgctcctcagatcttcctcaatatggcgtatcagggaagcgacttcctgtcgtttcagggaatttcctgggaaccctcgcctggcgccgggatacgggcccagaatatctgtaaggtcctgaacagatatctcgatattaaggagatacttcagtccctgctcggacacacttgccctcggtttcttgccggacttatggaggcaggggaatccgagttgaagcgaaaggtcaagcccgaggcctggttgagctgcggccccagccccggacccgggaggcttcagctggtttgtcacgtgtcggggttctaccctaagcctgtatgggtgatgtggatgaggggggaacaggagcagcggggcacccagcggggggacgtccttcccaatgccgacgaaacctggtggatttttcacctctcacatcctgatctattcgactgcgactcctatcctggccacattggctgttcatag

SEQ ID NO: 182071 - DNA, 183 bp, synthetic construct
  misc_feature 1..183: note = Description of Artificial Sequence: Synthetic coding sequence
  source 1..183: mol_type = other DNA
tgagtgagcggcttctaccccaagcccgtgtgggtgatgtggatgagaggggaacaggagcagcggggaacccagcgcggcgacgtactgcctaacgccgatgaaacctggtggatcttccaccttagtcatccagacttgttcgactgtgattcttacccggggcatataggatgctcctag

SEQ ID NO: 182072 - DNA, 966 bp, synthetic construct
  misc_feature 1..966: note = Description of Artificial Sequence: Synthetic coding sequence
  source 1..966: mol_type = other DNA
atgctgctgctgttcctgctgttcgagggcctgtgctgccccggcgaaaacaccgccgctcctcaggctctgcaaagctaccatctggcagcagaggagcagttaagctttcggatgcttcagacttcgagcttcgctaatcactcctgggcccacagtgaagggtccggatggttgggagatcttcagacgcacggatgggatacggtgttaggcacaattaggttcctgaaaccctggtctcacggaaacttcagtaaacaagagttaaaaaacctgcaaagcttgttccaattatacttccacagcttcatccagattgtacaagcaagcgctggacaattccagcttgagtatccgtttgagatccagatactggccggttgcaggatgaatgcccctcagatttttcttaacatggcttaccaagggtctgattttttgagtttccagggcatctcctgggagcccagccctggcgccggaatcagagcccagaacatatgtaaggtgctgaatcggtacctagatattaaggaaatactgcaatcccttctggggcatacttgcccaagatttcttgccggtctgatggaggccggggaaagcgagctgaagcgcaaggtgaaacctgaagcgtggttgtcctgcggcccttcacccggtcctgggagactccagctagtgtgtcacgtcagtgggttctacccgaaacccgtatgggtcatgtggatgcgaggcgggtactccatctttctgatcctcatctgcctgacagtgattgttaccctagtgatcctggtcgtcgttgattcacgactcaaaaaacagagcccagtttttttgatgggagccaacactcaggacacaaagaattctcggcaccagttctgtttggctcaggtttcttggatcaaaaacagagttctgaaaaaatggaagaccagacttaatcagctgtggtag

SEQ ID NO: 182073 - DNA, 306 bp, synthetic construct
  misc_feature 1..306: note = Description of Artificial Sequence: Synthetic coding sequence
  source 1..306: mol_type = other DNA
atgctgctgctgttcctgctgttcgagggcctgtgctgccccggcgaaaacacggccgttaagccagaagcatggttgtcttgcgggccatccccgggccctggacgactgcagttggtgtgtcatgtgtcaggattctaccctaaaccagtgtgggtgatgtggatgcgcggcgagcaggagcagagggggactcagcgaggagacgtgttgccaaacgccgacgaaacctggtggatatttcatttgtctcacccagatctcttcgattgcgactcataccccggtcatattggctgtagctag

SEQ ID NO: 182074 - DNA, 897 bp, synthetic construct
  misc_feature 1..897: note = Description of Artificial Sequence: Synthetic coding sequence
  source 1..897: mol_type = other DNA
atgctgctgctgttcctgctgttcgagggcctgtgctgccccggcgagaacactgcggctccacaggccctgcagagttaccatctggcagcggaggagcaattgtcttttaggatgctgcaaacgtctagctttgcaaaccactcgtgggctcattcggaagggtcaggatggctgggtgacctgcaaactcacggctgggataccgtcctgggaaccatccggtttctgaaaccttggagccatgggaatttctctaagcaggagctgaaaaaccttcagtccctctttcagctgtatttccactcctttatccagatcgtccaggctagcgccggacagtttcagttggaactaaaaccggaggcctggctgtcctgtggtcccagccctggccctgggcgtcttcaattggtctgccatgtgagcggcttctacccgaagccagtgtgggttatgtggatgcgaggagagcaggagcagagaggtacacaaagaggagacgtcttaccgaacgctgatgaaacctggtatctcagggccacgcttgatgttgctgctggcgaggctgctggactgtcttgccgcgtgaagcacagctctctcgggggccatgacttgataatccactggggagggtacagtatctttctgatcttaatatgtctcacagttatcgtcactctcgtcattctcgttgttgtcgacagccgcttaaagaaacagtcctcaaacaagaacattttatcaccgcacacacccagtcccgttttcttgatgggagcgaacactcaagacacaaaaaattcacgacatcagttttgtttggctcaagtgagctggataaagaacagagtactgaagaaatggaagactcggctgaaccagctgtggtag

SEQ ID NO: 182075 - DNA, 564 bp, synthetic construct
  misc_feature 1..564: note = Description of Artificial Sequence: Synthetic coding sequence
  source 1..564: mol_type = other DNA
atgctgctgctgttcctgctgttcgagggcctgtgctgccccggcgagaatactgcggtaaaaccagaggcatggttatcctgcggacccagccccggacccggaaggctgcaactcgtctgccacgtgagtggcttttaccccaagcctgtgtgggtgatgtggatgcgcggtgaacaggagcagagaggaacccagagaggcgacgtcctgcccaatgccgacgagacatggtacctgcgcgcaaccctggatgttgctgctggcgaggccgccgggctgtcatgtcgggtcaaacactcttcattaggaggtcacgacttgataatccattggggggggtactctattttccttattctaatctgtcttactgtaatagtgacgttggtgatcctcgtggtcgtggattctaggctgaagaagcaatctccagttttccttatgggcgccaatacccaggacacaaaaaacagcagacaccaattctgtctcgcacaggtcagctggattaagaaccgggtcctcaagaagtggaaaacccggctgaaccagctttggtag

SEQ ID NO: 182076 - DNA, 1167 bp, synthetic construct
  misc_feature 1..1167: note = Description of Artificial Sequence: Synthetic coding sequence
  source 1..1167: mol_type = other DNA
atgctgctgctgttcctgctgttcgagggcctgtgctgccccggcgaaaacaccgctgctccccaggccttgcaaagttaccacttagcagcagaggagcagttgagcttccgcatgctgcagacaagcagctttgccaaccactcgtgggctcattcggaaggaagcggatggctgggcgacctgcaaacacacggctgggataccgtcctgggcaccatccgcttcctgaaaccgtggtcgcacggtaatttttctaaacaggaactcaaaaatttacaaagtttgtttcagctgtatttccactcctttattcagatcgtccaggcatctgctggccagtttcagctcgagtacccttttgaaatacaaatccttgccgggtgccgaatgaatgccccccagatctttctgaacatggcgtaccagggatctgacttcctgtctttccaggggatatcatgggaaccctctccaggggcaggcataagggctcaaaacatctgcaaggtcctgaatagatacctggatatcaaggaaatcctgcagtccttgctgggccacacctgtcctcggttccttgccggattgatggaggcgggagaaagcgagctcaaacgcaaagtgaaacctgaggcgtggctaagctgtggcccttcaccaggtcccggccggttgcaacttgtttgtcacgtgagcggattttaccccaaaccagtttgggtcatgtggatgaggggggagcaggaacaacgcggtacccagaggggtgacgtgcttcctaatgctgacgaaacatggtacctgagagctaccctcgacgtggctgctggggaagctgcaggactgtcgtgcagggtcaagcattcttctctgggaggccacgatctgattatacactggggcgggtactctatctttctaattttgatctgtctgaccgtgatagtcacgctggtgatcctggtcgtggttgattctcgactcaagaagcagagcagtaacaagaacattctttctccgcacaccccctccccagttttcttgatgggcgccaacacacaggacacgaaaaattcccgacatcagttttgtctcgctcaagtatcttggattaaaaaccgtgtcctcaagaagtggaagactcgcttaaatcaactatggtag

SEQ ID NO: 182077 - DNA, 1023 bp, synthetic construct
  misc_feature 1..1023: note = Description of Artificial Sequence: Synthetic coding sequence
  source 1..1023: mol_type = other DNA
atgatcaagagccgggtgaagcggtaccggcggcggcggggcagccagagggcccctcaggccttgcagtcatatcacctggcagctgaggagcagctgtcctttagaatgctgcaaacttctagcttcgccaaccatagctgggcacactcggagggttctggctggctcggagacctccagacccacggctgggatacggtgctcggcacaatccggttcctgaaaccttggtcacatggcaatttttccaaacaagagctgaaaaacctgcagagcctgttccagctatattttcactcatttattcagattgtgcaagcttctgctggccagttccaactggagtacccgtttgaaattcaaatcctggcaggatgccggatgaacgcccctcagattttcctgaacatggcctatcagggctctgattttctcagtttccaaggcatttcctgggagccttcccccggtgctgggatccgtgcgcagaatatttgtaaagtcctcaaccgataccttgatattaaagaaatactgcagagcctgcttggtcacacatgccctagatttctcgctggactgatggaggcaggagaaagtgaattgaagaggaaggttaagcccgaagcatggttgtcatgtggaccaagtcccgggcctggtcggctgcagctggtttgccacgttagcggcttttaccccaagccggtctgggttatgtggatgcgaggagaacaagagcagaggggaacccaacgcggagacgtgttgccgaacgctgatgagacttggtacctcagagcaacattggatgtggccgccggagaagctgcagggctcagctgtcgtgtgaaacattcatcactgggcgggcatgatctgataatccactggggtgaaaagcagctgagactgtgttgggagattatgaagatagcactagggctcctgtcagtggggcttagaaaatgggttggcatgctcggaacaaggcgcgtaaagctcggccaatccaaatag

SEQ ID NO: 182078 - DNA, 870 bp, synthetic construct
  misc_feature 1..870: note = Description of Artificial Sequence: Synthetic coding sequence
  source 1..870: mol_type = other DNA
atgctgctgctgttcctgctgttcgagggcctgtgctgccccggcgagaataccgcagatcccttcgagattcagatcctggccgggtgcagaatgaatgcaccccagatctttctgaatatggcctatcagggctctgattttctcagctttcaggggatcagctgggaaccttcccccggagcaggcatccgcgcccaaaatatctgcaaagtgctcaaccgctacctggatattaaggagatcctccagagcctgctcggtcatacgtgccctcggttccttgcaggccttatggaagccggcgagagcgaactcaaacggaaggtgaaacccgaggcttggctgagctgcggtccttcacctggcccaggccggctgcagcttgtttgccatgtgagcggattctacccaaagccagtttgggtgatgtggatgaggggcgagcaggagcagcgaggtacacagcggggcgatgttctcccgaacgctgatgaaacatggtacctacgggcaactctcgacgtggctgccggcgaggctgccggactttcttgcagagtgaaacactcttctttgggcggtcacgacctgatcattcactggggcggatattccattttcctgatcctgatttgccttacagtgattgtgacccttgtcatactggtcgtagttgacagccgcctgaagaagcagagctccaacaaaaatattctgtccccccacacgccatctccagtattcttaatgggagcaaacactcaggatacgaagaactccaggcaccagttttgtctggcacaagtgtcttggattaaaaacagggttctcaaaaaatggaagacgaggcttaatcagctgtggtag

SEQ ID NO: 182079 - DNA, 600 bp, synthetic construct
  misc_feature 1..600: note = Description of Artificial Sequence: Synthetic coding sequence
  source 1..600: mol_type = other DNA
atgctgctgctgttcctgctgttcgagggcctgtgctgccccggcgagaatacggcagtcaagccagaggcatggctctcgtgtggtcctagccccggacccgggagactccagctggtatgccacgtgtcaggattctaccctaaacccgtatgggtcatgtggatgcgtggcgaacaggagcagcgcggtacccagcggggcgacgtcttgccgaatgccgatgaaacgtggtatctgcgggccacactggatgtggccgctggggaggctgctggtctcagttgccgtgtgaagcattcatccctcggcggccacgacctgataatccattggggaggctactcaatcttcttaattctcatttgtctgactgtcattgttacacttgtgattcttgttgtcgtggattccaggcttaagaaacaatccagtaataagaacatcctgtctccccatactccttcccccgtattcctcatgggagccaatacccaggatacgaagaacagcaggcaccaattctgcttagcgcaggtgtcctggattaagaatagagttctaaaaaagtggaagacccgccttaaccaactctggtag

SEQ ID NO: 182080 - DNA, 1047 bp, synthetic construct
  misc_feature 1..1047: note = Description of Artificial Sequence: Synthetic coding sequence
  source 1..1047: mol_type = other DNA
atgctgtgcccctggcggaccgccaacctgggcctgctgctgatcctcacaatttttctcgtggcagaagctgagggcgcagcacagcctaataattcactgatgttacagactagcaaagagaatcacgctctggcctcatcatctctgtgtatggacgagaaacaaataactcagaactatagcaaggtcctggctgaagtgaacacttcttggcccgttaagatggcaactaatgctgtgctttgctgcccccccatagccctgcggaacctcattataataacatgggagataatcctgcgtggtcagccatcctgtaccaaggcttataagaaggagaccaacgagactaaggagactaactgtaccgatgagcgaattacatgggtgtccagaccagatcagaactcggacttgcagatccgaactgtcgccattactcacgatgggtattacagatgcatcatggtcacccccgacggcaacttccatcggggctaccacttgcaagttctggttacccctgaggtgaccctcttccagaatagaaaccggactgctgtttgcaaggcagtggccggtaaacccgctgcacacatcagctggattcccgaaggcgactgtgccactaagcaagagtattggtctaatggtaccgtgaccgtgaaatctacctgtcattgggaagtgcataacgtttctaccgtgacttgccacgtctcccatcttaccggaaacaaaagcctttatatagagctcctacccgtgcctggggcgaaaaaaagtgccaaactgtacattccttacatcatactgaccataattatcctgactatcgtggggttcatttggctcctcaaagtcaacggttgcagaaaatataaattaaacaagacagagagcactcctgttgtggaagaggacgagatgcagccatacgctagttacacggagaagaataatccgctttacgacacgacaaataaggtgaaagcatctgaggcactccagtccgaagtcgataccgatctgcacacactatag

SEQ ID NO: 182081 - DNA, 567 bp, synthetic construct
  misc_feature 1..567: note = Description of Artificial Sequence: Synthetic coding sequence
  source 1..567: mol_type = other DNA
atgctgtgcccctggcggaccgccaacctgggcctgctgctgatccttacgatctttcttgtggcggaagccgaaggggcggcacagcccaacaactctttaatgttacagacctctaaagagaatcacgcgttagctagcagctccctgtgcatggacgagaagcagattactcagaattacagtaaggttttagcagaagtgaacacctcatggcccgtcaaaatggctaccaacgcagtcctttgctgccccccgattgcgctgcgcaacctgattataatcacttgggaaattatcttgcggggccagcccagctgtacaaaagcctataaaaaggaaacaaacgagacgaaggaaacaaattgcaccgacgagaggatcacttgggttagcaggcctgaccagaactccgacctgcagatccgtacggtggcaatcacgcacgatgggtactatcgctgtattatggtgacgcccgacgggaatttccaccggggataccatctccaagttctggggaaagagcaccacatcttgcgctattttacctccccagacctctag

SEQ ID NO: 182082 - DNA, 978 bp, synthetic construct
  misc_feature 1..978: note = Description of Artificial Sequence: Synthetic coding sequence
  source 1..978: mol_type = other DNA
atgctgtgcccctggcggaccgccaacctgggcctgctgctgatcctaaccattttcttagtggcagcttccagctctctttgtatggatgaaaagcaaattacccagaattactcaaaggtgcttgcagaagtcaacacaagctggccagtgaagatggctacgaatgccgttctctgctgcccccctattgccctccggaatctgatcataattacgtgggaaatcattctcagaggtcagccatcttgtaccaaggcatataaaaaagaaactaacgaaaccaaagaaaccaactgtactgatgagagaattacatgggttagccgaccggaccagaatagtgatctccagatcaggactgtcgctattacacatgatggctattatcgctgcattatggttacgcccgacggaaatttccacagggggtaccatctgcaggttctagtcacccctgaggtcacactttttcagaacaggaacagaacagccgtctgtaaagccgtagccggcaaaccagctgcccatataagctggattccagagggcgattgtgccaccaagcaggagtactggtctaatggcactgttacagtgaagtctacctgccattgggaagtgcataacgtgagtaccgtgacatgtcatgtctcacatcttacaggtaataaatcgctgtacattgagctgttacccgttccaggcgcaaaaaagagcgccaagctttatatcccatatatcatcttaaccattattatcctcacgatcgtaggattcatctggctgttgaaagtgaatggctgcagaaaatacaagctgaacaagactgaatctactccggtagtcgaggaagatgaaatgcagccctatgcctcttataccgagaaaaacaatccactctacgacactaccaataaagtgaaggccagcgaagccctccagtctgaagtggatactgaccttcatacattatag

SEQ ID NO: 182083 - DNA, 498 bp, synthetic construct
  misc_feature 1..498: note = Description of Artificial Sequence: Synthetic coding sequence
  source 1..498: mol_type = other DNA
atgctgtgcccctggcggaccgccaacctgggcctgctgctgatcctgactatatttctggtggccgccagctcaagcctttgcatggacgagaaacaaattactcagaattatagtaaggtgctggcagaggttaacacctcctggccggtgaagatggcgaccaatgccgtcctgtgttgccccccaatcgccttaaggaatctcataatcattacctgggaaatcatccttaggggccagccctcctgcacaaaggcttacaaaaaagagaccaatgaaacgaaagaaacgaactgcaccgacgaaaggattacttgggtttccagaccggatcagaattcggatcttcagatccgcaccgtagccattacacatgacgggtattacaggtgtatcatggtgacccctgatggcaactttcatcgcggatatcatttgcaagtgctggggaaagagcaccatattctgaggtattttactagccctgacctctag

SEQ ID NO: 182084 - DNA, 987 bp, synthetic construct
  misc_feature 1..987: note = Description of Artificial Sequence: Synthetic coding sequence
  source 1..987: mol_type = other DNA
atgaccgtggagaaggaggcccccgacgcccacttcaccgtggacaagcagaatatctcactgtggccacgtgaacccccccccaagtctgggccaagtttggtcccgggaaagacacccacagttcgtgcagccctgatctgtctcactctcgtattagtagctagcgttctgttgcaagccgttttgtatcctaggtttatgggtactataagtgatgttaagaccaatgttcaacttctgaagggcagggtagataacatctcgaccttggattctgaaatcaagaagaactcggatgggatggaggctgccggggtccagatccagatggttaacgagtccctgggctacgtacgatctcaatttctgaagctcaagacctccgtggagaaggccaatgcacagatacagatcttgactaggtcatgggaggaagtgagtaccctcaatgcccagatccccgagctgaaaagcgacctggagaaagcttccgcactgaatactaagatcagggctttacaggggtccctggagaatatgagcaagctcctgaagaggcaaaacgacatcctgcaagtggtttctcaggggtggaaatattttaaaggaaatttttattatttttcgttgatccccaaaacctggtatagcgcagagcaattttgcgtgtccaggaactctcatctcacatccgtcaccagtgagagcgagcaggagttcctgtacaaaactgccggaggcttgatctactggatcggcttgacgaaggctggaatggaaggagactggagttgggttgatgatacaccattcaataaggttcagtctgttcgtttttggatccccggggaacccaataatgctggtaacaacgagcactgtggaaacatcaaggcacctagcctgcaggcctggaacgacgctccgtgcgacaagactttccttttcatttgtaaaagaccctatgtcccgtccgaaccttag

SEQ ID NO: 182085 - DNA, 4497 bp, synthetic construct
  misc_feature 1..4497: note = Description of Artificial Sequence: Synthetic coding sequence
  source 1..4497: mol_type = other DNA
atggacggcgccagcgccgagcaggacggcctgcaggaggaccggtcccattcgggacctagttccctgcccgaagctcccttgaaacctccgggaccgcttgtccccccagatcagcaggataaagtacaatgcgccgaagttaatcgggcctccacagagggcgagtcccccgacggcccgggccagggaggcctttgccaaaatggacctacccctcctttccccgaccctccatcatccttggatcccaccacatctcctgtagggcccgacgcgagcccaggcgttgccggcttccacgataacttgcggaaatcacaaggtacttcggccgagggttcagtccgcaaggaggcactgcagtctcttagactaagtctgccaatgcaggagacacagctctgtagcaccgactctccactgcctctagaaaaggaagaacaggtgagactgcaagctagaaagtggctagaggaacagttgaagcagtatcgagtgaagaggcagcaagagcgatcctcacagcctgcaacgaaaacccggcttttctctacgcttgacccagagctgatgttgaaccccgagaaccttcctcgcgccagtactcttgcaatgaccaaggagtatagtttcctgcgcacatcagttcctagggggcccaaggtcggtagcctcggtcttcctgctcatccccgcgaaaagaagacgtccaaaagctcaaagatcaggagcctcgccgactacagaacagaggacagcaatgcaggcaactcaggcggtaatgtgcccgctcctgacagcaccaagggatcgttgaagcaaaatagatctagtgccgctagtgtggtaagtgagatttcactcagtccggacacggacgaccgcctggaaaacacatctctggcaggtgactccgtgtcagaagttgatgggaatgatagtgactcttcctcatactcctccgcctccacgcgaggaacgtacgggatcctctcaaaaaccgtggggacacaggataccccgtacatggtcaatgggcaggaaattccagcagatactttaggccagtttccctctataaaagatgtgctgcaagcggccgccgcggagcaccaggatcagggtcaggaggttaacggagaagtgagaagccgaagggacagcatctgcagtagcgtctcactggagtcttctgccgccgaaacccaggaggagatgctacaggtgctgaaggaaaagatgcggcttgaaggccagcttgaagccttgtctctcgaagcatctcaggcgttaaaggaaaaagccgagctacaggcccagctcgctgccctgtctacgaagctgcaggcccaggtcgaatgctcacatagctcccaacagcgccaagattccttatcaagtgaggttgacaccctcaagcagtcttgctgggaccttgagagagcaatgaccgatctgcaaaatatgttagaggctaaaaatgcaagcttagcctcctccaacaacgatcttcaagtggccgaagaacagtaccagcgcctgatggcaaaggtggaagatatgcaaagatccatgttgagtaaggataacacagtgcatgacctccgccagcagatgacggcattacagagccaattacaacaggtacagttggaaaggactactctaacgagcaagctaaaggcttcacaggcggaaatcagtagcctacagtctgtgcgccaatggtaccagcaacagctcgccctagcgcaggaagcaagggtgaggctgcagggggagatggcgcacatccaggtgggccagatgactcaggccggcctacttgaacacctcaaactggaaaacgtgagccttagtcagcagcttaccgagactcagcacaggtctatgaaggaaaaaggaagaatcgctgcccagcttcaaggcatagaagccgacatgcttgaccaagaggccgcgtttatgcagatccaggaggccaagaccatggtggaagaggacctgcagcgccgattggaggagtttgagggtgagcgagagcgactacagcgaatggctgatagcgctgcaagtctagagcagcagctggaacaagtgaaacttactctactgcagagagatcaacaactagaagcgcttcagcaagagcaccttgatcttatgaaacagctcacactcacacaagaggccctccaatctagggagcagagtctggacgctctccaaacacattacgatgaactgcaggccaggctcggcgaactgcagggtgaagcggctagtcgcgaggatacaatctgcctgcttcagaacgaaaaaattattctagaggcggcgctacaagctgccaagagtgggaaggaggagctggacaggggcgccaggcggctggaagaaggaaccgaagaaacatctgagaccctcgaaaaactccgggaggagctggccattaaatctggccaggtggaacacctgcagcaggagaccgccgccctcaagaagcagatgcagaagatcaaagaacagttcctgcagcagaaggtcatggtcgaggcttatagaagggacgccacttcgaaagatcaactgatcagcgaactgaaagccactcgcaaaagactggattctgaactgaaagagctccgacaagaattgatgcaagtacacggtgagaagcgtacggccgaagctgagctttcacgcctgcacagggaggtggctcaggtgcgccagcacatggctgatttagagggtcatttgcaatcagcccagaaggagagagatgagatggaaacccacctgcagagtctgcagtttgacaaggaacagatggttgcagtaaccgaggcaaacgaggctctcaaaaagcaaatcgaggagctgcaacaagaggctcgcaaggctatcaccgagcagaaacaaaagatgagaagactggggagcgatctgacatctgcgcagaaagagatgaaaactaaacacaaagcttacgagaatgcagtcggcatcctctcaagacgcctccaagaggcgcttgcagccaaagaggccgcagatgcagagttgggacagctccgggcccaggggggttctagtgactcctcacttgctctgcatgagcgcatccaggctctggaggctgaactccaagccgtgtcacattcgaaaactttgttggagaaggagctccaggaggttatagccctgacttcccaggagctcgaggagagccgagagaaggtactcgagctagaggacgaattacaggagtcaaggggttttcgcaaaaaaatcaagcggctcgaggagtccaacaagaaacttgcacttgagctggaacatgaaaaggggaagctcacaggactgggtcagtccaacgctgctctccgtgaacacaatagtatactggaaacagcattagccaaacgcgaggccgatttggttcaactgaatttgcaggttcaggccgtgttgcagcggaaagaagaggaagatagacaaatgaaacacctggtacaagccctccaagcctcactggagaaggaaaaggaaaaggtgaattctttgaaagagcaagtcgctgcagccaaagtggaggcaggccacaatcggcgccactttaaggctgcctccctggagctttctgaagtaaaaaaggaactccaggcaaaggagcacctcgttcagaaactccaggccgaggccgacgatctgcagattagagaaggtaagcacagccaggagattgcacagttccaagccgagctggctgaagcgcgcgctcaacttcagctgcttcagaaacagctggatgagcagctgtctaaacaaccggtcgggaatcaagaaatggagaatctgaagtgggaggtggatcagaaagagagagagatacaaagtctaaagcagcaacttgaccttactgaacagcaaggccgcaaagagttggagggtctgcagcaactcctccagaacgtcaaatccgaattagagatggctcaggaggacctcagcatgacccaaaaagacaagttcatgttgcaggccaaggttagtgagctgaagaacaacatgaaaacactgctacagcaaaaccagcagttgaagctagatcttaggagaggagccgctaaaacaaggaaagagcctaaaggcgaggccagttcatctaatcccgcgacccccattaaaatccctgactgcccagtgccagcctcgctcctcgaggagctgttacggcctcctccagctgtgtccaaggaacccctgaaaaatctcaatagctgtctgcagcagctcaagcaggagatggactccctccagagacagatggaagagcacgctctcaccgtgcacgagagccttagctcatggacacccctcgagcccgctaccgcgagtcccgtcccaccaggtggtcacgctggccccaggggggatccccagaggcactcccagagcagggccagtaaagaaggccctggcgaatag

SEQ ID NO: 182086 - DNA, 807 bp, synthetic construct
  misc_feature 1..807: note = Description of Artificial Sequence: Synthetic coding sequence
  source 1..807: mol_type = other DNA
atgagcgacagcaaggagccccggctgcagcagctgggcctgctggtgtcaaaggtgccctcatcaatttcacaggaacagtcacgccaagacgctatttatcagaacttgacacaattaaaagcggccgtcggggaactctccgagaaatccaagctgcaggaaatctatcaagagttgacccagctcaaggccgctgtgggcgaattgccagaaaagtcaaaacttcaggagatttaccaggaactgacacgtttgaaggccgcagtgggagagttaccagaaaagtctaaacaacaggaaatataccaagagttgactcagctgaaagctgccgtggaaagactttgtcatccgtgtccttgggagtggacttttttccagggcaactgctatttcatgagcaactcccagcggaactggcatgatagcatcactgcctgcaaggaggttggagcccagctagtggtgattaagtctgccgaggagcagaactttttacagcttcagtcctctcgttctaatcgctttacctggatgggactgtccgatttaaaccaggaagggacttggcaatgggtcgacgggagcccactgctcccaagtttcaaacagtactggaaccgaggcgagcctaataatgtcggtgaggaagactgtgccgagttttccggcaatggatggaatgatgacaaatgcaaccttgccaagttctggatatgcaagaagagcgcagcatcatgctcccgcgacgaggagcagtttctttcccctgcccccgctaccccgaacccaccgcctgcatag

SEQ ID NO: 182087 - DNA, 1143 bp, synthetic construct
  misc_feature 1..1143: note = Description of Artificial Sequence: Synthetic coding sequence
  source 1..1143: mol_type = other DNA
atgagcgacagcaaggagccccggctgcagcagctgggcctgctggaggaagaacagcttagagggttaggatttagacaaacacgcgggtacaaaagcctggcggtttcgaaagtgccttcctccatctcccaggagcaatcgaggcaggatgcaatctatcagaacttgacgcagctgaaagccgccgtgggggagctctcagaaaaatccaagcttcaggagatctatcaggaacttactcagctgaaggcagctgtcggcgagctgcccgagaagtccaaacttcaggagatataccaggaactcacgcgcctcaaagccgccgtcggcgaattacccgaaaagagcaaactgcaggaaatataccaggagttgacatggctcaaggctgcagttggggagcttcccgaaaaatccaaaatgcaagagatctaccaggaattgacgcggcttaaagcagccgtcggtgaactgcctgagaaatctaagcaacaggaaatttaccaagaactgacgaggcttaaggctgcagtgggcgaactacccgaaaaaagtaaacagcaagagatttaccaggaactgacgaggctgaaagctgcagtgggcgagctgcccgagaagagcaagcagcaagagatttaccaggagctaacccagctgaaggccgctgtggagcgactttgccatccgtgcccttgggaatggacctttttccagggaaattgttactttatgtctaatagccagagaaattggcacgattcgataacagcctgtaaagaagtcggtgcgcaacttgtcgtcattaagtctgctgaagagcagaacttcctgcagctgcagagctctaggagtaataggttcacctggatggggctcagcgatttgaatcaagaaggcacatggcaatgggtcgatggcagccccctgctgccaagctttaaacagtactggaatcggggggaaccaaacaacgtcggggaggaggattgcgcggaattctctggcaatggttggaatgatgacaagtgcaacctcgctaagttttggatctgcaagaagtctgcagcaagctgctctagagatgaagaacaatttctgtcgccagccccagccacccccaatccgcctcccgcatag

SEQ ID NO: 182088 - DNA, 1215 bp, synthetic construct
  misc_feature 1..1215: note = Description of Artificial Sequence: Synthetic coding sequence
  source 1..1215: mol_type = other DNA
atgagcgacagcaaggagccccggctgcagcagctgggcctgctggaggaagaacaactcagaggactggggtttcgccagacaaggggatacaagtctctcgctggctgtttggggcatggaccattagtgcttcagttactgtccttcactctcctcgcaggcttgctggtccaggttagtaaggtgccttcaagtattagccaagagcaaagccgccaggacgccatttaccagaatctgacccagttgaaggcagctgtgggagagctatctgagaagtccaagctgcaggaaatctatcaggagttgacccagctcaaggctgcagttggggaactcccggagaagagtaaactgcaagagatatatcaggaattgacccgcctcaaagcagccgtgggcgaattacctgagaaatcaaagcttcaagagatttatcaagaacttacttggctcaaagccgccgttggggagctaccagagaagtcaaaaatgcaagaaatataccaggaactgacgagactaaaggctgcagttggagagctgcctgaaaaaagcaagcagcaggagatatatcaagagctgacacgcctgaaagccgccgttggagagctcccagaaaaatccaagcagcaggagatctaccaggagctcacacgcctgaaagccgcagtaggagagttgcccgagaaatcaaagcaacaagagatctaccaggaattaacgcagctgaaggcagccgttgaacgactgtgccatccgtgtccctgggagtggactttctttcaggggaactgttacttcatgtccaactcgcagcgcaattggcacgatagcattacagcctgtaaggaggtaggtgcacagctggtggtgattaagtcagccgaagaacaaaatttcctacagctccagtctagccgcagcaaccgatttacatggatgggcctgtccgacctcaatcaggaagggacttggcagtgggtggatggctctcccctcttaccctcttttaagcaatactggaataggggggagccgaataacgtgggagaggaggattgcgctgagttttccgggaacggctggaatgatgacaagtgtaatctggcaaaattttggatttgcaagaaaagcgccgcctcatgctctcgcgacgaagagcagttcctcagcccagcaccggcaaccccaaacccccccccagcatag

SEQ ID NO: 182089 - DNA, 1197 bp, synthetic construct
  misc_feature 1..1197: note = Description of Artificial Sequence: Synthetic coding sequence
  source 1..1197: mol_type = other DNA
atgagcgacagcaaggagccccggctgcagcagctgggcctgctggaagaggaacagctcagaggcttggggtttcggcaaacgcgtggatacaaaagcctggcggggtgtctgggacatggccccctggttctgcaactgctgagctttacactccttgcaggactccttgttcaggtcagcaaggtcccaagctccatttcccaggaacagagcagacaggatgcaatatatcagaatcttacacagttgaaggcagctgtaggtgagttgagtgagaagagcaagctgcaggaaatttatcaggagctaactcagttgaaggcagccgtaggtgaactccctgaaaaatcgaagctgcaagagatctaccaggaactgacccggcttaaggctgccgtgggcgaattgcccgagaaatctaagctgcaggaaatttatcaagagctcacatggctcaaagccgctgtgggagaactcccagaaaagagcaagatgcaagagatataccaggagctcacacggttgaaggcagccgttggagagcttcctgagaagtccaagcaacaggaaatctaccaagagcttaccaggcttaaggccgccgtgggcgaactccccgagaaatccaaacagcaggaaatctaccaggaacttaccaggctgaaagccgctgttggagagcttccggaaaagagcaaacagcaggagatttaccaggaacttacccagctaaaggctgctgttgaaaggttatgtcacccatgtccttgggagtggacatttttccaggggaactgttattttatgtctaactcacaaaggaattggcacgactcgattacagcatgcaaagaagtcggggcccaattggtagtgattaaatccgccgaggagcagtcctccaggtctaatcggttcacctggatgggacttagcgacctgaaccaggagggcacatggcaatgggtggatggatcaccattactgccaagttttaagcagtattggaataggggtgaacccaacaacgtgggggaggaagattgcgccgagttttctggtaatggctggaatgacgataaatgcaatttagccaagttttggatctgcaaaaaaagcgctgcatcttgctctcgagatgaagaacagttcctctccccagcaccggccactcccaatcctccccccgcttag

SEQ ID NO: 182090 - DNA, 507 bp, synthetic construct
  misc_feature 1..507: note = Description of Artificial Sequence: Synthetic coding sequence
  source 1..507: mol_type = other DNA
atgagcgacagcaaggagccccggctgcagcagctgggcctgctggaagaggaacaactgagggggcttggctttaggcagacacgcggctataagagtctagcagggtgcctgggtcacggacccctggttctgcaactgctgtcatttaccctcctggccggactgctggtgcaggtctcaaaggttcctagctcgattagccaggagcaatcacgtagcaataggtttacttggatgggactaagcgatctcaatcaggagggcacttggcagtgggtcgacggttcccccttgctgccttcattcaaacagtactggaaccggggcgaaccaaacaacgtcggggaagaggactgcgccgaatttagcggtaatgggtggaatgacgacaagtgtaaccttgctaaattttggatctgcaagaagtcagccgcgtcatgctcgcgagatgaggagcagtttctaagcccagcccctgccacccccaacccacctcccgcctag

SEQ ID NO: 182091 - DNA, 939 bp, synthetic construct
  misc_feature 1..939: note = Description of Artificial Sequence: Synthetic coding sequence
  source 1..939: mol_type = other DNA
atgagcgacagcaaggagccccggctgcagcagctgggcctgctggaggaagaacagcttaggggcctgggttttagacagacaaggggatataaatccctggcaggatgcctcggtcacggacctttagtgctccagctcctcagcttcacgcttctagccggtctcctagtgcaggtttccaaggttccttcatctatcagccaggagcaaagccgacaagacgccatctatcagaatctgacccagcttaaggcggccgtgggcgagctaagcgaaaaatccaagctgcaggaaatttaccaggagttgacccagctgaaggcagctgtgggagagcttccagagaagtcgaaactgcaagaaatatatcaggaactgacccgcttgaaagctgccgttggagagcttcctgagaaaagcaaactccaggagatatatcaggaattgacatggctcaaggctgccgtcgaacggctgtgccatccctgcccatgggagtggacctttttccagggcaattgttattttatgtcgaactcacaaaggaattggcacgatagcattacagcctgcaaggaggtgggtgcacagctggtagtaatcaaaagcgccgaggagcagaatttcctacagctccagagctcccgctcgaaccgcttcacttggatgggcctgagcgaccttaatcaagaaggcacctggcagtgggtggatggaagtcctctcctaccaagctttaaacaatattggaatcgtggcgagcccaataatgtgggcgaggaggattgtgctgagttctcaggcaacggctggaacgacgacaagtgcaacttggccaaattctggatatgcaaaaaatctgcagccagctgttcccgagatgaagagcagtttctatctcccgctccagcaacccctaaccctcccccagcctag

SEQ ID NO: 182092 - DNA, 105 bp, synthetic construct
  misc_feature 1..105: note = Description of Artificial Sequence: Synthetic coding sequence
  source 1..105: mol_type = other DNA
atgagcgacagcaaggagccccggctgcagcagctgggcctgctggaagaggagcagctgcgaggactcgggtttaggcagacccgccgtaatcagaaatgctag

SEQ ID NO: 182093 - DNA, 855 bp, synthetic construct
  misc_feature 1..855: note = Description of Artificial Sequence: Synthetic coding sequence
  source 1..855: mol_type = other DNA
atgagcgacagcaaggagccccggctgcagcagctgggcctgctgggatgtctggggcacggcccgttggtccttcagctgctgtcctttactcttctggcaggcctgctggtgcaagtcctcggaccagtttcgaaagtgcccagctctatatcacaggagcagtcccgtcaggatgctatctaccagaaccttacgcagcttaaggccgccgtaggggagctgagcgagaaatcgaagttgcaggaaatttatcaggagctcacccaactaaaggcggccgtcggagagctccccgaaaaaagtaaacttcaagagatttaccaagagctcacccggctgaaggctgccgtcggcgagcttcccgaaaagagtaaactgcaagagatctatcaagaactcacctggctgaaggccgcggtcggcgagctgcccgagaagagtaaaatgcaagagatctatcaggagctcacccgcctgaaggccgccgtaggtgagctgccagagaagtccaaacaacaggagatttaccaggagctgacaaggctgaaagctgctgttggagaactgcctgaaaagtccaagcagcaggagatttaccaggagttgacgaggctcaaggctgcggtgggagagctccccgagaagtctaaacagcaggagatctaccaggaattaactcagttgaaagctgctgtggagcgtctctgtcatccttgtccatgggagtggacgttttttcaggggaattgctacttcatgagtaacagccaacgcaactggcatgattctatcaccgcttgcaaggaggtgggggctcagttagttgtcatcaagtctgcagaagagcaatag

SEQ ID NO: 182094 - DNA, 939 bp, synthetic construct
  misc_feature 1..939: note = Description of Artificial Sequence: Synthetic coding sequence
  source 1..939: mol_type = other DNA
atgagcgacagcaaggagccccggctgcagcagctgggcctgctggaagaggagcagttgagagggttgggcttcaggcaaacccggggatataaatctctcgctggctgcctaggacacgggccactggtcctgcagctgctcagtttcacacttttagctggcctgctggtgcaggtcagcaaagtgccctcaagtatctcccaggaacagtctcgccaggacgctatatatcagaaccttacacagctaaaggcggccgtgggggaattatccgaaaaatccaagctccaggaaatctaccaggagctgacccagcttaaggcagccgtgggcgagctccctgagaaatccaagctgcaggagatataccaggagctaacccggctgaaagccgccgtcggggagcttcccgagaagtcgaagctacaagaaatataccaggagctgacctggttaaaagctgccgtggagagactgtgccacccctgtccatgggaatggaccttttttcagggaaattgctattttatgagcaattcacagcggaactggcacgactccatcaccgcatgcaaagaagtcggcgcccaactggtggtaatcaagtctgcagaagagcagaattttctgcagctccagtcttctcgcagcaaccgcttcacttggatggggctgagtgatttaaaccaggaaggtacttggcaatgggttgatggatccccactgttgccttctttcaagcagtactggaaccggggcgaacctaataacgtgggtgaggaagattgcgctgagttctcagggaacggctggaacgacgataagtgcaatctcgccaagttctggatctgcaagaagtccgccgcttcgtgctctagagacgaggaacagtttctatctcctgccccagcgacaccaaacccaccacctgcttag

SEQ ID NO: 182095 - DNA, 1011 bp, synthetic construct
  misc_feature 1..1011: note = Description of Artificial Sequence: Synthetic coding sequence
  source 1..1011: mol_type = other DNA
atggactaccccaccctgctgctggccctgctgcacgtgtaccgggcactgtgcgaagaggtgctctggcacacatctgtccctttcgcagaaaacatgtctcttgagtgtgtgtatcctagcatgggaatactcacgcaagtcgagtggttcaagatcggcacccagcaggactcgatagccatcttcagccccacccacggtatggtgattcggaaaccgtatgccgagagggtatatttccttaactccaccatggccagcaacaacatgaccctgtttttcaggaatgcttcggaagacgatgttgggtattacagttgcagcctgtacacatacccacagggcacttggcagaaggttatacaggtcgtccagagcgattcgtttgaagctgccgtgccaagtaattcccatatagtttccgaacccggcaagaacgttacactgacgtgccagccacaaatgacctggcccgttcaggcagtgaggtgggagaagatccagccgagacagatagacttgctgacatattgcaacctggtgcacgggcgaaacttcacctcgaagtttccaagacagatcgtcagcaactgctctcacgggcggtggtccgtgatcgtgatccccgatgtgaccgtgtcagacagtggtctctacaggtgctacctgcaggccagcgccggcgagaatgagacattcgtgatgcgactgaccgtcgcagagggcaagaccgacaatcagtataccctcttcgtcgccggaggaaccgtccttctcctgctctttgtcatctcaattactaccataattgtgatatttctcaacaggcggaggcggagggagagacgagacctctttacagaaagctgggatacgcaaaaggcacctaataactaccgaagtccaatatccacaagtcagcctacaaatcaatccatggatgatacaagggaggacatttacgttaattatccaacattttctagaagacccaagacacgcgtttag

SEQ ID NO: 182096 - DNA, 822 bp, synthetic construct
  misc_feature 1..822: note = Description of Artificial Sequence: Synthetic coding sequence
  source 1..822: mol_type = other DNA
atgctgggccaggtggtgaccctgatcctgctgctgctgctgaaggtgtatcaaggtaagggatgccagggatccgcggatcacgttgtgtccatctcgggcgttcccctccagttgcagccgaactcaatccagaccaaggttgactccatcgcttggaaaaagctgctgccatctcaaaatggtttccaccacatcctgaaatgggaaaacggatcgctgccctctaacacttccaatgaccgcttcagcttcattgtgaaaaatctctctctgctgatcaaggccgcgcagcaacaggattctggattgtattgcctagaagtcacatcgattagtggaaaagtacaaaccgccacttttcaggtattcgtgttcgagtttcgtttttggccctttctcgtgatcatagtcatcctctcagccttatttctcggcactctcgcctgcttctgcgtctggcggagaaagcgcaaagaaaaacaatccgagacctcgcccaaggagttcctgaccatttacgaagacgtcaaagacctcaaaactaggaggaatcacgagcaggagcagactttcccaggagggggatcgacaatatatagtatgattcaaagtcagagctccgctcccacctctcaagaacctgcttatacattatacagccttatccagccctccagaaagtccggttcccgaaagcgcaaccacagtccttctttcaattctacaatttatgaggtgatagggaagtcccagcctaaggctcagaatcccgccagactctcccgaaaagaattggagaatttcgacgtgtactcttag

SEQ ID NO: 182097 - DNA, 990 bp, synthetic construct
  misc_feature 1..990: note = Description of Artificial Sequence: Synthetic coding sequence
  source 1..990: mol_type = other DNA
atgctgggccaggtggtgaccctgatcctgctgctgctgctgaaggtttaccaagggaagggatgccagggcagcgccgatcatgtggtttccatcagcggagtgccattacaactccagcccaacagtattcaaacaaaggttgattccattgcgtggaaaaagctactgccctcacaaaacggatttcatcatattctcaagtgggagaatgggagcctgccctccaatacatctaacgacagattctcttttatcgtgaagaacctatccctgttgataaaggcggcccaacagcaggattctggactgtattgtttggaggtaaccagcatttcgggaaaggtgcagaccgcgacgtttcaagtgttcgtgtttgataaagtcgaaaaacccagattgcaaggacaggggaagattctggataggggcaggtgccaggtcgccctgagctgtcttgtgtcaagggacggcaacgtgtcgtacgcttggtacaggggcagcaaactcatccaaactgcgggaaaccttacctacctggatgaggaggttgatattaacggcacacacacgtacacttgtaacgtctcgaatcccgtgagctgggagagccatactctcaatctcacccaggactgccaaaatgctcatcaggagttcaggttctggccattcctggtgatcattgtgatccttagtgccctatttctcggcacattggcgtgtttttgtgtgtggcggaggaaacggaaggagaaacagtctgaaacatcacccaaagagttcctgactatctatgaggacgtgaaggacctcaaaactagaaggaaccatgagcaagagcagacttttcctggaggaggatctactatttattccatgatccagtctcaatcatccgccccgactagccaggagcctgcctacaccctgtattcgctgattcagccttctcgcaaaggtgataggttttacagtttctccggatag

SEQ ID NO: 182098 - DNA, 1113 bp, synthetic construct
  misc_feature 1..1113: note = Description of Artificial Sequence: Synthetic coding sequence
  source 1..1113: mol_type = other DNA
atgctgggccaggtggtgaccctgatcctgctgctgctgctgaaggtgtatcaaggaaagggttgtcagggatccgcggatcacgtggtaagtatcagtggtgtgcccttacagctgcagcctaactcaattcagacaaaagtcgattcgattgcatggaaaaagctcttgccaagccagaatggttttcaccacatactgaagtgggagaacggaagtctgccatctaacacctcaaacgacagattcagtttcattgttaaaaaccttagcttgctcattaaagcagctcagcaacaggattccggtctgtactgcctagaggtgacctccatcagcgggaaggtccagacagccacattccaggtttttgtgtttgaatcccttctgcccgacaaggtggaaaagccccgactccaaggccagggcaaaatactggaccgagggcgttgccaggttgccctgtcatgtcttgtgagcagagacggcaatgtgagctacgcctggtatagaggctctaagttgatccagactgccggaaacttgacctatttggacgaggaagtagatattaatgggacacatacctacacgtgcaatgtgagcaaccccgtcagttgggagagtcacaccctgaacttgacacaggactgtcagaacgcccaccaggagtttagattctggccttttctcgtgatcatcgtgatactgtctgcattattcctaggcactctcgcctgtttttgtgtatggcgacgaaaacgaaaggagaaacagtcagagacatcaccaaaagagttcttgactatctatgaggacgtgaaggacctcaagacccggcgcaatcatgagcaagagcagacttttcccgggggaggaagtactatttacagcatgatacagagtcaaagttccgccccaacctcccaggagccggcatacacattgtactcactcattcagccaagtcgcaagtccggatcccgcaagcggaatcacagcccgtctttcaacagcaccatatatgaagtaatcggcaaatcccagccaaaagcacagaatccagcccggctgagccggaaagagctggagaacttcgatgtgtactcctag

SEQ ID NO: 182099 - DNA, 1098 bp, synthetic construct
  misc_feature 1..1098: note = Description of Artificial Sequence: Synthetic coding sequence
  source 1..1098: mol_type = other DNA
atgctgggccaggtggtgaccctgatcctgctgctgctgctgaaggtttaccagggcaaaggatgccagggctctgcagaccacgtggtctccatctctggcgtgcccctgcaattgcagcccaacagtatacagactaaggtcgacagcatcgcatggaaaaagctgctgccatcgcagaatggcttccaccatattttgaaatgggagaatgggtcgctcccttccaacactagcaacgataggttcagcttcatcgtaaagaatctctcgctgttgatcaaagccgcacagcagcaggattcgggactctactgccttgaggtgacgtctatctccgggaaggtgcagactgctacatttcaagtgtttgttttcgacaaagtggagaagccccgcctccaaggacagggtaagattttagatcggggtcgatgccaggtggccctctcttgcttggtgagccgggacggaaacgtgagctatgcctggtacagaggaagcaaactgatccaaaccgccgggaacctgacatatttggatgaagaggtcgacatcaacgggacccatacttatacatgtaacgtttcaaatcccgtgtcctgggagtcgcatacactcaacctgacacaagattgccagaacgcccaccaggagtttagattttggccatttttggtcataatcgtgatactctccgcactgtttctcggcacactcgcgtgcttttgtgtttggagaagaaagcggaaggaaaaacaaagcgaaacctcaccgaaagaatttctcacaatctacgaagatgttaaggatctaaaaactcgccggaatcacgaacaggagcagacatttccaggcgggggcagcactatctatagcatgatccaatcccaaagctcggctccaacgtcacaggaaccagcatacacattgtactccttgattcagccatcaaggaagagtggcagtagaaaaagaaaccattccccatccttcaattcgaccatttatgaggtgatcggaaaatcacagccaaaggcccagaacccagcccggctctccagaaaggagttagaaaatttcgacgtgtatagttag

SEQ ID NO: 182100 - DNA, 495 bp, synthetic construct
  misc_feature 1..495: note = Description of Artificial Sequence: Synthetic coding sequence
  source 1..495: mol_type = other DNA
atgaagtggaaggccctgttcaccgccgccatcctgcaggcccagctacccatcactgaagctcagtccttcggactcctagacccgaaactatgctacttgcttgatggcatcctgtttatttacggagtgatcttgaccgctctgtttctgagagttaaattctccagatcggccgacgccccagcctatcagcagggccagaaccaactatacaacgaactcaacctagggaggagagaagaatatgatgttcttgacaaacgccggggtcgggatccagagatgggcggtaagccacagcggcgaaaaaacccacaggaagggctctacaacgagctccagaaagataagatggcagaagcctattccgagattggaatgaaaggggagaggcgccgggggaaggggcacgacggcttgtaccagggactatctacagccactaaagacacgtatgacgcactgcacatgcaggcgctgccgcccagatag

SEQ ID NO: 182101 - DNA, 492 bp, synthetic construct
  misc_feature 1..492: note = Description of Artificial Sequence: Synthetic coding sequence
  source 1..492: mol_type = other DNA
atgaagtggaaggccctgttcaccgccgccatcctgcaggcccagctgccaatcacagaagcccagagtttcggtctactggaccctaagttatgctatctgctcgacggcatcttgtttatatacggcgtgatcctgaccgcactgttccttcgggtgaagtttagtcggagcgctgatgcccctgcatatcagcaggggcagaatcagttgtataacgaactcaatctgggccgcagagaggagtacgatgtgctggacaaacggcgaggccgggatcccgagatggggggcaagccccggcggaaaaacccccaggaagggctgtataatgagctccaaaaggacaagatggcggaagcttactccgagatcggcatgaaaggcgaaaggaggcgagggaagggacacgatggcctgtaccagggcctcagcactgccaccaaggatacctatgacgctcttcacatgcaggctctacccccaagatag

SEQ ID NO: 182102 - DNA, 2274 bp, synthetic construct
  misc_feature 1..2274: note = Description of Artificial Sequence: Synthetic coding sequence
  source 1..2274: mol_type = other DNA
atgctgctgcggctgctgctggcctgggccgccgccggccccaccttgggccaggacccttgggccgcagagcctcgagcggcatgcggaccgagtagttgctatgccttgtttcctagacggcggacttttttggaagcctggagagcctgcagggaactgggaggggaccttgccacgcctaggactcccgaggaggcccaaagggtggacagcctcgtgggtgctggaccggcctcacgccttctgtggatcggactgcagcgacaagccaggcagtgtcaattgcagcggccacttagaggttttacctggaccaccggggatcaggatactgcattcaccaattgggcgcagccggccagtgggggaccatgccccgcgcaaagatgtgtggccttggaggcgagcggagaacatcggtggttagagggttcttgtaccttagcagtggatgggtatctttgccagtttggctttgagggtgcctgtcctgccctgcaggacgaggctggtcaagctggccccgcggtatacaccaccccctttcatctggtcagtacagagttcgaatggctcccatttggctccgtggccgctgtccagtgccaagcaggaaggggggcctcgctcctgtgcgtgaaacaacctgaggggggggtcggctggtccagagccggtccgttatgtctaggcaccggctgcagcccagataacggtggctgcgaacacgaatgtgtcgaggaggtcgatggtcacgtgtcttgccggtgtaccgaggggttcagattggccgccgatggaaggtcttgcgaagatccctgtgctcaagccccctgtgagcagcagtgcgagccggggggcccacagggctatagctgtcattgtcgcctcgggtttcgaccagccgaagacgacccccatcggtgcgtcgataccgacgagtgtcaaatcgcgggagtctgccagcagatgtgcgttaattacgttgggggctttgaatgttattgttctgaagggcacgagttagaagctgacgggattagctgttctccagcaggagcaatgggggcacaagcaagtcaagacctcggggacgagctgctggacgacggagaggacgaggaagacgaggacgaagcttggaaagcattcaacggtggctggactgaaatgccgggcatcctatggatggagcctactcagcctcccgacttcgccctcgcttatcggcccagtttccctgaggaccgtgaacctcagatcccatatccagagcccacatggcccccacccttatctgcgccaagagtgccataccacagttccgtactgagcgtcacccgccccgtagtagtttccgccactcaccctaccctgcccagcgcgcatcaacctcccgtgattccagctacgcaccccgcactgagtcgggatcaccaaatccctgtaatagccgccaactacccagatctccctagtgcttaccagcctggcattctctctgtgagccacagtgcccagccccccgcccaccagccacccatgatttcaactaaatacccagaactgtttcctgcccaccaaagccctatgttccccgatacgcgcgtcgctgggacacagaccacaacacatctgcctggcataccgcccaatcatgcgccactggttactaccttgggcgcacagcttcctccccaggcgcctgacgcactcgtgttacggacacaagcaacacagctgccaatcattcctaccgctcagccctctctcaccaccacctcccggagcccagtctcacctgcccaccagatcagcgttcccgccgcgactcaacccgctgccctgccgacactcctcccttcccagagcccaactaatcagacatcccctatctctcccacacatccacattccaaagctccacagatcccccgggaagatggacccagtcccaagttggccctgtggcttccaagccccgcaccgacagcagctcctacagctctgggcgaggccgggctggccgaacattctcaacgagacgatagatggttgctggttgcacttctcgtcccaacatgcgtctttctggtcgtgctgttggccctgggcatagtctactgtactcgctgcggtccccatgctcctaacaagagaataactgattgttaccgctgggtgatccacgcgggatctaagtctccgaccgagcccatgccaccaaggggatccctgacaggagtacagacatgccggactagtgtgtag

SEQ ID NO: 182103 - DNA, 951 bp, synthetic construct
  misc_feature 1..951: note = Description of Artificial Sequence: Synthetic coding sequence
  source 1..951: mol_type = other DNA
atgctgcggcggcggggcagccccggcatgggcgtgcacgtgggcgctgccctaggtgcgctgtggttctgcctcaccggggccctggaagttcaggtacccgaagaccctgtcgtggcccttgtgggtacagacgcgaccttgtgctgcagcttctcccctgaaccaggcttcagcctggcccagttgaatctgatatggcagctcactgacaccaagcagctagtgcacagcttcgccgaaggccaggatcaaggtagcgcttacgccaaccggaccgcattgttcccagatttattagcgcagggcaatgcaagcctgaggctgcagcgagtgcgggtagccgatgagggtagctttacctgctttgtatctattcgggactttggctcagctgctgttagcctccaggtggcagcgccgtatagtaaaccatctatgactcttgaacccaataaagatttgcgccctggtgacaccgtcactatcacatgctctagctaccgaggctacccagaagcagaggtgttctggcaggacgggcagggtgtgccgctaacggggaacgttaccacatcgcagatggcaaatgagcaggggttgtttgatgtgcacagtgtgctgagggttgtgctgggcgcaaacggtacatacagctgtctcgtcagaaatccagtgctgcaacaagatgcccacggctcagtcaccattacaggtcaacccatgactttcccaccggaagccctctgggtcaccgtgggcttgtcggtgtgtctgattgcactgctagtcgcccttgcctttgtctgttggaggaagatcaagcagagctgtgaagaagaaaatgccggtgccgaggaccaggacggagaaggagagggcagcaagaccgcattgcagccactgaagcactcagactcaaaggaagatgatggccaagaaatcgcctag

SEQ ID NO: 182104 - DNA, 1605 bp, synthetic construct
  misc_feature 1..1605: note = Description of Artificial Sequence: Synthetic coding sequence
  source 1..1605: mol_type = other DNA
atgctgcggcggcggggcagccccggcatgggcgtgcacgtgggcgcagcactgggcgcgttatggttttgtctgacaggcgcccttgaggttcaggttcctgaagaccctgtcgtggctcttgtggggacagatgccaccctctgctgcagtttttcccctgagcccgggttctcgctggcccagcttaacctgatctggcagttgacagacaccaaacagctcgtgcactcattcgcggagggacaggaccaaggatccgcctacgctaatcggactgctctgttccctgatctcctggcccagggtaacgccagtctcaggcttcagcgagtgcgagtggccgacgagggctctttcacctgcttcgtttctattcgcgattttggtagtgctgcagtaagtctgcaagtggccgctccgtactccaaacccagcatgacactcgaaccaaacaaagatctccggcccggcgacacggtgactattacttgctcttcttatcagggctaccccgaggcagaagtcttctggcaggatggtcaaggcgtgccactcacggggaacgtcactacaagccaaatggccaatgagcagggcctgttcgacgtccactcgatcctacgagtcgttctgggggccaacggtacttattcctgtttggtccgtaatcccgtcctgcagcaggacgcacacagctcggtgactatcacgcctcagaggtctcctactggggctgtggaagtgcaagtccccgaggatcctgtggtagctttggtcggaacggacgctaccttgcgttgctctttctcaccagagccaggcttttctctcgctcaactcaatctgatctggcagctcacagataccaaacagctcgtccacagcttcacagagggaagagatcagggaagtgcttatgctaaccggaccgccttgtttccggacttgcttgcccaggggaatgctagcctgcgcctccagcgagtgcgtgttgccgatgaagggtcttttacatgctttgttagtattcgcgactttggctctgccgcggtaagcctgcaggtcgcggccccttactcgaagccatcgatgactcttgagcctaacaaggatctgagacctggcgacacggttacaatcacctgcagttcctatcgagggtatcctgaggcagaggttttttggcaggacggacagggcgtgcctctgaccggcaacgttaccacctcccaaatggctaacgaacagggcctcttcgacgttcactccgtactgagagtcgttctgggggccaacggaacatattcctgcctggtcaggaatcccgtgttacagcaggatgcccatgggtcagtcacgattaccgggcagcccatgacttttcccccagaggccctttgggttaccgtgggtctttctgtgtgcctcattgccctcctcgttgcgctggctttcgtgtgctggcgcaagataaagcagtcatgcgaggaggaaaacgccggcgccgaggaccaggatggcgaaggtgagggatcaaaaaccgccctgcagccgctaaagcactccgactcgaaggaggatgacgggcaggaaatagcctag

SEQ ID NO: 182105 - DNA, 1482 bp, synthetic construct
  misc_feature 1..1482: note = Description of Artificial Sequence: Synthetic coding sequence
  source 1..1482: mol_type = other DNA
atgctgcggcggcggggcagccccggcatgggcgtgcacgtgggcgccgccctgggcgcgctgtggttctgtttgaccggcgctctggaggtgcaggtgccggaggatcccgtcgttgcactggtgggaactgacgccaccttatgttgttctttcagccctgagcccggtttttccctggctcagttaaatttgatttggcagctgacagatacgaagcagctggtgcatagcttcgctgaggggcaggatcaggggagtgcttacgcaaatcggacagccctctttccagacctcctcgcccaaggaaacgcttctttgcgccttcagcgcgtgcgagtcgctgatgaggggtccttcacttgcttcgtcagtattcgcgacttcgggtcagccgccgtctcactccaggtcgcagccccctatagcaagccgtccatgactttggagcctaataaagatcttcgtccaggtgataccgtgacaatcacttgctctagctaccaggggtatcctgaagcggaagtgttttggcaagatggacagggggtgccgctcactggaaacgtgaccacctcgcagatggccaacgaacaaggactgtttgatgtccattccatcttgcgcgtcgttcttggggctaacggaacctattcatgcctcgtgagaaaccctgtgctgcaacaagacgcacatagctccgtgacaatcacccctcaaaggtcccctactggcgctgtcgaggtgcaagtacccgaggaccccgtcgtcgccctggttggaacagatgccaccctcagatgttctttctcaccagagcccggattctccctggcccagcttaacctgatctggcagctaaccgacactaagcagctggtccatagtttcaccgaaggcagggaccaagggagcgcctacgctaacagaactgccttgttccccgacctgttggctcaagggaatgcgtccctgcgcttgcagcgggttagggtagctgacgaaggtagcttcacctgtttcgtttctatacgggacttcggatctgcagccgtttcgctccaggttgctgccccatattcgaaaccgtctatgaccttggagcccaataaagatttacgtccaggggatacagtcacaatcacctgttcctcttatagagggtaccccgaggcggaggtcttttggcaagacggccaaggggtccccctgaccgggaatgtgactacatcacagatggcaaatgagcaggggctgttcgatgtccactctgttttaagagtggtcctgggagccaacggcacatactcatgtctggtgaggaaccccgtgctgcagcaggatgcacacggatcagtcacgattacaggacagcccatgaccttcccccccggtcctgcatcttccgcagtcccgctgtccccagcacatcctcctcatggctcaatgtgttggtcccattggttttcaagaggactgtag

SEQ ID NO: 182106 - DNA, 423 bp, synthetic construct
  misc_feature 1..423: note = Description of Artificial Sequence: Synthetic coding sequence
  source 1..423: mol_type = other DNA
atgctgcggcggcggggcagccccggcatgggcgtgcacgtgggcgctgccttgggtgccttatggttttgtttaaccggggccttggaggtgcaggttccagaggatccggtcgttgcccttgtgggaaccgatgctactctctgttgttctttctcacctgaaccagggtttagcctggcacaattaaatttgatctggcagctgacagatacgaaacagcttgtccacagctttgccgaaggtcaggatcagggatccgcttatgccaatcgaacagctctcttcccagatctgcatagagccgcgtatgacatccccccccggggcccagtgggcgatcgtggagctgtctgcctgagccactgcaccgccggggggccgggatttcgggtcctcgaaaaggaccagaccgagctgtag

SEQ ID NO: 182107 - DNA, 411 bp, synthetic construct
  misc_feature 1..411: note = Description of Artificial Sequence: Synthetic coding sequence
  source 1..411: mol_type = other DNA
atgctgcggcggcggggcagccccggcatgggcgtgcacgtgggcgctgcactgggagccctgtggttttgtctgaccggtgcactagaagtgcaggtgccagaggatcccgtagtcgctctggtcgggactgacgccaccttatgctgctcattttcacctgagccggggttttcacttgctcagttaaacttgatatggcagctgacagacacaaaacagctggtgcactcattcgcagaaggccaggaccaggggagcgcttacgccaatagaactgcactgttcccagacctgctggcacagggcaacgcatcactgcgcctccagcgtgtgagagtcgccgacgaaggctccttcacctgttttgtgtcgattcgtgattttgggagtgcagcggttagcctctag

SEQ ID NO: 182108 - DNA, 402 bp, synthetic construct
  misc_feature 1..402: note = Description of Artificial Sequence: Synthetic coding sequence
  source 1..402: mol_type = other DNA
atgctgcggcggcggggcagccccggcatgggcgtgcacgtgggcgccgccctaggggctctgtggttctgccttaccggcgcgctggaggtgcaagtgccagaagatcctgttgtagccctggtgggaaccgatgctacactgtgctgcagtttctccccagagcctggcttcagcctcgcgcagctgaatctcatctggcagctcacggataccaagcagcttgtgcactcatttgctgagggccaagatcaaggcagcgcttatgctaaccggactgccctgttcccagacttattggcgcaaggcaacgctagtctccggctgcagcgcgtacgggtcgctgatgagggatccttcacttgcttcgttagcatccgtgacttcgggtctgcagcatag

SEQ ID NO: 182109 - DNA, 1602 bp, synthetic construct
  misc_feature 1..1602: note = Description of Artificial Sequence: Synthetic coding sequence
  source 1..1602: mol_type = other DNA
atgctgcggcggcggggcagccccggcatgggcgtgcacgtgggcgccgcactgggggccttgtggttttgtctaaccggtgcccttgaggtgcaggtccctgaggatcctgtcgttgctctggtgggcacagacgctaccctttgttgttctttctcccccgagcccggtttctctctcgcccagctcaatcttatttggcagctcaccgacacaaagcagttagtacatagcttcgccgagggacaggatcagggctccgcgtacgccaaccgcacggccctgttccccgacctgctcgcacaagggaatgcttcgcttaggctgcagcgagtaagggtcgctgacgaaggatctttcacatgctttgtgtcgatcagagacttcggatctgccgcagtgagtctgcaggtggcggccccctacagtaaaccctcgatgacgctggagcccaacaaagacctccggcccggagatacagtgaccatcacgtgcagctcatatcaggggtatccagaggcggaggtgttctggcaagacggccagggcgtcccattaacagggaatgtgactacttctcagatggccaacgaacaggggctgttcgatgtccattctattttgcgcgttgtgttgggagcaaacggaacgtacagttgccttgtgcgcaaccccgttctgcaacaggatgcccattcaagcgtcaccatcaccccccagaggagccccaccggcgcagttgaggtccaggtcccagaagacccagtggtcgctcttgtgggtactgacgcgaccctgcgttgttcattctcccccgaacccggattctcactcgcccagctgaacctgatttggcagctgactgacacaaagcagttggtccactcttttacagagggacgagatcagggctccgcctatgcgaacaggacagcgctgtttccagatcttttagcccagggtaacgcatcgctgcggttacaaagggttcgtgtagcagacgaggggagctttacatgcttcgtatcaattcgagactttgggagcgcagcagtgtctctgcaagtcgccgcgccatattctaagccctctatgacactggagcccaataaagacctgagacccggcgacacagtgactataacatgtagcagctaccgcggataccctgaagcggaagtattttggcaggacgggcagggagtgcctctgaccggcaatgtgactacaagccagatggccaatgaacagggattgtttgacgttcactccgtcctccgcgtggtgctcggtgccaacggtacctacagctgcttggtgcggaaccctgtgctacagcaggatgctcatggttcagttaccatcaccggtcagcccatgacattccctcccgaagccctatgggtgacagttggcttgtcagtctgcctcattgcccttctcgttgctttggctttcgtatgctggagaaagatcaagcagtcttgtgaggaggaaaatgccggggctgaagaccaggacggcgagggcgaaggcagcaagacggcactgcagcccttgaagcattccgattctaaagaaggcaaggacacctgggcctag

SEQ ID NO: 182110 - DNA, 498 bp, synthetic construct
  misc_feature 1..498: note = Description of Artificial Sequence: Synthetic coding sequence
  source 1..498: mol_type = other DNA
atgctgcggcggcggggcagccccggcatgggcgtgcacgtgggcgcggcgctgggggcattatggttctgcctgacaggggctcttgaggtccaggtgcctgaagacccggtggtggcactggttgggactgacgccaccctctgctgctccttctctcctgagccaggtttttctctggctcagctgaacctgatttggcaattgactgataccaagcaactggtgcactcttttgctgaaggacaggatcagggctctgcttatgctaatagaactgcattattccccgatctgctggctcagggcaatgcctcacttcggctacagagagtcagggtagctgacgaaggaagcttcacatgtttcgtgagcatccgtgacttcgggtccgccgccgtaagtctgcaggtggccgcaccttacagcaaaccatcaatgacattagaaccaaataaagatctccgtcctggcgataccgtgacaataacttgctag

SEQ ID NO: 182111 - DNA, 156 bp, synthetic construct
  misc_feature 1..156: note = Description of Artificial Sequence: Synthetic coding sequence
  source 1..156: mol_type = other DNA
atgctgcggcggcggggcagccccggcatgggcgtgcacgtgggcgccgcccttggggcactatggttctgcctaaccggagccctggaggtgcaggtgcctgaggatcctgtggtggcgcttgtgggtactgatgcaaccctgtgttgcagctag

SEQ ID NO: 182112 - DNA, 663 bp, synthetic construct
  misc_feature 1..663: note = Description of Artificial Sequence: Synthetic coding sequence
  source 1..663: mol_type = other DNA
atgctgcggctgctgctggccctgaacctgttccccagcatccaggtgactggcaacaaaattcttgttaagcagagccctatgctggtggcctatgacaatgcggtgaatttgtcctgtaaatattcatacaatttgttttctagggaattccgcgcttccctacacaaggggctggacagcgcggtggaggtctgcgtcgtgtacgggaactattcccagcagttgcaggtctactcgaagaccgggttcaactgcgacggaaaactggggaacgagtctgtgaccttttatctccagaatctttacgtgaaccagacagacatctatttttgcaaaattgaggttatgtatcccccaccatatctggataacgaaaagtctaatggcacaatcatacacgtaaagggaaaacatctgtgtcctagccccttgttccccggaccttcaaagcccttctgggtgctggtcgtcgtgggcggagtgttggcctgttactccctgctggttacagtggcatttattatcttctgggtccgctctaagcgctcccgcttactccattccgattatatgaacatgacaccacggaggcccggtcctactcggaagcattaccagccatacgccccaccccgggatttcgcggcctaccgctcatag

SEQ ID NO: 182113 - DNA, 306 bp, synthetic construct
  misc_feature 1..306: note = Description of Artificial Sequence: Synthetic coding sequence
  source 1..306: mol_type = other DNA
atgctgcggctgctgctggccctgaacctgttccccagcatccaggtgaccggaaaacatttatgtccctcccccttgtttccgggaccatccaaacctttctgggttttagttgtggtagggggggtgctggcatgttacagcctgcttgtcaccgtggcttttatcatcttctgggtgcggtcgaagcggtcgagactcttgcacagcgattacatgaatatgactcctagaagaccggggcccacgcgcaagcattatcaaccctacgctccgcctagagatttcgcggcctaccgcagttag

SEQ ID NO: 182114 - DNA, 411 bp, synthetic construct
  misc_feature 1..411: note = Description of Artificial Sequence: Synthetic coding sequence
  source 1..411: mol_type = other DNA
atgctgcggctgctgctggccctgaacctgttccccagcatccaggtgacaggaaacaaaatcttagtcaaacagagccctatgttggttgcttacgataatgctgtgaacctcagctacaacgaaaagtctaatgggaccatcattcacgttaagggcaagcacctctgccctagcccgctgtttcctggcccctcaaagccgttctgggtgctggtcgtcgttggaggcgtccttgcttgttactctcttctggtgactgtagcgttcattatcttttgggttcgatctaaacgctcccgcctgctgcactccgattatatgaacatgacacctagacggccaggccccacaagaaagcattaccagccctacgcccccccccgggacttcgccgcctacagatcctag

SEQ ID NO: 182115 - DNA, 705 bp, synthetic construct
  misc_feature 1..705: note = Description of Artificial Sequence: Synthetic coding sequence
  source 1..705: mol_type = other DNA
atgccctgcggcctgagcgccctgatcatgtgccccaagggcatggtggccgtcgtggtggctgtggacgacggtgacagtcaggcattagccggaaacaaaattctcgtgaagcagtcaccgatgttggttgcctacgataatgccgtgaatctttcttgcaaatacagctacaatctctttagcagggagttcagagcctccctgcacaaggggctagactcagcagtagaggtgtgcgtggtgtatggcaattattcccagcaactccaagtctattctaaaactggctttaactgtgacgggaagctcggcaacgaatcagtcaccttttaccttcagaacttgtacgtgaaccagacagacatttacttttgcaaaattgaagtgatgtatccgccgccttacctggataatgagaaatctaatgggacaattatccatgtgaaaggtaaacacctgtgcccatcacctctgttcccagggccatcgaaacctttttgggtgctcgtcgttgtcgggggtgtgcttgcttgctattctttattggtcaccgtcgctttcatcatcttctgggttcggtccaaaagatcacggctgctgcattcagattacatgaacatgacacccagaaggcctggacctactaggaagcactatcagccatatgccccacctcgcgattttgctgcttataggagttag

SEQ ID NO: 182116 - DNA, 1920 bp, synthetic construct
  misc_feature 1..1920: note = Description of Artificial Sequence: Synthetic coding sequence
  source 1..1920: mol_type = other DNA
atggtggactacatcgtggagtacgactacgacgccgtgcacgacgacgaactgaccattcgtgttggggagatcattcgcaacgtgaaaaaactgcaagaggagggctggctggagggtgagttaaacggtcgtagagggatgttcccagataattttgtcaaggagatcaagagggaaactgaattcaaagacgactcgctgccaattaaacgggagaggcacggcaacgtagctagcctcgtacagcgaatttccacctacgggctcccggccggtggcatacagccccatcctcagacgaagaatatcaaaaaaaaaactaagaagcggcagtgcaaggtgttattcgagtatattccccaaaatgaggatgaactggagctcaaggtgggggacattatcgatatcaatgaggaagtcgaggagggctggtggtcaggtacattgaacaacaaactgggcctctttccctcaaactttgtgaaggaactagaagtgaccgacgacggcgaaacacatgaagctcaggatgattctgaaaccgtgttggccgggccaacatctccgattccaagcctgggcaacgtgagcgaaaccgccagcggctcagtgacacagccaaagaagatccgtgggatcgggtttggtgatatttttaaggagggctctgtgaaactgaggacccggacttcctcatcagagactgaagagaagaagccagaaaagcccctcattctccaaagtctcggcccaaagactcagagtgtagagattactaaaacggatacggaaggaaagatcaaggcaaaagaatattgtaggacactttttgcatatgagggcacaaacgaagatgaactcactttcaaagaaggggagatcattcacttaatttccaaggagacaggcgaagcaggctggtggcggggcgagctgaacggtaaagaaggggtctttcccgacaactttgctgtccaaattaatgagctggataaagacttccccaaacccaagaagccaccccccccagcgaaagctccagctccaaaacccgagctgattgccgctgagaagaagtacttctcactgaagcctgaagagaaggatgaaaagagtaccctggagcagaaacccagcaagcccgcagcccctcaggtaccacctaagaagcccacaccccccaccaaagcaagtaatctcctgcggtccagcggcacagtgtacccaaagaggcccgagaagcccgtgccaccaccacctccgatagctaaaattaatggtgaggtttcttcaatttcttccaaatttgagaccgaacctgtgagcaagctgaagcttgattcagagcagctgccactgaggcccaagtccgtggacttcgacagtcttacggtgaggacatcaaaagaaacagacgtcgttaactttgatgacatcgccagctcagaaaaccttcttcacctgaccgctaaccggcctaagatgccagggcggcgcttgcccgggaggttcaatggcggtcatagccctacccactcacctgaaaaaatcctgaagctccccaaagaagaggactctgctaatctgaaaccgtcggaactcaagaaagatacttgctactctcccaagccctccgtgtacttaagcacccctagcagcgcaagtaaggccaacaccacagcctttctgacacctctggagatcaaggccaaggtggaaaccgacgatgtgaagaagaacagcctggatgaactccgggcacagattatagagctcctgtgcattgtcgaggcgctgaaaaaagatcacggcaaagagcttgagaaactgaggaaggacctggaagaagaaaagacaatgcgatccaatctagagatggagatcgaaaagctaaagaaagctgtgctgagttcatag

SEQ ID NO: 182117 - DNA, 717 bp, synthetic construct
  misc_feature 1..717: note = Description of Artificial Sequence: Synthetic coding sequence
  source 1..717: mol_type = other DNA
atgtgccggcggtgcaagcccgagctgcggcagaacttccagagcgcatcaggtatctgcatttgccactggctccagatccgcagaacaaggagccgcgaaggaagagccatgtggttgccacccgcacttcttttgctgtcattaagcggctgcttctctattcaaggccccgaaagtgtacgggctccggaacaaggtagtctgactgtccaatgccattacaagcaaggctgggaaacctacatcaaatggtggtgccgtggtgtacggtgggacacttgcaagattctcatcgaaactcggggttctgaacagggagagaagtctgatagggtcagcatcaaagataaccaaaaagatagaaccttcaccgtcaccatggaaggcctacggagggatgacgctgatgtctactggtgtggaatagagcgtagggggccagacctggggactcaggtaaaggtcattgtcgatcccgagggagccgcgagcaccaccgcatcgtcccctactaattcgaatatggcagtcttcattggatcccataagaggaatcactacatgcttttggtatttgtcaaagtgcccatcttactgatcctggttactgccatattgtggctgaaggggtcacagcgcgtgccggaagaacccggtgagcagcctatttacatgaatttcagcgagccgctaacgaaggacatggctacttag

SEQ ID NO: 182118 - DNA, 606 bp, synthetic construct
  misc_feature 1..606: note = Description of Artificial Sequence: Synthetic coding sequence
  source 1..606: mol_type = other DNA
atgtggctgccccccgccctgctgctgctgagcctgagcggctgcttctccatccagggaccagaatctgtgcgggcacctgaacaaggaagcctaactgttcagtgccattacaagcaggggtgggagacatatattaagtggtggtgccgcggagtcaggtgggatacatgtaagatccttatagagactaggggctctgagcagggtgagaagagtgatcgtgtttctatcaaagataaccaaaaggatcggaccttcaccgtcacaatggaaggcctcagacgtgacgacgctgacgtttattggtgtggaatagaacgcaggggacctgatcttggcactcaagtgaaggtaatagttgatccggaaggagccgcatcgacaacagcctccagtccaactaattcaaatatggccgtgtttataggctcccacaaacggaaccattatatgctcctagtgtttgtgaaggtgcccatccttctgatccttgtgaccgctattctctggctaaagggaagccagcgcgtgcccgaagaacctggagaacagcctatctatatgaatttcagcgaaccactgacgaaggacatggctacatag

SEQ ID NO: 182119 - DNA, 735 bp, synthetic construct
  misc_feature 1..735: note = Description of Artificial Sequence: Synthetic coding sequence
  source 1..735: mol_type = other DNA
atgcccctgctgaccctgtacctgctgctgttctggctgagcggctactcaatagtaacccaaattaccgggcccacaaccgtgaatgggctggagcgcggatcactgactgttcagtgcgtctatcggtctggttgggaaacctatctgaagtggtggtgccgcggagcgatctggagagactgcaagatattggtaaaaacctccggcagcgagcaagaagtgaagagagaccgggtctctataaaagacaaccagaaaaatcggactttcaccgtaactatggaagatttgatgaagaccgatgcggatacctattggtgtggcattgagaaaactggcaatgacctcggcgtgaccgtacaggttaccatagatcccgccccggtgacacaggaagaaacttcctctagtcccactctcaccgggcatcatctggacaacaggtcggaggggtcacaagctgccaattatcgcccagcggcccaccaagcgcaggctcctgaggcgcagtgtccaccagccccacacctacaccatatcgctgccgcattcggaggacgattgaccctggggttagaggatgacgaagtgcctgcggagtctagtcgcgatgtgccgcgtgctggaaccgcggctcctggagggaggcctctcctgtgccggcctgaccctgctgctggacgaaatctcccagccaagggttatcacgaggcattcctgtgccctgggtag

SEQ ID NO: 182120 - DNA, 873 bp, synthetic construct
  misc_feature 1..873: note = Description of Artificial Sequence: Synthetic coding sequence
  source 1..873: mol_type = other DNA
atgcccctgctgaccctgtacctgctgctgttctggctgagcggctactcaattgttacccagatcactggaccaacaacggtcaacggactcgaacggggctccctgacggtccagtgcgtgtatcgatcgggctgggagacctacctgaaatggtggtgtcgtggagctatatggagggattgcaaaatcttggtcaagactagcggcagcgaacaggaggtgaaaagagaccgggtcagtattaaggacaatcagaagaaccggacctttaccgttactatggaagacttgatgaagaccgacgccgacacctattggtgtgggatcgaaaagaccggcaatgaccttggggtgactgtgcaagtgaccatagatcccgccccggttacgcaggaagaaacaagcagttcgcctacactaaccggacaccacctggataacagacacaaactgttgaagctgtctgtactgctcccccttattttcacgatcctgctgctgttgctggtcgccgcttctctgctagcctggcgcatgatgaaataccagcaaaaggctgccggcatgtcgcctgagcaggtgctccagccactggagggtgatctgtgttatgccgacttgaccctccagctggcaggcacaagtccccaaaaggcgactacaaaactgtcctctgcacaggtcgatcaggtggaagtagagtatgtcaccatggcctcattgcccaaagaagacatttcctacgcttctctgacgctcggcgctgaggaccaggaacctacatattgtaacatgggtcacctttcctcacacctcccgggccgagggccagaagagcctactgaatactcaactatcagtcggccatag

SEQ ID NO: 182121 - DNA, 585 bp, synthetic construct
  misc_feature 1..585: note = Description of Artificial Sequence: Synthetic coding sequence
  source 1..585: mol_type = other DNA
atgtggctgccccagctggacctgatgcgggtgatcagcgccaagagtcagggctattcaatagtgacacagataacgggaccaacaaccgttaacgggctggaacgtggctccttaaccgtgcaatgcgtgtaccgctctggctgggagacatacctcaaatggtggtgccggggcgcaatatggagggattgcaaaatcctggtgaaaaccagcggatccgagcaggaggtgaagcgggatcgagtgagcatcaaggacaaccaaaagaatagaacctttaccgtcacgatggaggacctaatgaagacagacgctgatacctactggtgcgggatcgagaagaccggaaacgacctgggagtgacggtgcaggtgaccattgatccagcaccagtcacgcaggaggaaacgtcaagcagccccacccttacgggtcaccacctggataactcctcacgcgacgttccacgcgcaggaacagccgcccccggggggaggcccctgctgtgtagaccagaccctgccgccggccgaaacctcccagcaaaggggtaccatgaagcttttttatgccctgggtag

SEQ ID NO: 182122 - DNA, 720 bp, synthetic construct
  misc_feature 1..720: note = Description of Artificial Sequence: Synthetic coding sequence
  source 1..720: mol_type = other DNA
atgtggctgccccagctggacctgatgcgggtgatcagcgccaagtctcagggctattcgatagtgacacagattaccggccctactacagtgaacggtctggaacggggatccctgaccgtacagtgtgtgtaccgatctggctgggagacctatctgaagtggtggtgcaggggagccatatggagggactgcaagattctcgttaaaacatccggctccgagcaagaggtcaaaagggaccgcgtgagtattaaagataatcaaaagaaccgcaccttcactgtgacaatggaagacctcatgaagacggacgctgacacctactggtgcggtattgaaaaaaccgggaatgatctcggggtcacggtgcaagtcaccatcgaccctgcaagcactccagcccccacgacacctaccagcacaactttcacggcccccgttacgcaggaagagacctcaagcagtcctacgctgacagggcaccatcttgacaatcgtcataagctcctgaagctgtcagttctgctccctctgattttcacaatccttctgttgctgctggtggcagcctccctgctggcgtggaggatgatgaaataccaacagaagggaacagccgcaccaggcgggcgacctctgctctgccgaccagatccagcagcagggaggaacttgccagccaaaggatatcatgaggcctttctgtgccctggttag

SEQ ID NO: 182123 - DNA, 699 bp, synthetic construct
  misc_feature 1..699: note = Description of Artificial Sequence: Synthetic coding sequence
  source 1..699: mol_type = other DNA
atgctgcgggccgccctgcccgccctgctgctgcccctgctgggcctggcggccgccgctgtcgccgattgtccgtcttccacatggatccagtttcaggatagttgctatatttttctgcaagaggcaatcaaggtcgaatccattgaggatgtccgcaatcaatgcactgaccatggcgcagatatgatctcgatacacaacgaggaagaaaacgctttcattctggatactcttaagaaacagtggaagggcccagacgacatcctcttgggaatgttttatgatacggacgacgcttctttcaagtggttcgataatagcaacatgactttcgacaaatggacagatcaggatgatgatgaagaccttgtggacacctgtgcttttctgcatattaagaccggggaatggaagaaaggaaattgcgaggtaagctcggtggagggcacattatgtaagaccgctattccgtacaagcgcaaataccttagcgataatcacattctcatctccgccctcgtcatcgcttccactgttattttaaccgtgcttggagccataatctggtttctgtacaaaaagcatagcgattccaggttcactacagtattttctactgccccgcagagcccatataacgaggactgcgtgctggtcgtgggcgaagaaaacgaatatccagtgcagtttgattag

SEQ ID NO: 182124 - DNA, 525 bp, synthetic construct
  misc_feature 1..525: note = Description of Artificial Sequence: Synthetic coding sequence
  source 1..525: mol_type = other DNA
atgctgcgggccgccctgcccgccctgctgctgcccctgctgggcttggcagcagctgccgtggctgactgtcccagctcaacttggatacagtttcaggattcatgttatatttttctgcaagaggctattaaagtggagagtatagaggacgtgcgcaaccagtgcactgaccacggggcggacatgattagcattcataacgaggaagaaaatgcgttcattttggatactcttaaaaagcagtggaaaggacctgatgacatactcctcggaatgttttacgacacggacgtaccatataagcggaaatacctctccgataatcatattctgatctctgccctggttattgctagtacagtcattctgaccgtgctgggagcaatcatttggtttctctataagaagcacagcgattcaagattcaccacagtgttctccacggcccctcagagcccctacaacgaagattgtgttctagtggttggagaagagaatgagtacccggtgcagtttgactag

SEQ ID NO: 182125 - DNA, 849 bp, synthetic construct
  misc_feature 1..849: note = Description of Artificial Sequence: Synthetic coding sequence
  source 1..849: mol_type = other DNA
atgagcggcggctggatggcccaggtgggcgcctggcggaccggcgcgctgggcctcgcccttctccttctgttagggcttggcttaggtctggaagccgcagcttcccccctcagcactccaaccagcgcgcaagctgcagggcctagctccgggagttgcccgcctaccaaattccagtgtcgcactagtggtctgtgcgtgccactgacctggagatgcgacagggacttggactgttcagatggtagcgatgaggaagagtgtaggatcgagccttgcacacagaagggacaatgtccaccacctccagggttaccgtgcccctgtaccggtgtgtctgactgctccggcggaacggataagaaactccgaaattgttcccgattggcttgcttggctggagagctgcgatgcaccttgtccgacgactgtatccccttgacatggcgctgcgacggccatcctgactgtcccgacagctccgacgaactcgggtgtggcacaaacgaaatcctccccgaaggcgacgccaccaccatggggccaccagtcacactggagtccgtgacatcactgcgcaatgccaccaccatgggcccacccgtgacattggagagcgttccctctgtcggcaacgccacatcatctagtgctggggatcagtctgggtcccccactgcctacggcgtcattgccgcggctgccgtgctgagtgccagcctggtgacggctactctgctgctactgtcctggctccgtgctcaggagcgcctgaggcctttaggtctcttggtcgccatgaaggaaagcctgctcctgtcagagcagaaaactagcctaccgtag

SEQ ID NO: 182126 - DNA, 606 bp, synthetic construct
  misc_feature 1..606: note = Description of Artificial Sequence: Synthetic coding sequence
  source 1..606: mol_type = other DNA
aacgagatcctgcccgagggcgacgccaccaccatgggcccccccgtaactctggaaagcgtgacttccctgcgaaatgcgacaacgatggggccaccggtaacactggagagcgttccaagcgtgggaaacgccattcttctctgccggagaccggtttggaagccgaactgtctgtggggttactgctcctgctgtggtgcacagtgcaaacctggccaccgccaccctccaccctttgtcctcgccccctctcccggtgccccaccacccaccggagtaacagggggccacgaaggggttcctgcggccgttagaacagaagatctcgccgccttgcgcacctctacttgccatcaccgacatagcgcactcggcgttgcgggccaggaggagtctagcgacgctgatggatatccgggcacacctgcattacgggacctgtctagcagtggccacgtggagcctcgcacgagagctcctgcagaggtggcattggagattgagggaccttggacgttaccaatggagataaggggagctaggatggggaatttgccacagccggaacttcgtggctggccccaggctgcccctcggggatag

SEQ ID NO: 182127 - DNA, 723 bp, synthetic construct
  misc_feature 1..723: note = Description of Artificial Sequence: Synthetic coding sequence
  source 1..723: mol_type = other DNA
atgagcggcggctggatggcccaggtgggcgcctggcggaccggcgccctcgggctggccctgctgcttctgctaggactgggactcggacttgaggctgcggctagcccattgagcacacccaccagtgcccaagctgctgggattgagccttgtacccaaaaaggtcagtgtcctcctcccccaggacttccctgcccctgtaccggcgtttccgattgctcggggggaacggacaagaagttgaggaattgtagccggctcgcctgtctggccggagagttgcggtgcacactctccgatgattgcattccgctcacatggcgctgtgacggacaccctgattgcccagattctagcgatgagctgggctgcggtacaaatgaaattctccccgagggagacgccaccacgatggggcctccagtgaccctggaaagcgtcacgtccttgcgaaatgcaacgactatgggcccaccggtgacgctagagtctgtgcctagcgttggcaacgcgactagtagtagcgctggagaccagtcaggatcccccaccgcgtatggagtgatcgcagctgccgcagtcctgtctgctagtctcgtaaccgccaccctcctgttgctaagctggttgagggcgcaggagagattaagacccttgggactgctggttgctatgaaagaaagccttctcttgtctgagcagaaaacgtcactcccctag

SEQ ID NO: 182128 - DNA, 1095 bp, synthetic construct
  misc_feature 1..1095: note = Description of Artificial Sequence: Synthetic coding sequence
  source 1..1095: mol_type = other DNA
atgcccctgctgctgctgctgcccctgctgtgggccggcgccctggccatggatcccaacttttggctgcaagtacaagagagtgtgacagtgcaggaaggcctgtgcgtcctcgttccctgcacattctttcaccccattccttactacgataaaaattcccctgtgcatggttactggttccgagagggcgccataatttccagggattctccggtcgcgactaacaagctggaccaggaagtgcaagaagagacccagggcaggtttcggttactcggagacccctcccggaacaattgctcacttagtatagtcgacgccaggagacgagataatggatcctattttttcagaatggagaggggatccaccaagtattcatataaatcacctcagttgtccgtgcacgtcaccgatctcactcatagacccaaaattctgattcccggtactctggagcctgggcattccaagaatcttacctgctccgtttcctgggcttgtgagcagggcaccccacccattttctcatggctgtcagccgctcccacctccctaggcccaagaacaacacacagctctgtccttatcattaccccacgtccgcaggaccacgggactaatctcacatgccaggttaagtttgccggcgctggagtaaccactgaaaggactatccagttaaatgtcacatacgtacctcaaaatcctacaactggaattttcccaggtgacggctccggaaagcaggagacaagggccggagttgtgcatggagcaataggtggcgcaggtgttaccgctctgctcgccctgtgtctgtgtctgatcttttttatcgtcaaaacacaccgtaggaaggccgctagaactgccgttggcaggaatgatacccaccccaccaccggcagcgcgagcccaaagcaccagaaaaaaagtaagcttcacggacctacagaaacaagctcctgctcaggtgcagcgccaaccgtcgagatggacgaagagttacactacgcatcccttaacttccatggcatgaatccgtctaaggacacaagcactgaatattccgaggttcgcacacagtag

SEQ ID NO: 182129 - DNA, 933 bp, synthetic construct
  misc_feature 1..933: note = Description of Artificial Sequence: Synthetic coding sequence
  source 1..933: mol_type = other DNA
atgcccctgctgctgctgctgcccctgctgtgggccggcgccctggcgatggatcccaatttttggctgcaggtccaagaatcagttaccgttcaggaaggattgtgtgttcttgtcccctgcacatttttccaccctatcccatattacgacaaaaattcgccagttcacgggtactggttccgagagggtgcaattatcagccgagattcaccagttgcgaccaacaagctagaccaggaagtgcaggaggagacacagggcaggtttcgccttctcggagatcccagtcggaataactgttcactatcaatcgtggacgcacgccgcagagataacggctcttacttcttccggatggagcgtgggtcgacaaaatattcctataagtcaccccagctctccgtgcatgttacagacctcacccacagaccaaaaatcctgattcccggcaccttggagcccggacactcaaaaaacctcacatgcagtgtaagttgggcctgcgagcagggaactccaccaatcttttcatggctttctgcggcccccacttcacttggaccccgtaccacccacagtagtgtgcttatcatcacgccacggccacaggaccatggtaccaacctgacttgccaggtcaagtttgcgggcgctggagtgacaactgagcggacaatacagctgaatgtgacgtatgttccacaaaaccctactacgggaattttccctggcgacgggagtgggaaacaggagacccgggccggcgtggtccacggtgccataggtggtgcaggagtcacggcactgctggcattgtgcttgtgtctaatctttttcatcgttaagactcatcgccgcaaagccgctaggaccgccgtcggtcgcaacgacacccatccaacaaccggaagcgctagcccagtacgctag

SEQ ID NO: 182130 - DNA, 714 bp, synthetic construct
  misc_feature 1..714: note = Description of Artificial Sequence: Synthetic coding sequence
  source 1..714: mol_type = other DNA
atgcccctgctgctgctgctgcccctgctgtgggccgacctgacccataggccgaagatcttgatccccggtaccctggaacccggccactctaagaacctcacatgcagtgtgtcctgggcatgtgagcaaggcacccctcccatattttcatggctgtctgccgcgcctacctccctgggcccacgcacaacacactcaagtgtcctcatcatcacgcctcggccacaagaccatgggaccaacctgacctgtcaggtgaaattcgcgggcgcgggcgtaacaacggaaaggacgattcagctcaatgtaacctacgtgccacaaaatcccaccacgggaatcttcccaggcgacgggtctggcaaacaggagaccagagctggcgtcgtgcacggagccatcggaggagcgggggtcaccgcactcctcgccttgtgtctctgcctgatattcttcatcgtgaaaacccaccgccgtaaagccgcaaggactgccgtgggtaggaatgatacccaccccaccactggctcagcctccccaaaacatcaaaagaaatctaagttgcacggacctactgaaacctcctcctgtagcggcgctgctcccacggtggagatggacgaggagctccactatgcatcactgaattttcatggaatgaatccgtccaaggatactagcaccgagtatagcgaggtccgaacccagtag

SEQ ID NO: 182131 - DNA, 639 bp, synthetic construct
  misc_feature 1..639: note = Description of Artificial Sequence: Synthetic coding sequence
  source 1..639: mol_type = other DNA
atgcccctgctgctgctgctgcccctgctgtgggccgacctgacccatcggccaaaaatcctgatccccggaactctggagcccggccattcaaagaatctgacatgctctgtttcttgggcgtgtgagcaggggaccccaccaatcttcagctggttgtctgctgcacctacctcgctggggccccgtacaacccactcatcagtcttgataattacacctcgccctcaggaccacggcaccaacctgacctgtcaggttaagttcgccggcgccggtgtcacaactgagagaaccattcagttaaatgtcacttacgtgccccagaacccgacaacaggcatcttccctggtgacggctcaggcaagcaggagaccagggcaggcgtggttcacggggccattggcggtgcgggtgtaactgccctgctcgccctgtgcctctgcctgatcttcttcatcgttaagactcacaggcgaaaggccgcccgaactgccgtgggaagaaacgacactcatcctacgactgggtctgcatctcctgtctcagatggtgcaagctggcacccagtgtgccccgctgatacgagctcgcagtgcggcccgcctagttgcccaatccagcattttcaaaactag

SEQ ID NO: 182132 - DNA, 1419 bp, synthetic construct
  misc_feature 1..1419: note = Description of Artificial Sequence: Synthetic coding sequence
  source 1..1419: mol_type = other DNA
atgggctgcgaccggaactgcggcctgatcgccggcgccgtgatcggagctgtcctggcagtgttcggcgggattctgatgccagtcggtgatctgctgattcagaagacaatcaagaaacaggtagtgctggaggagggcaccattgctttcaaaaactgggttaagacaggtacggaagtctataggcagttttggatcttcgatgtgcagaatccacaagaggtcatgatgaacagctccaacatccaagtgaaacaaagaggcccttatacgtacagggtaagattcttggccaaggaaaatgtgacacaggatgccgaagataacaccgtatcatttctccagcctaacggcgccatcttcgagccatcattgagtgttggcaccgaagccgacaactttacagtgctgaatctggctgtcgccgccgctagccacatctatcagaatcagttcgtgcagatgatattgaattcgctgattaataagtcgaagagcagtatgtttcaggtgaggaccctgcgggaactgctgtggggataccgagaccccttcctctccctcgtcccctatcctgtgactacaacagtgggactcttttacccgtataataacactgccgacggggtgtataaggttttcaacgggaaagacaatatcagcaaggttgccattatagatacttataaaggtaaaagaaacctgtcttattgggagagccactgcgatatgataaatgggacagatgctgccagcttccccccttttgttgagaagagccaagttctgcaattcttttcctcagatatctgccggagcatctacgccgtgttcgaatccgacgtgaatctgaaggggattcccgtgtaccgcttcgtcttgccatcaaaggcgttcgcttcgccggtagagaacccggataactactgtttctgtaccgagaagatcatatctaagaactgtaccagctatggagttctggacataagtaagtgcaaggagggtagaccggtttacatctcacttccacacttcctttacgcctcgccagatgtgagtgagcccattgacgggcttaaccctaatgaggaagaacaccgaacctaccttgatatcgaaccaataaccgggttcacactgcagttcgctaaacggctacaggtgaacctattggttaagccttcggaaaagattcaggttctgaaaaatttaaagcgcaattatattgtcccaatcctgtggcttaacgagacaggcactataggggacgaaaaggcaaatatgttccgaagccaggtgacaggcaagatcaatcttctgggtctcattgagatgatcctgctgagtgtgggggtagttatgttcgtagccttcatgatttcttattgcgcatgtcgctccaaaacaataaagtag

SEQ ID NO: 182133 - DNA, 1419 bp, synthetic construct
  misc_feature 1..1419: note = Description of Artificial Sequence: Synthetic coding sequence
  source 1..1419: mol_type = other DNA
atgggctgcgaccggaactgcggcctgatcgccggcgccgtgatcggcgctgttttagctgtgtttggaggaatcctgatgcccgtgggagacctcctgatccaaaaaacgataaaaaagcaggtcgttctcgaggagggcactatcgcatttaagaactgggttaagacggggactgaagtgtacagacagttctggattttcgacgtgcagaacccgcaggaggtaatgatgaactccagcaacattcaggttaagcagcgaggcccttatacatatagagtgaggttccttgctaaggagaatgttacacaggatgcagaggataatacagtcagctttctccagccaaacggcgctatctttgagcctagtctcagcgtgggcaccgaagctgataacttcaccgtcctcaatttagctgtcgctgccgctagtcatatctatcagaatcaattcgttcaaatgattcttaatagtttaatcaacaagtctaaaagtagcatgtttcaggtacgtacactgcgcgaacttctctggggatatcgggatccattcttaagcctggtgccctatcctgtcacaacgacagtagggctcttttacccttacaacaatactgctgacggtgtgtataaagtgtttaacggcaaggataacatctccaaagttgccatcatcgatacatacaagggaaagagaaatctctcatattgggaaagtcactgcgatatgatcaatggaaccgacgcagcttcattcccaccgttcgttgagaagtcccaggtgcttcagttttttagcagcgacatctgtaggtctatctatgctgtgttcgagtccgacgtcaacttgaaaggaatcccagtgtatcggttcgttcttccctcgaaagcatttgccagccccgtggagaacccagataattactgcttttgcactgagaaaattatctcgaagaactgcacctcctatggtgtcctggacatcagcaaatgtaaggaaggaaggcccgtgtatatcagtcttccccattttctttatgccagtcctgacgtgagcgaacctatcgacgggctgaacccgaacgaggaagaacatagaacctacctggatatcgaaccgatcaccggctttacactgcagtttgcaaaaagacttcaggtcaatttgctggtcaagcccagcgaaaagatccaagtattaaaaaacctgaagcgaaattatatcgtgccaattctctggctcaacgagacagggaccattggggatgagaaggcgaatatgtttcggagccaggttaccggaaagatcaatttgttggggctgatcgaaatgatcttgctgtcagtaggcgtggtaatgttcgtagcctttatgattagctactgcgcttgtcgcagtaagaccattaagtag

SEQ ID NO: 182134 - DNA, 612 bp, synthetic construct
  misc_feature 1..612: note = Description of Artificial Sequence: Synthetic coding sequence
  source 1..612: mol_type = other DNA
atgggctgcgaccggaactgcggcctgatcgccggcgccgtgatcggggctgtactggcagttttcgggggaatcctcatgcctgtgggggacctgctgatccagaaaaccataaagaagcaggtggtgttggaagaaggcaccatagcttttaaaaattgggtgaaaaccggcacggaggtgtataggcagttttggatatttgacgtgcagaacccccaagaggtgatgatgaattccagtaacatccaggtgaagcagcggggcccctatacctatagagtccgatttttggcaaaggaaaatgtcactcaagacgctgaggataacacggtaagctttctgcaaccaaacggagccatctttgagccaagtctgagcgtaggtaccgaagccgacaattttacagtgcttaacttagcagtggccgccgccagtcatatttaccagaaccagtttgttcagatgatcctcaacagtctcattaataagagtaaaagtagcatgttccaggttcgcactctgcgagaactgctttgggggtaccgcgacccctttctgtcgctggtcccataccccgttactactaccgtcggactgttctacccatag

SEQ ID NO: 182135 - DNA, 1392 bp, synthetic construct
  misc_feature 1..1392: note = Description of Artificial Sequence: Synthetic coding sequence
  source 1..1392: mol_type = other DNA
atgggctgcgaccggaactgcggcctgatcgccggcgccgtgatcggagccgtgttggcagtgtttggtggcatcttgatgccagtcggggatctgctgattcagaagactattaaaaagcaagtcgttctagaagaaggtaccattgcattcaagaattgggtaaagaccggtaccgaagtgtatcgccagttctggatctttgacgtgcaaaaccctcaggaagtcatgatgaactccagcaatattcaggtaaagcagcgcggtccctatacctatagggtgaggtttcttgccaaggagaatgtcacacaagacgccgaagataataccgtctcttttctgcaacctaacggcgcaatcttcgagccatccttatcagtcggaacagaggctgacaactttaccgtgttaaacctggcagtcgcagcggcctcgcacatctatcagaatcagttcgtgcaaatgatcctaaactccttaattaacaagtcaaagtcaagcatgtttcaggtgcggactctgagggagctcttatggggctaccgtgacccctttctgtctctcgtcccatatcctgtcacaacaaccgtggggctcttttacccctataacaacacagccgacggcgtttataaggtgtttaacggaaaagacaacattagtaaagtcgcaatcattgacacttacaagggtaagcggaatctttcttattgggagtctcactgcgacatgattaacggtaccgacgctgctagttttcctcctttcgttgaaaaaagtcaagtcctccagttcttctccagcgatatttgccgttccatctacgcagtctttgagagcgacgtgaacctgaaggggataccagtctatcgattcgtgctccctagcaaggcatttgcatcacctgttgaaaatcctgacaattactgcttttgcactgagaagatcatctctaagaactgcacttcatacggggtcctggacatcagtaagtgcaaggaaggtaggccggtgtacatcagcctcccccacttcctctacgcgtcacctgacgtgagcgagcccattgacggactgaaccctaacgaagaggaacatcggacatacttagacatcgaacccatcacgggattcaccctgcagttcgcaaagagactgcaggtgaacctgcttgtgaaacctagcgaaaaaatccaagtgctcaaaaacctcaaaagaaactacatcgtccctatactgtggctgaatgaaactgggacgattggagatgagaaagcaaatatgtttaggtcgcaggtgacaggtaagattaacctgctaggtttgattgagatgattctcctctccgtgggggtcgtgatgtttgtcgcctttatgatcagttactag

SEQ ID NO: 182136 - DNA, 447 bp, synthetic construct
  misc_feature 1..447: note = Description of Artificial Sequence: Synthetic coding sequence
  source 1..447: mol_type = other DNA
atgggctgcgaccggaactgcggcctgatcgccggcgccgtgatcggcgccgtcctggccgttttcggtggaatattgatgccagtgggggatctgctgattcagaagaccatcaaaaagcaagtcgtcctggaggagggtaccatcgcatttaaaaactgggtaaaaactgggacagaagtctaccggcagttctggatcttcgatgtacagaatcctcaggaggtcatgatgaattcgagcaacatacaggttaaacagcgagggccctacacatatcgggtgcggttcctggccaaagagaatgtgacgcaggatgccgaggataacaccgtctcttttttgcagcctaatggagccatattcgaaccttctttgagcgtgggcaccgaagccgataactttaccgtgctgaaccttgcggtggccgccgcctctcacatctag

SEQ ID NO: 182137 - DNA, 282 bp, synthetic construct
  misc_feature 1..282: note = Description of Artificial Sequence: Synthetic coding sequence
  source 1..282: mol_type = other DNA
atgggctgcgaccggaactgcggcctgatcgccggcgccgtgatcggagccgtcctggccgtgtttggcggcatcctcatgcccgttggggacttgctgattcaaaagactatcaagaaacaggtcgttctagaggagggcactatcgcctttaagaactgggtgaaaaccggcacagaagtgtaccgacagttctggattttcgatgtgcaaaacccacaagaagtgatgatgaatagcagcaacatccaagtgaagcaacgaggcccctacacctattag

SEQ ID NO: 182138 - DNA, 1419 bp, synthetic construct
  misc_feature 1..1419: note = Description of Artificial Sequence: Synthetic coding sequence
  source 1..1419: mol_type = other DNA
atgggctgcgaccggaactgcggcctgatcgccggcgccgtgatcggcgctgtgctggcagtgttcggaggcatcctgatgcctgtgggcgacctcctgatccagaagacaatcaaaaaacaggtcgtactggaggagggcactatcgcgttcaaaaactgggtgaagaccggcactgaggtgtatcgtcagttttggattttcgacgtccagaatccacaggaagtcatgatgaacagtagcaatatccaggttaaacaacgaggtccctacacctacagggttcgcttcctggctaaggagaatgtgacacaggatgcggaggataacactgtcagcttcttacaacccaacggggctatattcgaaccctccttatccgttggtaccgaggcagataacttcacagtccttaatctcgccgttgccgcagcatctcacatctatcagaatcaatttgttcaaatgattctaaattctctcattaacaaaagtaagagctcgatgtttcaggttcggacgcttcgagaactgttgtgggggtaccgggatccattcctatcgctcgttccttaccctgtgaccaccacagtgggcctattctacccctacaacaacaccgcagatggtgtgtacaaagtgtttaacggcaaggataatatcagcaaggtcgcaattattgacacctataaaggaaagcgcaacctgtcatattgggagtctcactgcgacatgatcaacggaacagatgcagcatcctttcccccatttgtcgaaaagtctcaggtactacagttcttcagcagtgatatttgcagaagtatctatgccgtcttcgaatccgacgtgaatttaaaggggatccctgtataccgctttgtactccctagcaaggcctttgcttctcctgtagagaacccagataattattgtttctgcaccgagaagataatttccaaaaattgtactagctacggggtccttgacataagcaagtgcaaggaaggccgaccggtttacataagcttgccccactttctgtatgcaagtcccgacgtgtccgagcctatcgacggtctgaatccaaatgaggaggaacatcggacctatctcgacatagagcctatcaccggttttaccctgcagttcgctaaacggttacaagtgaacctgctcgtgaaacctagcgaaaagatccaggtgctgaagaatctgaagcgcaattatatcgtacccattctctggttgaacgaaacgggcacaattggcgatgagaaagcaaacatgtttaggagccaggtgactggcaaaatcaacctcctcggacttattgagatgattttactgtctgtgggagtggtgatgtttgtggcctttatgatttcatattgtgcatgcagaagtaaaactatcaaatag

SEQ ID NO: 182139 - DNA, 1302 bp, synthetic construct
  misc_feature 1..1302: note = Description of Artificial Sequence: Synthetic coding sequence
  source 1..1302: mol_type = other DNA
atgggctgcgaccggaactgcggcctgatcgccggcgccgtgatcggagcggtattagccgtttttgggggcatcttaatgcccgttggggaccttctgattcagaaaacaatcaaaaaacaggtcgttctcgaagaaggaactattgctttcaagaattgggtgaagaccggcaccgaggtctatcgtcagttttggattttcgatgtgcagaatcctcaggaggttatgatgaatagttctaacatccaagttaaacagcgggggccatatacctatagagttcgttttctcgccaaagagaacgtgactcaggacgccgaagacaatacggtctccttccttcaacccaacggggctatcttcgagccatctcttagcgtcggcacagaagctgacaattttacagtgctgaacttggccgtggcagcggctagtcatatctatcagaatcagtttgtgcagatgatcctgaattctcttattaacaagtctaaatcctctatgtttcaagttaggacactccgcgagctcttgtggggctaccgcgaccccttccttagcctggtgccatatccggtgactacaactgtcggcctcttttacccctataacaacacagctgacggagtctataaggtctttaacggaaaagacaacatttcgaaggtggccatcatagacacctataaaggaaagcggtccatatacgccgtgttcgagtctgacgtcaacctgaaggggattccagtgtataggtttgtgctgccctccaaagcgtttgcaagccctgtcgagaaccccgataactactgcttctgtaccgagaaaatcatatccaaaaactgcacctcttatggcgtgctggatatcagcaaatgcaaagagggccggcccgtgtatatcagcttgccccacttcctctacgcctcaccagacgtatcagagccaatagatgggctgaatccgaatgaagaagaacatcggacttatctcgacatcgagcccatcacaggcttcaccctccagttcgctaagagactgcaagttaatctgctcgtgaagccgtctgagaagatccaagtgcttaagaacctgaaaaggaattacatcgtgccaattctgtggcttaatgagacaggaacgattggcgatgaaaaggccaatatgtttcgctctcaagtcaccggcaagatcaaccttctggggctaatcgagatgatcttgctgtctgtcggcgtggtgatgtttgtggcgtttatgatatcctactgcgcctgcaggtccaaaaccatcaaatag

SEQ ID NO: 182140 - DNA, 1419 bp, synthetic construct
  misc_feature 1..1419: note = Description of Artificial Sequence: Synthetic coding sequence
  source 1..1419: mol_type = other DNA
atgggctgcgaccggaactgcggcctgatcgccggcgccgtgatcggtgctgtgctcgctgtgtttggtggtatcctcatgccggtgggggacttgctgattcagaagacaataaagaagcaggtagtgctcgaagaaggaaccattgccttcaaaaattgggtcaaaactggtaccgaagtttaccggcagttttggatcttcgacgttcagaatcctcaggaggtaatgatgaactcatcaaacatccaagtcaagcagcgggggccctacacttaccgggtgcgctttctcgcaaaggagaatgttacccaggacgcagaagacaataccgttagcttcttgcaaccaaacggcgccatctttgaaccctcgttaagtgttggcaccgaagccgataattttacagtattgaatctagcggtcgccgccgcgtcacacatctatcaaaatcaatttgtccagatgatccttaacagtttaatcaacaaaagcaagtcttctatgttccaagtgagaactcttcgggaactgctatggggataccgggacccgtttctgtcacttgtgccctaccccgtaaccaccacggtggggttattctacccatataacaatacagccgatggagtgtacaaggtgtttaacggcaaagacaacatctcaaaggtggccattattgatacttataaagggaaacgaaacttatcttactgggaaagccactgcgatatgattaacggtacagacgccgcatcatttcccccatttgtcgaaaaaagccaagtgctgcagttcttctcctctgacatctgccggagtatttacgccgtgttcgagtcagacgtgaatctgaagggcatacctgtatatcgcttcgtcctgccgagcaaggcgttcgcttcacccgtcgaaaatcctgacaactattgcttttgtactgagaaaatcatctcgaagaattgcacaagctacggagtacttgacatctctaaatgtaaagagggacggcccgtctatatttcactgccccacttcctgtatgccagtcctgatgtcagcgagcctatagacggacttaacccaaacgaagaggaacatcgtacctacctcgacatcgagccaatcactgggtttactctgcaattcgccaagcgcctgcaggtgaatctgctggtcaagccctccgagaagattcaggtcctgaaaaatctgaaacggaattacattgtgcctattttatggctcaacgagactggtactatcggcgacgaaaaagccaatatgtttcggagtcaggtgaccggaaaaatcaatttactagggctcatagaaatgatcctgctcagcgtcggtgtggtgatgtttgtcgccttcatgatctcatattgtgcctgccgcagcaagaccattaaatag

SEQ ID NO: 182141 - DNA, 282 bp, synthetic construct
  misc_feature 1..282: note = Description of Artificial Sequence: Synthetic coding sequence
  source 1..282: mol_type = other DNA
atgggctgcgaccggaactgcggcctgatcgccggcgccgtgatcggcgctgtgctcgccgtctttggcggaatcctgatgccagttggggacctgctgatccaaaagactattaaaaagcaggtggttctcgaagaagggactatcgcctttaagaattgggtgaagactggtactgaggtgtacagacagttttggattttcgacgtccagaatccccaggaggtgatgatgaactctagtaacattcaggtcaagcagagaggtccttacacctactag

SEQ ID NO: 182142 - DNA, 432 bp, synthetic construct
  misc_feature 1..432: note = Description of Artificial Sequence: Synthetic coding sequence
  source 1..432: mol_type = other DNA
atgggctgcgaccggaactgcggcctgatcgccggcgccgtgatcggggccgtgctggccgttttcggaggaatcctcatgcccgtgggagatctccttatacaaaagaccattaagaaacaggtggtgctcgaagaaggcaccatcgccttcaaaaactgggttaaaactggaaccgaggtttatcgccagttctggatttttgacgtgcagaatccccaagaggttatgatgaactctagcaatatccaggtgaaacagcggggaccatatacatacagagttaggtttctggccaaagaaaatgttactcaggacgccgaggataacacagtgagttttctacaacccaacggggccatcttcgagcctagcctgagcgtcggtacggaggcagataactttacggttctgaacttagccgttgcatag

SEQ ID NO: 182143 - DNA, 1419 bp, synthetic construct
  misc_feature 1..1419: note = Description of Artificial Sequence: Synthetic coding sequence
  source 1..1419: mol_type = other DNA
atgggctgcgaccggaactgcggcctgatcgccggcgccgtgatcggcgctgttctcgcagtctttggcgggatattgatgccagtaggtgaccttctcatccaaaagaccattaaaaaacaggtcgtacttgaagaggggaccatcgcgtttaagaactgggtaaagaccggcactgaggtataccgacagttctggatcttcgatgtgcagaacccacaggaggtcatgatgaattcatctaatattcaggtcaaacagagaggaccctacacttatcgggtacggtttctcgcgaaggaaaatgtcacccaggacgccgaggataataccgtctcatttcttcagccaaacggggccatttttgagccttctctgtcagtaggcacagaggctgataattttaccgtccttaatcttgccgtggcagccgccagccatatctatcaaaaccagttcgtgcagatgattcttaatagtctgatcaataaaagcaagagctcgatgtttcaggtccggactcttcgtgagctgttatggggctatagagacccctttctctccctcgtaccatatcctgtgactacaactgtgggattattctatccgtataataacacagcagacggtgtgtacaaggtgttcaatgggaaagataacatcagtaaggtagcaataatcgatacctacaaaggaaagcggaacctgtcatactgggagagtcactgcgacatgatcaatggaacggatgcagcttcctttcctccctttgttgaaaaaagccaggtgttgcaattttttagttccgacatctgtaggagcatttacgcagtttttgagagcgacgttaatctgaaaggcattccggtctatcgcttcgtgttgccatcaaaggcattcgcttctcccgtggaaaaccccgacaactactgcttctgcaccgagaaaatcatttccaaaaactgcacaagttacggcgttcttgacatctctaagtgcaaagaggggcggcccgtctacataagcttgcctcactttctgtacgcctcccctgacgtctcagaacccatcgacggcctcaaccctaatgaggaagagcaccgcacttacctcgacatcgagccaatcacagggttcactctgcagttcgctaaaagactgcaggtaaacctgctcgttaagccctccgaaaagatccaggttctgaaaaatctcaaacggaattacatcgtgcctattctctggctcaacgagaccggtaccattggggacgaaaaggctaacatgtttaggagccaggttaccggtaagataaaccttttaggcctgattgagatgattctactgtctgtgggcgtcgtgatgtttgttgcattcatgataagctattgcgcctgtagaagcaaaaccataaagtag

SEQ ID NO: 182144 - DNA, 198 bp, synthetic construct
  misc_feature 1..198: note = Description of Artificial Sequence: Synthetic coding sequence
  source 1..198: mol_type = other DNA
atgggctgcgaccggaactgcggcctgatcgccggcgccgtgatcggagccgtcctggctgtgtttggtgggatcttaatgcccgtgggggacctgcttattcagaaaaccattaagaaacaggtcgtcctggaagaaggaactatagcatttaaaaattgggtcaagactggtactgaggtctaccgtcagttctag

SEQ ID NO: 182145 - DNA, 1191 bp, synthetic construct
  misc_feature 1..1191: note = Description of Artificial Sequence: Synthetic coding sequence
  source 1..1191: mol_type = other DNA
atgatgaacagcagcaacatccaggtgaagcagcggggcccctacacatatagagtaaggtttctggctaaggaaaatgtcacacaggatgctgaggacaatacggtgtccttcctccagccaaacggcgcaatttttgagcccagtttgtcggtgggcaccgaggctgacaacttcactgttctcaaccttgcagtggcagcagctagccatatttatcaaaatcagttcgtccaaatgatcctgaattcgctgataaacaaatccaaaagctctatgttccaggtcagaacgctgagagaacttttgtggggatatcgcgacccgttcctatccctggtgccttatcctgtaaccacaacagtggggctgttctacccatacaacaataccgccgacggtgtgtacaaagtgttcaacggcaaggacaacataagcaaagtcgccataatcgacacctataaggggaaacgcaatctttcttactgggagagtcattgtgatatgatcaacggtacagacgcagcttcttttcccccctttgtggaaaaatcccaggtactccagttcttctccagcgatatttgccggagcatttatgccgtctttgaaagcgatgtgaacctgaaaggcatcccagtctacagatttgtgcttccatccaaagcctttgcgtctccagtggagaatcccgataactattgtttttgtacagagaaaattatcagtaaaaattgtacatcttatggagttctggatatcagtaagtgcaaagaagggaggcccgtctacatatccctcccgcacttcctgtacgcttctccagacgtttccgagcccatcgatggcttgaaccctaatgaagaggagcacagaacatacctcgacatcgaacccatcaccgggttcactcttcagttcgcaaaacggctgcaggtgaacctgcttgtgaaaccgtccgagaagattcaggtgttaaaaaacttaaaacggaattacattgttccaatcctatggctcaacgaaacgggaacaattggggacgagaaagcaaacatgttcagatcccaggtaaccggtaagataaatctccttggactcatcgagatgatcctactgagtgtaggcgtcgtcatgttcgtggccttcatgatctcttactgcgcatgtcggagcaagacaattaagtag

SEQ ID NO: 182146 - DNA, 1239 bp, synthetic construct
  misc_feature 1..1239: note = Description of Artificial Sequence: Synthetic coding sequence
  source 1..1239: mol_type = other DNA
atgggctgcgaccggaactgcggcctgatcgccggcgccgtgatcggagccgtccttgctgtttttgggggtattctgatgccagtgggcgatctccttattcagaaaaccattaagaaacaggtggtccttgaggagggcaccatagcatttaaaaactgggtgaaaactggaaccgaggtctatcgtcaattttggatattcgacgtacagaatccacaagaggtgatgatgaactcttctaatatccaggtgaaacagcggggcccctacacgtaccgtgtccgtttcttggccaaggagaatgtgacacaagacgctgaggacaatacagtgtcatttcttcagccaaatggcgcaatcttcgaaccttctctatctgttggaacagaggcggataactttaccgtcctaaacctggccgtggcctataacaacacagctgatggagtgtacaaggttttcaacggaaaggacaacatcagcaaagtggccatcatcgacacctataaagggaagaggaatctatcatactgggagtcgcattgtgatatgatcaacggcaccgacgctgccagtttcccccctttcgtggagaaaagccaggtactccagttcttttcaagtgacatttgtagatcaatttacgccgtattcgaatctgacgttaaccttaaaggcattcccgtttatagatttgtgctgccaagcaaggcattcgcatcacctgtagaaaatccagataattactgcttctgcaccgagaagataattagcaagaactgcacttcttacggggtattagacataagcaagtgtaaggagggaaggccagtgtacatttccctgcctcatttcctctatgcttcaccagacgtatctgagcctatagacggcctcaaccccaatgaagaagagcacaggacttatctggacatcgaaccaataaccggcttcacgcttcagttcgccaagagactacaagtcaacctgttagtgaagccctcagagaagattcaggtcctgaagaacctgaagcgtaattatatcgtgcccatcctttggctcaatgaaaccggtaccataggggatgaaaaggctaatatgtttagatcccaggtcaccggaaagattaatttattggggcttatcgagatgatcctgttatctgttggcgttgttatgttcgtcgccttcatgatctcatactgcgcctgtcggtcgaaaactattaaatag

SEQ ID NO: 182147 - DNA, 867 bp, synthetic construct
  misc_feature 1..867: note = Description of Artificial Sequence: Synthetic coding sequence
  source 1..867: mol_type = other DNA
atgggctgcgaccggaactgcggcctgatcgccggcgccgtgatcggggctgtactggcagtctttggaggtatcctgatgccagtgggggacttactcattcagaaaaccatcaagaagcaggtcgtcctcgaggagggaaccattgcgtttaaaaactgggtcaaaactggcactgaggtctatagacagttctggatcttcgatgttcagaaccctcaggaggtcatgatgaacagtagtaatatccaagtcaagcagagagggccatatacctatagagtgcggtttctcgccaaagagaatgtgacgcaggatgctgaagacaataccgtctcttttctgcaaccaaatggagctatcttcgaacccagccttagtgtgggcaccgaggccgataactttacagtcttgaatcttgccgttgctgcggcatcccatatttaccagaatcagttcgtacagatgatcttaaatagcctaataaacaaaagcaagtcaagtatgttccaggtcagaacgctacgggagctgctttggggttatcgggatcccttcctgtcccttgtgccctacccggttaccacaaccgtagggctcttttacccttataacaacaccgccgacggggtgtacaaagtgttcaacggaaaggacaatataagcaaggttgccatcatcgatacatacaaaggaaagagaaacctctcctactgggaatcacattgcgacatgataaacggcactgacgccgcttcctttcccccttttgtcgagaagagccaggtccttcagtttttttcttccgacatatgcagagagacctgcgtgcacttcacatccagctttagcgtgtgtaaaagctag

SEQ ID NO: 182148 - DNA, 846 bp, synthetic construct
  misc_feature 1..846: note = Description of Artificial Sequence: Synthetic coding sequence
  source 1..846: mol_type = other DNA
atgagcgcccaggagagctgcctgagcctgatcaagtacttcctgtttgttttcaacctttttttctttgtcctcggctcacttattttctgtttcggtatatggattctgatagacaagacatcttttgtgtcttttgtaggattagctttcgtgcccctgcagatttggagtaaagtgttggctatttctgggatcttcaccatgggcatcgcactcttggggtgcgtaggagctctgaaggagctaaggtgcctgctcgggttgtatttcggtatgttgctgctgcttttcgcaacccaaatcacactcgggattctaattagcactcagcgcgcccagctcgagaggtcgctgcgggatgttgtggaaaagacaatccaaaagtatgggacaaacccagaggagacagccgcagaggagtcctgggattatgttcagttccagctgcggtgttgtggatggcactatccacaggattggtttcaggtgctcattctgcgaggcaacggtagtgaggcccacagggttccgtgttcctgttacaatctgtcagcaaccaacgatagtaccatcctggacaaggtgatactaccacagctgtctcgtttgggccacctggccaggtctaggcactccgcagatatctgtgccgtccctgccgagtctcatatttatcgggagggttgcgcacaggggctgcagaagtggttgcacaacaatctgatcagtatagtgggcatctgtctcggcgtgggtctgctggaacttggcttcatgacactcagcattttcctgtgtcggaacctggatcacgtctacaacagactggccagatacaggtag

SEQ ID NO: 182149 - DNA, 471 bp, synthetic construct
  misc_feature 1..471: note = Description of Artificial Sequence: Synthetic coding sequence
  source 1..471: mol_type = other DNA
atgagcgcccaggagagctgcctgagcctgatcaagtacttcctgtttgtctttaacttatttttcttcgtcttagggagccttatattttgcttcgggatatggatcctcatcgacaaaacaagtttcgtctcattcgtcggactggcctttgtaccactgcagatatggtctaaggtgcttgcgatatccgggatctttacaatgggcatagctctacttggctgcgtgggggcattgaaggagctccggtgcctgttaggcctgtacttcggaatgcttctgctcctctttgccacccagatcacccttggcattttgatctcaactcagcgggcacagaaggatacacctacttggactaagggagaccgacacaaacagctccagcgtgaaacccacggcaagaagagggaacaggaaaaggaaatcgatgctctaaaggaagaaacagagacgtacgaaccttag

SEQ ID NO: 182150 - DNA, 642 bp, synthetic construct
  misc_feature 1..642: note = Description of Artificial Sequence: Synthetic coding sequence
  source 1..642: mol_type = other DNA
atgggcatcgccctgctgggctgcgtgggcgccctgaaggagctgaggtgcttgctgggactgtatttcggcatgctcctcctactatttgctacgcagatcaccttaggtatcctgatcagtactcagcgagcccagctggagagatcactgcgggacgtcgtggaaaaaacaatccagaaatacgggacaaatccagaggagactgccgcagaggagtcctgggattatgttcagtttcagctccgctgctgtggctggcattacccacaggactggtttcaagtgctcatcctgagaggaaatgggagtgaggcccaccgcgttccttgctcctgttacaatctgtctgccacaaatgacagcacaattcttgacaaggtgattctgcctcaattgtctcggctcggtcacctcgccaggagccgacacagcgctgacatctgcgcagtgcccgcggaaagtcatatctatcgggagggttgcgcccagggcctacaaaagtggctgcacaacaatctgatctctatcgtgggcatctgcctgggcgtgggcctgctcgagctgggttttatgacactgtccatcttcttgtgccgcaatctcgaccacgtgtataacaggcttgcaaggtaccggtag

SEQ ID NO: 182151 - DNA, 813 bp, synthetic construct
  misc_feature 1..813: note = Description of Artificial Sequence: Synthetic coding sequence
  source 1..813: mol_type = other DNA
atgagcgcccaggagagctgcctgagcctgatcaagtacttcctgtttgtcttcaatctctttttcttcgtgcttggcagcttgatcttttgcttcgggatttggattctgatagataaaacctcctttgtctcctttgttggtttagcattcgtgcctcttcaaatctggtcaaaagttctggccatctccggcatctttactatggggattgctcttttaggatgtgtcggggccctgaaggaacttaggtgtctgttgggattgtacttcggcatgctcctactcctgtttgcgactcagattacgttgggaattctgatctccactcaacgggcacaattagaaaggagtctgagagacgtggttgaaaagaccatccagaagtacggaacaaaccctgaggagaccgccgctgaggaatcttgggactatgtccagttccaattgcgatgttgtggttggcactacccgcaggattggttccaggtgctaatactgcggggaaacgggagtgaagcgcatagagtcccctgttcctgttacaacctgagtgctaccaatgacagtactattctcgataaggtaatactgccccagttgagcagattgggtcacctggcgcgatcccgacacagcgctgatatctgtgcggtcccggcggaatcccatatctatcgcgagggctgcgctcaaggactgcaaaagtggctgcataataacctgatctcaatcgtgggaatttgcctgggggtgggcttgttagaggtgatctggccgcggcctcatccacggtcggctctgaatccgtag

SEQ ID NO: 182152 - DNA, 1095 bp, synthetic construct
  misc_feature 1..1095: note = Description of Artificial Sequence: Synthetic coding sequence
  source 1..1095: mol_type = other DNA
atgccccacagctaccccgccctgagcgccgagcagaagaaggagctgagtgatattgccctgcgcatcgtcgcccctgggaaaggcatcttagccgctgacgagtctgtaggaagcatggccaagcgactcagccagatcggtgttgaaaataccgaagagaatcggagactgtaccgccaagtgttgtttagtgccgacgatagagttaagaagtgtattgggggtgtgatctttttccatgagaccctgtatcagaaagatgacaatggcgttcctttcgttaggacaatacaagataagggtattgtagttggtataaaggtggacaaaggggtggtaccactggcaggaacggatggggagactacaacacagggcttggatggcctgtccgaacgctgcgcccaatacaagaaagatggagcagatttcgctaagtggcgctgtgttttgaagattagcgagcggacaccttcggccctggccatacttgaaaatgcgaatgttctcgctaggtacgcttcaatttgccaacagaacggaatcgtccctatcgtggagcccgagattctccccgacggagatcatgatctcaagcggtgtcaatatgtgactgaaaaggtcctggccgccgtgtacaaggctctgtccgatcatcacgtgtaccttgagggaacactgctgaagcccaacatggttacccccggacatgcttgtcccatcaaatatactcccgaagagatcgccatggctactgtcacagccttgcggcggacagtgcccccagcggtgcccggggtcacatttctctcgggaggacaatctgaagaagaggcatctttcaatctgaatgctatcaataggtgtcctctgcctagaccttgggccttgacattcagctatggaagggccctccaggccagcgccctgaacgcatggcgcgggcagagggataacgccggcgctgcaactgaagagttcatcaaacgtgcggaagtgaacggtcttgctgcacaaggtaaatacgagggaagcggggaggatggaggcgctgcagcacaaagcctgtatattgctaaccatgcctattag

SEQ ID NO: 182153 - DNA, 483 bp, synthetic construct
  misc_feature 1..483: note = Description of Artificial Sequence: Synthetic coding sequence
  source 1..483: mol_type = other DNA
atggccaactgcgagttcagccccgtgagcggcgacaagccctgctgcagactgtctagaagggcccagctctgcctgggcgtctctatacttgtcctgatactggtcgtggttctggctgtggtagtcccccgctggcggcagcagtggagcggacccggaaccacaaaaaggtttccagagactgtactcgccaggtgtgtgaagtatacagaaatccaccccgagatgagacatgtggattgccagtccgtgtgggacgcctttaagggtgcctttatcagtaaacatccatgcaatatcaccgaggaagactatcaacccctgatgaagctgggcacacagacggttccctgtaataagaatgagaccatcaacctcgcccagacaggtgagagaactgctgccacaaccctgttccagtatagcggcaaaaggttcccagccggactgcagaagctgcctgtcatgtggtctatgtag

SEQ ID NO: 182154 - DNA, 624 bp, synthetic construct
  misc_feature 1..624: note = Description of Artificial Sequence: Synthetic coding sequence
  source 1..624: mol_type = other DNA
atgcagagcggcacccactggcgggtgctgggcctgtgcctgctgtcggtgggcgtctggggccaggacgggaatgaggaaatgggtggcatcactcagaccccttacaaggtgtcaatcagcgggaccaccgttatccttacctgtccacagtacccaggttcggagatcttgtggcagcacaacgataagaacataggcggcgacgaggacgacaagaacatcggctctgacgaagaccatttatccctgaaagagttttcagaacttgagcagtctggatactacgtttgctatccacgcggtagtaagcccgaggatgcaaacttctacctatacttacgtgcccgagtgtgcgaaaattgtatggagatggatgtaatgtccgtcgccacaattgtcatagttgacatttgcataacaggaggcctactcctgttagtgtattattggtcaaagaacaggaaggccaaagccaagcctgtgactcgaggtgccggggccgggggacgacagcggggccaaaataaagagagaccacccccagtcccaaatccagactacgaacccatccgcaaaggccaacgagacctgtactctggactgaatcagagaaggatatag

SEQ ID NO: 182155 - DNA, 606 bp, synthetic construct
  misc_feature 1..606: note = Description of Artificial Sequence: Synthetic coding sequence
  source 1..606: mol_type = other DNA
atgcagagcggcacccactggcgggtgctgggcctgtgcctgctgagcgttggtgtttggggccaggatggcaacgaggagatggcctacaaagtctccatcagtggaacaaccgtaatcctcacatgtccccaataccctggctcagagatcttgtggcagcacaacgataaaaacatcggaggagacgaggacgacaaaaatatcgggtctgatgaggatcacctgagcctgaaggagttctctgaactcgagcagtcaggttactatgtatgctaccctcgtggatctaagcccgaagacgcaaacttctacctgtacctgcgggcccgcgtgtgtgagaactgtatggagatggacgtgatgtccgtggctacgatcgtcatagttgacatatgtatcacaggtggcctcctgctactcgtgtactactggagcaaaaaccggaaagccaaagcaaaacctgtgaccaggggggctggagcaggggggcgacagaggggtcagaacaaagaaagacctccccccgtgccaaaccctgattacgagcccatccgcaagggtcagagggatttatactccggcctgaatcagcgccgaatctag

SEQ ID NO: 182156 - DNA, 237 bp, synthetic construct
  misc_feature 1..237: note = Description of Artificial Sequence: Synthetic coding sequence
  source 1..237: mol_type = other DNA
atgatcggcttcctgaccgaggacaagaagaagtggaacctgggctcaaatgcaaaagatccacgcggtatgtaccagtgcaagggctctcagaataagagcaagcctctgcaggtgtactaccgaacgtctgataagcaaaccctgcttccaaatgaccagctctaccagcctttgaaagacagagaagatgatcagtactcccacttgcagggaaaccaactccgcaggaattag

SEQ ID NO: 182157 - DNA, 549 bp, synthetic construct
  misc_feature 1..549: note = Description of Artificial Sequence: Synthetic coding sequence
  source 1..549: mol_type = other DNA
atggagcagggcaagggcctggccgtgctgatcctggccatcatcctattgcagggaaccctggctcaatctattaaaggcaatcacctcgtgaaggtctatgattatcaagaagatggaagtgtcctgctgacttgtgatgcagaggctaagaacattacctggttcaaggacggcaagatgatcggttttctcacagaggataagaaaaaatggaatctgggcagcaatgctaaagatccgcgaggcatgtaccagtgtaaaggcagccagaacaaatctaaaccactgcaggtgtattaccgtatgtgtcagaattgcatcgaactgaacgccgctacaatcagtggattcttatttgcagaaatcgtatcaatttttgtcctcgccgtaggagtctacttcatcgccggccaggacggggtgaggcagtctagagccagcgacaaacaaacactcttgcctaacgatcagctctatcaacccctcaaggatagggaggacgatcagtactctcatctacaaggcaaccagttgcgaaggaactag

SEQ ID NO: 182158 - DNA, 1200 bp, synthetic construct
  misc_feature 1..1200: note = Description of Artificial Sequence: Synthetic coding sequence
  source 1..1200: mol_type = other DNA
atggagccccccggccggcgggagtgccccttccccagctggcggttccccgggctgctgctggcggcaatggtattgctgctttactcattttccgatgcgtgcgaggagccaccaacctttgaggctatggaactgataggcaaaccgaagccgtactatgaaattggggaacgcgtagactataaatgtaaaaaggggtatttctatatcccgcctctggctacacacacaatttgtgaccgcaatcatacatggcttcccgttagtgacgacgcgtgttaccgcgaaacgtgcccttatatccgtgaccccctgaatgggcaagctgtccccgcgaacggcacttatgagttcggctaccaaatgcattttatttgtaacgaggggtactacttaatcggagaagagatcctgtactgcgaacttaaggggagtgtggccatttggagtggcaagccgcccatctgcgaaaaagtcctttgcacgcccccccctaagatcaagaatggtaaacataccttttcagaagtggaggtcttcgagtatctggacgccgttacgtattcttgtgaccctgctcctggtcccgaccccttcagcctaattggcgagtcaacaatttactgtggagacaacagtgtctggagccgggccgccccagaatgcaaggtggtgaagtgccggttccccgttgtcgaaaacggtaaacagatttcaggctttgggaagaaattttattacaaggccactgtgatgtttgaatgcgataaaggtttctaccttgatgggtccgacactatcgtgtgcgactccaacagcacctgggatccgcctgtgccaaagtgtctgaaggtgctgcccccaagctcaacgaagccccccgctctcagccactccgtgtccacatcctccaccacaaaaagccccgcctcctcagcttctgggcctagacctacctataaaccaccagtgagcaactacccaggttacccgaaaccagaggagggcatcctggactcactcgacgtgtgggtgatcgcggtgatcgtgattgctatcgttgtcggcgtggccgtcatatgcgtggtgccatatcgttatctgcagagaagaaaaaaaaaaggcaaggctgacggaggtgcggagtacgccacataccagactaaaagcaccacaccagctgaacagcgaggttag

SEQ ID NO: 182159 - DNA, 1050 bp, synthetic construct
  misc_feature 1..1050: note = Description of Artificial Sequence: Synthetic coding sequence
  source 1..1050: mol_type = other DNA
atggagccccccggccggcgggagtgccccttccccagctggcggtttcctggactcctgttggcagccatggtcctcctgctgtattctttctcagacgcctgtgaggaaccccctaccttcgaggcaatggaactgatcggcaagcccaagccatattacgaaattggggagcgcgtggattataagtgcaagaagggctacttctatattcccccactagccactcataccatctgcgacagaaaccacacttggcttcctgtgtcagacgacgcgtgttatcgcgaaacctgtccatacataagggatcctttaaatggacaggctgtgcctgccaacggtacctacgagttcggttaccagatgcactttatctgtaacgagggctactacctcattggcgaggaaattctctactgcgagctcaaggggtctgtggcaatctggagcggcaagcctcctatatgtgagaaggtgctgtgcacaccccctcctaagataaaaaatggaaaacataccttttctgaagtagaggttttcgagtatctggacgcagtcacgtattcatgcgaccctgcaccaggaccagaccccttctctctgattggggagtctactatctattgtggcgacaatagcgtgtggtctagagctgcgcctgagtgcaaggttgtgaaatgccgttttcctgttgtggaaaacggtaagcagatcagcggatttgggaagaagttttattacaaggccactgtgatgtttgaatgtgacaaagggttttacctcgatggctccgacacaattgtgtgtgattctaatagcacctgggacccacctgtgccaaagtgtctgaaaggaccacgaccaacgtacaagccacccgtgtctaattatcccggttaccccaaacccgaagaaggcattttagacagcctggatgtgtgggtaatagctgtgattgttattgctatcgggaagcagatggttgagttgaacatgccgctgactaggctgaatcaaccactgcagcagagccgggaggcagagtag

SEQ ID NO: 182160 - DNA, 1155 bp, synthetic construct
  misc_feature 1..1155: note = Description of Artificial Sequence: Synthetic coding sequence
  source 1..1155: mol_type = other DNA
atggagccccccggccggcgggagtgccccttccccagctggcggtttcccggcctgctgctggccgccatggttctgctgctgtactcattcagtgatgcctgcgaagagcctccaactttcgaggccatggaactgatcggcaagcccaaaccttactatgaaattggagagagggtagattataagtgcaagaaaggatacttttacatacctcctctcgctacacacacaatctgcgacagaaaccatacctggctgccagtgagtgatgacgcgtgctatcgtgaaacatgcccatacattcgggatccattaaatggccaggctgttccagccaatggcacgtacgagttcggttatcagatgcacttcatttgtaacgagggctattatctcatcggtgaagagattctctactgcgagctgaagggctccgtggcaatttggagcggaaaacccccaatctgcgaaaaggtcctgtgcacaccgcctcccaaaataaagaatggcaagcacacctttagcgaagttgaagtgtttgaatacttggacgccgtgacctatagctgtgacccagctcctggaccggatccattcagtttgatcggcgagtctactatttactgcggggataactccgtatggagccgggccgcgcccgaatgtaaggtggttaagtgtagattcccggtggtagaaaatggcaaacagatctccggttttgggaagaagttttactacaaggctacagtcatgtttgagtgcgacaagggtttttacctggacgggtcagatacaatagtgtgtgacagcaattctacgtgggacccacctgtacctaagtgtctaaaagtctcaacttccagcactactaaaagtcccgcaagtagtgcatctggccccagaccaacatataaacctcctgtgagtaattacccaggctacccaaagccagaggagggaatacttgacagccttgatgtgtgggtgatcgcagtaatagtgattgccattgtggtcggcgtggccgtcatttgcgtagtcccctataggtacctgcagcggcgaaagaagaagggcaaggcggacggcggtgccgaatatgccacctaccaaaccaagagcacaacacccgctgaacagagaggctag

SEQ ID NO: 182161 - DNA, 1110 bp, synthetic construct
  misc_feature 1..1110: note = Description of Artificial Sequence: Synthetic coding sequence
  source 1..1110: mol_type = other DNA
atggagccccccggccggcgggagtgccccttccccagctggcggttccctggcctgctcctggccgccatggtacttctcctctattctttttccgatgcgtgcgaggaaccccccacatttgaggccatggaactgatcggcaagcctaaaccttactacgaaatcggagagagagtggactataagtgcaaaaaagggtatttttacattcctccactcgctacccatacaatttgcgacaggaaccacacctggctgcctgtttcagatgatgcctgttatcgcgaaacttgtccctacatccgtgacccgctgaatggccaggccgtcccagcaaatggcacctacgaatttggatatcagatgcactttatctgcaacgaggggtactatcttatcggcgaggaaatcctgtactgcgaactcaaggggtcagtggcaatttggagtggcaagccgcctatatgtgagaaggtgctttgcactccaccacctaaaataaagaatggtaagcataccttctccgaagtggaggtcttcgagtacctagatgcggttacctattcctgtgaccctgccccaggtcccgatccttttagtctgatcggggaatccaccatatattgcggtgataatagcgtgtggtccagggcagcacccgagtgtaaagtggtaaaatgtagatttcccgtcgtcgaaaatggtaagcagatctccggcttcgggaagaaattctattacaaggcaacagtcatgtttgagtgcgacaagggattttatctggacggcagtgatacaattgtgtgcgactccaatagcacctgggatccacccgtgccaaagtgccttaaaggacctcgacccacatacaaaccgcccgtgtcaaattaccctggctacccaaagccagaagaaggaatcctcgactctctggacgtctgggtgattgccgtaatcgtaatagctattgtggtgggcgtggcggtaatatgcgtggtaccctacagatacctacagcgccgcaaaaagaagggcaaggccgatgggggcgccgagtacgctacctatcagacaaagtccaccacccctgccgagcagagaggatag

SEQ ID NO: 182162 - DNA, 1179 bp, synthetic construct
  misc_feature 1..1179: note = Description of Artificial Sequence: Synthetic coding sequence
  source 1..1179: mol_type = other DNA
atggagccccccggccggcgggagtgccccttccccagctggcggtttcccggactgctgctggcagcaatggtgttactcttgtacagcttttcagatgcgtgtgaagagccccccacctttgaggccatggaactaattgggaaacctaagccatactatgagattggcgaacgcgtggactataaatgcaaaaaaggctatttctacatcccgccgttagccacccacacgatctgcgatcgtaatcacacttggttaccagtctctgatgacgcctgctaccgcgaaacttgcccatacatcagagaccccttgaacgggcaggcggtccccgccaacgggacctacgagtttggctatcaaatgcacttcatatgtaatgagggatactatttaattggggaggagatcctgtactgcgaattgaaggggagcgtcgcgatctggagcggcaaaccgccaatctgtgagaaagttctctgtacccccccgcccaaaataaagaatggcaaacacaccttttcagaggtcgaggtgttcgaatacctcgacgctgtgacctatagctgcgaccccgcccctggccctgatcctttttcactcattggagagtccaccatctattgcggagataactcggtgtggtctagagccgctccggaatgcaaggtcgtcaagtgcagattcccagtggttgagaacggcaagcagatctccgggttcggtaagaagttttactacaaggcaactgtcatgttcgagtgcgataagggcttctaccttgatggatccgatactatagtttgcgattcaaacagcacctgggaccctccagtgccaaagtgtcttaaagtgctccctccctcaagcaccaagcccccagccctctcccacagtgtgtccacctcctcaactacgaagagtccagcatccagcgcctctggccctcgtccaacgtataagcctccagttagcaactaccccggttatcccaagcctgaggagggaatcctcgacagcttagacgtttgggtaattgccgtgatagtcatcgcaattgttgttggagtggccgttatttgcgttgttccttatcggtatctccagcgcaggaaaaagaaggggacatacctgactgacgagacccatcgagaggtcaaattcacaagcctctag

SEQ ID NO: 182163 - DNA, 1068 bp, synthetic construct
  misc_feature 1..1068: note = Description of Artificial Sequence: Synthetic coding sequence
  source 1..1068: mol_type = other DNA
atggagccccccggccggcgggagtgccccttccccagctggcggtttcccggcctcttgttggccgccatggtcctattactgtattccttctcagacgcttgtgaagaacccccgacatttgaggcaatggaactgatcggaaaacccaagccttactatgagatcggtgaacgtgttgattacaagtgcaaaaagggatacttttacatcccacctctggcaactcataccatttgtgaccgtaaccatacatggctcccagtaagcgatgacgcttgctatagggagacttgcccctacataagagatccactgaatggacaggccgtcccagccaacggaacttacgagttcggataccagatgcacttcatttgcaacgagggatactatctcatcggcgaggagattctgtactgcgaattgaaaggttctgttgccatttggtccgggaagccgcctatctgcgagaaggtcctgtgcacccccccccccaagatcaaaaatggaaagcacacattttctgaagtggaagtgtttgaatatctggacgcagtgacatatagttgtgaccctgcacccggtccagatcccttctctctgattggtgaatctactatttattgtggcgacaacagtgtgtggtctcgcgctgcacccgaatgtaaagtggtgaagtgtaggtttccagtggtggaaaacggaaagcaaatttctgggttcggaaaaaagttctactataaggcgacagttatgttcgagtgcgataaaggattttacttggatggaagtgacactatcgtgtgtgactccaatagcacgtgggatcccccggtgcccaaatgtctgaaaggttaccccaagcccgaggaaggaattctggacagcctggacgtttgggtcatcgccgtcatcgtgatcgctatcgtggtgggtgtggctgtgatctgtgtcgtgccctatcgctacctccagcgcagaaagaaaaaagggaaagccgacggcggcgccgaatatgctacataccagacgaagagtacgacccccgccgagcagagaggttag

SEQ ID NO: 182164 - DNA, 1158 bp, synthetic construct
  misc_feature 1..1158: note = Description of Artificial Sequence: Synthetic coding sequence
  source 1..1158: mol_type = other DNA
atggagccccccggccggcgggagtgccccttccccagctggcggtttccagggctgctcttggcagcaatggtcctgttactgtactccttctcggacgcctgcgaggaaccgccgacttttgaggctatggagttaattggtaagcccaaaccatactatgagataggagagcgagttgattacaaatgcaaaaagggatatttttacatacctccactcgccacccataccatttgcgacaggaaccatacttggctgccggtttcagatgacgcttgctatcgagaaacttgtccgtacatccgtgatcctctcaatgggcaggccgtgcccgccaacggcacttatgagttcggataccagatgcatttcatctgcaacgaaggctattacctgatcggcgaagaaatcctctactgcgaattgaagggttctgtcgccatatggtcaggaaagcccccaatctgcgagaaagtactatgtacgcccccaccaaaaatcaaaaatggaaagcacaccttcagcgaagttgaagtgtttgagtacctcgacgccgttacctatagctgtgaccccgctcccgggcctgacccctttagtcttatcggagagagcactatctattgcggcgacaatagcgtttggtcccgcgctgcccccgaatgcaaggttgtcaaatgtcgatttcctgtcgtggaaaacggtaaacaaattagcggattcggcaaaaagttctattataaggctactgtgatgtttgagtgtgataaaggcttctacctcgatggatcagacaccattgtgtgcgattccaacagtacatgggatccccccgttcctaaatgccttaaggtgctccccccttccagcaccaaaccccctgccctctctcatagcgtttctacctccagtacaactaagtccccagcttcgagcgctagcggttatcccaaacctgaggaagggatcctggattctcttgacgtgtgggtgattgccgtgatcgttattgctatagtcgtgggagtggccgtcatctgtgttgtgccataccgttacttgcagaggcggaagaaaaaaggcaaagccgacggcggagctgagtatgcgacctatcaaaccaaatctacgactccggctgagcaacgcggctag

SEQ ID NO: 182165 - DNA, 1089 bp, synthetic construct
  misc_feature 1..1089: note = Description of Artificial Sequence: Synthetic coding sequence
  source 1..1089: mol_type = other DNA
atggagccccccggccggcgggagtgccccttccccagctggcggttcccaggcctgctgttagccgcgatggtcctgcttctatattcctttagcgatgcctgtgaggaacccccaacgttcgaagctatggagttgatcggcaaaccgaaaccttattacgagattggtgagcgcgtggactataaatgtaaaaaaggatatttctacatacctccccttgcaacgcacacgatttgtgaccggaaccacacctggttgcctgtgtcagatgacgcatgttatcgtgaaacttgcccatatatcagagatccactcaatggacaagccgtacctgcaaacggcacctacgagttcggataccagatgcacttcatttgtaacgaaggctattacttgattggcgaagagatcttgtactgcgagttaaagggcagtgtggccatctggagcggaaagcctcctatttgcgagaaggtcttatgcacaccccctccgaaaattaaaaacggcaagcatacgttcagtgaagtcgaagtcttcgaatatctcgatgcagtgacatactcttgtgacccggcgccaggcccagaccccttctcactaatcggagaatcgacaatttactgcggtgataatagcgtgtggagcagagccgctccagaatgtaaggtagtaaagtgtaggtttccagtcgtggagaacggcaagcagatttcaggtttcggcaaaaaattctattacaaagcaactgttatgttcgaatgtgataagggcttctatctggacggtagtgatacgattgtgtgcgactcaaatagcacgtgggaccctcccgtgcctaagtgcctcaaggggcctcggcccacttacaagcctcccgtcagcaattatccagggtatcctaaacccgaggagggcattctggactcactggacgtgtgggtgattgccgtcattgtgatcgcaatcgtggtcggtgtcgctgtcatatgcgtggtgccatacaggtatctgcaaaggagaaaaaagaagggaacataccttaccgacgagacccatcgagaggtcaaatttacaagcctgtag

SEQ ID NO: 182166 - DNA, 1134 bp, synthetic construct
  misc_feature 1..1134: note = Description of Artificial Sequence: Synthetic coding sequence
  source 1..1134: mol_type = other DNA
atggagccccccggccggcgggagtgccccttccccagctggcggttcccagggctcctgttggctgcaatggtgttactcttgtactccttcagcgacgcatgcgaagaacccccgacctttgaagccatggagctgatcgggaagcctaagccctactacgagattggagaaagagtagactacaagtgcaagaagggatacttttacattccacctttggctacccataccatctgtgacaggaatcacacatggctgcccgtttccgacgacgcatgttacagagaaacttgcccatatatccgggatccacttaacgggcaagccgtcccagccaatggcacctatgagtttggctatcagatgcattttatctgtaacgaaggctactatcttatcggcgaggaaatcttatactgtgaactaaagggcagcgtggctatctggagtggcaagcctccaatatgtgagaaggtgttgtgtactccccctcctaagatcaaaaacgggaagcatacattctccgaagtagaagtctttgagtatcttgatgcagtgacatatagctgtgaccctgctccgggacctgaccctttctccctgatcggcgaaagcactatctactgcggtgacaactccgtctggtccagagccgcgccggaatgtaaagttgttaaatgtagattccctgtggtggagaacgggaaacagatctctggatttggaaagaagttctactataaggctactgtcatgtttgagtgcgacaagggattctacctagatggtagtgacactattgtctgtgacagtaactccacctgggatccaccagttcccaagtgcctcaaagtgagcacctcctcaactaccaaatcccccgcctccagcgcaagcggacctagaccaacatataagccacccgtgagtaactaccccggctatcctaagcccgaagaggggatccttgatagccttgacgtgtgggtcattgctgtaattgttatcgctattgttgttggtgttgcagtgatatgcgtggtgccttacagatacctgcagagaagaaaaaagaaggggacgtaccttactgacgagacgcaccgcgaggtgaagttcacctctctgtag

SEQ ID NO: 182167 - DNA, 1011 bp, synthetic construct
  misc_feature 1..1011: note = Description of Artificial Sequence: Synthetic coding sequence
  source 1..1011: mol_type = other DNA
atggagccccccggccggcgggagtgccccttccccagctggcggtttcctgggctgctcctggccgcgatggtactgctgttgtattcattcagcggcgaaacatgtccttacatccgagaccctcttaatgggcaagccgtcccagccaacgggacctacgaattcggctaccaaatgcacttcatctgcaacgaggggtattacctaatcggagaagaaatactgtactgtgaacttaaaggtagcgtggccatctggtccggtaagccacccatttgtgaaaaggttttgtgcactccaccacccaaaatcaagaatggaaaacacacattctccgaggtcgaagtgtttgagtacctggacgccgtcacttattcttgcgatcccgcccccgggcctgatcctttctccctcattggcgaatccacaatttactgtggggacaatagcgtctggtcacgagctgccccagaatgcaaggtcgttaagtgtcgatttccagtcgtggaaaatggcaaacaaatatccggcttcggtaaaaaattctattataaagccacggtaatgtttgagtgtgataaaggattctacctcgacggatccgacaccatcgtatgcgactcgaattccacttgggacccacccgttccaaaatgcctcaaagtgctaccaccctcctctaccaagccaccggccttatcacactcggtgtcaactagtagcacgaccaaaagcccagctagcagtgcgagcggtcctcggccaacgtataagcccccagtaagtaattatccaggctatcctaaacccgaggaaggaatcctggattctctcgacgtgtgggtgatcgcagtgatcgtgatcgctatcgtggttggtgttgcggtgatttgcgtggtgccttaccgttatctgcagaggcggaagaaaaaaggtaaggctgacgggggcgccgagtatgcaacctatcagactaagtccacaactcccgcagaacaacggggctag

SEQ ID NO: 182168 - DNA, 1095 bp, synthetic construct
  misc_feature 1..1095: note = Description of Artificial Sequence: Synthetic coding sequence
  source 1..1095: mol_type = other DNA
atggagccccccggccggcgggagtgccccttccccagctggcggttcccaggcctccttctggcagccatggtactcctgttatattcatttagcgatgcatgcgaggagcctccaacttttgaagccatggagctgattggcaagccaaagccttactatgagattggcgaacgtgttgattataagtgcaagaaagggtacttctacattccacctctggcgacacacactatctgcgaccggaatcatacatggttaccggtgagcgatgacgcttgttaccgcgaaacctgtccatacattcgggatcccttaaacgggcaggcggttccagccaacggtacttatgagttcgggtatcagatgcactttatttgtaacgagggctactatttgatcggagaagaaatactgtactgcgaattgaaggggtctgtggctatctggtccggaaagccccctatttgtgagaaagtgctctgcacaccccctcctaagattaagaacggaaaacacacatttagcgaagtggaagtgtttgagtacctcgacgccgtgacttactcatgcgatccagcccccggcccggacccgttctctctgatcggcgaaagcacaatctattgcggcgacaacagcgtgtggtcacgggcagcacccgagtgcaaggtcgtgaaatgccgtttcccagttgtcgagaacgggaaacaaattagcggtttcggcaaaaaattctactacaaggcaacagtgatgttcgagtgtgacaagggattctatctggatgggtcagacactattgtttgcgattccaatagcacttgggatcctcccgtgcctaagtgcctaaaagtctctacttcctccacaactaaaagtccggctagctcagcatccggccccaggcctacatataaaccgccagtgtcaaattacccaggctatccaaaacctgaagaaggcatccttgactccctggacgtgtgggtgattgcagtcattgttattgctatcggaaaacagatggttgagttaaacatgcctctgaccaggctgaaccaacccttacaacagtcacgggaggcggaatag

SEQ ID NO: 182169 - DNA, 1113 bp, synthetic construct
  misc_feature 1..1113: note = Description of Artificial Sequence: Synthetic coding sequence
  source 1..1113: mol_type = other DNA
atggagccccccggccggcgggagtgccccttccccagctggcggttccccggtctgctgctggccgctatggtcctcttactttactctttttctgatgcatgtgaagaaccccccacatttgaagctatggagctgatagggaaaccgaagccctactacgagatcggcgagagggtcgactacaaatgtaaaaagggttatttctatatcccgcctctcgcgactcacactatttgtgacaggaaccacacctggctgcctgtgtcagacgatgcttgctatcgtgaaacatgcccatacatcagggaccccttaaacgggcaggccgtgcccgctaacggaacatacgagtttggctatcagatgcattttatttgtaacgaggggtattacctaattggcgaagagatcctatactgtgagttaaaaggttcagtcgctatctggtccggaaagcccccaatttgcgagaaagtgctgtgcacaccacctcctaagattaaaaacgggaagcatacctttagtgaggtggaggtgttcgaatatctggacgctgtaacctactcctgcgatccggcccctgggcctgatcccttctcgttaattggggaaagtaccatatattgcggggacaactctgtgtggagtagagccgctccagagtgcaaggtagttaaatgccggtttccagtggtggaaaatgggaagcaaatctccggctttgggaagaaattctactataaggcaacagtgatgttcgaatgtgataagggtttctatctcgacggctctgacactattgtgtgtgactcgaactcaacatgggacccgccagtcccgaaatgtttaaaggtgtcgacttcatcgacaaccaagtcccctgccagttccgcatccggataccctaagccggaggaagggattcttgactctctggacgtctgggtgattgcagtgatagttattgctatcgtggtgggcgtcgcggtgatctgtgtggtcccttaccggtacctacaacggagaaagaagaaggggaaagccgatggcggggccgagtatgccacgtatcagactaagtcgacaactcctgcagaacagcggggctag

SEQ ID NO: 182170 - DNA, 510 bp, synthetic construct
  misc_feature 1..510: note = Description of Artificial Sequence: Synthetic coding sequence
  source 1..510: mol_type = other DNA
atgtgcagccggggctgggacagctgcctggccctggagctgctgctgctgcctctgtcgctgctagtgacctctatccaggggcacctggtgcatatgacagtagtgtcaggctcaaacgtgactctcaatatttctgaaagcctgcccgagaattacaaacagctaacctggttctacaccttcgatcaaaagatagttgagtgggattcacggaagtccaaatatttcgagtctaagttcaaggggcgcgtgagactcgacccccaatccggagcactgtacatttccaaagtgcagaaagaggacaactccacatacattatgcgggtgctaaaaaaaacgggaaatgagcaggaatggaagatcaagctacaggtgctaggggagtctggagagcctaaatctaagtcaccactccagtggccccagatggaccactgcagggccagctgggaggcctggggaaccctaggagaggaagagcgcaagacctctggccaggtgtag

SEQ ID NO: 182171 - DNA, 732 bp, synthetic construct
  misc_feature 1..732: note = Description of Artificial Sequence: Synthetic coding sequence
  source 1..732: mol_type = other DNA
atgtgcagccggggctgggacagctgcctggccctggagctgctgttgctaccactgagtctgctagtgactagtatccaaggacacctggttcatatgacggtcgtgtcaggtagcaacgtcactctgaatatctccgagagtctgcccgagaactataagcaactaacttggttctatacatttgaccagaagatcgtagaatgggatagccgcaagtctaaatatttcgagtccaaatttaaagggagggtgcggctcgacccacaatctggggccttgtacatttccaaggtgcagaaagaagacaattccacatacatcatgagagttttgaaaaagacgggcaatgaacaggagtggaagatcaaattgcaggtgttggatccggtccctaaacctgttataaagattgaaaagattgaggatatggatgacaattgttacctgaaattatcatgtgttatccccggggaatcagtcaactatacatggtacggcgataagcgcccgttcccgaaagagctgcaaaattctgttctcgaaactaccctcatgcctcacaactatagtcggtgctatacttgtcaggtgtccaatagcgtgtcctctaagaacggcaccgtatgtctgagtcccccgtgtacactagctcgcagttttggtgttgaatggatcgctagctggctcgtggttaccgtgcctaccattctgggactgctgctcacctag

SEQ ID NO: 182172 - DNA, 1044 bp, synthetic construct
  misc_feature 1..1044: note = Description of Artificial Sequence: Synthetic coding sequence
  source 1..1044: mol_type = other DNA
atggccctgctgttcagcctgatcctggccatctgcacccggcccggctttctagcttcgcctagcggtgttaggctggttgggggcttacaccggtgcgaaggccgggtcgaggtggagcagaagggccaatggggcacggtgtgtgacgacgggtgggacatcaaggacgtggcggtgctatgcagggagctgggctgcggcgccgcctctggtactccctcagggatcctgtacgagcctcccgccgagaaagagcaaaaggtgcttatccagtctgtttcgtgtaccggtaccgaggatacgctggctcagtgtgagcaagaagaagtgtatgactgtagccacgacgaagatgctggtgccagttgtgaaaacccggagagctctttcagtccagtgccagaaggcgtgcggctcgctgacggtcctggccactgcaaaggaagggtcgaggtcaaacaccaaaatcagtggtacacggtctgccagactggatggagcctgagggctgccaaggtcgtctgtaggcagttgggctgtggtcgggctgtactgacacagaagaggtgcaataagcacgcatacggacggaagccaatctggctctcccagatgagctgttccggtcgggaggcgactctgcaggactgtccttccggcccttggggtaaaaacacctgcaaccacgatgaagacacttgggtcgagtgtgaagacccattcgatttacgcctagtaggcggagataatttgtgctctggccggttggaagtgctccacaagggcgtgtgggggtctgtctgtgacgacaactggggagagaaggaggaccaggtggtttgtaagcagctgggatgcggaaagtctctgtccccttcgttccgcgatcggaagtgttacggccctggagttgggagaatctggctggacaatgtgagatgttccggagaggaacagagcttggagcagtgccagcacagattctggggtttccatgattgtacccaccaggaggacgtggcagtgatctgctccggatag

SEQ ID NO: 182173 - DNA, 660 bp, synthetic construct
  misc_feature 1..660: note = Description of Artificial Sequence: Synthetic coding sequence
  source 1..660: mol_type = other DNA
atgggcatgagcagcctgaagctgctgaagtacgtgctgttcttcttcaatctcctcttttggatttgtggctgctgcattttagggttcgggatttaccttcttatacataataatttcggcgtgctgttccacaatctgccttcactgacactgggaaatgtctttgtcatcgtgggctccataatcatggttgtagccttcctcggctgtatgggctctataaaggaaaacaaatgcttgctgatgtccttcttcattctcctgctgatcatcttgcttgccgaggtgacactcgccatccttctttttgtctacgagcaaaagttgaacgagtatgtggcgaaaggcttgaccgactccatccataggtaccacagcgataacagcactaaagccgcttgggactctattcaatctttccttcaatgttgtggcataaacggaacctcggactggacatccggcccccctgctagctgtccctctgatagaaaggtcgaaggctgctacgccaaagcccgcttgtggttccacagtaacttcttgtatattggcattataactatttgcgtgtgtgtcatcgaagtgctgggaatgagtttcgccctgactctgaattgccaaattgacaagacatcccagaccatcggcttatag

SEQ ID NO: 182174 - DNA, 483 bp, synthetic construct
  misc_feature 1..483: note = Description of Artificial Sequence: Synthetic coding sequence
  source 1..483: mol_type = other DNA
atgggcatgagcagcctgaagctgctgaagtacgtgctgttcttctttaatctcctgttctggatttgcggctgctgtattttagggttcggaatctatctgttaattcataataacttcggagtgctcttccacaatctgccaagtctgacactcggcaatgtgtttgtgatcgtgggcagcatcatcatggttgtggcattcctgggctgtatggggtccattaaggagaacaagtgccttctgatgagtttctttattcttctcctgattatcctgctggctgaagtgacgttggctatactgctattcgtctatgagcagaaaggttgttacgctaaggctcgattatggttccattcgaactttctgtatatcggcatcattaccatctgtgtttgtgtgattgaggtgctggggatgtctttcgctcttaccctcaactgtcaaatcgacaagactagccagactatcggcctatag

SEQ ID NO: 182175 - DNA, 1323 bp, synthetic construct
  misc_feature 1..1323: note = Description of Artificial Sequence: Synthetic coding sequence
  source 1..1323: mol_type = other DNA
atgaccgtggcccggcccagcgtgcccgccgccctgcccctgctgggcgaactgccacgactcttgctgctcgtcctgctgtgccttcccgccgtatggggagattgtggattgccaccagacgtgcccaatgcccagccggccctcgagggcaggactagttttcctgaggataccgttataacctataaatgcgaagagtctttcgtcaagatccccggcgagaaggattccgtgatctgtctgaagggcagccagtggagcgacatcgaggaattttgcaataggtcatgtgaggtgcctacccgactcaattctgcctcgctgaaacagccctacattacccagaattactttccagtcgggactgtggttgaatatgagtgcaggccagggtacaggagagaaccttccctatctccaaaattaacatgtctccaaaatctaaagtggtcgactgccgtagaattttgtaagaaaaaatcatgcccgaacccaggcgagattcgaaatggccagattgacgtgcccggaggtattctctttggagccaccattagctttagttgtaacacaggctataaattattcggctcaacgtccagcttttgcctcataagcggcagctcggtgcagtggtctgatccactgcctgagtgcagggagatttactgcccagcccctccccagatcgacaacggaattatacagggcgagcgcgaccattacgggtaccggcagtccgtcacgtacgcctgcaacaaaggcttcactatgattggtgaacacagtatctactgcaccgtcaataacgacgagggcgagtggagcggccctcctccagagtgccggggtaagtcgctaacatctaaagtgccgcccacggttcagaagccgaccactgtcaatgtacctacgactgaggtctcgccaactagtcagaagacaactacaaagaccaccacccccaatgcgcaggctacccgcagcacgcctgtgagtcggacaactaaacacttccatgagaccacgccaaataaaggctcaggtaccacctctggaaccacacgcttgttatctggtagccgccccgtcactcaggcggggatgcgctggtgcgatcggagtagcctacaaagtcggactccgggatttaagcgctcattccattttagtctgccatcttcttggtactatcgggcacatgtctttcatgtggataggtttgcttgggatgctagtaaccacggactggctgatctcgctaaggaggagttaagaagaaagtatacccaagtgtaccggctgttcctggtatcttag

SEQ ID NO: 182176 - DNA, 1095 bp, synthetic construct
  misc_feature 1..1095: note = Description of Artificial Sequence: Synthetic coding sequence
  source 1..1095: mol_type = other DNA
atgaccgtggcccggcccagcgtgcccgccgccctgcccctgctgggagagctcccccgcctgttgctactagtgctgctgtgcctgccagctgtgtggggagactgcgggttaccaccggatgtaccaaacgcacagccagcactcgaaggaaggacctcatttccggaggatacggtcatcacatacaagtgcgaggagagtttcgtgaagattcctggagagaaagacagcgtgatttgccttaaggggtcccagtggtctgacatcgaggaattttgtaaccgctcatgtgaggtccctacaaggttgaactctgccagcttaaaacaaccatacattacccaaaactacttccctgtgggcaccgtcgtggaatacgagtgccggccaggctatagacgcgaaccctcattgtctccaaagctgacttgcctgcagaacttgaagtggagcaccgccgtcgagttctgtaagaagaaatcctgccctaatcccggagagattcgtaacggtcagatcgacgtcccaggaggaatcctgtttggtgctaccattagtttttcttgcaacaccggctataagcttttcggtagtaccagcagcttctgtcttatctctggttctagtgtccaatggtctgacccgctccctgaatgtcgtgaaatctactgccccgctcctccccagattgataatgggatcatccagggtgaaagggatcactatggctaccgccagagtgtgacttatgcatgcaacaagggtttcacgatgattggggaacattcaatttattgcacggtgaacaacgatgaaggtgagtggagtgggccaccccccgaatgcagaggcaaatcactgaccagcaaggtgccgccaacggtccagaagccgactaccgtgaatgtcccgaccacggaagtgagtcctacatctcagaaaaccaccactaaaacaacaacaccaaatgcacaggcaacacgcagcactcccgtttcgaggaccactaagcacttccatgaaactacaccgaataagggatctggaaccacgtccggtactaccaggttattgagcgtgctattcatgtag

SEQ ID NO: 182177 - DNA, 1146 bp, synthetic construct
  misc_feature 1..1146: note = Description of Artificial Sequence: Synthetic coding sequence
  source 1..1146: mol_type = other DNA
atgaccgtggcccggcccagcgtgcccgccgccctgcccctgctgggagagctgccacggctcttgctcctcgtcctcctctgccttccagctgtatggggtgattgcggcctacccccagatgtgcccaatgcccaacccgccctggagggccgtacctcctttcccgaggatacagttatcacctacaagtgtgaggagtcattcgtaaagattcccggggagaaggactctgtaatctgcctcaaaggaagccaatggtccgacattgaggagttttgcaacaggtcatgtgaggtccctaccaggctgaactcggcttctctaaaacaaccttacattacacaaaattacttccccgtcgggaccgttgtggagtacgaatgtcggcccggctaccggagagagccttcactgtcccccaagttgacttgtctccagaatctgaaatggagcacagccgtcgagttttgtaagaaaaagtcctgccctaatcccggggaaatcaggaatggccagatagatgttcctgggggaattctgttcggggcgaccatctcattttcgtgtaacacgggttataagctgttcggctcaacatcctccttctgcctgatttcaggaagcagtgttcagtggagtgaccccttgccagagtgccgcgagatctactgcccagccccgcctcagatagacaacggcatcatccagggcgagagggaccattacgggtaccgccagtccgtgacatacgcttgcaacaaaggcttcacaatgatcggcgaacatagcatatattgcactgtgaataacgatgaaggtgagtggtccgggccaccgccggagtgccgcggcaagtcactcacaagtaaggtgccacctaccgtgcagaaacccactactgtgaacgtcccgacgactgaggtttctcctacgtcgcagaagactaccaccaagacaaccaccccaaatgctcaggctactcgctctaccccagttagccggacgaccaaacactttcacgaaacaacacctaacaaaggatccggcactacctccggcacaacacggctgctctccggacacacatgttttacactgaccggactattaggtacccttgtcaccatgggcttgctgacatag

SEQ ID NO: 182178 - DNA, 1320 bp, synthetic construct
  misc_feature 1..1320: note = Description of Artificial Sequence: Synthetic coding sequence
  source 1..1320: mol_type = other DNA
atgaccgtggcccggcccagcgtgcccgccgccctgcccctgctgggcgagctccctcgcctgctcctgctggtgcttctgtgcctgcctgcggtgtggggggactgcggactaccgcccgatgtcccaaatgcccagccggccctggaaggaagaacatcatttcccgaagataccgttatcacatataagtgtgaagaaagttttgttaagatcccaggggagaaggactccgtgatttgtcttaagggcagccagtggagtgacattgaggaattctgtaatagaagttgtgaagtgcccacccgcctgaattccgcaagcctcaagcaaccctacatcacacagaattactttcccgttgggacagtggttgaatacgagtgtagaccaggctaccggagggagccgtcactaagccccaagctgacttgcctgcagaacctgaagtggagcacggctgttgagttttgcaagaaaaaatcatgtccaaacccaggcgaaatccgtaatgggcagattgatgtcccagggggcattctcttcggggcaaccatttcattttcatgcaacactggatataagttgtttggctcaacctcatcgttttgtctgatttccggcagtagcgtccaatggtccgaccctctgcccgagtgtcgggaaatatattgccctgctccgccacagatcgataacggaattatacaaggagagcgggaccactatggataccgtcagagcgtgacctatgcatgcaataaagggtttacaatgatcggcgagcacagcatctactgcaccgttaataatgatgagggggagtggagcggtcctccccccgagtgtaggggaaagagcctcacttcgaaggtgccgccaaccgtgcagaagccaaccactgtgaacgtgcctaccacagaggtcagcccgaccagtcaaaagacaacaactaaaacgaccactcccaatgctcaggcaactcgctccacaccagtttccagaacgacaaagcactttcatgaaaccacacctaataaaggttccggcaccacaagcgggaccactcggctcctgtctgagaccgtgttccatcgggttatccaggatggcctggacctgctggcttctcgctccgcgtgcctggggctcccgaagtgttgggactaccggagagagcccccacatttggccagagctcacgtgtttcacgtggacagattcgcttgggacgctagcaatcatggtttagccgacctagccaaagaggaactgcgtcgtaagtacacccaggtgtaccgtctgtttctcgtgagctag

SEQ ID NO: 182179 - DNA, 390 bp, synthetic construct
  misc_feature 1..390: note = Description of Artificial Sequence: Synthetic coding sequence
  source 1..390: mol_type = other DNA
atgaccgtggcccggcccagcgtgcccgccgccctgcccctgctgggcgaactaccgcgcctgttacttttggtgttattatgtctgccggcagtttggggtgactgcggccttccgccggatgtgccaaatgcccagccagctctcgagggccgtacctctttccctgaagataccgtcatcacttacaaatgtgaggagtcctttgtaaagatcccgggggagaaggattctgtcatttgtttgaaggggtcccagtggtccgatatcgaggagttctgtaatcgttcctgcgaggtacccacacggctacaaaaacggactttttctattaccaaaactaacctgccgtcggagtttaagatggtccacagcagcaggattctatag

SEQ ID NO: 182180 - DNA, 1155 bp, synthetic construct
  misc_feature 1..1155: note = Description of Artificial Sequence: Synthetic coding sequence
  source 1..1155: mol_type = other DNA
atgaccgtggcccggcccagcgtgcccgccgccctgcccctgctgggtgagcttccgcgtctgctgctcttggtcctgttatgtttacctgctgtgtggggggattgcggacttcctccggatgtccctaatgcgcagcccgcgttggagggcagaacctcatttcctgaagacaccgtgatcacttacaaatgcgaggaaagcttcgtcaagattccaggagaaaaggatagtgtgatctgtctgaagggcagtcagtggagcgacatagaggagttttgcaataggtcttgcgaggtgcctacgaggctaaattcagcttcgctgaagcagccctacatcacgcaaaactacttcccggtgggaacagtggtggagtacgaatgtagacctggttatcgtcgagagcccagcttgtcccccaagctcacctgcttacagaatctgaaatggagcacagcggttgaattttgtaagaagaagagctgccctaatccgggcgagatccgcaatggacagattgatgtccctgggggtattctctttggggctacgatctcattttcatgcaacacggggtacaagctgtttgggagtacatccagcttttgcctaatttccgggagtagtgtgcagtggtcggacccactgcccgaatgtcgggaaatttactgtcctgcacccccacaaatcgacaacggcattattcagggcgagcgggaccattacggctaccgacaaagtgttacgtacgcatgcaataagggcttcactatgatcggagagcatagcatctactgtactgtgaataacgatgaaggagagtggtccggtccgccacccgagtgccgcgggaaatctctgacctctaaagtaccacctacggtacaaaaaccaaccactgtcaacgtccccacaacagaagtgagcccgaccagccaaaaaacaacaacaaagacgactacgcccaatgcccaagcaaccaggagcactcccgtcagcagaaccactaagcattttcatgagacaactcccaataaagggtccggcacaacatcagggacaactaggctgttgtccgcactccaggtgaggccattcgaagtctctggatcctctcacatttcaagcaaaaagatgatgtgcattctgtag

SEQ ID NO: 182181 - DNA, 954 bp, synthetic construct
  misc_feature 1..954: note = Description of Artificial Sequence: Synthetic coding sequence
  source 1..954: mol_type = other DNA
atgaccgtggcccggcccagcgtgcccgccgccctgcccctgctgggtgaactccctcgattgctgttactggtgctactctgcctgccggctgtctggggggactgcgggctacccccagatgtaccgaatgcccaaccagcgctagagggcagaacctctttccccgaagataccgttataacctacaaatgcgaggagagtttcgtcaagatcccaggcgaaaaggattcagtaatatgtttgaagggcagtcagtggagtgatatagaagagttctgtaatcaaaagagttgtcctaatcccggcgagatccgcaatggccaaatcgacgtacctggggggattctgttcggagctacaatttccttctcctgtaacacaggttacaagctgttcggcagtactagctctttttgcttgatttccggatctagcgtccagtggtccgatcctctgcctgagtgccgcgagatctattgtccagcgcctcctcagatcgacaacggaatcattcagggcgagagggaccactatggctaccggcagagcgtgacctatgcatgtaacaaagggtttacaatgatcggcgagcattctatttactgtaccgtaaacaacgacgagggcgagtggagtgggcctcctccagagtgtaggggcaagagtctgacctcgaaagtgcctcccacagtgcagaaacccacaacagtgaacgtgcctaccaccgaagtaagcccgaccagccagaagacaacaacaaagacgactacccccaacgctcaagctactcgctctactccggtgtcccgcaccactaagcattttcacgagacaacccctaataaaggctcaggaactaccagtggccagctgactctgttttctgggcatacttgcttcactctgaccggactcctgggcacgctcgtaactatgggcctcctcacatag

SEQ ID NO: 182182 - DNA, 753 bp, synthetic construct
  misc_feature 1..753: note = Description of Artificial Sequence: Synthetic coding sequence
  source 1..753: mol_type = other DNA
atggtggccggcagcgacgccggccgggccctgggcgtgctgagcgttgtctgtctgctgcattgttttggcttcatttcttgcttctctcagcaaatttatggcgtggtgtacgggaatgtgacgttccacgttccctcaaacgtgccactcaaagaggtgctctggaagaagcaaaaagataaagtcgctgaattagaaaactctgaatttagggcctttagtagctttaagaatcgcgtttatctagatacggtgtctgggagcctgaccatctacaacctgacctccagtgatgaggatgagtacgagatggagagccccaacatcacagatactatgaaatttttcctgtatgttttagagtctctgcccagccccactttaacctgcgctttaacaaacggctctatcgaggtgcagtgcatgattcccgaacactacaattctcatcgcgggctgatcatgtattcatgggactgccccatggagcagtgcaaacgtaattccacctccatatatttcaagatggaaaatgatctaccgcagaagatccagtgcaccctgtccaatccactctttaacacgacctcatctataattctcacgacttgtataccgtcttctgggcatagtagacataggtacgccctgattcctattccactggccgtgattaccacctgtattgtgctgtacatgaacggcatcctgaagtgcgatcggaaacccgaccgaaccaacagcaattag

SEQ ID NO: 182183 - DNA, 747 bp, synthetic construct
  misc_feature 1..747: note = Description of Artificial Sequence: Synthetic coding sequence
  source 1..747: mol_type = other DNA
atggtggccggcagcgacgccggccgggccctgggcgtgctgagcgtggtgtgcctgctacactgcttcggtttcatctcctgtttctcacagcagatctacggcgtagtgtacggcaacgtcaccttccacgttccctcaaatgttcctctgaaagaagtgctgtggaagaaacagaaggacaaagtggctgaactcgagaattcagaattccgggccttttctagtttcaagaaccgggtttatctcgataccgtgagcggatcacttacgatatacaatctcaccagttccgacgaggatgaatacgaaatggagtcacccaatattacagacaccatgaaatttttcctgtacgtgctcgaatctctcccttcccctaccctcacctgtgccctgacgaatgggtccatcgaggtgcagtgcatgattccagagcactacaacagccataggggcctgatcatgtatagctgggattgtcccatggagcagtgtaagcgcaactcaacctcaatttatttcaagatggagaacgatttaccacagaagatccagtgtactctatccaaccctctgtttaacactaccagttccatcattcttactacatgcattccatcttccggacattctaggcaccggtacgccttgatccccatcccgctggctgttatcactacctgtatcgttctatacatgaatggcatcctgaagtgtgacagaaagcctgataggactaagtag

SEQ ID NO: 182184 - DNA, 387 bp, synthetic construct
  misc_feature 1..387: note = Description of Artificial Sequence: Synthetic coding sequence
  source 1..387: mol_type = other DNA
atgggcatccagggcggcagcgtgctgttcggcctgctgctggtgctggctgtgttctgccactccggtcacagccttcagtgctataactgccctaaccctacggccgactgcaaaactgccgttaactgcagctcagactttgatgcgtgcctgatcaccaaggcgggtctccaggtatacaacaagtgttggaagttcgagcattgtaattttaacgatgtgaccacccgcctgcgcgagaatgaattaacgtattactgctgcaagaaagatttatgcaatttcaacgagcagctggagaatggtggaacttccctgagtgaaaagacagtgttactgctcgttaccccatttctggctgctgcatggtcccttcatccctag

SEQ ID NO: 182185 - DNA, 387 bp, synthetic construct
  misc_feature 1..387: note = Description of Artificial Sequence: Synthetic coding sequence
  source 1..387: mol_type = other DNA
atgggcatccagggcggcagcgtgctgttcggcctgctgctggtgttggcagttttttgccattcaggacactccctccaatgctataactgtcctaatcctactgcagattgcaaaacagcagttaattgctcctccgacttcgacgcatgcctgatcactaaggctggtctgcaggtgtacaacaaatgttggaaattcgaacactgtaattttaacgatgttactacccggttaagagagaacgaactgacatattactgctgtaagaaggacctgtgcaactttaatgaacagctggagaacggtggcacttctctttcagagaagaccgttttgctgctggtgactcccttcttggccgccgcatggagcctacatccctag

SEQ ID NO: 182186 - DNA, 387 bp, synthetic construct
  misc_feature 1..387: note = Description of Artificial Sequence: Synthetic coding sequence
  source 1..387: mol_type = other DNA
atgggcatccagggcggcagcgtgctgttcggcctgctgctggtgctggccgttttctgccatagtgggcattccctgcaatgctacaactgccctaatcccaccgccgactgcaaaactgctgtgaactgttcgagtgattttgatgcctgtctgattacaaaggccggattgcaggtgtataacaagtgttggaagttcgagcactgtaatttcaacgacgtcacgaccagactgcgggagaacgagcttacttattattgctgtaaaaaagacttatgcaatttcaatgaacagctggaaaacgggggaaccagcctgagcgaaaagactgtgctactgctagtgactccatttctggcagctgcctggtctctgcacccatag

SEQ ID NO: 182187 - DNA, 387 bp, synthetic construct
  misc_feature 1..387: note = Description of Artificial Sequence: Synthetic coding sequence
  source 1..387: mol_type = other DNA
atgggcatccagggcggcagcgtgctgttcggcctgctgctggtgctggccgtgttctgtcatagtggacactctctgcagtgttacaattgtcctaaccccacggccgattgcaagactgccgttaactgttcatctgattttgacgcatgtctgatcactaaagcaggtctgcaggtgtataacaaatgttggaagtttgagcactgcaactttaacgatgttaccactcggctgagagagaacgagctgacctattactgctgtaagaaagatctatgtaattttaacgagcagcttgaaaatggtggcacgtcattaagtgaaaagactgtgctcttgttggtgacaccattcttggcagcagcatggtccctccatccctag

SEQ ID NO: 182188 - DNA, 387 bp, synthetic construct
  misc_feature 1..387: note = Description of Artificial Sequence: Synthetic coding sequence
  source 1..387: mol_type = other DNA
atgggcatccagggcggcagcgtgctgttcggcctgctgctggtgctggcagtgttttgccactccggtcatagtctgcaatgctacaactgccccaacccaaccgcagattgtaagaccgctgtcaactgcagcagcgactttgatgcgtgtcttattaccaaagccggacttcaggtgtacaataagtgttggaagttcgagcactgcaacttcaacgacgtaacaaccaggctgagagaaaacgagttaacttactactgttgtaaaaaggacctctgtaatttcaacgagcaactcgagaatggaggcacaagcctgtctgagaaaactgtgttgcttctagtgacaccatttttggctgcagcttggtccttacacccatag

SEQ ID NO: 182189 - DNA, 387 bp, synthetic construct
  misc_feature 1..387: note = Description of Artificial Sequence: Synthetic coding sequence
  source 1..387: mol_type = other DNA
atgggcatccagggcggcagcgtgctgttcggcctgctgctggtgctggcggtgttctgccatagtggccactctctgcagtgttataactgtcctaaccctaccgcggactgcaaaaccgctgtcaattgcagctccgacttcgacgcctgcttgattactaaggctggtcttcaggtgtataataagtgctggaaattcgaacactgcaatttcaatgatgtgacgacccggctgcgggagaatgagctgacgtattactgttgcaagaaagacctttgcaacttcaatgaacagcttgagaatgggggtacttccctctctgagaagaccgttctgctcctggtcaccccttttctggccgccgcctggtcattacatccctag

SEQ ID NO: 182190 - DNA, 387 bp, synthetic construct
  misc_feature 1..387: note = Description of Artificial Sequence: Synthetic coding sequence
  source 1..387: mol_type = other DNA
atgggcatccagggcggcagcgtgctgttcggcctgctgctggtgctcgctgttttttgccatagcgggcactcactgcagtgttataactgtccaaatcccacagccgattgcaaaaccgcggtgaattgctcaagcgattttgatgcctgcttaataaccaaggccggactgcaggtttacaacaaatgctggaaattcgagcactgtaatttcaatgatgttactacgagattgcgtgaaaacgagcttacatattattgttgcaagaaggacctgtgtaatttcaatgaacagctggagaacgggggaacctctctctctgagaaaacagtcttacttctggtcactccattcctggcagcagcatggagtctgcatccatag

SEQ ID NO: 182191 - DNA, 387 bp, synthetic construct
  misc_feature 1..387: note = Description of Artificial Sequence: Synthetic coding sequence
  source 1..387: mol_type = other DNA
atgggcatccagggcggcagcgtgctgttcggcctgctgctggtgctggctgtgttttgccatagcggccactctctgcagtgttataactgcccaaatccaaccgctgattgtaagaccgccgttaactgtagtagtgactttgacgcatgcttgattacaaaggctggactccaggtgtacaacaaatgctggaagtttgaacactgtaacttcaatgacgtcaccacgcgactgagagagaacgaacttacctactactgctgtaagaaggacctgtgcaatttcaatgagcaattagagaatgggggtacctcactgtctgagaagactgtgttgctcctggttacgccttttctggctgccgcctggagtctccacccctag

SEQ ID NO: 182192 - DNA, 387 bp, synthetic construct
  misc_feature 1..387: note = Description of Artificial Sequence: Synthetic coding sequence
  source 1..387: mol_type = other DNA
atgggcatccagggcggcagcgtgctgttcggcctgctgctggtgctggcagtgttctgtcatagcggtcacagtctgcagtgctataattgccccaaccccacagcggactgcaagacggcggttaattgttcctccgactttgacgcctgtctgattacaaaggccgggctgcaggtctacaataaatgttggaagttcgaacactgcaactttaacgacgtaacgacacgcctgagggaaaacgaactgacatattactgctgtaaaaaagacctgtgtaactttaatgagcagcttgaaaatggtggaacctccttgtcggaaaaaacagttctcctcctggttaccccctttctcgccgctgcatggagtctccatccatag

SEQ ID NO: 182193 - DNA, 2007 bp, synthetic construct
  misc_feature 1..2007: note = Description of Artificial Sequence: Synthetic coding sequence
  source 1..2007: mol_type = other DNA
atgtggctgttcttcggcatcaccggcctgctgaccgccgccctgtctggacatccctccccagctccaccagaccagctgaacaccagttccgctgaatctgagctttgggagcccggcgagaggctccccgtaaggctcacaaatggttcttcatcctgtagcggcactgtggaggttcgattagaggcatcatgggagccagcttgcggagcattatgggatagtcgagcagccgaggcagtatgtcgggccctggggtgcggtggcgccgaagctgcaagccagctggcacctcccactccagagttgcctcccccaccagccgcaggtaacacgtcggtcgcagcgaacgctaccttggcaggagcaccggccctcctttgttccggcgcagagtggaggctctgtgaagtagtggagcatgcatgtcgatcggacggccgaagggcacgcgtgacctgcgcagagaaccgtgcgctgcggttggtggacggcgggggggcatgcgccggacgggtagaaatgctcgagcacggagaatggggctcagtctgcgatgacacctgggatctcgaggacgctcacgtggtttgccggcagctgggctgtggttgggcggtacaggccctgccaggactccattttactcccgggagaggccccatacaccgagatcaggtgaattgtagtggcgcagaagcgtatttgtgggactgccctggtctgcccggtcagcattattgcggccacaaagaagatgctggggcagtttgtagcgaacatcagtcatggcggctgactggaggtgcagaccgttgtgagggccaggttgaggtgcatttccggggggtgtggaacaccgtctgcgactctgaatggtatcccagtgaggctaaagtgctttgccaatctctcggttgcggtacggctgtcgagcggcccaaaggacttccgcatagcctcagtggccgtatgtactacagttgtaatggagaggagcttaccttatcaaactgctcatggaggttcaataattctaacctgtgctctcagtccttagccgctcgcgtgctctgcagcgcctccaggtcactacataacctctcaactcctgaggtacccgcctcggtccaaacagtaaccatcgagtccagcgtaacagttaagatagagaacaaggaaagtcgcgagctgatgctgctgattccaagcatcgtgctggggattcttctgttgggtagtcttattttcattgctttcattctactgcggattaaagggaaatacgccctgcctgtcatggtgaatcaccaacacctgcccactaccatacccgccggctcaaattcttaccaaccggtccccataactatcccgaaggaagtgtttatgcttcccatccaggtgcaggctcctccacccgaggattccgactctggatctgactctgattacgaacactatgacttctcggctcagccccccgtcgctcttactactttctataacagccaaagacacagggtgacggatgaggaggtgcagcaatcgcgattccagatgcctccacttgaggaaggacttgaagagctacacgcatcacacattcccactgccaaccccggccactgtattacggacccgccgtccctcgggcctcagtaccaccccaggagtaactcagagtcatctacttcatcaggagaggactactgcaattcacccaagtcaaagttgccaccctggaatccccaggtgttctctagtgaacgctcttcttttctggaacaaccgcccaatctggagcttgctggaacgcaacctgccttctctgctgggcctcctgcagacgactcttcctctacgtctagtggcgagtggtatcaaaattttcagcctcctccacagcctccgtcggaggagcaatttggttgtcctggtagtccttcacctcagccggatagtactgacaatgacgattatgatgatatcagtgcagcatag

SEQ ID NO: 182194 - DNA, 1911 bp, synthetic construct
  misc_feature 1..1911: note = Description of Artificial Sequence: Synthetic coding sequence
  source 1..1911: mol_type = other DNA
atgtggctgttcttcggcatcaccggcctgctgaccgccgccctgtccggtcacccaagccccgccccacctgaccaactcaatacttccagtgcagaaagcgaactgtgggagccaggagaaagactcccagtgagattgacaaatggtagctcttcctgtagtgggacagtggaagtgaggttagaggcaagctgggaacctgcttgtggagctttgtgggatagtcgcgccgcagaagccgtctgtagggccttggggtgcggaggggccgaggcggcttcccagcttgcccctccaactccagagcttcctccgccacctgcggctggaaacaccagcgttgctgctaatgctacactggctggtgcaccagccctgttgtgcagcggcgctgagtggcgcctttgcgaagtggtggagcacgcatgtaggagcgatggtagaagggcgagggttacctgcgcggagaaccgggctctgcgtctcgtcgacggaggaggagcctgtgctggacgcgtggaaatgctggagcatggggaatgggggtctgtctgcgatgatacctgggacctcgaggatgcccacgtggtgtgtcgccaactaggttgcggatgggccgttcaagctctgccaggtctgcatttcactcctggtcggggacctatacatcgcgatcaggtgaattgttcaggggccgaagcctatctgtgggattgtcccggcttacctggacaacactattgcgggcacaaagaagatgcaggcgcagtttgctccgaacaccagtcatggcggctgaccggaggagcggacagatgcgagggtcaagtcgaggtgcacttcagaggggtgtggaacaccgtttgtgatagcgaatggtatccatccgaagccaaggtattatgtcaatccctgggctgtggaaccgccgtagagcgcccaaagggtttgccccactctctttccgggcgaatgtattattcttgtaacggcgaggagctgactctatcgaattgctcttggcgtttcaacaattctaatctatgttcccagtccctggcagctcgcgtgctgtgttccgcatcccgatcactgcacaatctgtcgaccccagaggtgcctgccagtgtccaaaccgtgaccatcgagagcagcgtgaccgtgaaaatcgaaaataaggagtccagggagctgatgttactcataccctccattgtgctgggaatcctactattgggttccctcatctttatcgctttcattctcctgcggataaagggcaagtacgtctttatgctgccaattcaggttcaggcccctcccccagaagactcagactctgggagcgactctgactacgagcattacgacttctccgcccaacccccagttgccctaactacattctacaattcccagcggcatcgtgtgacagacgaggaagttcaacagagccggttccaaatgccacccctcgaggaaggtctggaggaactgcatgcgagccacattccaacagccaatcctggacactgcattaccgaccccccgtcacttgggccgcaatatcacccacggagcaatagcgagagctccacctcatctggcgaggactattgtaatagcccaaaaagcaagttacccccttggaaccctcaggtttttagtagcgagaggagctccttcctcgaacagcctcccaacttagaactggctggcacccagcctgcattctccgcaggaccacccgccgatgactcctcctctacgtccagcggcgagtggtatcagaactttcagccccctccccaacctccaagcgaggagcagttcggatgcccagggtctccgtcaccgcagccggattccactgacaatgatgactacgacgatatctccgctgcttag

SEQ ID NO: 182195 - DNA, 1788 bp, synthetic construct
  misc_feature 1..1788: note = Description of Artificial Sequence: Synthetic coding sequence
  source 1..1788: mol_type = other DNA
atgtggctgttcttcggcatcaccggcctgctgaccgccgccctgtcgggccaccccagtcctgcaccccccgaccagctgaacacaagtagcgcggaatcggaactgtgggagcccggggagcggttgcctgttaggctgaccaacggctcttcatcttgctctggcacagtcgaagtcagactcgaggcaagttgggaaccagcgtgcggcgccttgtgggattccagggcagccgaagcagtgtgtcgcgccctgggctgtggaggggcggaagccgcaagccagctcgcacctccgacgcccgaattgcctccgccgccagctgctggaaatacctccgtcgccgccaacgccacgctggcgggggctcccgctctgctctgctccggcgccgagtggcgcctgtgcgaagtagttgagcatgcttgcagatcagacgggaggcgagccagagtcacctgcgctgagaaccgcgctctgagactggtggacggcggaggtgcctgtgccgggagggtcgaaatgctcgaacacggagaatggggtagtgtgtgcgacgatacttgggatctcgaggatgctcacgtggtttgccgccagcttgggtgcggatgggccgtgcaggcactccctggcctacactttacccccggacgaggaccgatacatcgtgaccaggtaaactgttcgggagctgaagcttacctctgggattgccccggtctccccggccagcattattgtggtcacaaggaagatgcaggagccgtgtgttctgaacatcaatcctggcgccttaccggcggagccgacagatgcgagggccaggttgaagtccactttagaggtgtgtggaacactgtctgcgattcagaatggtacccgagcgaggccaaagtactgtgtcaaagcctgggatgtgggactgccgtggagagaccgaaagggctaccccactccttatctgggaggatgtactactcatgcaacggggaggagctgacactctcaaactgtagctggcgattcaataactcaaacctttgtagccagtctctcgccgcgcgtgtattgtgcagtgcatcccgttccctgcacaacctgagtacacctgaggtcccagccagcgtgcagaccgtaacaatagagagctctgtgactgtgaagattgaaaacaaagagtccagagagctcatgctccttattccctccatagtcctgggaattctcctgctcgggtccctgattttcattgccttcatcctcctgagaatcaaaggtaagtatgattctcagcggcatagagtgactgatgaggaggtgcagcagtctcggtttcagatgcccccgctggaggaaggcctcgaggaactacacgcctctcatatcccgaccgccaacccaggccattgcatcaccgacccacccagccttggaccccagtaccatcctcgctctaactctgaatcctcaacaagctccggcgaggactattgtaattcacccaagtccaagttgcctccctggaatccccaggtgttttcttccgaaaggagtagctttctggagcagccccctaacctggaacttgctgggactcagcccgctttcagtgctggacccccagcggacgattcgagctcgacttctagcggggaatggtaccagaatttccaaccacccccccaacctccaagcgaagagcagttcggatgtcctgggtctccctctccacagcctgactctacagacaatgacgactacgatgacatctctgctgcatag

SEQ ID NO: 182196 - DNA, 1806 bp, synthetic construct
  misc_feature 1..1806: note = Description of Artificial Sequence: Synthetic coding sequence
  source 1..1806: mol_type = other DNA
atgtggctgttcttcggcatcaccggcctgctgaccgccgccctgtccgggcaccctagccccgccccccctgatcaacttaatacttcaagcgccgagtccgagctgtgggagcctggagaaagactgcccgtgagactgacgaacggctcctcttcttgctccggcacagtggaagtgcggctggaagcctcctgggaacctgcctgcggtgccctgtgggattcaagggcagctgaggcagtttgcagggcattgggctgcggcggggccgaggccgcctcacagcttgcccctccaactccggagctgcccccaccaccagcagcaggaaatacatctgttgcagcaaatgccacattggctggcgctcccgcgttgctgtgcagtggagccgagtggagactatgtgaagttgtcgagcatgcttgtcggtccgacggcagaagggcaagagtgacatgtgccgaaaatcgagccctacggctggtcgacggcggaggggcctgcgccggacgagtcgaaatgctggagcatggtgagtgggggtccgtgtgcgacgacacatgggacctggaagatgcccacgtggtgtgtcgacagttaggctgcgggtgggcggtccaggccctgcccggccttcatttcaccccggggcgcgggcccatacatcgcgaccaggtcaactgcagcggggcggaggcctacctctgggactgcccaggcttacccggccagcactactgcggacataaagaagacgcaggggcagtatgctctgagcatcaaagctggcgactcaccggcggggctgatagatgtgagggacaggtcgaagtccatttccgtggggtgtggaacacagtatgcgacagcgaatggtacccgtcagaagctaaagtgctctgtcagtcattgggatgtggcaccgccgtggagcgtcctaagggactcccacatagcttaagcggacgcatgtattactcgtgcaatggcgaagaactgaccttgagtaattgctcctggcgtttcaacaacagcaacttgtgctcccagtctctggcggcccgcgtgctttgctcggcctcaagaagtctgcataatcttagtacccctgaggttccagcttccgttcaaactgtgacaattgagtcgtctgtgaccgtgaagatcgaaaataaagagagcagggaacttatgctgctgattccatcgatcgtgctaggcatcctgcttctcggaagcctcatatttattgcgtttatcttgctccgcataaagggaaaatacgtattcatgctgcctatccaggttcaggctccaccacccgaggatagtgactctgggagcgatagtgactatgagcattacgatttttcagctcagcctcccgttgccctgactaccttttataacagccagcgccacagggtcacagatgaggaagttcaacagtcccggttccagatgccgcccctcgaggaggggctcgaagaactgcatgcctctcacatcccaactgcaaatcccggccattgtataacagaccctcccagtcttggccctcagtaccatcctcgttctaatagcgaaagctcaacgtcatcaggggaagactactgtaactcccctaaatccaagctgcctccatggaatccacaagtgttctcgagtgagcgcagcagcttcctggagcaacctcctaatctcgagctggctgggacacaacctgcctttagcggctccccctccccacagccagactccaccgacaatgatgactatgacgatatcagtgctgcttag

SEQ ID NO: 182197 - DNA, 1779 bp, synthetic construct
  misc_feature 1..1779: note = Description of Artificial Sequence: Synthetic coding sequence
  source 1..1779: mol_type = other DNA
atgtggctgttcttcggcatcaccggcctgctgaccgccgccctgtctgggcatccttccccagcacctcctgaccagctcaacacttccagcgcagaatccgaactgtgggagcccggcgagagactgccagttaggctcaccaacggcagcagctcttgtagcggcactgtcgaggttcgcttggaagcatcttgggaacccgcgtgcggggccctgtgggattcacgagctgccgaggctgtgtgccgcgctctggggtgcggcggagctgaggcagctagccagctagcccctcctacacctgagctaccccccccacctgccgctgggaacacctctgtggcggctaatgccacactggccggggcccctgccctgttatgttctggtgctgagtggaggttatgcgaggtcgtagagcacgcctgccgcagcgatgggcgcagggccagagtgacatgtgccgagaacagggccttgagattagtcgatggcggaggggcctgcgccgggcgggtggaaatgcttgaacatggtgagtggggttctgtgtgcgacgacacatgggacctggaggatgcgcacgtagtttgtcgccagctgggatgtggatgggcagttcaggccctgccaggcttgcactttactccaggccggggaccaattcatagagaccaggtgaactgtagcggagcagaggcctatctgtgggactgtccgggcctaccgggacagcattactgcgggcataaggaggacgcaggagctgtgtgttccgagcatcagagctggagattgaccggcggggctgatcgctgtgaaggacaggttgaagtccatttcaggggagtgtggaacacggtgtgcgactctgaatggtatccttctgaggcaaaggttctgtgtcaatctctcgggtgcgggactgcagtggagcggcccaagggactgcctcactcactttccggtcgcatgtattattcctgcaatggcgaggagctaacgctctcaaactgtagttggaggtttaacaacagtaatctgtgttcccagagccttgccgccagggtgttgtgttctgcttccaggtccttacataatctctctacacctgaagtgcccgcatccgttcagaccgtaacgatcgaaagcagtgttacggtcaaaatcgagaataaggagtcacgcgaactgatgctgctaatcccctcaatcgtcctgggaatcctgctgctgggttccttgatctttatcgcattcattctgctgaggattaagggcaaatacgccctgcctgtgatggtcaatcaccaacacctgccaactactatcccagcgggtagtaatagttatcagccagttccaattacaatccctaaggaggactcgcaacggcatcgagtaaccgacgaggaggttcagcagagtagatttcaaatgcctcccttggaagaggggttagaagagttgcacgcctcccatatcccgaccgcaaacccagggcactgcataaccgacccgccctccctggggccccaataccatccaagaagcaactctgaatctagtacctctagcggggaagattattgcaatagcccaaaatctaagcttcccccatggaacccccaggttttttctagcgaacgatccagtttcctcgagcaacctccaaacttagaactcgcggggacacagccagcgttcagcggatcaccgtccccccagccggacagcacagacaacgacgactatgacgatatttcagctgcctag

SEQ ID NO: 182198 - DNA, 717 bp, synthetic construct
  misc_feature 1..717: note = Description of Artificial Sequence: Synthetic coding sequence
  source 1..717: mol_type = other DNA
atggccgtggagggcggcatgaagtgcgtgaagttcctgctgtacgtgcttctcctagccttttgcgcctgcgccgtcggcttaatagccgtcggcgtgggtgcccaacttgtgctgtctcagactattatccaaggcgccacaccgggcagcctattgcccgttgtgattatcgccgttggagtgtttctgtttctggtcgcatttgtgggctgttgcggagcatgtaaagagaattattgcctcatgataacgttcgccattttcctgagtctcattatgcttgtagaggtcgctgcagcgattgccggttacgtgttcagagataaggttatgtccgagtttaataacaattttcgccaacaaatggaaaactatccaaaaaataaccacactgcatccattctggataggatgcaggcggattttaaatgttgcggtgccgctaactacacagattgggaaaagatcccgagcatgtctaagaaccgcgttcccgattcatgctgtataaacgtgactgttggctgtgggataaattttaacgagaaggctatacacaaggagggttgcgtcgaaaaaattggggggtggctaaggaaaaatgtcctcgtggttgctgccgccgcattgggcatcgctttcgtggaagttcttggcatcgtgttcgcttgttgtctagtgaaatccatcaggagcgggtacgaagttatgtag

SEQ ID NO: 182199 - DNA, 711 bp, synthetic construct
  misc_feature 1..711: note = Description of Artificial Sequence: Synthetic coding sequence
  source 1..711: mol_type = other DNA
atggccgtggagggcggcatgaagtgcgtgaagttcctgctgtacgtgctgctgctggcgttctgcgcctgcgcggtcggacttatcgctgtgggcgtcggtgctcagctcgtgctgagtcagaccattattcagggtgcaaccccaggaagcctgttgccagttgttatcattgcggttggcgtgtttctgttcttagttgcttttgtcggctgttgtggagcctgcaaggaaaactactgtctgatgattacatttgctatttttctttccttgataatgcttgtcgaggtagctgcagcaattgcaggatatgtgttcagggacaaggttatgagtgagttcaacaacaatttccggcagcaaatggagaactatccaaagaacaaccacactgctagtatattagatcgtatgcaggccgatttcaagtgctgtggagcagctaactatacagattgggagaaaatcccatccatgagcaagaatcgcgtccctgactcctgctgtattaacgtgactgttggctgtgggataaattttaatgagaaagctatccataaagaagggtgcgtcgagaaaattggcggctggctaaggaagaacgtgctggttgttgctgccgcagcgctcggcattgccttcgtccttggcatcgttttcgcctgctgtctggtcaaatcaatacgatcagggtatgaagtaatgtag

SEQ ID NO: 182200 - DNA, 402 bp, synthetic construct
  misc_feature 1..402: note = Description of Artificial Sequence: Synthetic coding sequence
  source 1..402: mol_type = other DNA
atggccgtggagggcggcatgaagtgcgtgaagttcctgctgtacgtcttgctgcttgcattttgtgcatgtgctgttgggctcatagccgtgggcgtgggcgcgcaactggtgctgtctcagaccatcattcaaggtgctacacctggttcattactccctgtcgtaataattgcggtaggcgtgttcctctttctggtcgcattcgtcggatgctgtggggcatgtaaagaaaactactgtctaatgataacgtttgctatcttcctttctcttattatgctggtcgaggtggcagccgcgatagccggttacgtgttccgcgacaaggttatgagtgaatttaataataacttccggcagcaaatggaaaattaccccaagaacaaccacactgcatag

SEQ ID NO: 182201 - DNA, 717 bp, synthetic construct
  misc_feature 1..717: note = Description of Artificial Sequence: Synthetic coding sequence
  source 1..717: mol_type = other DNA
atggccgtggagggcggcatgaagtgcgtgaagttcctgctgtacgtactcttgcttgcattctgtgcctgtgcagttggactcatcgccgtcggagtcggtgcccaactggtactctcgcagacaatcatccagggagctacccctgggagtttgctccctgtggtgataattgccgttggggtgttcctgtttctggtcgccttcgtgggctgctgtggcgcgtgcaaggagaattactgtctcatgatcacctttgccatttttctctctcttataatgctggtcgaggtggctgcggctatcgcaggttatgtattcagagacaaagtgatgagcgagtttaacaacaacttccggcagcaaatggaaaactatcccaagaacaaccacaccgcttccatactagacaggatgcaagccgactttaagtgttgtggcgccgcaaattacacagactgggaaaaaattccctcgatgtcaaagaacagggtccctgacagctgctgcatcaacgttaccgtcggatgcggcataaactttaacgaaaaggcgatccataaagagggttgcgtggaaaaaattgggggctggctgcgcaaaaatgtgctcgttgtcgctgccgcggctcttggcatcgctttcgtggaagtgctgggtattgttttcgcctgctgcttggtgaagtctatccgcagcgggtacgaggtcatgtag

SEQ ID NO: 182202 - DNA, 648 bp, synthetic construct
  misc_feature 1..648: note = Description of Artificial Sequence: Synthetic coding sequence
  source 1..648: mol_type = other DNA
atggccgtggagggcggcatgaagtgcgtgaagttcctgctgtacgtgcttttgctggcattctgtgcctgcgcggtgggcctgatcgcggttggcgtgggcgcccagcttgtcttgagccagaccataatccagggtgctacacctggctccctgctaccagtggtgatcatcgcagtcggtgtgttcttatttctggtggccttcgtgggctgctgcggggcctgcaaggagaactattgcctcatgattacgttcgccatttttttgtctctcattatgctggtcgaagtagccgccgccatcgcgggatatgtcttcagagataaggtaatgtccgagttcaacaataacttccggcagcagatggagaactatccaaagaacaatcacaccgcaagcattctggatcggatgcaggccgattttaagtgctgcggtgccgccaactacaccgactgggaaaagatcccctctatgtcaaagaacagggtccccgacagctgctgcatcaatgtcaccgtagggtgtggcatcaactttaacgaaaaggccattcataaagaaggatgcgtggagaaaatcggcggttggttacgtaagaacgtcctagtcgtcgccgccgcagccctgggtattgccttctag

SEQ ID NO: 182203 - DNA, 654 bp, synthetic construct
  misc_feature 1..654: note = Description of Artificial Sequence: Synthetic coding sequence
  source 1..654: mol_type = other DNA
atggccgtggagggcggcatgaagtgcgtgaagttcctgctgtacgtgctgcttcttgctttttgcgcatgcgctgttgggctgatcgccgtgggcgtaggcgcgcagttggtgctgtcccagaccattattcaaggagccacgcccggtagtcttttgcccgtggttatcattgccgtgggcgtcttcctgtttctggtcgctttcgttggatgttgtggagcttgcaaagagaactactgcctgatgattacatttgccatcttcctgtctttgatcatgctagtcgaggtggcagccgcaattgcaggctatgtcttcagggataaggttatgtccgagtttaataacaactttaggcaacagatggagaattaccccaaaaacaaccacactgcatcgattctggatcgaatgcaggccgacttcaaatgctgtggggctgccaattataccgactgggaaaaaattccctctatgagcaagaatcgtgttccagactcatgctgtatcaatgttactgttgggtgcgggatcaattttaatgaaaaggcaatccacaaagaaggatgcgtcgaaaagattggcgggtggctgcggaagaatgtcctagtggtggccgccgctgccttgggaatcgctttcgttgaatag

SEQ ID NO: 182204 - DNA, 717 bp, synthetic construct
  misc_feature 1..717: note = Description of Artificial Sequence: Synthetic coding sequence
  source 1..717: mol_type = other DNA
atggccgtggagggcggcatgaagtgcgtgaagttcctgctgtacgtccttcttttagccttctgtgcctgcgcagtgggtctcatagctgtgggagttggcgcccagctagtactctcccagactatcatccagggggccacccccggcagcctactgcctgtggtcataatcgccgttggcgtgtttctttttctcgtcgcctttgtgggctgctgtggtgcgtgcaaggagaactactgccttatgatcaccttcgctatcttcctatcccttataatgctcgtggaggtggcagccgctatcgctggctacgtctttcgcgacaaggtgatgagcgaatttaataataactttaggcagcagatggaaaattacccgaagaataaccatactgccagtattctggatcgcatgcaggctgattttaagtgctgtggggccgccaattataccgattgggaaaagatcccctccatgtctaaaaatagggtccccgattcttgctgtattaacgtgacagtaggatgcggaatcaactttaatgagaaggctatacataaagaagggtgcgtggagaagatcggcggctggttgcggaaaaacgtgcttgtggtggccgccgctgctctgggaatcgcctttgttgaggtgctgggcatcgtgttcgcatgttgcctggtcaagtccatcagatccggctatgaggtcatgtag

SEQ ID NO: 182205 - DNA, 648 bp, synthetic construct
  misc_feature 1..648: note = Description of Artificial Sequence: Synthetic coding sequence
  source 1..648: mol_type = other DNA
atggccgtggagggcggcatgaagtgcgtgaagttcctgctgtacgttttacttcttgctttttgcggagcaaccccgggcagtctcttgcccgtcgtgattatagccgtcggagtcttcctgttcctggtggcctttgtgggctgttgcggcgcttgtaaagaaaactactgcctcatgatcactttcgctattttcctgtcattaatcatgctcgtcgaagtggcagccgccatcgctggatacgtattccgtgataaggtgatgtccgaattcaacaataactttcggcagcaaatggaaaactaccctaaaaacaatcatacagcttctatccttgaccgcatgcaggcggattttaagtgctgtggagcagctaattatacagactgggaaaaaattccatcaatgagcaaaaatcgagtgcctgattcatgctgcattaatgtaactgttgggtgcggaattaactttaacgaaaaggcaattcacaaagaggggtgcgttgaaaagatcggggggtggctcagaaaaaatgtacttgtggtcgccgcagcagcattaggcattgcattcgtcgaggtgctggggatcgtttttgcctgttgtctggtcaagtcaatcagaagcggttacgaagtaatgtag

SEQ ID NO: 182206 - DNA, 471 bp, synthetic construct
  misc_feature 1..471: note = Description of Artificial Sequence: Synthetic coding sequence
  source 1..471: mol_type = other DNA
atgatcaccttcgccatcttcctgagcctgatcatgctggtggaggtggctgccgctattgccggctacgtgttcagagataaggtgatgtccgagttcaacaataactttaggcagcagatggaaaattatcctaaaaacaaccacacagcctcgatactggaccgcatgcaagctgattttaaatgttgtggggcggctaattataccgattgggaaaaaattccatctatgagtaagaatagagtgccagactcgtgctgcatcaacgtgactgtgggatgcggcatcaattttaacgaaaaggctatccacaaggaaggatgtgtggaaaaaatcggcggatggctccgcaaaaatgtactggttgtcgccgcggcagccctgggcatcgccttcgtagaggtgctcgggattgttttcgcgtgttgcctcgtgaaatcaattcggtccggctacgaggtgatgtag

SEQ ID NO: 182207 - DNA, 471 bp, synthetic construct
  misc_feature 1..471: note = Description of Artificial Sequence: Synthetic coding sequence
  source 1..471: mol_type = other DNA
atgatcaccttcgccatcttcctgagcctgatcatgctggtggaggtagctgcagcaatagctggctacgtgtttagggataaggtaatgagtgagtttaacaataacttcaggcagcaaatggagaattaccctaagaacaaccacaccgcaagcatcctggacaggatgcaggcggactttaaatgttgcggcgccgctaactatacagactgggaaaagatcccaagcatgtctaaaaatagggtcccagacagctgttgcattaatgtaaccgtcggctgcggaataaattttaacgaaaaggccatccacaaagagggatgcgtagagaagatcggagggtggctacgaaagaatgtccttgtggtggctgctgcggcactggggatcgcattcgttgaggtgttagggattgtattcgcatgttgtctcgtgaagagtattagaagcggatacgaagtgatgtag

SEQ ID NO: 182208 - DNA, 1065 bp, synthetic construct
  misc_feature 1..1065: note = Description of Artificial Sequence: Synthetic coding sequence
  source 1..1065: mol_type = other DNA
atgcggctggccgtgctgttcagcggcgccctgctgggcctgctggctgcccagggtacggggaacgattgtcctcataagaaaagcgctactctcctgccatccttcactgtgacgcccacggtgaccgagagcacaggcaccacaagtcaccggactacgaagtcgcacaagactaccacacaccgtactaccactactggtacaacatcccacggccctaccacagcaacccacaacccaacgacaacttctcacggaaacgtgaccgtgcatcctacctctaacagtactgctactagccaagggccatccaccgcaacccactcccctgccaccacatcccacggaaacgctacagtgcaccccacaagtaacagtactgccacaagccctggcttcacgtctagcgctcaccccgagccccctcctccctccccctcacccagccccacatccaaagagactatcggtgactacacttggactaatggcagtcagccttgcgtgcatctgcaagcacagatacagatacgtgtaatgtatacaacgcagggaggcggcgaggcctggggcattagcgttttaaatccgaacaaaaccaaggtacaggggtcttgcgagggggctcatccgcacctgctgcttagcttcccctacggtcacttgtcctttggattcatgcaggatcttcagcaaaaagtcgtttatttgtcctatatggccgtcgagtataacgtatccttccctcacgccgctcagtggacattttccgcacaaaatgctagtctcagggatcttcaagctcccctgggccagagtttctcctgtagtaacagtagcatcatactgtcacctgcagtgcacctggatttgctatccctgaggctgcaggcggctcaattaccacacactggagtcttcggccagtcattttcctgtccatctgaccgcagcatcctgctgccactcatcatcggcctgatcctgttgggcctgttggcgctggtgctcattgccttttgcattattaggaggcggcctagcgcctatcaagcattgtag

SEQ ID NO: 182209 - DNA, 894 bp, synthetic construct
  misc_feature 1..894: note = Description of Artificial Sequence: Synthetic coding sequence
  source 1..894: mol_type = other DNA
atgcggctggccgtgctgttcagcggcgccctgctgggcctgctggcagagtcaactggaaccacttctcaccggaccactaagtcacacaaaactacaacccatcgcaccacaactacagggacaacatcccatggcccaaccacagccactcacaatcccacaacaacttcccatggaaacgctaccgtgcacccgacgagtaacagtaccgcgacatcccccgggttcacatcttcagcccatcccgagccccctcccccatctccttctcctagccctacttcaaaggagactatcggtgactacacatggacgaatggatcccagccctgcgtgcatctgcaggcccagatacagatacgtgtgatgtacactactcagggcggcggtgaggcctggggcatctcagtcctcaaccccaacaagaccaaggtccagggatcatgtgaaggtgcccatccgcatctccttttgtccttcccctatgggcacctctctttcggatttatgcaggatctacagcagaaggttgtctaccttagttacatggccgtggagtataatgtcagctttcctcacgccgcacaatggaccttcagtgcccagaacgcctctctcagagacttgcaggcaccactgggccagtccttctcatgttcaaactcatctatcatcctgtccccagcagtgcaccttgacctgttgagcttgcgactgcaggcggcgcagctcccgcatactggagtgttcgggcaatcctttagttgccctagcgaccgtagcatactactacctctcattatcggtctgatcctattagggctgttggccttagtcctaatcgcattctgcataattaggcgtcgcccctctgcctaccaggctctatag

SEQ ID NO: 182210 - DNA, 3018 bp, synthetic construct
  misc_feature 1..3018: note = Description of Artificial Sequence: Synthetic coding sequence
  source 1..3018: mol_type = other DNA
atgatgagcgacgccagcgacatgctggccgccgccctggagcagatggacgggattatcgctgggagtaaagctcttgagtacagcaacggaattttcgattgccagtcaccaacatccccctttatgggcagcctgagagccctccacttggtggaagatctgcgtggactgctggaaatgatggagaccgatgaaaaggagggcttgcgatgtcaaatcccagatagcaccgccgagacgctggtggagtggctacagagccagatgaccaatggccatttgccaggcaatggtgacgtgtatcaggagaggcttgcacgactggagaatgacaaagaaagtttagttctgcaggtcagtgtgctcaccgatcaggtggaggctcagggtgagaaaatcagggatctcgagttctgcctggaggaacacagggagaaggttaatgcaaccgaggagatgctgcagcaggagttactgagccggacatcactggagactcaaaaactggatttgatggctgagatttcaaatctcaagctcaagctgaccgctgtggagaaagataggctagattacgaggacaaatttcgggacacggagggactgattcaggagatcaacgatctccgtctcaaggtatctgaaatggattctgaacgcctccagtacgagaagaagctgaaatcaaccaaagatgagcttgcctcacttaaggagcagctcgaggaaaaagagagtgaagtgaaaagactccaggagaaactcgtctgtaaaatgaagggagagggggttgaaattgtcgatagggacgagaatttcaaaaagaagctgaaggagaagaacatcgaggttcaaaaaatgaaaaaagccgtcgagtcactcatggccgctaacgaggagaaggatcgaaagattgaggacctgcggcagtgtctcaataggtacaagaagatgcaggacactgttgtcctagctcagggcaaaaagggcaaagacggggaatatgaagagctcttaaatagctcatccatcagcagcttgctggacgctcagggattttcagatcttgagaaaagtcctagccccacaccagtaatgggctccccatcatgcgaccccttcaacacgagtgtgcctgaggaatttcacacgaccatcctgcaggtttccattccgtctttgctgcccgctacagtctccatggagaccagtgaaaaatctaagttaacacccaaacctgagacatccttcgaagagaacgacgggaacattatcctgggggccactgtggatacccagctctgcgacaaattgttgacttcctctttgcagaaaagtagctcattgggcaacctaaagaaggaaactagtgatggagagaaggagactatacagaaaacaagtgaagacagagctccggccgaatcacggcctttcgggacgctgccccctagacctcccgggcaggatactagtatggatgacaaccccttcggcaccagaaaggtgcgctcttccttcggccgcggattttttaagataaagtccaataagcggaccgccagcgcccccaacctggaccgtaagcgcagtgcctcggcgcccacgttggccgagacggagaaggagaccgctgagcatctcgatcttgctggtgcctctagcaggcccaaggatagccagcgcaactcccctttccaaatccctccacctagccctgattccaagaaaaagagccgaggcatcatgaagctgtttggaaaactgcgcagaagtcagagtacgacatttaaccccgacgatatgagcgaaccagagttcaaaagaggggggacccgggccacagctggtccacggctgggctggtctcgcgatcttggtcaatccaactctgatctggatatgccgttcgcaaagtggaccaaggagcaggtgtgcaattggctcatggagcaagggctaggtagttatctgaatagcggcaaacactggattgcctccgggcaaacgctgctccaagcttctcagcaggatctcgagaaagagctcggcattaagcacagcttgcaccgaaagaagctccagctcgccttgcaggccctcgggagcgaggaagaaaccaatcacggtaagctggattttaattgggttacgcgctggctcgacgatatcggcctcccgcaatacaaaacccaatttgatgagggccgagtagacggacgtatgctccattatatgactgtcgatgacctcctgagtctgaaggtggtaagcgtgttgcaccacctgtccatcaaacgcgctattcaggtgctcaggattaacaatttcgagcctaactgtctgaggcggcggccctccgacgagaacacaattgccccaagcgaagtgcagaagtggactaatcaccgggtcatggagtggctgcggagcgtcgaccttgcggaatacgccccaaacctgcgggggagcggcgttcacgggggcttaatggtcctggaaccaagatttaatgtggaaaccatggcccagctgctgaatatccctccaaataaaactcttttacggcggcacttagctactcatttcaacctgctgatcggtgccgaggcccagcaccagaagcgggatgctatggagttacctgattatgtgttgctgactgctactgccaaggtgaagccgaaaaaactcgctttttccaacttcggaaatctgagaaaaaagaaacaagaagacggggaggaatacgtgtgcccaatggaactggggcaggcttccggaagtgcaagcaaaaaggggttcaagcccggtcttgacatgcgattgtatgaggaggacgaccttgacagattggagcagatggaggactctgaaggcacggtccggcagatcggcgcattcagcgagggcatcaacaatctgactcacatgttgaaagaggacgacatgttcaaggactttgctgcccgctctcctagtgcctccattacagacgaagacagcaatgtctag

SEQ ID NO: 182211 - DNA, 495 bp, synthetic construct
  misc_feature 1..495: note = Description of Artificial Sequence: Synthetic coding sequence
  source 1..495: mol_type = other DNA
atgagcagcgagaactgcttcgtggccgagaacagcagcctgcacccagaaagcgggcaggaaaacgatgccacgtctccacactttagcactagacacgagggaagttttcaggtgccagtgctttgcgcagtgatgaatgtcgtgtttattacaatactgattatcgcattgattgccctgagtgtcggtcagtacaattgtcccggccaatatactttctctatgccctctgatagccacgtttcatcctgctcagaagattgggtggggtatcagcgcaagtgttattttatttcaacagttaaaagaagttggacctctgctcaaaatgcctgttcggagcacggcgctacactggcggtgatcgattcagagaaagatatgaactttttgaagcgctacgctgggcgggaagagcactgggtcggcctgaagaaagagcccggtcacccctggaagtggagcaacggcaaggaattcaacaattggtag

SEQ ID NO: 182212 - DNA, 723 bp, synthetic construct
  misc_feature 1..723: note = Description of Artificial Sequence: Synthetic coding sequence
  source 1..723: mol_type = other DNA
atggccggccccccccggctgctgctgctgcccctgctgctggccctggcccgcggattaccaggagcactcgcagctcaggaagttcaacaatcacctcactgtaccacagtccccgtaggggccagcgttaacatcacttgttctacgtccggtggcctcagaggaatttatttacggcagcttggacctcaaccccaggatattatttattatgaggacggcgtagtgcctaccacggaccgccgattcagagggcgcattgactttagcggcagccaggataacctaaccattaccatgcataggcttcagctgtccgatacgggaacttacacgtgtcaggccataaccgaagtgaatgtttacgggtccggaaccttggtgctggtcaccgaggagcagtcacagggatggcatcgctgctccgatgcaccgccacgagcctctgctctcccggctccacccactggcagtgcccttcccgacccccagaccgccagtgcgctgccggacccccctgcagcttccgctcttcctgccgctctggctgtcatttcattcctattgggcctgggtctgggcgtagcgtgtgtgctggcacgtacacagattaaaaagctgtgttcttggcgggacaaaaattctgcggcttgcgtggtgtatgaggatatgtctcatagccgttgtaatacactgtcttctcccaaccaatatcagtag

SEQ ID NO: 182213 - DNA, 1080 bp, synthetic construct
  misc_feature 1..1080: note = Description of Artificial Sequence: Synthetic coding sequence
  source 1..1080: mol_type = other DNA
atggccgaggccatcacctacgccgacctgcggttcgtgaaggccccccttaagaaatctatctccagccggttagggcaggacccgggagccgacgatgacggcgagattacatacgagaatgtacaggtgcccgccgtcctcggagtcccgagttctcttgccagtagtgtgctcggcgacaaggcagccgttaaatccgaacaacccaccgcatcctggcgggctgtcacttcccccgccgtgggacgcatcctgccctgcaggactacgtgtttgaggtacctgttgcttggacttctcctgacctgtctattacttggcgtgactgcgatttgtctgggcgtccgttatttgcaggtttcccagcagctgcaacagaccaacagggtcctggaggtaaccaacagcagtctgcggcagcaactgcggttgaagatcacgcaacttggccagtcagctgaggacctgcagggcagcagaagggagttggctcaaagccaggaagcattgcaggtggagcaacgagcacaccaggcagcagaaggtcagctgcaagcttgtcaggccgaccggcagaagacaaaggagactcttcagagtgaggagcagcaacgcagagctcttgagcagaagctgtccaacatggaaaatagactgaaaccattttttacatgcggctccgccgacacatgttgcccaagcggatggatcatgcaccaaaaaagttgtttttatatctcactcacaagcaagaactggcaggaaagtcagaagcagtgcgaaacgctgagcagtaagctcgcaacttttagcgagatctaccctcagtcccacagctattattttttgaacagccttttaccaaatggaggcagcggcaattcttactggactggactgtcctcaaataaggattggaaacttacagatgatacacagcgtacgcgcacctatgcacagtcatcaaagtgcaataaggtgcataagacgtggtcatggtggacattggaatccgagagctgtcgatcctctctgccctacatttgtgaaatgaccgctttccgattccctgattag

SEQ ID NO: 182214 - DNA, 363 bp, synthetic construct
  misc_feature 1..363: note = Description of Artificial Sequence: Synthetic coding sequence
  source 1..363: mol_type = other DNA
atggccgaggccatcacctacgccgacctgcggttcgtgaaggccccgttgaagaagagtatctcctctcgcctaggccaggacccaggggccgacgatgatggcgagatcacctatgaaaacgtgcaggtgccagctgttttgggcgtccccagtagcctcgcctcttctgtgctgggagacaaagcggccgtgaagtctgaacagcccacagcgagttggagggccgtgacctctcccgctgtggggagaatactcccttgtgagtgtgcatgcgccggccagccaaggggccaagttcttgcaccagtacccgctgccgatggagctggaccgaggggagtgcagttgctgcccgggtag

SEQ ID NO: 182215 - DNA, 360 bp, synthetic construct
  misc_feature 1..360: note = Description of Artificial Sequence: Synthetic coding sequence
  source 1..360: mol_type = other DNA
atggccgaggccatcacctacgccgacctgcggttcgtgaaggccccgctcaagaagagcatttcaagccgacttggacaggacccgggggctgacgatgatggggaaattacctatgagaatgttcaagtacccgctgtgctgggcgtgcctagctctcttgcaagctcagtgctgggtgataaagccgcagtgaagtcggagcagcctaccgccagctggcgcgcggttacgtccccagcagtaggccgcatcctgccttgtaggacgacatgccttcgctacctgttgttgggtctgctcctgacatgcttgctgctgggcgtcactgctatttgcctgggggttaggtgtgaatag

SEQ ID NO: 182216 - DNA, 1080 bp, synthetic construct
  misc_feature 1..1080: note = Description of Artificial Sequence: Synthetic coding sequence
  source 1..1080: mol_type = other DNA
atggccgaggccatcacctacgccgacctgcggttcgtgaaggccccactcaagaaatccatctcctcacgactcggacaggaccctggcgctgacgatgacggggaaatcacatacgagaacgtgcaggtgccagcagttctaggtgtgcccagctccctggcttctagcgtgttgggcgataaagccgcggtgaagagcgaacagcccactgcctcttggcgggcagtcacgagtcctgcagtggggcgtatcctgccttgtcgcactacctgcctaagatatctgctgttggggttgctccttacttgcctgctgctaggggttacagccatatgcctcggagttaggtaccttcaggtttcgcagcaactgcaacagacgaatcgcgttctcgaagtcaccaactcatccctccggcagcagctgcggctcaagatcacacagttgggccagtccgccgaggacctccagggctcacgaagagaactcgctcaaagccaagaagctctccaggtggaacagcgagcccatcaagccgctgaggggcagctgcaagcctgtcaggctgacagacaaaagacgaaagagaccctgcaaagcgaagagcagcagcggagagccctcgaacagaagctttccaatatggagaaccgcctgaagccttttttcacgtgcggcagtgccgacacatgctgtccctccggatggatcatgcaccagaaaagctgtttctacattagcttgacctcaaagaattggcaggaaagtcaaaagcagtgtgagacacttagcagcaagctggcaactttttccgagatctatcctcagtcgcattcctactatttcctgaactcattgttgcctaatgggggatcaggcaatagctactggaccgggctgtcatccaataaggactggaagctgacagatgatactcagcgaactcgtacctacgctcagtccagcaaatgcaataaagtccataaaacgtggtcttggtggaccctagaatcagagtcatgtaggtcgtcactgccttacatatgtgaaatgacagctttccgcttccctgattag

SEQ ID NO: 182217 - DNA, 1080 bp, synthetic construct
  misc_feature 1..1080: note = Description of Artificial Sequence: Synthetic coding sequence
  source 1..1080: mol_type = other DNA
atgcagacccggaacccccagagccacggcgagaacggcgccagcccttggtcatggggggatagactgggacctggacccgatcctggggcggacgacgacggagaaattacttacgaaaacgtccaagtccccgccgtgctgggcgtccccagcagccttgcatcttccgtgctgggcgacaaggccgctgtcaagagcgagcagcctacagctagctggagagcggtgactagccccgcagtgggaagaatacttccttgtcgcacaacatgcttacgctacttgctgctgggtttactgttgacttgtctgctgctgggagtcaccgctatatgtctgggagtgaggtacttgcaggtttctcagcaactccagcagaccaaccgcgtgctggaggtgacaaactcatcgctacgacagcagctgcgtctgaaaatcactcagctgggacagagtgctgaggacttgcagggctccagaagggaactggcccagagtcaggaagccctccaggttgaacagcgagcacaccaggctgctgaaggccagttacaggcctgccaggctgacaggcaaaagaccaaagagaccctgcagtctgaagagcagcaacgcagggcgctggagcagaaactgagcaatatggagaaccggctcaagccattctttacatgcggcagtgctgatacttgttgccccagtgggtggatcatgcatcagaagagttgtttttatatctctctcacaagcaaaaattggcaggagtcacagaagcaatgcgagaccctcagttccaaactggctaccttctccgaaatctacccacaatcccactcctactacttcttaaacagtcttctgcctaatggggggagcggaaactcttattggactggcctcagcagtaacaaggattggaaactgactgacgatactcagcgcacccgtacttacgcccaaagctctaaatgtaataaagtccataaaacttggagctggtggacccttgaaagtgagtcctgtcggagtagcctgccgtacatctgcgagatgacggcctttcgtttccccgattag

SEQ ID NO: 182218 - DNA, 891 bp, synthetic construct
  misc_feature 1..891: note = Description of Artificial Sequence: Synthetic coding sequence
  source 1..891: mol_type = other DNA
atgcaccggcggcggagccggagctgccgggaggaccagaagcccgtaatggatgaccagagggatctaatctccaacaacgaacagttacccatgctgggcagaaggcctggggccccagagagcaaatgcagccggggagcgctgtatacagggttctccatcctcgtcacccttctcctggccgggcaggccaccacagcttactttttgtaccaacagcaaggcagacttgacaagctgacagtcacatcacagaacctccagttggagaacctccgcatgaagctgccaaaaccaccaaaacctgtcagcaagatgcgcatggccacacctttactgatgcaggctctcccgatgggagccttgccgcagggacccatgcagaatgcgaccaaatatggaaacatgaccgaggatcacgtcatgcacctcctccagaatgccgaccccctcaaggtgtatccccccctgaaaggcagttttccagaaaaccttcggcatctgaaaaataccatggaaacgattgattggaaggtgtttgaatcatggatgcatcactggctgctgttcgaaatgtctcgccactctcttgaacagaagcccacggatgctcctccaaaagtcctaacgaagtgccaagaggaagtgagccatatccccgcagtccaccccggatcgtttaggcccaaatgcgacgaaaacggcaattatctccccctgcagtgttatggaagcattgggtactgttggtgtgtgttcccaaatggcacggaggttcctaatactagatcaagggggcaccacaattgctccgagagcctggagctcgaggatccctctagtggactcggagttacaaaacaagatctcggccctgttcctatgtag

SEQ ID NO: 182219 - DNA, 699 bp, synthetic construct
  misc_feature 1..699: note = Description of Artificial Sequence: Synthetic coding sequence
  source 1..699: mol_type = other DNA
atgcaccggcggcggagccggagctgccgggaggaccagaagcccgttatggacgaccagcgcgacttgatttccaacaacgagcagcttcctatgttaggcaggcgcccaggagctcccgagtcaaaatgctcacgtggtgccttgtacacagggtttagcatcctcgtgactctactactggcaggacaggccaccaccgcctactttctctatcagcagcagggcaggctggataaactgaccgtcacctctcagaatcttcagcttgagaaccttagaatgaagctgcccaagccacctaagcccgttagtaaaatgagaatggcaaccccacttctaatgcaggccctgcccatgggggccctcccccagggacctatgcaaaatgcaacgaaatacggcaacatgacggaggatcacgtaatgcatcttttacaaaatgcggatcctttaaaagtctacccgcccttaaaagggagtttcccagagaatctgaggcaccttaagaatacaatggaaacgatcgattggaaagtgttcgagagttggatgcaccactggttactgtttgagatgtccaggcactccctggagcagaagcctaccgacgcccctccgaaggaatccctggagctggaagacccttcttcaggtctcggcgtgacaaagcaggatttggggcccgtgcccatgtag

SEQ ID NO: 182220 - DNA, 483 bp, synthetic construct
  misc_feature 1..483: note = Description of Artificial Sequence: Synthetic coding sequence
  source 1..483: mol_type = other DNA
atgcaccggcggcggagccggagctgccgggaggaccagaagcccgtgatggacgaccaaagagacctcatctccaataatgagcagctgcctatgctgggccggcgccctggtgcaccagagtcaaagtgtagtagaggtgcattgtacacaggttttagtattctggttactctgctcttggccggccaagctactacggcatattttttataccagcagcagggcaggctggacaagctgaccgtcacatcacagaacttacagcttgaaaacctcaggatgaaactaccgaaacctccgaagccggttagcaagatgagaatggctaccccccttctcatgcaagcgttgcctatgggagccctccctcaggggcctatgcagaacgcgacaaaatacggaaacatgaccgaggatcacgtcatgcacctcctgcagtcccactggaactggagaacaagactcctcggctgggtgtag

SEQ ID NO: 182221 - DNA, 951 bp, synthetic construct
  misc_feature 1..951: note = Description of Artificial Sequence: Synthetic coding sequence
  source 1..951: mol_type = other DNA
tgacggagctgccgggaggaccagaagcccgtgatggacgaccagcgagacctgatcagcaataatgaacagctgccaatgctgggccggcgccctggggcacccgaatcaaagtgttctcgtggagccctttacacaggcttctctattctcgtcacccttctccttgccggtcaggccactacggcatatttcctctatcagcagcagggcaggcttgataagcttacggtgacatcacagaatttacagctggaaaatctgcgcatgaaactccctaagccgccaaagccagtttctaagatgaggatggccacgccgctccttatgcaggcactccccatgggggctcttccgcagggacccatgcagaatgcaacgaagtacggtaacatgacggaggatcatgtcatgcatttgctgcagaacgcagaccctctcaaagtctacccacccttaaagggctccttccccgagaatcttcgccacctgaagaacaccatggagacaatcgactggaaggtgttcgagagttggatgcatcactggctcctctttgaaatgtctaggcatagtcttgagcagaagcccactgacgctcccccaaaagtactaaccaaatgtcaagaagaggtttcacacatacccgccgtccacccaggctcctttagaccaaaatgcgacgagaacggcaattacctcccactgcagtgctatggtagtataggatactgttggtgtgtgttccccaatggaaccgaagtgcctaatactagatctaggggccaccacaattgtagcgagtctttagagctcgaggatccatcctcaggactgggtgtgacaaaacaggacctggggcctggcaaggggcttgcagaaggtcacctcgtgacaagtagtagcagtccagccgggcctgctccactctgggctggggagggcgtttag

SEQ ID NO: 182222 - DNA, 369 bp, synthetic construct
  misc_feature 1..369: note = Description of Artificial Sequence: Synthetic coding sequence
  source 1..369: mol_type = other DNA
atgcaccggcggcggagccggagctgccgggaggaccagaagcccgtgatggatgatcagcgagacctcatttcgaacaacgagcagctgcccatgcttggacgccgcccaggcgctccggagtccaagtgctcgcgcggtgcactctacacgggatttagcatcctggtgacattattgctcgcgggacaagcgacaaccgcctactttctctaccagcagcagggcaggttggataagttaaccgtgacctctcaaaacctacagttagagaacctgagaatgaagctccctaagccacacgcagaatgccatcaggtctggcagcacgatcggggtccatgtgatgcccctgctcctgaatgttag

SEQ ID NO: 182223 - DNA, 459 bp, synthetic construct
  misc_feature 1..459: note = Description of Artificial Sequence: Synthetic coding sequence
  source 1..459: mol_type = other DNA
atgcaccggcggcggagccggagctgccgggaggaccagaagcccgtgatggacgaccagcgggatctcatctccaataacgaacaactgcccatgttgggccgccgcccaggcgcaccggagtcaaagtgtagtcggggggccctgtacaccggcttttctatcctagtgacactcctgctcgccggccaagccactactgcctacttcctgtaccagcagcaagggaggctggataagctcactgttaccagtcaaaacctgcaacttgaaaacctgcgtatgaagttgcccaaacccccaaagcccgtgagcaagatgaggatggccactccactgctcatgcaggcactcccgatgggggccctcccacagggacccatgcagaatgcgactaagtacggtaacatgacagaggatcatgtgatgcacttgcttcaggaggttgctaagtcatag

SEQ ID NO: 182224 - DNA, 690 bp, synthetic construct
  misc_feature 1..690: note = Description of Artificial Sequence: Synthetic coding sequence
  source 1..690: mol_type = other DNA
atggcccggctggccctgagccccgtgcccagccactggatggtggcgcttctcctccttctgtccgccgaacctgtacccgcggcgcgttccgaggaccgttatcggaatcccaaagggagcgcttgtagtagaatctggcaatctccgcgctttatagcccgaaagagagggtttactgttaaaatgcactgttatatgaatagcgcctccggcaatgtaagctggttgtggaagcaagagatggacgagaatccccagcagctgaaactcgaaaaagggcggatggaagagagccagaatgaatccctggcaaccttaactatacaaggaatcaggttcgaggataatggtatttatttctgtcagcagaagtgcaacaacacatctgaagtctatcaaggctgtggcaccgaattgcgcgtgatggggtttagtacactggcccagctgaagcaaagaaacacccttaaggacggaattatcatgattcagaccctgctcatcatcctgtttattattgtccccatctttctccttctcgataaagacgattccaaggccggcatggaggaggaccatacatacgaaggcctggatattgatcagacagctacttacgaagacatcgtgactctccgaaccggcgaagtgaagtggagtgtgggggagcatccaggtcaggagtag

SEQ ID NO: 182225 - DNA, 378 bp, synthetic construct
  misc_feature 1..378: note = Description of Artificial Sequence: Synthetic coding sequence
  source 1..378: mol_type = other DNA
atggcccggctggccctgagccccgtgcccagccactggatggtggccctgctgctgctgctgagtgccgagccagttccagctgcacgcagtgaggaccgctaccgaaatccaaagggatttagcaccctggcccagctgaagcaacggaatacactgaaagacggtatcatcatgatccaaactcttcttattatactctttatcattgtgccaatcttcctcctcctcgacaaggacgattctaaggcgggcatggaagaggaccatacttatgaaggcctggacatcgatcagacagcaacgtacgaggacatagtgactctccgaacgggtgaggtcaagtggtcggttggagagcatcccgggcaggaatag

SEQ ID NO: 182226 - DNA, 693 bp, synthetic construct
  misc_feature 1..693: note = Description of Artificial Sequence: Synthetic coding sequence
  source 1..693: mol_type = other DNA
atggcccggctggccctgagccccgtgcccagccactggatggtggcgttgttgcttcttctgtccgccgctgaacccgtccctgcagccaggtcagaagatcggtatagaaacccaaagggttcagcttgctcgcgaatctggcagagcccacgcttcatcgctagaaaaagaggcttcacagtgaagatgcactgctacatgaactccgcctccgggaacgtctcctggctatggaaacaggagatggatgagaatccgcagcagctcaaactcgagaagggaaggatggaagaatcccagaacgagtctctcgctaccctgacaattcagggaattcgcttcgaggataatggcatatacttctgccagcagaagtgcaataatacaagcgaagtgtaccagggctgcggaacagagttaagagtgatgggattttcaacgttagcccagcttaaacagcggaataccctaaaggacggcataataatgattcagacactcctgatcatcctcttcatcatcgtgccgatcttccttctactggacaaggatgatagcaaagcgggtatggaggaggaccacacatacgagggactggacatcgatcaaaccgccacttacgaggacatagtgaccctgcgtaccggcgaagtcaaatggagcgttggggaacacccagggcaggagtag

SEQ ID NO: 182227 - DNA, 711 bp, synthetic construct
  misc_feature 1..711: note = Description of Artificial Sequence: Synthetic coding sequence
  source 1..711: mol_type = other DNA
atgggcgtggagggctgcaccaagtgcatcaagtacctgctgttcgtattcaatttcgtattctggctagctggcggggtgattctaggtgtggccctttggctcagacacgatcctcaaaccacaaacctactgtatctagaactgggtgataagcccgctcctaacaccttttatgtaggcatctacattctcattgccgtgggtgcagtgatgatgtttgtgggcttcctcggctgttacggtgccatccaggagtcacagtgtctcttggggaccttcttcacatgcctggtgattctcttcgcatgtgaagtggccgcgggaatttggggtttcgtaaataaagaccagattgcaaaggacgtgaaacagttctacgatcaagcccttcagcaggccgtggtagacgatgatgcaaataacgcaaaggccgttgtgaaaacctttcacgagacactggattgttgtggcagcagtacattgaccgccttgacaacaagcgtccttaaaaacaatctgtgcccctcaggatcgaacatcatttcaaacctgtttaaggaagactgtcatcagaaaattgacgatctcttttccgggaaactgtatctgatcgggatagctgccatagtagtggctgtgattatgatttttgagatgattctcagtatggtgctgtgctgtggcattcgcaatagctctgtgtactag

SEQ ID NO: 182228 - DNA, 618 bp, synthetic construct
  misc_feature 1..618: note = Description of Artificial Sequence: Synthetic coding sequence
  source 1..618: mol_type = other DNA
atgagccggggcctgcagctgctgctgctgagctgcgcctacagcctcgcacccgcgactccagaagtcaaagtcgcttgctcagaagacgtcgatctgccgtgcacggcaccatgggacccacaggttccttataccgtttcttgggtgaaactccttgaaggtggggaagaacgtatggaaaccccccaagaagaccacctgcgaggacagcactatcatcagaaagggcagaatggctcattcgatgcacccaatgaaagaccttatagcctgaagattcgaaacacaacaagttgcaattccgggacatatcggtgtactctgcaggaccctgacggccagagaaatctgtccggcaaagtgattctgcgggtgactgggtgcccagcccagcgcaaagaagagacgtttaagaagtacagagccgaaatcgttctgctcctcgctcttgtgatcttctacctgactctgattatttttacttgcaagttcgcccgacttcaaagcatattcccagacttcagcaaggcaggcatggaacgggccttcctacctgtgaccagccctaataagcaccttggactggtcactccccacaagacggagctggtgtag

SEQ ID NO: 182229 - DNA, 351 bp, synthetic construct
  misc_feature 1..351: note = Description of Artificial Sequence: Synthetic coding sequence
  source 1..351: mol_type = other DNA
atggacccccagtgcaccatgggcctgagcaacatcctgttcgtgatggcttttctgttgagtgaattggaggatcctcagccccctccagaccacatcccatggatcaccgcagtgctgccaacagtcattatatgtgtcatggtgttctgtctgattctgtggaaatggaagaagaaaaaacggccaaggaattcctacaagtgcggaaccaatacaatggaaagggaagagtccgaacaaacaaaaaaaagggagaaaatacatattcctgaacgctccgacgaggcccaaagagtattcaaatcatccaaaacatctagttgcgataaaagcgacacttgcttttag

SEQ ID NO: 182230 - DNA, 990 bp, synthetic construct
  misc_feature 1..990: note = Description of Artificial Sequence: Synthetic coding sequence
  source 1..990: mol_type = other DNA
atggacccccagtgcaccatgggcctgagcaacatcctgttcgtgatggctttcttactcagtggagcggcccccctcaagatccaggcctactttaacgagactgccgacctaccttgccagtttgccaattcccagaatcagtccctctccgagttggtggtgttttggcaggaccaggaaaatctcgtgcttaacgaggtttatctgggtaaagagaagttcgactccgtccatagcaagtacatgggcaggacctctttcgactcagatagctggactcttcgcctacataatttgcaaattaaggacaaggggctctaccaatgtatcattcaccataaaaaacctactggtatgatacgcattcaccagatgaacagcgaactctctgttctggctaatttcagccagccggagatcgtgccaatatcaaatattaccgaaaacgtctacattaacttaacctgcagcagtatccacggataccctgaacctaagaagatgagcgtcctcttacgtaccaagaattctaccatcgaatacgatggagtcatgcaaaaatcacaggataacgtgactgagctttacgacgtgagtatatcactcagtgtctcctttccagatgtgacctcgaatatgaccatattctgcatcttggaaacagacaagacacgcttgctatcgagcccttttagcattgagttggaagatccccagccccctccagaccatatcccctggatcaccgccgttctgcctaccgtaattatttgtgtgatggtattctgcctcatcctctggaagtggaaaaagaagaaaagaccaaggaatagctataagtgtgggaccaacacaatggagagagaagaatcagagcagacgaaaaaaagggaaaagattcacattccagagagatcagatgaggcccaaagagttttcaagtcaagtaaaactagcagctgcgacaagagcgatacctgcttttag

SEQ ID NO: 182231 - DNA, 972 bp, synthetic construct
  misc_feature 1..972: note = Description of Artificial Sequence: Synthetic coding sequence
  source 1..972: mol_type = other DNA
atgggcctgagcaacatcctgttcgtgatggccttcctgctgagcggcgcagcacccttaaagattcaggcctattttaacgagactgccgatctgccctgtcagttcgcaaattcccagaatcaatctctctctgagcttgtggtgttttggcaagaccaggaaaacctggtcctcaatgaagtatatctgggaaaggagaaattcgatagtgtccatagtaaatatatggggaggacttctttcgattctgattcctggactctcagactgcataatttgcaaatcaaagacaaagggctgtaccagtgtatcattcaccataaaaagcccactggaatgattcgcattcaccaaatgaactcggagttgtccgtgttagccaatttctctcagccagagatcgtcccaatcagcaacattaccgaaaacgtctatataaatcttacttgcagttctatccacggctaccccgagccaaaaaaaatgtccgtgctccttcgtacaaaaaacagtactatagagtatgacggtgtgatgcagaagagccaggataacgttactgagctgtacgacgtgagcatctcgctgagtgtatcattccctgacgtcacctcaaatatgacaattttctgcatcctggaaacagataagaccaggctcttgtcctcaccctttagcattgaactggaggatccacagccacctccagaccatataccgtggattaccgcagttttgccaaccgtgattatctgtgtcatggtgttctgcttgattctatggaagtggaagaaaaaaaagcgcccaaggaattcatacaaatgtggcacaaatactatggagcgagaagagagcgagcagaccaagaaacgcgaaaaaatacacatccccgaacggtccgacgaggcacagagggtctttaaatcctctaagacaagctcgtgtgataagtccgatacttgtttctag

SEQ ID NO: 182232 - DNA, 504 bp, synthetic construct
  misc_feature 1..504: note = Description of Artificial Sequence: Synthetic coding sequence
  source 1..504: mol_type = other DNA
atgggcctgagcaacatcctgttcgtgatggccttcctgctgagcggagccgctccactcaagattcaggcctactttaacgagaccgccgatctgccttgccagttcgccaatagtcaaaatcagtcgttaagcgaactggtcgtgttttggcaagatcaagagaatcttgtgttgaatgaggtctatctcggaaaagagaaatttgattccgtccactctaaatacatgggccgcactagttttgatagcgattcttggacgctacggctgcataacctacagatcaaagacaagggactctaccagtgtatcatccatcacaaaaagccgacaggtatgatccggatccatcaaatgaatagcgagctgtccgtgctggctaacttctctcagcccgagatcgtgccgattagtaatatcaccgagaacgtatacatcaatctgacatgcagttcaatccacggctatccagagcctaagaaaatgagtgtccttttgtag

SEQ ID NO: 182233 - DNA, 744 bp, synthetic construct
  misc_feature 1..744: note = Description of Artificial Sequence: Synthetic coding sequence
  source 1..744: mol_type = other DNA
atgggccggaccagcttcgacagcgacagctggaccctgcggctgcacaaccttcagattaaggacaagggactataccagtgtatcattcatcataaaaaacccaccggtatgattcgaatccaccaaatgaatagcgagctgagtgtactggccaactttagccaacccgagattgtaccaatttctaatatcactgagaacgtgtatattaacctcacttgcagcagcattcatgggtaccccgagcccaaaaaaatgagcgtcctattgaggaccaagaacagcaccattgaatatgacggtgtcatgcagaagagtcaagacaatgtgactgaactctatgacgtgagcatttctctgtcagtatccttccccgacgttaccagcaacatgacaatattctgcatcctggagaccgacaagactcgcctgttatctagccctttttccatcgaattggaggatccacaacctcccccagatcacataccctggataacagctgtgttgcccacggtgattatctgtgttatggtcttttgtttgatactgtggaagtggaagaagaagaagcggccaaggaatagttataaatgtggcacaaacacaatggagagggaggaaagcgagcagacaaagaaacgggagaagatccatatccccgaacgctccgatgaggcccagcgggtgttcaaatcaagcaagactagtagctgcgacaaatctgatacatgcttttag

SEQ ID NO: 182234 - DNA, 654 bp, synthetic construct
  misc_feature 1..654: note = Description of Artificial Sequence: Synthetic coding sequence
  source 1..654: mol_type = other DNA
atggacccccagtgcaccatgggcctgagcaacatcctgttcgtgatggccttcctgctctcagccaatttctcacagcctgaaatcgttcctatcagcaatataacggagaatgtctacataaacctgacttgcagctcgattcacggttaccctgagccaaaaaagatgtcagtcctgctacggacaaaaaacagcacgattgagtatgatggcgtgatgcagaagagccaggataatgtaaccgaactgtacgacgtctcgatttcgttatccgtctccttcccagacgtgacttccaatatgacaatcttctgtatcctcgagactgataagacgcggttattgagctcacctttcagcatcgagttggaagatccccagcccccccccgatcacattccctggatcaccgccgtgctgcccacggtgatcatatgcgtgatggtgttttgcctgattttgtggaaatggaagaaaaaaaaacgcccccggaactcttataagtgtggcacaaacacgatggagagggaagagtccgaacagacgaagaagcgcgaaaaaattcacattccggagaggtctgatgaggcgcagagagtgtttaaatcttctaagaccagttcatgtgacaagtccgacacatgtttctag

SEQ ID NO: 182235 - DNA, 732 bp, synthetic construct
  misc_feature 1..732: note = Description of Artificial Sequence: Synthetic coding sequence
  source 1..732: mol_type = other DNA
atgcggccccggctgtggctgctgctggccgcccagctgaccgtgctgcatggcaacagcgtgcttcagcagaccccggcctatatcaaagtgcagaccaataagatggtgatgctgtcatgtgaggccaaaatttctctgtcaaatatgcggatctattggcttaggcagcggcaagcacctagctccgattcacaccatgagtttttggctctttgggactctgcaaaggggacaatccacggcgaggaagtcgagcaggaaaaaatagctgtcttccgtgatgcgtcccggtttatcctgaacttgacttcagtcaaacctgaggactctgggatttacttctgtatgattgttgggagtccggagttaacattcggaaaaggcacccaactgagcgtggtggacttcctgccaaccacagctcagcctacgaagaagagcacactgaaaaaacgagtatgccggcttccacgcccagagacccaaaaggggccattatgctcgcccataacactcggactgctggtagccggtgtattggtgctgctcgtgagtctaggcgtggctatacatttgtgttgtaggaggaggcgcgcccgtctaagattcatgaagcaaccccagggggagggaataagcgggaccttcgtgcctcagtgtctgcacgggtattacagcaataccacaacctcacagaagctgctcaatccctggatactgaagacgtag

SEQ ID NO: 182236 - DNA, 642 bp, synthetic construct
  misc_feature 1..642: note = Description of Artificial Sequence: Synthetic coding sequence
  source 1..642: mol_type = other DNA
atgcggccccggctgtggctgctgctggccgcccagctgaccgtgctccacggcaattccgtgctgcaacagactcctgcatacatcaaagtgcagaccaacaagatggtcatgctgtcatgcgaggccaaaatctctctctcaaatatgagaatttattggctgcggcagcgacaggcaccctcctcggattcgcaccatgaatttctcgcactttgggactccgccaagggcacgatacacggtgaggaagtcgaacaggaaaagatcgctgtcttccgggatgcatcgcgcttcatcttgaacctgacctctgtgaagcctgaggactctggaatttatttctgcatgattgtgggcagccccgagctgacgttcggaaagggtacgcagctctctgtcgttgactttctgcccacaaccgcccagcctaccaagaagtcaactctcaagaagcgtgtttgcagacttccacggcctgaaacccagaaaggaaggcggcggagggctagactgagatttatgaagcaacctcagggagaaggaatctcagggaccttcgtcccacagtgtcttcatgggtactacagtaacactaccacgtcccaaaaactactgaacccctggatcctgaagacctag

SEQ ID NO: 182237 - DNA, 633 bp, synthetic construct
  misc_feature 1..633: note = Description of Artificial Sequence: Synthetic coding sequence
  source 1..633: mol_type = other DNA
atgcggccccggctgtggctgctgctggccgcccagctgaccgtgctccacggaaactcggtcttgcagcaaacacccgcctacattaaagtgcaaaccaacaaaatggtcatgctctcgtgcgaggctaaaatctctctgagcaacatgcgcatttactggctgcgccagcggcaggccccaagttccgatagtcaccacgaatttctagccctctgggattctgcaaaagggactatccacggagaagaagtcgaacaggagaaaattgctgtcttcagagatgcttccagatttattctcaatctgacctcggtgaagccagaagacagtgggatctacttctgcatgatcgtgggatctcccgagttgactttcgggaaagggacccagctgagcgttgtggacttcctgccaactaccgcccagcccactaagaagagtaccctcaaaaaacgcgtttgcagactccctcggccagagactcagaagggcccgctgtgtagccctatcactctgggtctgctagtggctggggtattggtgcttctagtaagcctcggcgtggctattcacctgtgttgtaggaggcgtcgggctaggcttaggtttatgaagcaattctacaaatag

SEQ ID NO: 182238 - DNA, 666 bp, synthetic construct
  misc_feature 1..666: note = Description of Artificial Sequence: Synthetic coding sequence
  source 1..666: mol_type = other DNA
atgcggccccggctgtggctgctgctggccgcccagctgaccgtgttacacggcaattcggttttgcaacaaactccagcgtatattaaggtgcagacaaataaaatggttatgctcagctgtgaagcaaagattagcctgtccaatatgaggatttattggctgcgccagagacaagcaccgtccagtgattcccaccacgaattcctcgcactatgggattcagctaagggtacgattcatggcgaggaggtggagcaagagaagatcgcggttttccgtgacgcttcaagatttatcctcaatctgaccagcgtgaagcccgaggacagcggcatctacttctgcatgatcgtgggctctccggaattgacattcgggaagggtacgcaactcagtgtggtggactttctcccaacaaccgctcagcccacgaagaagtccacactgaagaagagagtctgtcggttaccccggcccgagacacagaaagggccgctgtgtagccccattacacttggtctcctggtggcgggcgtgttggtgctgcttgtgagtttgggagtggcaatacatctctgttgtcggcgtaggcgggctaggctgcggtttatgaaacagttgcggctgcaccctctcgagaaatgctcaagaatggactattag

SEQ ID NO: 182239 - DNA, 597 bp, synthetic construct
  misc_feature 1..597: note = Description of Artificial Sequence: Synthetic coding sequence
  source 1..597: mol_type = other DNA
atgcggccccggctgtggctgctgctggccgcccagctgaccgtgttgcatgggaactcggtgctgcaacagacccccgcatatatcaaagtgcagacaaataaaatggtaatgttatcttgcgaggccaagatctctctgagcaacatgcgcatctactggctacggcaacgccaggccccctcatctgactcgcaccatgagttcctcgcactgtgggactctgctaaaggaactatccacggggaagaggtcgaacaagagaagatcgccgtttttagggatgcttctaggtttatccttaatttaacatctgtgaagcccgaggattcaggtatctacttctgtatgatagtcggatcccctgaactgacattcggtaaaggaacacagctaagtgtagtggacttccttccaaccaccgcccaacccacaaaaaagtctactttgaagaagagggtttgccgcctgccacggccagagactcagaaggggctgaaagggaaggtgtaccaggaacctctaagcccaaacgcctgcatggacaccactgctatcttgcagccacatcgctcttgcctaacccacggtagttag

SEQ ID NO: 182240 - DNA, 93 bp, synthetic construct
  misc_feature 1..93: note = Description of Artificial Sequence: Synthetic coding sequence
  source 1..93: mol_type = other DNA
atgcggccccggctgtggctgctgctggccgcccagctgaccggccgtcgccgacgggcgagactgcgcttcatgaaacaattatataagtag

SEQ ID NO: 182241 - DNA, 624 bp, synthetic construct
  misc_feature 1..624: note = Description of Artificial Sequence: Synthetic coding sequence
  source 1..624: mol_type = other DNA
atgcggccccggctgtggctgctgctggccgcccagctgaccgtgttgcacggcaattccgtccttcagcaaactcctgcctatatcaaggtacagaccaataaaatggtcatgctaagctgcgaggctaaaatcagtctgtcgaacatgcgtatctactggctccgacagagacaagcaccttcatcagacagtcatcacgaattcctggccctctgggacagcgctaaaggtaccatacacggtgaggaagttgaacaggaaaagattgccgtctttcgtgatgcctcacgcttcattctaaatctaacaagtgtgaaaccagaggatagcggtatttatttttgcatgattgtgggaagccccgaactgacattcggtaagggaacacagttatcagtagtagattttcttcctaccactgctcagcctacgaagaagagtactctaaaaaagagagtgtgcaggctgccgcggccggaaacacagaaagggcccttgtgcagccctattacccttggcctcttggtcgccggtgtgctagttcttctggtaagcctgggcgtagctattcacctgtgctgcaggcgtcggcgtgcccgactgcggttcatgaaacagtag

SEQ ID NO: 182242 - DNA, 153 bp, synthetic construct
  misc_feature 1..153: note = Description of Artificial Sequence: Synthetic coding sequence
  source 1..153: mol_type = other DNA
gagcggggccgggagcggcgggtgaagctgcggttcagcgcccggcctcaaggggaagggatcagcggcaccttcgtgccacaatgcctgcacggctattatagtaatacaaccacaagtcaaaagctgctgaatccgtggatcttaaaatag

SEQ ID NO: 182243 - DNA, 687 bp, synthetic construct
  misc_feature 1..687: note = Description of Artificial Sequence: Synthetic coding sequence
  source 1..687: mol_type = other DNA
atgcccgtgaagggcggcaccaagtgcatcaagtacctgctgttcggcttcaactttattttttggctggccggaattgccgtgttggccatagggctgtggttacgtttcgattcacagacgaagtctatcttcgagcaggaaaccaacaacaacaactccagtttttacactggtgtatacattcttattggcgcaggtgcgctcatgatgctggtgggatttcttggatgttgtggcgcagtgcaggaatcccagtgcatgctcggcctgttcttcggcttcctgctggttattttcgcaatcgaaattgcggccgccatctggggctactctcataaggacgaggtgattaaggaggtgcaggaattttacaaggacacgtacaataagctgaagacaaaagacgagcctcagcgtgaaactttaaaagccatccattatgccttgaattgctgtggcctggcagggggagttgaacagtttatttccgacatttgtcctaaaaaggatgttttggagacctttacggtaaagagttgtcccgatgcaatcaaggaggtgttcgataataagttccacataattggagcggtcggaatcggaatcgcggtggtcatgatctttgggatgatctttagtatgattctgtgttgcgctattagacgtaacagggagatggtatag

SEQ ID NO: 182244 - DNA, 480 bp, synthetic construct
  misc_feature 1..480: note = Description of Artificial Sequence: Synthetic coding sequence
  source 1..480: mol_type = other DNA
atgatgctggtgggcttcctgggctgctgcggcgccgtgcaggagtcccagtgcatgttgggcctgttttttggtttcctcctcgtgattttcgcaatagagatagccgctgccatctgggggtactcacacaaagacgaggttattaaagaagtccaggagttctataaagatacttataataagctgaagacaaaggacgagcctcaacgtgagaccctaaaggccatacattacgccctgaactgctgcggcctggccggtggtgtggagcaattcatctctgacatatgtcccaagaaagacgtgctggaaactttcacagtcaaatcctgccccgatgcgattaaggaagtgtttgacaacaagtttcacatcataggcgccgttgggataggcatagccgtggtgatgatctttgggatgattttttcgatgattctctgctgcgccatccgcaggaatcgagaaatggtgtag

SEQ ID NO: 182245 - DNA, 687 bp, synthetic construct
  misc_feature 1..687: note = Description of Artificial Sequence: Synthetic coding sequence
  source 1..687: mol_type = other DNA
atgcccgtgaagggcggcaccaagtgcatcaagtacctgctgttcggcttcaactttatcttttggcttgctggcatcgcagtgttagccattggtctttggctgaggttcgatagtcagaccaagagcatttttgagcaggagaccaataataacaactcttcattttacaccggtgtctacatactcattggcgctggggccctgatgatgctagtggggttcctcggatgctgtggcgcagttcaggagtcccagtgtatgctcggactgttttttggcttccttttggtgattttcgccatcgagatcgctgcagctatctggggttattcccacaaagacgaggtcattaaagaggtccaggagttttataaagatacctacaacaagttgaaaactaaagacgagccccagcgcgaaactctgaaggccatacactatgccttgaattgttgcggactggcaggaggagtggagcagttcatctctgatatttgtccaaagaaggatgtactggagacctttacggtgaagtcttgcccggatgctatcaaggaggttttcgataataagttccatatcataggcgccgtgggtataggcatagctgttgtcatgatttttgggatgattttctccatgattctctgctgcgccatacggaggaaccgagaaatggtgtag

SEQ ID NO: 182246 - DNA, 687 bp, synthetic construct
  misc_feature 1..687: note = Description of Artificial Sequence: Synthetic coding sequence
  source 1..687: mol_type = other DNA
atgcccgtgaagggcggcaccaagtgcatcaagtacctgctgttcgggttcaactttatcttctggctggctggcatcgcagtcttggcaatagggctctggctccgctttgatagtcagaccaagtccatttttgagcaggagacaaacaacaataactcaagcttttacaccggtgtgtacatcctgattggcgcaggggccttaatgatgttagtcgggtttctcggttgttgcggcgccgtgcaggagtcacagtgtatgcttggtctcgctactaagcgaactatgtttcctcccttcctggaggaccacgtatgtttctttagcttgaacccccaattctttggattcttgctagtgattttcgcgattgagatcgccgcagcgatttggggatacagtcacaaggacgaggtgatcaaggaagttcaggagttttataaggacacatacaacaagcttaaaacgaaggacgagccccagagggagaccctgaaggcaatacattacgctctgaactgttgcggcctggctgggggcgtcgaacagtttatctccgacatttgcccaaagaaagacgtcttagagacctttacggtgaagtcctgccccgacgcgatcaaggaggtgtttgacaacaaatttcatatcattggtgccgtgggaattgggattgctgtgtag

SEQ ID NO: 182247 - DNA, 546 bp, synthetic construct
  misc_feature 1..546: note = Description of Artificial Sequence: Synthetic coding sequence
  source 1..546: mol_type = other DNA
atgcccgtgaagggcggcaccaagtgcatcaagtacctgctgttcggtttcaacttcatcttctggctggctggaatcgccgttttggcgataggactgtggctgaggttcgattcccagactaagagtatcttcgaacaggaaactaacaataacaatagttccttctacacgggcgtgtacatactgataggggctggtgccttaatgatgcttgttgggttccttggatgttgcggcgccgtgcaggaatcgcaatgtatgctgggactcttttttggcttcctgcttgtaatctttgccatcgaaattgcagccgcgatctgggggtattcccataaggatgaagtgatcaaggaagtgcaggagttctacaaagatacttataataagttgaagacaaaagacgaacctcagcgagaaactctgaaagctatccattatgctctcaacctttggtttggttggggcagaggcaccgtatacctccggcacctgcctcaagaaggacgcaccagaaacctgcatagagaggtcctgtcttag

SEQ ID NO: 182248 - DNA, 426 bp, synthetic construct
  misc_feature 1..426: note = Description of Artificial Sequence: Synthetic coding sequence
  source 1..426: mol_type = other DNA
atgctgggcctgttcttcggcttcctgctggtgatcttcgccatcgaaatcgccgctgctatatggggatactcacacaaagatgaggtcatcaaggaagtgcaggagttttacaaggatacatataataagctcaaaactaaggacgaaccccagagggagaccctgaaggccattcattatgccctcaattgctgcggtcttgcaggaggtgtcgagcagtttatatcagatatttgtcctaaaaaggacgtgcttgaaacttttactgtgaaatcgtgtcccgacgcgatcaaggaggtgttcgataataagttccacataattggagccgtaggaatcggaatcgccgtagtgatgatttttggaatgatcttcagcatgatcttatgctgcgcgatcaggcggaatcgggaaatggtgtag

SEQ ID NO: 182249 - DNA, 1758 bp, synthetic construct
  misc_feature 1..1758: note = Description of Artificial Sequence: Synthetic coding sequence
  source 1..1758: mol_type = other DNA
atggagaagaagtggaagtactgcgccgtgtactacatcatccagattcattttgttaagggcgtgtgggagaagactgtgaataccgaagagaatgtgtacgccacattaggctcagacgtcaacttgacctgccagacccagactgtgggcttttttgtgcagatgcaatggtctaaagttaccaacaagatcgatcttatcgctgtgtatcatccacagtacggcttctattgtgcatatggaagaccctgtgagagcctcgtgaccttcaccgaaacaccagaaaacggatcaaagtggacactccatctgagaaatatgtcttgtagtgtgagtggccggtacgaatgcatgctggttttatatcctgaggggattcaaacaaagatatacaacctgttaatccagacacatgtgacagcagacgaatggaatagcaatcacaccattgagatagaaatcaaccagaccttagagatcccttgttttcagaatagcagcagtaagatctcctcagagtttacgtatgcttggtcggtggagaacagtagtaccgattcttgggtgctgttgtctaaaggcattaaggaggacaacggcacacaggagacattaatcagtcagaaccatctgatctctaattcaacacttctgaaggaccgcgtgaaactcggtacagactacaggctccatctaagccctgtacaaatcttcgatgacggcaggaagttcagctgtcacataagagtcggtccgaacaaaatcctgaggtcttcaacgacagtgaaagtgtttgccaaaccggaaataccagtgattgtggagaataattctactgatgtgctggtggagagaagatttacatgtttactgaagaatgtcttccccaaggctaacattacttggttcattgacggcagtttcctccatgatgagaaggagggaatttatataacgaacgaggagcgtaagggcaaggacggtttcttggagcttaagtcagtcttgaccagggtacacagcaataaacctgcgcagagtgacaacctcaccatttggtgcatggctctctccccggtcccaggaaacaaggtatggaacatctctagcgagaagattacattcctgctgggatccgagattagctctacagacccacccctcagtgtcacagagtccaccctggacacacagccatcccccgcctcctcagtgtcgcctgccaggtatccggctactagctcagtcacacttgttgatgtgagcgctcttagaccaaacacaaccccacaacccagcaacagcagtatgactacgcgcgggttcaattacccctggacctcttccggcacagacaccaagaaatcggtgtccagaattccatcagaaacatatagctcatccccctctggcgctggctccactctgcatgacaacgtgttcactagtacagcccgggcgttcagcgaagtgccaacaaccgctaatggctcaaccaagacaaatcacgtgcacataactggaatcgtcgtgaacaagccaaaagatgggatgtcctggcctgtgatagttgcagctctattattctgctgcatgattctgttcggacttggggttcgcaagtggtgtcaataccaaaaagaaatcatggagagacctcctccattcaagcccccccccccgcccatcaagtacacctgcattcaagagccgaacgaatcggacttaccttaccacgagatggagacgctgtag

SEQ ID NO: 182250 - DNA, 1710 bp, synthetic construct
  misc_feature 1..1710: note = Description of Artificial Sequence: Synthetic coding sequence
  source 1..1710: mol_type = other DNA
atggagaagaagtggaagtactgcgccgtgtactacatcatccagattcattttgttaagggtgtgtgggaaaagaccgtaaacactgaagagaacgtgtatgcgactttggggtcagatgtaaatctgacatgccagactcagactgttggcttcttcgttcagatgcagtggagcaaggtaaccaacaaaatcgacctgatagccgtctaccatcctcaatacggattctactgcgcttatggacgaccttgtgagtcgctggtcacctttacggaaacaccagaaaacggctctaagtggacgctgcatttgaggaacatgtcctgctctgtgagcggccgctatgaatgcatgctggtcctgtaccctgagggcatccagacaaaaatttataatctgctaattcaaacccacgtgaccgccgatgaatggaattctaaccataccatcgaaatagagattaatcaaactttggaaattccctgcttccagaactcctccagcaaaattagctccgaattcacgtacgcttggagtgtagaggacaacggaacgcaagagactcttattagccagaatcacttgatcagcaattctacattgctgaaggacagagtcaagcttggcaccgactacagacttcatttatccccagtgcagatttttgatgatgggcggaagtttagctgccacatcagggtaggaccaaacaagatacttcgcagttccacaaccgtgaaagtattcgccaagccagagattcccgtcatcgtggaaaataactctacagacgtcctcgtcgagcggcggtttacttgcttgctgaagaacgttttccccaaagctaacatcacatggtttatagatgggtctttcctgcatgatgagaaggaagggatctacatcactaatgaggaacggaaagggaaggatggatttctggagctcaagtcggtgttgacgagggtgcactccaataagcccgcccaatcagataacctgaccatctggtgcatggctctgagcccagtgcccggcaataaggtatggaacatttccagcgaaaagatcacatttctactgggcagtgagatttcttcaaccgacccccctctgtcagtgactgagtctacgctggatactcagcccagccccgccagtagcgtgagccctgcaaggtacccagccacgtcttccgttacgctggtggacgtctctgcccttagacctaacacaaccccacagcccagcaatagctcaatgaccacgcgcggatttaactacccctggaccagctcaggcacagataccaaaaagtccgttagccgaatacctagcgagacgtattcttcgtcaccatctggagcaggctccacacttcatgataacgtgttcacctccacggcccgcgcgttttccgaggtgcccacaacggctaacggaagcacaaaaacaaaccatgtacatattactggaattgtggttaacaagcccaaagacgggatgtcctggcccgtgatcgtcgccgcgctgcttttctgttgtatgatcctgttcggactcggcgtccgaaagtggtgccaataccagaaggaaatcatggaacgaccccctcctttcaagccccctccaccacctatcaagtatacatgcattcaggagccaaatgaatcagatctgccatatcacgaaatggagaccctgtag

SEQ ID NO: 182251 - DNA, 2508 bp, synthetic construct
  misc_feature 1..2508: note = Description of Artificial Sequence: Synthetic coding sequence
  source 1..2508: mol_type = other DNA
atgggcggccgggtgttcctggccttctgcgtgtggctgaccctgccaggtgctgagacacaggattcaagaggttgcgctaggtggtgtccacagaactcttcatgcgtgaacgcgaccgcatgcagatgtaaccccggcttttccagcttcagtgaaatcataacaacacctacggagacttgcgatgatattaatgaatgtgctacacctagcaaagtgagctgcggaaaattcagtgactgttggaacacggagggatcatatgattgcgtgtgcagccccggatacgagcctgtctccggcgcaaaaacgtttaagaacgagtctgaaaacacctgtcaagacgtcgatgagtgccaacagaatccacgtctgtgtaaatcctacgggacatgcgtgaacacgctgggatcgtacacatgccaatgtctaccaggttttaagtttatcccagaggatcccaaggtgtgcaccgacgtgaacgagtgtaccagcgggcagaatccatgccactccagtactcactgtcttaataacgtgggatcctaccagtgtcgctgccgccccggctggcagcccattcccggctcacctaacggtcctaataataccgtgtgtgaagacgtggacgagtgttctagtggacagcatcagtgcgactctagtacagtttgcttcaacaccgtgggtagctattcttgccgctgtcgtccagggtggaaaccgagacatgggataccaaacaaccagaaggacactgtgtgcgaggatatgaccttttctacctggaccccgccccccggcgtgcattctcagacactgtcccgctttttcgataaggtgcaggacctgggaagagactctaagaccagctccgcagaagtgaccatccaaaacgtcatcaaactggttgacgagcttatggaagctcctggagacgtggaagccctggcgccccccgtacgacatcttatcgctacccaattgctcagtaatcttgaagatatcatgagaatcctggcgaaatctctccccaagggcccattcacgtacatctccccatccaacacagagttgacactgatgatccaggagaggggtgataagaatgtgacaatggggcagagttccgcccggatgaaactcaattgggctgttgctgccggggcggaggacccaggcccggcagtagccgggatcctgtcaatccagaatatgaccaccctgctagccaacgctagcctgaacctacactccaaaaaacaggctgagctggaggaaatatacgaaagttccattagaggcgtgcaacttcggcgcttgagcgccgtgaatagtatattcttgagccacaacaacactaaagagttgaacagtccaattttgttcgcattctctcacctggaaagcagtgacggagaggcaggcagagatccacccgctaaggatgtcatgcctggcccgcgccaagagctgctgtgtgcattctggaagagtgatagcgaccgtggcggccactgggcaaccgagggttgtcaggttctgggctctaagaatggatccacaacctgtcagtgttcacatctcagcagcttcgccatcctgatggcccactacgacgtggaggactggaagctgacgctgattaccagagtaggactcgctctatccctgttctgccttcttctctgtatcctcacgtttctgctggtgaggcctatacagggtagtcggacaactatccatctgcatttatgcatatgcctatttgtgggcagtactatctttctggccggaatcgaaaacgagggtggccaggtgggcttaaggtgccgactcgtggccggcttgctgcattattgtttcttggcagctttctgttggatgagtttagaagggctggagctctactttctggtggtgcgcgtgtttcaaggacaggggctttccacccgatggctgtgtctcattggttatggcgtcccactgctgattgtaggggtatcggctgctatttattccaaaggctacgggagaccccgttactgctggctagatttcgaacagggttttctgtggtctttcctgggccctgtgacctttattatcctgtgcaacgcagtcatcttcgttacaaccgtttggaagctcacccagaagttttcagagataaatccagacatgaaaaagttgaagaaagctcgagcgttaaccattacggcaatagcccagttgttcctgctgggctgtacatgggtgttcggcttgtttatctttgatgatcgcagcctggtgctaacctacgttttcactattctgaactgtctacaaggagcattcttatatctcctacattgcttgttgaacaagaaggtgcgggaagaatatagaaagtgggcctgccttgtggctggcggaagcaagtatagtgagtttacaagcaccacttctgggaccgggcataatcagacccgcgctttgagggcttccgaatcgggcatctag

SEQ ID NO: 182252 - DNA, 2361 bp, synthetic construct
  misc_feature 1..2361: note = Description of Artificial Sequence: Synthetic coding sequence
  source 1..2361: mol_type = other DNA
atgggcggccgggtgttcctggccttctgcgtgtggctgaccctgcctggcgcagagacacaggactccaggggatgtgcccgctggtgtccacagaattcttcatgcgtcaacgctactgcctgcaggtgcaacccaggcttttcctccttctctgagatcattacaaccccaacagagacctgcgacgatattaacgaatgcgctacccctagtaaggtgagctgtggaaaattcagtgactgttggaatacggagggctcgtatgattgtgtgtgttccccagggtacgagccagtcagtggggcgaagacttttaagaacgaaagcgaaaatacctgtcaggacgtcgacgagtgccagcagaaccctcggctctgcaagagctacggaacatgtgtgaacaccctcggctcatacacatgccagtgtttgcccggctttaagttcattccagaggacccgaaagtgtgcacggatgtggacgagtgctcttcgggccagcaccagtgtgatagttcaactgtctgtttcaatacagtcgggtcttattcttgtagatgccgcccagggtggaagccgcgccacggcatacctaacaaccaaaaggacaccgtgtgtgaggatatgacatttagcacgtggacaccaccaccaggggtgcatagtcagaccttgtcaagattcttcgataaagtccaggatctcggcagagattctaaaacatcttctgcggaggtcaccatccagaatgtcataaagttagtggatgagctgatggaggcacccggagacgttgaagccctcgcaccacccgtgcgacacttaatagccacacagctactttcaaacttggaggatataatgcgcatcctggcaaaatccctgcctaagggccccttcacttacatcagccctagcaataccgagctaaccctgatgattcaggagcggggggataagaacgtcacgatggggcagtcttctgcgaggatgaagctgaactgggctgttgctgctggcgcagaggatccagggcccgctgtcgccggaatactgtccatccagaatatgacgacgcttcttgctaacgccagtcttaacttgcactctaagaagcaagcagaactggaagaaatttatgagtcctctatccggggggtccagctgagacgtctatctgccgtaaattcgatctttctgagtcataataataccaaggagcttaattcccctatcctcttcgccttttcccaccttgaatcctccgacggggaggccggacgagatcccccagctaaggacgtaatgcctggaccacgtcaggaactcctgtgcgctttctggaagagcgacagcgatcgtggcggtcactgggctaccgaaggttgtcaagtcctggggagcaagaatggtagtaccacgtgtcaatgttctcacttgagttcctttgcaatccttatggcacattacgacgtggaagactggaagctgactctgatcacgagggtcgggctcgccctcagcctcttttgtctcttgttgtgcatacttaccttcctgttggtccggcctatacaggggtcacgcactacaatacatctccacttgtgtatctgtctctttgtcggcagtacaatttttctggccggcatcgagaatgaagggggccaggtgggcctaaggtgcagacttgttgccggcctattgcactattgtttccttgcagccttttgttggatgtccttggagggactcgagttgtactttctggtcgtgagggtgtttcaaggccaaggtttgtctacacgctggctgtgcctgataggctacggtgtgcctttgctgattgttggcgttagcgccgccatctacagcaaggggtacggtaggcccaggtattgctggctggatttcgagcagggattcctgtggagctttcttgggcctgttacttttatcattctttgcaacgccgtcatctttgtaacaacggtatggaagcttacccagaagttttcagaaatcaaccctgatatgaaaaaactgaaaaaggcgagggccttaactattaccgcaatcgcgcagctcttcctcttgggttgtacgtgggtgttcgggttgtttatctttgatgaccggtcacttgtgctgacctatgtttttaccattctcaattgcctgcagggtgccttcctgtatttattacactgcttgttgaataagaaggttcgagaggaatacaggaaatgggcctgtctagttgccggggggtccaagtactccgagttcacatctacaacgtctggtactgggcataatcagactcgggctttaagagcgagtgaatccggtatatag

SEQ ID NO: 182253 - DNA, 2229 bp, synthetic construct
  misc_feature 1..2229: note = Description of Artificial Sequence: Synthetic coding sequence
  source 1..2229: mol_type = other DNA
atgggcggccgggtgttcctggccttctgcgtgtggctgaccctgccaggtgctgagacccaagattcacgtggatgcgctcggtggtgtccacaaaatagctcctgtgttaacgccactgcctgcagatgcaacccaggcttctcaagcttcagtgagattattacaaccccaacagagacatgcgatgacatcaacgagtgcgccacccctagtaaggtctcctgtggtaaattcagcgactgttggaacacggaagggtcatatgattgcgtgtgcagtcccggctatgaacctgtgtctggcgcaaaaacattcaagaacgagagtgaaaatacttgccaggatgtggacgagtgctctagcgggcagcaccagtgtgacagctcaacagtgtgtttcaataccgtcggcagctacagctgcaggtgccgccccggatggaaaccaaggcacggcattcctaacaatcagaaggacacagtctgcgaggacatgacttttagcacctggaccccccctccaggagtccactctcagacgctgagcaggtttttcgacaaggtgcaggacctaggccgagattcgaaaacatcgagcgctgaagtcacaatccagaacgttattaagctggtagacgagctcatggaggctcctggcgacgtcgaagctctggcccccccggtgagacatctcattgcgacccagctcctttctaacttagaggacatcatgcgaatcctggccaagtctctacctaaagggcccttcacctatatcagccccagcaataccgagcttaccctcatgattcaggaacggggagacaaaaatgtgacaatgggccagtcttccgccagaatgaagctgaattgggccgttgcagctggggcagaggatcccggcccagccgttgctggtatcctgagcatccagaatatgacgactctcctcgccaatgcctccctcaatctgcattccaagaagcaagcagaactggaagaaatttacgagtcttctatcagaggcgtgcaactacgaagactgagcgccgtaaattccatctttctgtcacacaacaacaccaaggaactaaattcgcctattctttttgccttctctcacttagagagctccgacggggaggctggtagagacccaccagcaaaagacgtgatgccagggccccggcaggaactcttatgcgctttctggaaaagcgacagcgatcgcggtgggcactgggccacagagggctgtcaagtcttagggtcaaaaaatggctctacaacgtgccaatgcagccatttgagctcctttgctatccttatggcacactatgatgtagaggactggaaactcaccctgatcacacgagttggcctggcactcagcctcttctgccttctgctgtgtattctgacattcttactggtgaggcctatccaggggagcagaactaccatacatctgcacctttgcatctgccttttcgtagggtccaccatttttttggccggaatcgagaacgagggaggccaagtcgggttacggtgccggctcgttgccgggttgctgcactattgtttcctcgcagccttttgctggatgagtctcgagggactcgagctatattttctcgtggtgagggtcttccagggacagggcctcagcacccggtggctctgtcttatcggttacggcgtacctctcctcattgtcggagtcagtgctgccatatactcaaagggatatggaagacctaggtactgttggctggactttgaacaggggttcctgtggtctttcctgggtcccgtaacctttatcatcttatgcaatgctgtcattttcgtgacaacagtttggaaactgacacagaaattcagcgagatcaatccagacatgaaaaagttaaagaaagcgcgagcactgactatcactgccatcgcgcaactctttttattgggatgtacatgggtttttggtttgtttatttttgatgaccgaagcctagtcctgacttacgtgtttaccatactcaattgcctgcagggcgcatttttatatctcctccactgtctcttaaataagaaagtcagagaagaatacaggaagtgggcctgtctggtggcaggcggatctaagtactcagagtttacatcgaccacctcaggcacaggtcataaccaaacaagggccctcagagcttccgagtctggcatttag

SEQ ID NO: 182254 - DNA, 2358 bp, synthetic construct
  misc_feature 1..2358: note = Description of Artificial Sequence: Synthetic coding sequence
  source 1..2358: mol_type = other DNA
ggcggccggatcatgcgggccttctgcgtgtggctgaccctgcccggcgctgagacgcaagacagcagagggtgtgctcgatggtgcccccaaaattcaagttgtgtaaatgccaccgcatgtagatgtaaccccggtttcagcagctttagcgagatcatcacgacaccgaccgagacatgcgacgacattaatgaatgcgccactccctccaaagtctcctgcggtaagttctccgattgctggaatacagaggggagctatgattgtgtgtgctcccccggctacgaaccagtgagcggagccaaaactttcaaaaatgagtcagagaatacttgtcaggatgtagacgaatgccagcaaaatcccaggctgtgcaagagttacggtacatgcgtaaatacgctcggctcttacacttgccagtgtttacccggcttcaagtttatccccgaggaccccaaagtctgtacagacgtcgacgagtgcagctccggacagcaccagtgcgacagttctacagtgtgtttcaacacagtgggttcctactcttgcaggtgcagacccggctggaagcctaggcatggcattccaaataaccagaaggatacagtgtgcgaggatatgacattttctacttggacacccccgccgggagtccactctcagaccctgtctcgctttttcgacaaggtccaagacctaggcagagactccaagacatcttccgctgaggtgaccatccaaaacgtaatcaagctggtggacgaacttatggaggccccaggagatgtcgaagctctcgctcctccagtgagacatctcatagccacacagcttctgagcaatctggaggacattatgcggattctcgcgaaatcactccccaaaggacctttcacctatatatccccgtctaacaccgagctgacgcttatgatccaggaacgcggcgataagaacgtgactatgggccagtcttcagcgcggatgaagctgaactgggccgtcgcagccggagcagaggaccctggacctgctgttgccggtatcctgagcatacagaacatgactaccctgctagcaaatgcctctttgaatctacattccaagaagcaggccgagctagaggagatttacgagtccagtattagaggcgtccagctccgtagattgagtgccgttaacagtatcttcctgtcccacaataacacaaaggaactgaactctcccattctctttgcttttagtcacttagagagttccgacggggaggccggcagggatcctccagccaaagacgtcatgcccggaccccgacaggagctgctttgcgccttttggaaaagtgattcagatcgagggggccactgggccaccgaggggtgccaggttcttgggtccaaaaacggtagtactacttgccagtgcagccacctgagtagtttcgcaatccttatggcgcactatgacgttgaggattggaaactgaccctgatcactagagtcggactggcactgtcactattttgcctacttctgtgtattctgacctttctcttggtgaggcccattcaaggcagccgcacgactattcacctccatctgtgcatatgcctttttgtgggttccacgattttcctggcaggcatcgagaacgaaggagggcaagtgggactgagatgccggctcgttgccgggcttttgcattactgtttccttgctgcgttttgctggatgagcctcgagggactggaattgtatttcctcgtggtccgagtgttccaaggccaaggcttgtccacccgctggttatgtctcattggctacggtgtcccattgctgatcgtcggagtctccgcagccatatactcaaagggctacggtcgaccacggtactgttggctcgatttcgaacagggattcctgtggtccttcctgggacccgtcactttcatcattttgtgcaatgctgtgatctttgtcactaccgtctggaagttgacccaaaagtttagcgaaattaatccagatatgaaaaagctcaagaaagcaagagcacttaccattaccgccattgcccagctgttcttgctgggctgtacctgggttttcgggctctttatcttcgacgaccgtagcctggtgcttacctacgtgtttactatattgaactgtctgcagggtgccttcctgtatctcttgcattgcttgctgaataaaaaggtcagggaggagtatcgcaagtgggcctgcttagtggccggcgggagcaagtactcagaatttacctcaacgacttctggaacaggccataaccaaaccagggccctgagggcctccgagagtggcatctag

SEQ ID NO: 182255 - DNA, 297 bp, synthetic construct
  misc_feature 1..297: note = Description of Artificial Sequence: Synthetic coding sequence
  source 1..297: mol_type = other DNA
atgagcgtgcggctgcacgtgcccagcggcagccggggcagcgagctttccgctttaatccaggcaatcggagcctccaccagtgggaagcccaaatgttttgtgtgtatacttagatccgggctgtccgttgccctctcactgtccgtctattttctcctgctcttttcacggacccgcggaggcggacacggcgaaccgcccgaatgtcagagaagggcctcttgttcagcctacagcttcagagagattgaggattgtaggcagaagcagcctcggcgatggcaacaaggttag

SEQ ID NO: 182256 - DNA, 231 bp, synthetic construct
  misc_feature 1..231: note = Description of Artificial Sequence: Synthetic coding sequence
  source 1..231: mol_type = other DNA
atggcccggggcgccgccctggccctgctgctgttcggcctgctgggcgtgctcgtggctgccccagggtttggtgacctgcgtttgcaggcagcacggggcggacgtcctggcgttgcctgtcatagccacgccctgcggcctggccccaagtttggtatcgcgcggtccctgagacctggatggtggggggaagggaaggagaagttagaaaaaaatttcgaaccctag

SEQ ID NO: 182257 - DNA, 534 bp, synthetic construct
  misc_feature 1..534: note = Description of Artificial Sequence: Synthetic coding sequence
  source 1..534: mol_type = other DNA
atggcccggggcgccgccctggccctgctgctgttcggcctgctgggcgttctggtagccgcccccgatggcggctttgacctatccgacgcactgcccgacaatgagaataaaaagccgaccgcaatcccaaagaagccatccgccggagacgatttcgacttgggagatgcggtagtcgatggagagaacgacgaccctaggccaccgaacccgcctaagccgatgccgaatcctaacccgaatcacccatcttcctccggctcttttagtgatgccgatctggccgatggggtatccggaggcgaggggaaaggagggtcagacggtggaggctcccacaggaaagagggggaggaggccgacgccccaggtgtgattcccgggattgtgggtgccgtggtggtagccgtggcgggtgctatctctagtttcattgcatatcagaaaaagaagctgtgctttaaggagaacggccaactggccggttccctcgggccctgtatcggaattcggcgcgaggccgacggctag

SEQ ID NO: 182258 - DNA, 510 bp, synthetic construct
  misc_feature 1..510: note = Description of Artificial Sequence: Synthetic coding sequence
  source 1..510: mol_type = other DNA
atggcccggggcgccgccctggccctgctgctgttcggcctgctgggagtgctagttgccgcgccagacgggggatttgatctttctgacgcacttcccggggatgactttgatctcggcgatgccgtggtcgacggggagaacgacgatccacggccgccgaatcctcctaagcccatgcccaaccccaatccaaatcacccctctagtagcggatccttctccgacgccgacctcgctgatggagtgtcaggaggtgaaggcaaaggtggttctgacggcggtggtagtcatagaaaggagggggaggaggcagacgcacccggtgtgatccccggcatcgtaggcgccgtcgtggtcgccgtcgcaggcgccatctcttcttttatagcctaccagaaaaagaagttgtgtttcaaagaaaatgcagagcagggcgaggtcgacatggaaagccacaggaacgcaaatgcggaacccgccgtgcaaaggactctcctcgagaagtag

SEQ ID NO: 182259 - DNA, 558 bp, synthetic construct
  misc_feature 1..558: note = Description of Artificial Sequence: Synthetic coding sequence
  source 1..558: mol_type = other DNA
atggcccggggcgccgccctggccctgctgctgttcggcctgctgggagtgctggtggcagcaccagatggagggtttgacctctccgacgcactacctgataatgaaaataagaagcccaccgcaattcctaagaaaccaagcgccggtgacgattttgaccttggcgatgcagtcgtggacggcgagaacgacgatcctcgccccccaaatccccctaagccaatgcccaaccctaatcctaatcatccttcctcaagtggttctttttctgatgctgatcttgcagatggcgtctccgggggcgagggcaaaggcgggtcagacggtggcggctctcacagaaaggaaggcgaagaagctgacgctccaggagtcatccctgggattgtaggtgctgtggttgttgcagtggcaggtgcaatctcctctttcattgcatatcagaaaaagaaactttgctttaaggagaatgctgagcagggcgaggtggatatggaatcccataggaacgccaatgcggaaccagccgttcaacgaactcttcttgagaagtag

SEQ ID NO: 182260 - DNA, 606 bp, synthetic construct
  misc_feature 1..606: note = Description of Artificial Sequence: Synthetic coding sequence
  source 1..606: mol_type = other DNA
cggcggtggggccggcccgccggcacccccggcgccagcagcctgcctggccggaccaggtgtgcccacggaggaccgggtcctgaggaagctccaactttcagccccactctcttccttgaaccctttcagcgggaaaagtctgcctttgtagtgggcgtcgcaaactcctacatgtggggtggactcggtcgagacggcgggttcgatttatccgatgctctgcctgataacgaaaacaagaagcctacggcaattcccaagaaaccgtctgccggcgacgacttcgatctgggtgacgctgtggtggatggcgagaatgacgacccgcgcccccctaatcccccgaagccaatgcctaatcctaaccctaatcatccctctagcagcggctctttttctgatgccgatcttgcagacggcgtctcagggggagaggggaaaggcggatcagacggtggtggcagtcacagaaaggagggcgaagaagccgatgcaccgggcgtaattcctggtatcgtgggggcagtggtggttgctgtcgctggcgctattagttcgtttatcgcctatcagaagaagaagttatgcttcaaagaaaactag

SEQ ID NO: 182261 - DNA, 438 bp, synthetic construct
  misc_feature 1..438: note = Description of Artificial Sequence: Synthetic coding sequence
  source 1..438: mol_type = other DNA
atggtggcctggcggagcgccttcctggtgtgcctggccttcagcttggccaccttagtgcagcgtgggagtggggacttcgatgactttaatttggaagacgccgtgaaggaaaccagcagcgtcaagccagcactcggcatgtatcataaactggacgggctgaagcagcagaattttatcctgtccctgttctggatgctcgaggtgctctaccaaggggtggggtgggccacattcagtctgaaagccctgggcaaaaacctgtcactgacattcccaaccagcggcggaagccggtgttctcttgtttgcggatgcatcactccaatttccgccagcgtggtgacctggtgctctcctttctgcgtgagcctcctcagtctcaccaaaatgttggtgagcggatttaaggcccatttagataatcccggctag

SEQ ID NO: 182262 - DNA, 573 bp, synthetic construct
  misc_feature 1..573: note = Description of Artificial Sequence: Synthetic coding sequence
  source 1..573: mol_type = other DNA
atggtggcctggcggagcgccttcctggtgtgcctggccttcagcctcgcgaccttagtccagaggggttcaggtgatttcgatgactttaatctggaagacgccgtcaaagagacatcttccgtcaagagaaatgactttgacttagccgatgccttggacgatagaaacgacagagatgacggccgccggaagcccatagccggtggtggcggcttttctgataaggacctcgaagacatcgtaggcggcggcgagtataaacccgacaagggaaagggcgacggccgctatggaagtaacgacgatccaggaagcggtatggttgcagaaccaggaacaatcgcaggtgttgcctcagcactggctatggctttaataggtgctgtctcttcttacatttcctatcagcagaaaaagttctgcttttcgattcagcaaggtctgaatgctgattatgttaaaggagaaaacctcgaggccgtggtgtgcgaagagcctcaggtgaaatattcgactctgcatactcagtcagcggaacctccccccccccctgaaccagcgagaatttag

SEQ ID NO: 182263 - DNA, 789 bp, synthetic construct
  misc_feature 1..789: note = Description of Artificial Sequence: Synthetic coding sequence
  source 1..789: mol_type = other DNA
atggtggcctggcggagcgccttcctggtgtgcctggccttcagcctcgccacgctcgtgcagcgcggcagtggggacttcgacgacttcaatttagaagatgcggtcaaggaaacctcaagcgtcaagcagccctgggatcataccacgaccacaacaaccaatcgacccgggacaacacgggccccagcaaaacctcccggaagcggactcgatttagctgatgccttggatgaccaggatgatggaaggagaaaacctggaatagggggaagagaacgttggaatcacgtgactacgactaccaagaggcctgtgaccacccgtgctccagccaacacgctaggcaatgattttgatctggctgatgcactggatgatcgcaacgatagagacgacgggagacggaagccgatcgcgggaggtggggggttcagcgataaggatttggaggatatcgtcggcggtggcgagtacaagcctgataagggaaagggtgacggtagatatggtagcaatgatgacccggggtctggaatggtagctgaacccggaactatcgccggcgtagctagcgcactggcgatggctctcatcggcgctgtttctagctacatctcctaccagcagaagaaattctgtttcagcatacagcaaggactcaatgcagactatgtgaagggggagaatctggaagctgtggtgtgtgaggagcctcaagtgaagtactccactctgcacacccagtcagctgagcctccacctccccccgaacccgctcggatttag

SEQ ID NO: 182264 - DNA, 474 bp, synthetic construct
  misc_feature 1..474: note = Description of Artificial Sequence: Synthetic coding sequence
  source 1..474: mol_type = other DNA
gagaccagcagcgtgaagcagccctgggaccacaccaccaccaccaccacaaatagacccgggacaacaagggctcctgccaagccacccggcagcggcctggatctcgcggacgccctggacgatcaggacgacgggaggcggaagcctggcattggtggcagagaacggtggaaccatgtgactactacgactaaacggccagtgacgacacgggcgcccgccaataccctcggcaacgacttcgacctggcagacgctttagacgatcgcaatgatagggatgatggccgaagaaagcccatagctggtggggggggattttctgataaggatctcgaagacattgtggggggtggagaatataagcccgacaaagggaagggtgatgggcgctatggatcaaatgacgatccaggcagcggcgggtttctcaaccccgaggcgcctgtcggccacgtcaagggtaagtag

SEQ ID NO: 182265 - DNA, 570 bp, synthetic construct
  misc_feature 1..570: note = Description of Artificial Sequence: Synthetic coding sequence
  source 1..570: mol_type = other DNA
atggtggcctggcggagcgccttcctggtgtgcctggccttcagcctagccacgttggttcagcgcggatcaggggatttcgacgacttcaacctggaagacgctgtgaaagagacaagctctgtgaagcagccatgggatcacactaccactactacaactaacaggccagggaccacccgagcaccagcaaaacctccgggatccgggctggacctggctgacgccctggacgatcaggatgacggccggagaaagcccgggattggcgggagaggcgacggtcgctatggctcaaatgacgacccagggtcgggcatggtagccgagcccggaaccatcgccggcgtggccagcgccttggccatggctttaatcggtgccgtgagttcgtacatttcatatcagcagaagaagttctgtttcagtattcagcagggcttgaatgctgattatgttaagggtgaaaacctggaagctgttgtttgtgaggaaccacaagttaaatactcaacactgcacacacagagcgctgaacccccccctcctcccgagcctgctcgaatctag

SEQ ID NO: 182266 - DNA, 819 bp, synthetic construct
  misc_feature 1..819: note = Description of Artificial Sequence: Synthetic coding sequence
  source 1..819: mol_type = other DNA
atggtggcctggcggagcgccttcctggtgtgcctggccttcagcttagctacattggtgcagagagggtccggagacttcgatgactttaatctcgaggacgccgtgaaagagacaagtagtgtaaagcaaccatgggaccatacaactactacaaccaccaatcgccctgggactacacgggcccctgccaagccgcctggaccaactgagggctcaggcctcgatctcgccgatgctctcgacgatcaggacgatggcagacgaaagcccggcataggaggaagggaaagatggaatcatgtcacaaccacaacgaaaagacctgtgactactagggccccagctaatactctggggaacgactttgacttagccgacgcactcgatgaccgcaatgacagggatgacggtcgtcggaagccaatcgcaggcggaggcgggtttagcgacaaagatctggaagatatcgttgggggaggtgagtataagccagacaaaggaaagggcgatggacgatacgggagcaacgacgacccaggcagcgggatggtggcagagcccggcactattgccggtgtcgcctccgcactggcgatggccttaattggcgccgtctcttcctatatatcataccaacagaaaaagttctgtttctcaatccagcatgccgcagcgggacaggaaggtctgaacgccgactatgtgaagggggagaacctggaagctgtggtgtgcgaagagccacaagtgaaatattcaactctgcacacccaatcggcagagcccccgccccctcctgagcccgctcgcatctag

SEQ ID NO: 182267 - DNA, 642 bp, synthetic construct
  misc_feature 1..642: note = Description of Artificial Sequence: Synthetic coding sequence
  source 1..642: mol_type = other DNA
atggtggcctggcggagcgccttcctggtgtgcctggccttcagcctggccactctggtgcagcgggggtccggagactttgatgatttcaatctggaggacgcggttaaagagacatctagcgtgaagcagcggtggaatcatgtgaccacaacaactaagaggccggttacaactagagcacctgccaacactctcgggaacgacttcgatctggcagatgctctggatgacagaaatgaccgtgatgacggacgcaggaagccaatagcgggaggaggcggctttagtgataaggatctagaagatatcgtcggaggcggcgagtacaaacctgataagggcaaaggcgatgggcggtacggctctaacgatgatcccgggtcggggatggtcgcagagcctggaaccatcgcaggggttgccagcgcgctagccatggccctgatcggggcagtttcctcctatatctcgtaccagcagaagaagttttgctttagcatccagcaaggactgaatgcggactacgtcaaaggggagaacctggaagcagtggtctgcgaggaacctcaggtcaaatatagcaccttacatacacaatctgccgagcccccacccccgccggaacccgccaggatctag

SEQ ID NO: 182268 - DNA, 1785 bp, synthetic construct
  misc_feature 1..1785: note = Description of Artificial Sequence: Synthetic coding sequence
  source 1..1785: mol_type = other DNA
atggccgccgagagcggcgagctgatcggcgcctgcgagttcatgaaggatagactttacttcgccaccctccgcaaccggcccaagtcaaccgttaatacacactatttctccatcgacgaggaactcgtttatgagaatttctacgccgattttggtcctctgaatctggcaatggtctaccgctattgttgcaagctcaataaaaaactcaagtcctatagcctctctcggaagaagatagtgcactatacatgtttcgaccagcgtaaacgagcgaatgccgcttttctgattggcgcctacgcagttatttacctgaaaaagactcctgaggaggcttacagagccctactcagtgggagcaaccccccatacctgcctttccgcgatgcaagctttggaaactgtacttacaatttgaccatattggattgccttcaggggatccggaagggattacagcacggattcttcgatttcgagactttcgatgtggacgagtacgagcattatgagcgggtggagaacggagattttaactggatagtccctggaaagtttcttgccttttcaggcccacaccccaaaagcaaaatcgagaatggataccctttgcatgcgcctgaggcctacttcccctattttaagaaacacaacgtgactgctgtggtccggctcaataaaaagatctatgaagcgaaaagattcacagacgctggttttgaacactatgacctcttttttatcgacggctccacccctagcgacaatatagtccgtcgcttcctcaatatctgtgagaacaccgaaggtgctattgcagtgcattgcaaagcaggtttgggaagaaccggaaccctgattgcctgttacgtaatgaagcattaccgatttacccacgccgaaattattgcttggatacgaatttgcagaccaggatccatcatcggcccacagcaacattttttggaagagaagcaggctagtttatgggtgcagggcgatattttcagatcgaagctgaagaaccgcccttcaagcgaaggatctatcaataagatcctgagtgggttggacgatatgtcgatcggcggcaaccttagcaagacacagaatatggagcgcttcggagaggacaacctggaagacgatgacgttgaaatgaagaatgggattacccagggggataaactgagagcgctgaaaagtcagcgccaaccgaggacatcaccttcctgtgcctttagatccgacgacaccaagggacacccacgtgctgtgtcccaaccttttcgtctgagttccagccttcagggcagcgcagtgaccttaaagacatccaagatggcattgagccccagtgccaccgctaagcggattaacaggacaagcttaagctccggcgcaacagtgagatccttcagcataaattccaggctggcttcaagtctaggaaacctgaacgccgcaaccgacgaccccgagaacaagaagacgagctcaagtagcaaagcgggctttactgcgagccctttcaccaatttattaaatggtagcagtcagcctactaccaggaattaccccgagttgaataacaatcagtataaccggtcctctaattccaacggtggtaacctgaactcacctcctggtccccatagtgctaagacggaggagcacacaactatcctgagaccgtcatatactgggctcagctcttccagtgcccggtttctgagccggtctattcctagcctgcagtcggagtacgttcattattag

SEQ ID NO: 182269 - DNA, 1872 bp, synthetic construct
  misc_feature 1..1872: note = Description of Artificial Sequence: Synthetic coding sequence
  source 1..1872: mol_type = other DNA
atggccgccgagagcggcgagctgatcggcgcctgcgagttcatgaaagacagactgtattttgcaactctccgaaaccgcccaaaatccaccgtcaatacgcattacttcagcatcgatgaagaactcgtgtacgagaacttttacgcagatttcggccccttaaatttggccatggtgtaccggtactgctgtaaactgaacaagaagctgaaaagctactcattgtcaagaaaaaagatcgtccactacacttgttttgaccagcgaaagagagcaaacgcagcatttcttatcggggcctacgcggtgatctatctgaagaaaacccctgaagaggcctatagagcactcctgtccgggtccaaccccccctatctgcccttcagagatgcctcctttggaaactgtacctacaacctgaccattctggattgtctccaggggatacggaaggggctgcagcacgggttcttcgattttgaaacgtttgacgttgatgaatacgaacattatgagcgagtggaaaacggagacttcaattggatagtgcctgggaaatttcttgccttcagcggtccccatcctaaaagtaaaattgaaaacggatacccattacatgcccctgaggcatacttcccgtacttcaagaaacacaatgtgaccgctgtggtgagactgaataaaaaaatttatgaggcaaagcgtttcaccgatgccgggtttgagcactacgatctgttttttattgacggctccacgcctagtgataacatcgtgcgccgcttcctaaacatctgcgaaaatacagaaggcgcaattgcagttcactgtaaagcagggctcggccggactggaacgttgattgcatgctatgtgatgaaacattacagatttactcatgcggagattattgcctggatccggatatgccgaccaggctccatcattggccctcagcagcacttcttggaggagaagcaggcctcactctgggtgcagggggacatattccgttccaagctgaaaaatcgccctagttccgagggttcgattaacaaaatcctgtcgggcctggacgatatgtcaatcggaggtaacctgtctaagacccaaaacatggagcggtttggagaggacaatctcgaggacgacgatgtcgagatgaagaacggtataacccagggcgacaaactccgcgccctcaagagtcagcgccaaccccggacatctccttcatgtgctttcaggtcagatgatacgaaaggccaccctagggccgtgtcccagcctttccgtctgagctcctccctccagggatccgccgtgactctgaaaacttcaaagatggcactgagtccaagtgcaaccgcaaaaagaatcaatcgcaccagtttatcgagcggcgctaccgtacggtccttctccatcaattctcgactcgcctcaagtctaggtaacctgaacgctgccactgatgatcctgagaacaagaagacaagctcctcatccaaagccgggttcaccgcctctccatttacaaatctgttgaatggctcaagtcagcccacaacgcgaaactaccccgagctcaacaacaatcagtataataggagttcaaacagcaatggcggtaacctgaacagtcccccgggccctcactcagccaagaccgaagaacatacgaccatcctccgccccagctatacgggattatccagctctagtgcccgctttcttagcaggtctatacctgtgtccgctcagacaccacccccaggtccacagaatcccgaatgcaacttttgcgccttgccctctcagccccgactccctcctaaaaagttcaatagcgctaaggaggcgttctag

SEQ ID NO: 182270 - DNA, 1152 bp, synthetic construct
  misc_feature 1..1152: note = Description of Artificial Sequence: Synthetic coding sequence
  source 1..1152: mol_type = other DNA
atggccgccgagagcggcgagctgatcggcgcctgcgagttcatgaaagatagactatacttcgctaccctgcgcaatcggcccaagtcaacagtcaatacccattacttctcaatcgacgaagaactagtgtacgagaatttctacgccgattttgggccactgaacctcgcaatggtatatcggtattgttgtaagctgaacaagaagctgaagtcctattctctgagccgcaaaaagattgtgcattacacctgttttgaccaacggaagcgggcaaatgccgcttttttgatcggggcctacgccgtcatctacttgaagaaaaccccggaggaggcctacagggccctgctctcagggtcaaatccaccctatctcccattcagagatgcaagctttggcaactgtacatacaacctgaccattttggactgtctgcaaggcattcgcaaagggctgcagcacggtttctttgattttgagacattcgatgttgatgagtatgaacattacgaacgagtcgagaacggtgacttcaactggattgttccaggaaaattcctggctttctctggccctcaccctaaaagcaaaatcgagaatggatacccgctgcacgcgccagaggcttactttccctatttcaaaaagcacaacgtgactgcagtggtgaggctcaacaaaaagatctatgaagcaaagcgcttcacagatgccgggttcgaacactatgacctattcttcattgacggtagcacaccatccgataatatcgtgaggagattcctgaacatctgcgaaaatacagagggagctattgccgttcattgtaaggccggcctgggtcgcaccggtaccctgatcgcttgctatgtcatgaagcactataggtttacccacgccgaaatcatcgcttggattcggatttgtcggcctggctcaattattgggccccagcagcattttctagaagagaaacaagcctctctctgggtacagggcgacattttccggtctaaactcaaaaaccgaccgtcttccgaaggttccataaacaagatattgagtgggctggacgatatgagcatcggcggcaacttatctaagacccaaaacatggagaggtttggcgaggtgtcatttccgtag

SEQ ID NO: 182271 - DNA, 576 bp, synthetic construct
  misc_feature 1..576: note = Description of Artificial Sequence: Synthetic coding sequence
  source 1..576: mol_type = other DNA
atggccgccgagagcggcgagctgatcggcgcctgcgagttcatgaaagaccgtctctacttcgcaactcttcgcaaccgccccaagagtacagtaaatacgcattatttttctatcgacgaggagttggtatacgaaaatttctatgccgatttcggtcctctaaacctagctatggtgtatcgctactgttgcaagctgaacaagaagctaaagtcatattcactgagccggaagaagatcgtgcactacacctgcttcgatcagagaaaacgggcaaacgctgctttcctgatcggcgcctatgcagtcatctacctgaagaaaacccccgaggaagcctatagggcactactgagtggcagtaaccccccttatttgccctttcgcgatgcctcattcggaaactgtacgtacaacctgacaattctggactgcctgcaggggattaggaagggtctacaacatggcttcttcgactttgaaacctttgatgtggatgagtacgaacactatgaagttattttattcacccccctgaagcctacttttttgattagtaagtctattatgtag

SEQ ID NO: 182272 - DNA, 822 bp, synthetic construct
  misc_feature 1..822: note = Description of Artificial Sequence: Synthetic coding sequence
  source 1..822: mol_type = other DNA
atgggcaacttcctgagccgggagaacaaggtgcaggtgatcagcgaaagcgatcggctgtattttgcaacgcttcggaataggccaaaatctacagtcaacacacattacttctccatcgacgaggagcttgtctatgaaaatttctatgccgactttggacctctcaatcttgctatggtctacaggtactgctgtaagctgaataaaaagctgaagagctactccttatccagaaagaagatcgtgcactatacatgcttcgatcagcggaaacgggcgaatgccgcctttttgatcggggcatatgccgtcatctatttgaaaaaaacacccgaagaagcatacagggctcttctgtcaggaagcaacccgccatatctgccctttcgagatgcttcgttcggcaactgtacatataatctaaccattctagactgcctgcaaggtatccgcaagggccttcagcatggcttctttgatttcgagactttcgacgtcgatgagtatgagcactatgaacgggttgaaaacggagatttcaactggattgtgcccggcaaatttctggcattctctggaccacacccaaagtctaaaatcgaaaacggctaccctctgcacgcacctgaagcatacttcccctactttaagaaacataatgtcaccgccgtggtcagactgaacaaaaagatatatgaggctaagaggttcacagacgccggatttgaacattatgatctgtttttcatagacggctctacacctagtgacaatatcgtgaggcgctttctgaatatctgcgagaacactgaagggtag

SEQ ID NO: 182273 - DNA, 1698 bp, synthetic construct
  misc_feature 1..1698: note = Description of Artificial Sequence: Synthetic coding sequence
  source 1..1698: mol_type = other DNA
atggtgtaccggtactgctgcaagctgaacaagaagctgaagagctacagccttagccgcaaaaaaatcgtacactatacctgctttgatcagcggaagcgggcaaacgccgccttcctgattggagcctatgccgtgatttacctcaaaaagactcccgaagaggcctacagagctctgttgagcggatctaaccctccataccttccattcagggacgcctcctttggcaattgtacttataatctgaccattctcgactgcttgcagggaatacggaagggcctccagcatggattttttgacttcgagacttttgatgtggatgagtatgagcattatgagagagtggagaacggggatttcaactggatcgtgcctggaaagttcttagcattctcagggcctcacccaaaatccaaaatcgaaaacggctatccattgcacgccccagaagcctattttccatacttcaaaaaacacaacgtcacagcagtggttcggttaaataaaaaaatctacgaagccaaacgctttactgacgctggatttgaacattatgacctctttttcatcgacgggagcaccccctcagataacatcgtgcgacgtttcctaaacatctgtgaaaatacagaaggcgcgatcgcagtgcattgcaaggccgggttaggacgaacaggaacactcattgcttgctatgtgatgaagcactatcgcttcactcacgctgaaataatcgcctggattcggatttgcaggcctggaagcatcatcggtccacaacagcacttcctagaggaaaagcaggcgagcctctgggtccaaggcgatattttccggtctaagctgaaaaatcggccaagtagcgagggtagtatcaacaagatcctgagcgggcttgatgatatgtccattggtggtaatctatcaaagacacaaaatatggaaaggttcggagaggacaatctggaggacgatgacgtggagatgaaaaatggtataacccaaggagacaagcttcgggcgctaaagtcgcagcgccaaccaagaaccagcccttcttgcgcattcaggagtgacgatacaaaggggcatccacgggcagtgtctcaacccttccgcctgtcctcttcactgcaaggcagcgcggtgactctgaagaccagcaaaatggccctcagtccaagtgccaccgcaaagaggataaacaggacaagtctgtcttccggcgctacagtgcgctcgttttccattaacagtcgcctggcctcctcactgggcaatctgaatgcggcaacagatgatcctgagaacaagaagacctcctccagctccaaagccggctttaccgctagcccatttactaacctgctcaacggttcctcccagccgaccacccgcaactacccagagttgaacaacaaccagtacaatcggagctccaactctaatggcgggaatctcaatagcccacccggaccgcattcagcaaagaccgaggagcacacaacaatcctcaggccgtcctacaccggcctgtcgtcttccagtgcaaggttcctttccaggtcaatccccgtgtccgcacagacacctcctccaggtccccagaatccagaatgtaatttttgcgctctgccgagtcagccaagactgcctccgaagaagttcaactccgccaaagaggcattttag

SEQ ID NO: 182274 - DNA, 1833 bp, synthetic construct
  misc_feature 1..1833: note = Description of Artificial Sequence: Synthetic coding sequence
  source 1..1833: mol_type = other DNA
atggccgccgagagcggcgagctgatcggcgcctgcgagttcatgaaggaccggctttatttcgctaccctccgtaaccggcctaagagtactgtgaacactcattatttctctattgatgaggagctcgtctacgagaacttctacgctgacttcgggccgctgaacctggcgatggtttacagatactgttgcaaattgaacaagaagctaaagagctatagcctgtcaagaaagaagatcgttcactatacttgcttcgaccagcgaaagcgcgcaaatgccgcgtttctgatcggagcatacgcagtcatctacctgaaaaaaacaccagaagaggcgtatagggccctcttatcaggatcaaaccccccctatctccccttccgtgacgcaagctttggcaactgtacctacaaccttaccatactggactgcctccagggcatcaggaaaggtctgcaacacgggttctttgacttcgagaccttcgatgtggatgagtacgagcactacgaaagagtggaaaacggagattttaactggattgtacctggtaagttcctagcgttctctggaccgcaccctaagtctaagatcgaaaatggctatccactgcatgcacccgaggcctattttccgtatttcaagaagcacaacgtgaccgccgtcgtgaggctgaacaaaaaaatatacgaggctaaaaggttcactgacgccggcttcgaacactacgatctgttctttatcgatggctcaacgccatcagacaatatagtgcggcgcttcctgaatatttgtgagaacactgaaggtgctatcgccgttcactgcaaggctgggttggggaggaccgggaccctcatcgcctgttatgttatgaagcattaccgcttcacccatgccgaaataatcgcttggatccgcatctgccggcctggttctatcatcggacctcagcaacactttctcgaagaaaagcaggcttccctctgggttcagggagatatatttcggtccaaactgaaaaaccgacctagctccgagggctccattaataaaatcttatcagggcttgatgatatgagcattggcgggaatctgtcaaagacgcagaacatggaacggtttggagaagataacctcgaggatgatgacgtggaaatgaagaatggcattactcagggagacaagctaagagcactgaagagccagagacagccacggaccagcccaagttgcgcctttcgttcagacgatacaaagggacacccacgagccgtaagccagcctttccgcttgtccagcagtttacagggatctgctgtgaccttaaagacttctaagatggccttgagtcccagcgctacggccaagcgcattaatcgcacgagcctgtcctcaggcgccactgtccgcagcttcagtatcaactccagacttgccagctccctgggcaacctgaacgctgccactgacgacccagaaaataaaaagaccagctctagttctaaagctggcttcaccgcctctcccttcactaacctgctcaacgggagctctcagcctaccactaggaattacccggaactgaacaacaatcagtacaatcgatcttcaaactcaaatggaggtaatctgaacagtccccccggacctcatagtgcaaaaaccgaagaacacacaaccatcctcagaccaagctacaccggtctcagcagttctagtgccaggtttctgagccggagtataccatgctcgtgtctacttctcgtgtttaggaagccattcctgggcagcccccttctcagcctccccatatctcacctgtag

SEQ ID NO: 182275 - DNA, 1416 bp, synthetic construct
  misc_feature 1..1416: note = Description of Artificial Sequence: Synthetic coding sequence
  source 1..1416: mol_type = other DNA
atgaagcggaagagcgagcggcggagcagctgggccgccgcccccccatgttcaaggagatgttctagcacttccccaggcgtgaagaaaattcggtcaagtacccagcaggacccaagacgcagagatccccaggacgatgtgtaccttgatatcacagaccgcttatgcttcgccattctctattcacgcccaaagagtgcgagcaatgtgcattacttctcaatagacaacgagctcgagtatgagaatttctacgctgacttcggccccctaaatctggccatggtgtataggtactgttgtaaaatcaacaagaaattgaaaagtattacaatgctgcgcaagaaaattgtgcactttacgggtagcgatcagagaaagcaggcaaacgcagcctttttggtaggatgttacatggtgatttaccttggtagaacgccagaggaagcctaccggattctaatctttggagagacaagctacatcccgttcagggatgcagcctatgggtcctgcaacttctacatcacccttcttgattgcttccacgctgtgaaaaaggctatgcagtacggattcctcaacttcaattcttttaatctcgacgagtatgagcattacgaaaaagcagaaaacggggatctcaactggattatccccgaccgattcattgcgttttgcggcccgcacagccgtgctagactggagtctgggtatcatcagcattcacccgaaacttatatccaatatttcaaaaatcataacgttacaacaattatccgcttaaataagcgaatgtacgacgcaaagcggtttacagatgcaggctttgaccatcacgatctcttttttgcagacgggtctaccccaacagacgcgattgtcaaggagtttcttgatatttgtgaaaacgcagagggcgcaatcgccgtgcattgcaaagcgggtcttggacggaccggaacgcttatcgcctgttatatcatgaaacactacaggatgacagcggccgaaactatcgcttgggtgagaatttgccgcccaggcagtgtgattggcccgcaacaacagttccttgtgatgaaacaaacaaacctgtggctagaaggcgactactttaggcagaaactgaaaggtcaggaaaatggtcagcatcgcgccgccttctctaaactgctctccggagtggacgacatatctatcaatggtgtcgagaatcaggaccagcaggagcccgaaccctatagcgacgacgacgagatcaatggcgtgactcagggcgacagactgcgggccctgaagtctcgacggcagtccaaaacgaacgcaatccctctcaccgacggctggttgtcgcaagctgtaacctttctggaccgcttgctcatctggctgggcatccataaggactag

SEQ ID NO: 182276 - DNA, 1458 bp, synthetic construct
  misc_feature 1..1458: note = Description of Artificial Sequence: Synthetic coding sequence
  source 1..1458: mol_type = other DNA
atgaagcggaagagcgagcggcggagcagctgggccgccgcccccccatgttcaagacgctgcagcagcactagtccaggggtgaagaagattcgaagtagtacacagcaggaccctaggaggcgagatccacaggacgatgtttacctcgacatcactgaccgcctctgcttcgctatactttacagtaggcctaaatccgcctccaatgtgcactatttctctatcgacaacgaactggagtacgagaacttctacgcagattttggcccactgaatctcgcaatggtgtacagatactgttgcaaaatcaataaaaaactcaaaagcatcaccatgttgcgaaagaagattgttcattttactggctccgaccagaggaaacaggcaaacgctgcattcctggtgggttgctatatggtaatatatctgggacggacccctgaggaggcttaccgtattctcatctttggcgagacctcttatattccatttcgagatgcagcctacggaagctgcaacttctacattactttgcttgattgcttccatgctgtgaagaaagctatgcaatacggctttctcaacttcaattctttcaatcttgacgagtatgagcactatgagaaagccgagaacggggatctgaattggatcatccctgatcgattcattgcattttgtggtccccactcccgagctcggctggagtctggctaccatcagcactctcccgagacctacattcagtattttaaaaaccacaatgtgacaaccatcataaggctaaacaaacggatgtatgacgccaagcggttcactgacgctggctttgatcaccacgacctatttttcgctgacgggtccacaccaacagatgccatcgtcaaggagtttttggacatatgcgaaaacgccgaaggtgcgatcgcagtacattgcaaggccggcctgggtcgcacagggactctgatcgcctgctacataatgaaacattaccgcatgacagccgctgagactatagcctgggtgaggatatgtcggcccggttcagtcattggtccacagcagcagttcctggtgatgaagcaaaccaacctgtggctcgagggagattacttccgccagaaactgaaaggccaggaaaacgggcagcatagggccgccttctcaaaactactgagtggcgtggatgacatatccattaacggcgtagagaatcaggatcaacaagagccagagccatacagtgacgatgatgagatcaacggagttacccagggggataggctgagggccttgaagtccaggaggcagagcaaaacgaacgcgatacctctgacatgtccgctggccgtgctcacctctgcactgtgctctgtggtgatctggtggatcgtttgcgactatattttgcccatcctcctgttttgccttgatgggttcaggacccagtag

SEQ ID NO: 182277 - DNA, 1380 bp, synthetic construct
  misc_feature 1..1380: note = Description of Artificial Sequence: Synthetic coding sequence
  source 1..1380: mol_type = other DNA
atgaagcggaagagcgagcggcggagcagctgggccgccgcccccccctgctcccgccgctgctcttccacctcaccgggggtgaagaaaatcaggtcgagcacccagcaggatccccgtcgtcgggatcctcaggatgatgtttatctggatatcaccgatcgcctgtgctttgcaatcctgtattcacgaccgaaatctgctagtaacgtgcactacttctccattgacaatgaactcgagtatgagaacttctacgcagacttcggtccactgaacctagccatggtgtataggtattgctgcaagattaacaaaaagcttaagtccataaccatgctgagaaaaaaaatagtgcacttcactggaagcgaccagcggaaacaagctaatgctgcatttcttgttggttgctacatggtaatatacttgggtcggactcctgaagaggcctaccggatccttatctttggcgaaacgagctacatcccctttcgcgacgccgcgtacggctcatgtaatttttacataaccctgctggattgctttcatgccgtaaagaaggcaatgcagtatgggtttctgaatttcaactcttttaatctggatgagtatgaacattacgagaaggcggagaatggggatttgaactggattattcctgataggttcattgctttctgcgggccgcactcccgggcaagattagaatctggctaccatcaacactcgccagagacctacatccagtactttaaaaatcacaatgtaacaacaatcatcagacttaacaagcgaatgtacgatgccaagaggttcactgacgcggggtttgaccaccacgatctgttcttcgctgatggatcaaccccaacggatgccattgtcaaagaatttttggacatttgtgaaaatgcggaaggcgctattgctgtgcactgtaaagccgggctgggtaggacaggcaccctgatcgcatgttacattatgaagcattatagaatgactgctgcagagaccattgcatgggtgcggatatgcagacctggaagcgttattggtccacagcagcagtttctagtgatgaaacaaacaaacctgtggctcgaaggcgattatttcaggcaaaagctgaaagggcaggagaacggccagcacagagccgcattttcgaaattgctgagtggggtcgatgacatctcaataaatggagtcgagaatcaggaccagcaggagccagagccctactcagacgacgacgagatcaatggcgtcacccagggggaccgattaagggctctgaagagtagacgccaatccaagaccaacgcgatacctctgactctttcaatcagtcgaaccaagaccgtcctccgttag

SEQ ID NO: 182278 - DNA, 1497 bp, synthetic construct
  misc_feature 1..1497: note = Description of Artificial Sequence: Synthetic coding sequence
  source 1..1497: mol_type = other DNA
atgaagcggaagagcgagcggcggagcagctgggccgccgcccccccttgcagccggcgatgttccagcaccagcccaggcgtgaaaaagatacggagtagtacacaacaggacccccgtcgtcgcgacccccaggacgacgtgtacctggacatcacagacagactgtgtttcgccatattatacagtcgacccaagtctgccagtaacgtccactacttttctattgacaacgagctcgagtatgagaacttttatgccgatttcggtcctctgaacctggcaatggtctaccgctattgctgtaaaatcaacaaaaaattaaagtcaatcaccatgctgagaaaaaaaatagtccatttcacaggaagtgaccagcgtaagcaagctaacgccgctttcttagtgggctgctacatggtcatctaccttgggagaactccagaggaggcctacaggattctcatctttggcgagacgtcttatatacccttccgcgacgctgcttacggatcttgcaatttctacattaccctccttgattgcttccacgcggtcaagaaggccatgcagtacggttttctaaacttcaatagcttcaatctggatgagtatgaacattacgagaaagccgaaaacggggacctcaactggattataccggaccgctttatagcgttttgtggtcctcactctagggcccggctggaatcgggttaccaccagcatagccctgaaacttacattcagtacttcaaaaaccataacgttaccacgattataagactcaacaagcgcatgtatgacgcgaagagatttacggatgctggcttcgatcatcacgacctttttttcgcagacggtagcaccccaactgatgcaattgtaaaagagttcctcgatatatgcgaaaacgccgaaggcgccattgcagtccattgcaaggccgggctcgggagaactggcaccctaatcgcctgttatattatgaaacattatcgtatgaccgccgccgagaccattgcttgggttcgaatttgtagaccaggcagcgtgataggtccccagcaacagttcctggtcatgaaacagaccaacctttggctggaaggtgactattttcgccagaagctgaaaggacaagagaacggacagcacagagccgcctttagcaagctcctctcaggggtagatgacatctccataaatggcgtagagaatcaagaccagcaggaacccgaaccctactctgatgacgatgagattaatggagtcacacaaggggacagactgagggcgctgaagtcccgcaggcagtcaaagacaaacgccattccgctgacagtcatcctgcagtcctctgttcagtcttgtaagacttcagagcctaatatctccgggtctgcgggtatcactaaacgtacgactaggtcagcaagtcgcaagagcagcgtgaaatctctgagtatctctcgcaccaaaaccgtactgaggtag

SEQ ID NO: 182279 - DNA, 1386 bp, synthetic construct
  misc_feature 1..1386: note = Description of Artificial Sequence: Synthetic coding sequence
  source 1..1386: mol_type = other DNA
atgagccgggagggcgccggcgccgccctggtggccgaggtgatcaaggaccgtttatgctttgcaattctgtacagtcggcccaagtcagctagcaacgtacattatttttccattgacaatgaactcgagtatgaaaatttttatgctgatttcggcccattaaatctggccatggtttaccgttattgttgtaagataaataaaaagctgaagagcattactatgcttaggaaaaagatcgttcattttacagggtcggatcagcgaaagcaggccaatgcagcattcttggtgggctgctatatggtgatctacctaggtcggacaccggaggaagcgtatcgaattttgatattcggcgagacatcctacatcccgttcagagatgccgcttacgggagttgtaatttctacataaccctgctcgactgcttccacgcagtgaaaaaggccatgcagtacgggttcctgaacttcaactcattcaatctggatgagtatgaacactacgagaaagcagaaaatggagacttgaattggatcatccctgatcgatttattgccttttgcggtccccactcccgcgcaagattggagtccggataccaccagcactcacctgagacctacatacagtattttaagaaccataatgtgaccacgattatacgcctcaataagagaatgtatgatgcaaagcggtttacagacgcgggtttcgaccatcacgatctgtttttcgccgacgggagcacaccaacagacgccatcgtcaaggagttcttagatatctgcgagaatgcagagggggcaattgcggtgcattgcaaggcagggctgggacgcacagggacgctgatcgcgtgctatattatgaaacattacagaatgacggccgccgaaaccatagcttgggtgcgcatatgcagacctggatccgtcattgggccccagcagcagttcttggtgatgaagcaaactaatctgtggctcgagggagactatttccggcagaaactaaaaggtcaggaaaacgggcagcatcgggctgcgtttagtaagctcctctcgggggttgacgacatctcgattaatggcgtcgagaaccaggatcagcaggaacctgaaccctattcagacgatgatgagatcaatggagtgacacagggggacaggctccgcgcactgaagagtcgccgccagagtaaaacaaacgcaatcccccttacagtgatcctgcagtcttctgtacaaagctgcaaaaccagtgagcctaacatttccgggtccgccgggatcacgaagaggacgacacgaagcgcaagccgtaagtcaagcgtgaaatctctgagtatctcccgaaccaagacggtgttgcggtag

SEQ ID NO: 182280 - DNA, 1458 bp, synthetic construct
  misc_feature 1..1458: note = Description of Artificial Sequence: Synthetic coding sequence
  source 1..1458: mol_type = other DNA
atgaagcggaagagcgagcggcggagcagctgggccgccgcccccccatgttcacggcgctgctcctccacttctcctggagtcaagaaaattcgtagctctactcaacaggacccgcgcaggcgggatccccaggacgatgtttacctagacattactgaccgtttgtgttttgctatattatacagccggcctaagtcagcttcaaatgttcattactttagcattgataatgagcttgaatatgaaaatttttacgccgacttcggtccgcttaacctggctatggtgtatcggtactgttgtaaaatcaacaagaagctgaagagtataacaatgctcaggaaaaaaatagtgcactttacgggctcagaccagaggaagcaagctaatgccgcatttttggtcgggtgttacatggtgatctacctcggccgaacccctgaagaggcataccgcatcctcatatttggagagacctcctacattccttttagagatgcagcctacgggagttgcaatttttacatcacgctgcttgactgtttccatgccgtcaagaaggcaatgcagtacggatttctgaatttcaattcattcaacctcgatgagtatgagcactacgagaaagcagagaacggggacttgaactggatcatccccgacagattcattgctttctgtggaccccactccagggctagactggaatctgggtaccatcaacattccccggaaacttacatacaatattttaagaaccataacgttaccaccatcataagattgaataagcgcatgtacgatgccaagcgttttactgacgctggatttgatcatcatgaccttttctttgctgatggatctactcccacagatgctattgtgaaggagttcctagatatttgtgagaacgcagagggggccattgcagttcattgtaaagccgggctggggcggaccggcacgttaatagcatgttatatcatgaagcattatcggatgaccgccgcagaaaccattgcttgggtgaggatctgtcggcccgggtcagtgattgggccacagcagcagttcttggttatgaaacagactaacctctggttggagggagactatttccgacagaagctgaaggggcaggagaatggacagcaccgagcagccttttcaaaactgctctccggagtcgacgacatcagcataaatggcgtggaaaatcaagaccaacaggagccggagccgtattctgatgacgacgaaatcaatggagtgactcagggcgacaggctccgtgccctcaagtcccggcgacagtccaagacaaatgcaatccctctcacatgtccgttggctgtccttaccagtgcgctttgtagcgtggtcatctggtggattgtttgtgactatatactgcctatccttctgttttgtctcgatggattcaggacccagtag

SEQ ID NO: 182281 - DNA, 5346 bp, synthetic construct
  misc_feature 1..5346: note = Description of Artificial Sequence: Synthetic coding sequence
  source 1..5346: mol_type = other DNA
atgagcggcgaggtgcggctgcggcagctggagcagttcatcctggacggccccgcacaaactaacgggcagtgcttcagtgtagagactttgcttgatatattaatctgcttatacgacgaatgtaacaactcaccattgaggagggagaaaaatatcctggaatatctggagtgggcgaagccatttacttcaaaagtgaagcagatgagactccaccgcgaggactttgagattctaaaggttataggcaggggggccttcggcgaggtcgctgtagtaaagctgaaaaacgccgataaagtttttgccatgaagattctgaacaagtgggaaatgctcaagagagctgaaacggcctgttttcgggaagagcgcgacgtgttggtcaacggggataacaagtggatcaccacactgcactatgcttttcaggacgataacaacctctatttagtgatggactactacgtgggcggggacctgctgacgctgctgtcaaagttcgaggataggctacccgaggacatggcccggttctatctcgctgagatggttattgcaattgatagcgtacatcagctacattacgtacacagagacataaaaccagacaatatacttatggacatgaacggtcatattcgtttggctgactttggctcatgtctcaagctgatggaagacgggactgtgcagtccagcgtggcagtgggcacaccagactacatttccccagaaatccttcaggccatggaggatggtaaggggcgctatggaccagaatgtgattggtggtctctgggggtgtgcatgtacgaaatgctctatggggagactcctttctatgccgaatccctcgtcgaaacctacgggaagatcatgaaccataaagaacgcttccagttccctgcacaggttacggacgtgagcgagaatgcgaaggatctaattcgaagactgatctgttcaagagagcaccggctcggccagaatgggatcgaggactttaagaagcatccattcttcagcgggatcgattgggacaacattcggaattgtgaggccccgtacatccccgaggtttcctcccccacggatacctccaattttgatgtggacgatgattgtttgaagaactccgaaacaatgccaccaccaacccacacggcattctccggccatcatctgccgtttgtgggatttacctatacaagcagctgtgtgttgagcgataggagctgtttgagagtgacagccggcccaacctctctcgacttagatgtaaatgtccagcgcacattggacaataatctggccaccgaagcatatgaaagacgtatcaaacgactagaacaggagaaactggagctgagtcgcaagttgcaggaatctacccagactgtgcaggccttacagtattccaccgtagatggtccgttgacagcaagtaaagacttggagatcaagaacctcaaggaggaaatagagaagctgagaaagcaggtgacagagtccagccaccttgagcaacagctcgaagaggcgaacgctgtgagacaggagctcgacgacgctttccgccaaattaaggcgtacgagaaacaaattaaaacgctgcagcaggaacgcgaggaccttaataaggagcttgtgcaggcgtccgagcgtctgaaaaatcagtcgaaggagctgaaagatgcacattgtcagagaaaattggctatgcaagaatttatggagatcaacgaacgccttactgaactccacacgcagaagcagaaactggcccgtcatgtgcgtgacaaggaggaggaagtggatcttgtgatgcagaaagtagaatctctcagacaagaactgcggcgtaccgagagggcaaagaaagaactggaagtgcataccgaagctctggccgccgaagccagcaaagatcgcaagctacgagagcagtctgaacactatagcaagcagttagagaatgagctggagggactgaaacagaaacagatcagctactcaccgggtgtgtgttctatcgaacaccagcaggagataaccaagctgaagacagatttggaaaaaaagtctatcttttatgaagaagagctctccaaacgtgaagggattcacgccaacgagataaaaaatcttaaaaaggaactgcatgattcagagggtcagcagcttgctttaaataaagagattatgatcctgaaagacaagctcgagaagactcgccgtgagtcccagtctgagcgggaggaatttgagagcgagtttaaacagcaatatgagagggagaaggttctcctgacagaggagaacaaaaaactaacctccgagctagataaactgacaacgttgtacgagaatcttagtatccacaaccagcagctggaggaggaggtgaaggatttggcggacaagaaggaaagcgtggcccactgggaagcccaaatcaccgagatcatccaatgggtgtctgacgagaaggacgcccgtgggtatctgcaggcactcgcatctaaaatgacagaagagctggaagctctgcgaaattcctcattaggtactagggctacagatatgccctggaaaatgcgccggtttgccaaactcgacatgtcagcacgcctggagctgcagagtgccttggatgctgagatcagggccaagcaggcgatccaggaagaactcaataaagtgaaagcgagcaacattatcaccgagtgcaagcttaaggattctgaaaagaaaaatctcgagctcttgagtgaaattgagcaactcatcaaagacacagaagagttacggtcagaaaagggcattgaacatcaggatagtcagcatagtttcctagcctttctgaatactcctactgatgccctggaccagtttgagaccgttgattccactcccctctctgtgcacacccccacccttcggaaaaaaggctgcccaggatctacaggatttcctccaaaacggaaaacgcaccaattcttcgttaaatctttcacaacaccaaccaaatgtcaccagtgcacttctttgatggtgggactcattcgtcaaggctgcagctgtgaagtgtgtggtttttcctgtcatatcacatgtgtgaacaaagcccccacaacatgccctgtgccgcctgagcagacgaagggccctcttggaatcgaccctcagaaagggattggcactgcctacgaaggacatgtgcgtatcccgaagccagctggcgttaaaaaggggtggcagcgggccctggcgattgtctgtgactttaagttgtttctgtacgacatagccgagggcaaagccagtcagccttctgtagtgatttcccaggtgattgatatgagggacgaggagttcagcgtgtcaagtgtgctggcctccgacgttatccacgcctcccgaaaagacatcccatgcatcttccgcgttacagcctcgcagctgtcagccagcaataataaatgctctattctgatgctggccgacactgagaatgaaaaaaacaagtgggtgggcgtgctttctgagctgcacaagatcttgaaaaagaataagtttagagaccgcagcgtgtacgtgcctaaagaggcttacgatagcactttgcctctaatcaagaccacgcaagctgctgcaataattgatcacgagcgcatagcactaggaaatgaagaaggactgttcgtggtgcacgtaactaaagacgagataattcgcgtaggggacaataaaaagatccaccaaatagaactgatccctaacgatcagcttgtagccgtcatttctgggcggaatagacatgtcagactgttccccatgagtgccctggacgggagggagacagatttttataagctgagtgaaaccaagggctgccaaactgttacgtctggcaaggttcggcacggagctcttacttgtttgtgcgtggctatgaaacgacaagtgttatgctatgagctgttccagagcaaaacacggcaccggaagtttaaggaaattcaagtaccgtataatgttcagtggatggcgatcttctctgaacagctatgtgtagggtttcagtctgggttcctgaggtatccccttaatggagaaggtaatccatacagcatgttgcactcgaacgaccatacactgtccttcattgctcaccagccaatggatgcaatctgtgcagttgagatttcatctaaagagtacttgctgtgctttaactctatcgggatctacacagattgtcaaggcaggcgctcaagacagcaagagctcatgtggcctgccaatccctctagctgttgttataatgccccatatctttcagtctattccgagaatgccgtcgacattttcgacgttaacagtatggagtggatccaaaccctgccgctcaaaaaggtccgccctcttaataacgagggcagtctcaatttgctgggcctcgagaccattcgattgatctatttcaaaaataagatggctgagggcgacgaattggttgtcccagagaccagtgataattctcgtaagcagatggtccgtaacatcaataacaagcgtcgctattctttccgagtacctgaagaagaacgaatgcaacaaagacgcgagatgctcagggaccctgaaatgcggaacaagttgatatctaatccaactaacttcaatcacattgcccatatgggaccaggagacggcattcaaatcttgaaagatctgcccatgccggggttcccgtatcctagcccccatcatcacagtggcttaatttcctcccctattaacttcgagcatatctaccacatgaccgtgaactcagccgaaaagttcctatcacctgactccatcaatcccgaatattcacctagcctgagatctgtgcctggcaccccgtccttcatgaccctgagaaatccccgacctcaggaatctcgtacagtctttagcggtagtgtgtctatcccttcaattaccaagtctcgcccggaacctggacgatccatgagcgcatcctcgggcctgagtgcacgctcttccgcccagaacggcagcgcacttaaacgcgaattctcaggaggcagctattctgcgaaaagacagccaatgccaagtccatcagagggctcgctgagttcaggggggatggaccaggggagcgatgcccctgctagggatttcgatggggaagattctgattcacctcggcattcaacagcgagtaacagtagcaatctcagctcgccaccaagccccgcctcaccacgaaagaccaagagtctttccctcgaatccactgatcgcgggtcttgggacccatag

SEQ ID NO: 182282 - DNA, 2457 bp, synthetic construct
  misc_feature 1..2457: note = Description of Artificial Sequence: Synthetic coding sequence
  source 1..2457: mol_type = other DNA
atgatcctgaaggacaagctggagaagacccggcgggagagccagagcgaacgggaagaatttgagtctgagtttaagcagcaatacgagcgtgagaaggtgcttctcacagaagaaaataagaaactcacttctgagcttgacaaattaacaacattatacgagaatctttccattcacaaccaacagctcgaagaggaagtcaaggatctggccgacaagaaggagagcgttgcacattgggaagcacagataacggagatcatccaatgggtgtccgacgagaaggatgcccgcggatatcttcaggcattagccagcaagatgaccgaggagctcgaggccctgcggaattcctcgttggggaccagagccactgatatgccctggaagatgcggagatttgccaagttagacatgagtgcccggcttgagcttcagtcagcactggacgccgagatccgagcgaaacaggccattcaggaagagctgaacaaggtgaaagcaagtaacattatcactgaatgcaagttaaaggactcagagaagaagaatttggaacttttatcagagatcgagcagttgatcaaagataccgaggagcttcgaagtgagaaaggcattgaacatcaagattcccagcattctttcttagcattcctaaacacaccgacggacgctctcgatcagtttgaggactctttcagttcttcgagctctagcctgattgatttcctggatgataccgatccagtggaaaatacgtacgtctggaatccgagtgttaagttccatatccagtcccgttcaacttcccccagcacttctagcgaagcagaacctgtgaagacagtggactccacacccttaagtgtgcatactcctaccttgcggaagaagggatgcccaggcagtacgggattccctcctaaacgaaagacacatcagttctttgtcaagtcctttactactccaactaagtgtcaccaatgtaccagcctgatggtggggctgatcaggcagggctgcagttgcgaagtgtgtgggtttagctgccatattacatgtgtgaacaaggcaccgacgacatgtccagtgccaccagagcagacaaaaggtcccctgggtatcgaccctcaaaaaggcattggaacagcctatgagggacacgtgcgaatcccgaaacctgccggcgtcaaaaaaggctggcagagggccttggctattgtgtgtgattttaaactctttctgtatgacattgccgagggcaaagcttcccagccatctgtggtgatcagccaggtaatagatatgagagacgaagaattcagtgtgagctcagtcctcgcttctgacgtgattcacgctagtagaaaggatataccttgtatatttcgagtcactgcctcacagctctctgcctccaataacaaatgtagcatactgatgctggcggatactgaaaatgagaaaaacaagtgggtgggcgtcctgagcgaactgcacaaaattctgaagaaaaataaatttcgggatagatcagtatacgtgccgaaggaagcctacgactcaactctcccgttgatcaagaccactcaagcggccgcaatcattgatcacgagaggattgccctcggcaacgaagaagggctgttcgttgtgcacgtgacaaaggatgaaatcattcgggtgggcgacaataagaagatccaccaaatcgagctgatcccgaatgatcaactggttgccgtcatctctggcagaaatcgacacgtgaggctttttccaatgtcagccctggatggcagagaaaccgacttctataagctgtccgagacaaaaggatgtcagaccgtgacgtcaggaaaggtccgtcatggcgcactcacatgcctgtgtgtggccatgaaacggcaggttttgtgctacgagctctttcagtctaaaacccgacatcgaaaattcaaagagattcaggtgccctataacgtccagtggatggccattttctctgaacagttgtgcgtaggattccagtcaggattcctgaggtatccattgaatggggaaggcaacccctacagcatgctccatagtaacgaccacacgctcagtttcattgcccatcagcccatggacgctatttgcgccgtagagatttcctctaaagagtacctgttgtgctttaatagcatcggaatttacaccgattgtcagggacgcagatccagacagcaggagcttatgtggccagccaacccctcttcttgctgctataacgccccttacctgtctgtgtactccgaaaatgctgtggacatcttcgacgtaaattcgatggagtggatacagaccctacccctgaagaaagtgaggccattgaacaatgagggaagtttgaacctcctggggctagaaactattcggttgatatattttaaaaataaaatggcttag

SEQ ID NO: 182283 - DNA, 5076 bp, synthetic construct
  misc_feature 1..5076: note = Description of Artificial Sequence: Synthetic coding sequence
  source 1..5076: mol_type = other DNA
atgagcggcgaggtgcggctgcggcagctggagcagttcatcctggacggacccgctcagactaatggacaatgtttttccgtggagacacttctggacatcctgatatgtttgtatgatgaatgtaataattcacccctgcgccgggagaaaaacatcttagagtatttagaatgggcgaagcccttcacctcaaaggtgaaacaaatgcgactgcacagagaggattttgaaattctcaaggtcataggacgtggcgcttttggcgaggttgccgtggtgaagttgaaaaatgccgacaaggtctttgccatgaaaatccttaacaagtgggaaatgcttaaacgtgcggaaaccgcctgttttcgagaagaaagggatgtccttgtcaatggggataataagtggatcacgacactgcactacgcctttcaagacgacaataatttgtacctcgtgatggattactatgtgggcggcgacttgctgacactcttgtcgaagtttgaagatagactgcccgaggatatggctaggttctacctggctgagatggtgatagccattgattctgtccaccagctgcattatgttcaccgcgatataaagccggacaatatactcatggatatgaatgggcacatccggttggctgattttgggagttgccttaagctgatggaagacggtaccgttcagagcagcgtggcagtgggaacacctgattacataagtcccgaaattctccaggccatggaagatggcaagggccgatatggccctgagtgcgactggtggtccttaggagtatgtatgtacgagatgctgtacggggaaacccctttctacgccgaaagtttggtggagacgtacgggaaaatcatgaaccataaagagcgatttcagttcccagcacaggttacggacgtttctgagaacgcaaaggatctgattcgtcgcttgatctgctctcgcgagcacagactcggtcagaatggaatcgaggatttcaaaaagcatcccttcttctccggcattgactgggataacattagaaactgtgaggccccatacattcctgaggtgtcctcgcccacagatacaagtaactttgacgtggatgatgattgcttgaagaactcagaaactatgcctcctcccacccacacggctttctccggtcaccacctcccctttgtgggctttacgtacacatcttcctgcgtgctctctgaccggtcttgcctccgagtcacagcgggccccacctcgctggacctggacgtgaacgtgcaaaggacccttgataacaatcttgccacagaagcatatgagagacggattaaaagactagagcaagagaagctggaactcagccggaaactgcaggaaagcacccagactgtccaggcactgcagtattccacagtagatggccccctaacagctagcaaggacctggaaataaaaaacctcaaggaggagatcgagaaattgaggaagcaagtgacggaatcctcccatctcgagcagcagttggaggaagcaaatgccgtgcgtcaggagcttgacgatgcattccgtcaaatcaaggcctatgagaagcagatcaaaactctccagcaggagcgcgaggatctgaataaagagctagttcaagcaagcgaaagactgaagaaccagtcgaaagaacttaaagacgcccattgccagcgcaaattggccatgcaagaatttatggaaattaacgaaagactgactgagctgcacacacagaagcagaagctcgcacgacacgtgcgagataaggaagaggaggtggatctggtgatgcaaaaggtggagagcttgcggcaggaactgcggaggactgagcgagccaaaaaggagttggaggtgcatacagaagcactggctgccgaggcctccaaggaccggaagctcagggaacaatctgagcactacagcaagcagttagagaacgagctagagggtctgaaacagaaacaaataagttatagtccaggggtgtgttcaattgagcaccagcaggagattacaaagttgaaaacggacctggaaaaaaagtccatcttctatgaggaagaactgagcaagcgggagggaatacacgccaacgagatcaagaacctgaaaaaagagctgcatgactccgagggacaacagcttgcactgaataaggaaattatgatcctgaaagacaagctggaaaaaacgagacgagagagtcagagcgagagggaggagttcgagtctgagtttaagcagcagtatgaacgcgaaaaagtgctgttgacggaggagaacaagaagcttacttctgaactggataagctcacgaccctctacgaaaatttatccatccacaatcagcaacttgaggaggaggttaaggacctagccgacaagaaggagtcggttgcccattgggaagcacagattactgagataatccaatgggtgtcagatgaaaaagatgctcgggggtacctccaggctcttgcatcgaagatgactgaagagctggaggccttaaggaatagctctcttgggacacgcgccactgatatgccctggaagatgcgaaggttcgccaaactcgacatgtctgctaggttggaactgcaaagcgccctcgacgccgagatccgcgcgaagcaggctatacaggaagagctgaataaagtgaaagcatctaacatcatcaccgagtgcaagttgaaggactcagagaagaagaatttagagctgctgtctgaaattgagcagctcataaaggacaccgaggaactcagaagtgagaagggaatagaacaccaggattcccagcattctttcttggcttttttgaatactccaaccgacgccttggatcaatttgaacgcaagacccaccagttcttcgttaaatcctttacaactcccacgaagtgccatcaatgtacaagcctgatggtggggctcatcaggcagggatgctcatgtgaagtgtgcggcttcagctgccacataacttgcgtgaacaaagcacctaccacctgcccagttcctcccgagcaaacaaagggacccctaggaatcgacccccagaaaggaatcgggacagcatatgaggggcacgtccggatccccaagcccgccggtgtgaagaaaggctggcaacgtgcgttggccatcgtttgcgacttcaagttatttctgtacgatattgccgagggtaaagcctcacagccaagtgtggtgataagccaagttatagacatgcgcgacgaagaattctccgtctcctcagtgctggccagtgatgtgatccacgccagtcgaaaagatatcccttgcatttttcgagtgactgctagccagctcagcgccagtaacaataagtgtagcattctcatgctggcagataccgagaacgagaagaataaatgggtgggagtcctgagtgaactccataaaatcctgaagaagaacaagttcagagatcggtcagtgtacgtgcccaaagaggcatatgactcgacactgccattgatcaagaccacgcaagccgccgctatcatcgatcatgagcggatcgccctcgggaacgaggaaggcctgttcgtcgtccacgtgactaaggacgaaatcataagggtcggagacaacaagaaaatccaccagatagagcttatcccgaatgatcagctggtcgcggtcatcagtggacgaaaccgccacgttcgcctgtttccaatgtccgccctagacgggcgagaaactgatttttacaaactttcagaaacgaaggggtgtcagaccgtcacctctggaaaagtgagacatggagctctgacttgcctgtgcgttgctatgaagcgtcaggtgctctgttatgagctttttcagagcaagacccggcaccgcaaattcaaagaaatccaagtgccctataacgtgcaatggatggctatttttagcgagcagctctgcgtaggattccaatcaggattcctcaggtatccccttaacggtgaaggcaatccttactccatgctccacagcaatgatcatactctctcttttattgcacaccagcctatggacgcgatctgtgcagtcgaaatttcttctaaggagtacttactgtgctttaacagtattgggatatacactgactgtcagggacgacggtcgcgccagcaggaactgatgtggccagccaatccctcgtcctgctgttacaacgccccctacctgtctgtgtactcagagaacgccgttgacatcttcgacgtcaattccatggaatggattcaaactctgcccctgaagaaggtgcgacccctgaacaacgaggggagtctgaacctgctcggcctcgagactattagactgatctatttcaaaaacaagatggctgagggcgacgagttggttgtgccggagaccagtgacaactctaggaagcagatggtccgtaatattaacaacaaacggcggtattcttttcgcgtccctgaagaggaacgcatgcagcaacggagagaaatgcttcgagatcccgagatgcggaacaaactcatatcaaaccccaccaattttaaccatatcgcccatatgggccccggggatggaatccaaatcctgaaggaccttcccatgaacccacggccacaggagagccgcaccgtgttttcgggttccgtgagcatcccgtccataacaaagagccggcccgagccaggcagatcaatgtctgcttcttcagggttgtctgccaggtcctctgcccagaatggcagcgctctgaaaagagaattctctgggggatcgtattccgccaagcgacaacccatgcccagtcctagcgagggcagcctctcatctggaggtatggatcaagggtcagatgcccctgctagagacttcgatggtgaggactcagactctcccagacactccaccgcatccaacagcagtaatcttagtagcccacctagcccagctagcccgaggaaaaccaaaagtctgagcctggaaagtaccgaccgcggcagttgggacccatag

SEQ ID NO: 182284 - DNA, 5199 bp, synthetic construct
  misc_feature 1..5199: note = Description of Artificial Sequence: Synthetic coding sequence
  source 1..5199: mol_type = other DNA
atgagcggcgaggtgcggctgcggcagctggagcagttcatcctggatggacccgcacagacaaacgggcagtgctttagcgtcgaaacattgctagatatcttaatttgcttatacgacgagtgtaacaattctcctctccgccgggaaaaaaacattctggaatatctcgagtgggccaagccctttacctctaaggtcaagcagatgaggctgcatcgggaagatttcgaaatcctgaaggtcatcgggagaggcgctttcggtgaggttgccgttgtgaagctcaagaacgctgataaggtgttcgctatgaagatcctcaataagtgggagatgctaaagagggctgagaccgcttgttttagagaagagagagatgtgctggtgaacggggacaataagtggataaccaccctacactacgctttccaggatgacaacaatttatacctggtgatggattactatgtcgggggggacctgttgactttactgagtaagttcgaagacagactgcctgaggatatggccaggttttacctcgccgaaatggtcatcgccattgattcagtgcatcagctccactacgtgcaccgtgatatcaagcctgacaatattttgatggacatgaacggccatattcggctcgctgattttggatcatgtctgaagttaatggaagatggaactgtgcagtcttcagtcgctgtcggtacccccgattacataagccccgagattctccaggccatggaggatggaaaaggcagatacggcccggagtgcgattggtggtccctaggagtgtgcatgtatgagatgctgtacggcgaaacgcctttttacgcggagtctttagtggagacatacggcaaaatcatgaaccacaaggaaagattccagtttccagcccaggtcaccgatgtgtccgaaaacgccaaagatttgatcaggcgtttgatctgcagccgagagcatcgactcgggcagaatggaatcgaagactttaaaaagcaccccttcttctctggtattgattgggataacattaggaattgtgaggctccttacatccccgaggtgtccagtccaacagatacctctaacttcgatgtagacgatgattgtctcaaaaacagcgagaccatgcccccaccaactcacaccgcttttagcggccatcacctgccattcgttggctttacctacactagctcttgtgtgctgtcagacagatcctgccttagggtaaccgctggaccaacatccctggacctcgatgtcaacgtgcaaagaacactggataacaacctggcaactgaggcatacgagaggagaatcaagaggctagagcaggagaagcttgaattgagccgaaagctccaggaatccacgcaaacagtacaggcgcttcagtatagcaccgtggatggcccactcacagctagcaaggatttagaaatcaagaatctcaaggaagaaatagagaaactaaggaagcaggtaaccgagtcctcacacctggaacagcagctggaggaagccaacgcagtacgtcaggaactggatgacgctttccggcagatcaaggcgtacgagaaacagataaaaaccttacaacaggaacgcgaggatttgaataaggaattggtgcaggctagcgagcgactgaagaaccagagcaaggaattgaaggatgctcactgccagagaaaattagctatgcaggaatttatggagattaatgagcgacttacagagctgcatacccagaagcagaaactcgcacgccatgttcgggacaaggaggaggaggttgatctggttatgcaaaaggtggagtctcttcggcaggagcttcgaagaactgagcgagctaaaaaggaactagaagttcataccgaggctctggccgccgaagcatccaaggatcgcaagcttagggaacagagcgagcactactcaaaacagttggagaatgagttagaagggctgaagcagaagcagatcagctacagccctggagtgtgtagcattgagcaccaacaggagatcaccaaactcaagaccgacctggagaaaaagagtatcttttacgaggaagagctgagtaaacgggaaggaattcacgcgaatgagataaagaatctcaaaaaagaacttcacgacagtgaaggtcaacaactggcacttaataaggaaatcatgattctaaaggacaagctcgagaagacacggcgtgagtcacagtcagaaagggaggaattcgagtccgagttcaagcaacagtatgagagagaaaaggtactgctgactgaagagaacaaaaagctcacaagcgaactcgataagctgaccaccttgtatgaaaacctgtccatacataaccagcagctcgaagaggaggtaaaggacctagcagataaaaaggagtctgtggcgcactgggaggcccagatcacggagattatccagtgggtcagtgatgaaaaagacgctcgggggtatctgcaggcactggcctcaaagatgaccgaggagttggaggcactccgcaattcgagcctggggacaagagcaacagacatgccttggaaaatgaggaggttcgccaagcttgatatgtccgctcgactcgaactgcagtctgctctggatgctgagattcgggccaagcaggctatccaggaggaactcaataaggtgaaggccagtaacattattacagaatgtaagcttaaggattccgagaaaaaaaacctggaactcctgtctgagatcgaacagttaattaaggacaccgaggagctgcgaagtgaaaaggggatcgaacatcaagactcccaacattccttcttagctttcctcaacactcccacggacgcacttgaccagtttgaacggtcaccgtcatgtacaccagcctccaagggcaggcgcactgtcgactccacgccactatctgtacatactccgaccttgcgcaaaaagggctgccctggctcaactggatttccacctaaacggaaaactcaccagttttttgtcaagtcctttacaacccctacgaagtgccaccagtgcacctccctgatggtgggcctgatacgccaaggctgcagctgcgaagtgtgtggcttctcttgtcatataacatgtgtgaataaggcaccgactacctgtcccgtccctccagagcagaccaaaggccctcttgggatcgatccacaaaagggtattggaacagcttatgaagggcatgtgcgaatcccgaagcctgcaggcgtaaagaaggggtggcagcgggccctggctatcgtgtgtgacttcaaactatttctctatgatatcgctgaaggtaaagcctcacaaccatcggtagtgatctctcaggtcatcgatatgcgcgatgaagagtttagcgtgtcatcagtgcttgcctccgatgtcattcacgcaagccgtaaagacattccgtgcattttccgcgtcactgcctctcagctgagcgccagtaataataagtgctctattctcatgctggccgataccgaaaacgaaaagaacaagtgggtgggagtgctgtcagagctacataaaatactgaagaaaaataaattccgcgaccggtctgtctatgtacccaaggaagcttatgactccactctccctctgataaagaccacccaagccgcagccatcatcgaccatgaacgcattgccctaggcaacgaggagggcctgttcgtggttcacgtaaccaaggatgagataatccgagttggcgataataagaaaatccaccaaatcgaactaatccccaatgaccagttagtggctgtgataagtggaagaaatagacatgtgcggttgtttccaatgagcgcgctggatggacgagaaactgacttctacaagctttcagagaccaagggatgccagaccgtcacgtctgggaaggtccgccacggcgccctgacttgcctgtgtgtcgcaatgaagaggcaagtgctctgttatgagttgttccagagtaagactaggcaccggaagtttaaggagatacaggtgccctacaatgtgcagtggatggctatcttcagcgaacaattgtgcgtagggttccagtccggtttcctcagatatccactgaacggcgaaggcaacccatactccatgctacattcgaacgatcacacattatcctttatagcgcaccagcccatggatgctatttgcgctgttgaaatctcttcgaaagagtacctcctgtgctttaatagcataggtatctacaccgattgccagggccgcagaagtaggcaacaagagttaatgtggccagccaacccaagctcctgctgctacaacgccccctatctgtccgtgtattctgaaaatgcagtagacatttttgatgttaatagcatggagtggatccagactcttccccttaagaaagtgcgacctctcaataacgagggctccttgaatctgttaggtcttgaaactataagattgatttacttcaaaaataagatggctgagggggacgaattagttgtgccggagacatcagataatagtcgaaagcagatggtgcggaatatcaacaataagaggaggtacagcttcagggtccctgaagaggaaaggatgcagcagcgaagagagatgttgagagaccccgagatgcgcaacaagttaatcagtaatcccactaactttaatcatatagctcacatgggcccaggcgacggtattcagatactgaaggacctgcccatgaacccaagaccgcaggagagccggacggtgtttagtggctccgtatcgattcccagcatcaccaagtccagacccgagccgggccgcagcatgtccgcctctagtggcctcagcgcacgttccagcgcacagaacggttccgccctgaagcgcgagtttagtggcgggagctacagcgccaagcggcagcccatgccttctccctctgagggatctctgagctctgggggcatggaccagggttccgatgcaccagcacgggactttgacggcgaggactctgatagccctaggcattccactgcatcaaattcaagtaatctttcgtctccgcctagcccagcttccccaaggaagacaaaaagcctgagcctagagagcaccgaccgtggcagctgggatccttag

SEQ ID NO: 182285 - DNA, 5265 bp, synthetic construct
  misc_feature 1..5265: note = Description of Artificial Sequence: Synthetic coding sequence
  source 1..5265: mol_type = other DNA
atgagcggcgaggtgcggctgcggcagctggagcagttcatcctggatgggccggcacagacaaacggacagtgcttttctgttgagaccctgctggatattcttatttgcctctatgatgaatgtaacaacagccctctcagaagggagaaaaacatattagagtatttagagtgggcaaagccctttaccagtaaagtaaagcagatgagactgcacagagaggatttcgaaatactgaaggtgattgggagaggtgcattcggggaggtagccgtggtaaagctcaagaacgctgacaaggtgtttgctatgaagattctgaacaaatgggagatgctgaagcgagctgagacagcttgtttccgcgaggaaagggatgtgttagtgaacggcgataacaagtggattacgacactgcactacgcttttcaggacgataataatttgtatctcgttatggactattacgtgggtggagatctgctgacactgctgagtaagttcgaagataggctgcccgaggacatggccagattctacctggcagagatggtcatcgccatcgactccgtgcatcagctccactacgtacaccgggacatcaagccagataatatcctaatggacatgaatggccatattcggctggctgacttcggaagttgtttgaagctgatggaggatggaactgttcaatctagtgtagccgtggggacccccgattacatcagcccagagatcttacaggctatggaggatggcaaaggaaggtacgggcccgaatgtgactggtggtctctgggcgtatgcatgtacgaaatgctgtacggcgagacccccttttacgcggagtccctggttgagacttatggcaagatcatgaatcacaaggagcgatttcaatttcccgcccaggttacggatgtttctgaaaacgcaaaggacctgatacgacgcctgatatgctccagggagcatcgcctagggcaaaatggaattgaagatttcaaaaagcatcccttcttctcggggatagattgggacaacatcagaaattgtgaagcgccatatattcccgaggtgtcgtcccccaccgacacctccaacttcgatgtcgatgacgactgcttgaaaaactctgaaacaatgcctccacctactcataccgccttctccgggcaccatttaccatttgtggggtttacctatactagttcttgtgtgctaagtgatcgtagctgcttaagggtgaccgccggacccacatccctggatttggatgtgaacgtgcagcgcactttggataacaatcttgcgaccgaagcatatgaaagacgaatcaagagactggaacaggagaagcttgagctgagccgaaaacttcaggaatccactcagaccgtgcaagccctccagtactcaactgtggacgggcccttgaccgcgtcaaaggatctggagatcaaaaacctgaaggaagagatcgagaaactccggaaacaggtgacagagtctagccatctcgagcagcagttggaggaggctaacgcagtgcgccaggagctggatgacgcctttcgccagattaaagcgtacgaaaaacagatcaagacactgcagcaagaacgagaagacctgaacaaggagctggttcaggctagtgagaggctgaaaaatcaaagcaaggagctcaaagacgcacactgccagaggaagttggcaatgcaggagtttatggaaattaatgagaggttgacagagctccacacccagaaacagaaactcgctagacatgtgcgggataaagaggaggaagtggaccttgtgatgcagaaggtggagtccttgaggcaggagctaagaagaacggagagagcaaagaaagagctcgaagtgcatacagaagccctggctgcggaggcctccaaagacagaaaactgcgcgaacaatcggagcattatagtaaacagcttgagaacgaactggagggcctgaagcagaagcaaatctcctacagcccaggagtatgctccattgagcaccagcaagaaatcaccaaactcaagacggacttggagaagaaatcaatcttctacgaggaagagcttagcaaaagggaaggaatacatgctaatgagataaagaatctgaaaaaggaattgcacgactccgaaggccagcagctggctcttaataaggagatcatgattctcaaggataagttggagaagacccgcagggagtcccagtcggagcgggaagaatttgaatccgaatttaagcagcagtatgaacgcgaaaaggtcctgctgacagaggagaacaagaagcttaccagtgaactcgacaagctgactacgctctacgaaaacttgtctatccacaatcagcagctcgaggaagaagtgaaggatctggcagacaaaaaagagagtgtagcccactgggaagcccagataaccgaaataatccagtgggtgtcagatgagaaagacgcgcgaggatatctgcaggccctggcttccaagatgactgaagaactggaagcgttgcggaactcatccctgggaacaagagcgaccgacatgccatggaagatgcggaggtttgctaagcttgatatgtccgcacggctggaacttcagagcgccctagacgctgagataagggccaagcaggccatccaggaggagctgaacaaagtcaaagccagcaacatcataactgaatgcaagttgaaggatagcgagaaaaaaaacttggagttgctcagtgagatagagcagttaatcaaggataccgaggagctgcggagcgagaagggcatagagcatcaggatagccagcactcatttctcgcctttctcaacacacctaccgacgcgttggaccagttcgaaaccgacccagtggagaacacatacgtgtggaacccctcggttaagttccacatccagagccgaagcaccagcccgtctacttctagtgaggccgagcccgtaaaaactgtggacagtacccccctgagtgtccataccccaacactgaggaagaaaggctgtcctggcagcacaggctttccccccaagagaaaaacacaccagttcttcgttaagtctttcacgacacccactaaatgtcatcagtgcacttcattgatggtaggtttgataaggcaaggatgctcatgtgaggtatgcggattttcctgtcacataacttgtgttaataaggctcctacaacttgtcccgtgccaccagaacagaccaaagggccattgggcatcgaccctcaaaagggtatcggcaccgcgtacgagggtcacgttagaattccaaaaccggccggggtaaaaaagggatggcagcgggcgctggcgattgtgtgtgactttaagctgttcctttatgacatcgctgagggcaaggcttcacagccttcagttgtgatcagccaggtgatcgatatgcgcgatgaggagttttctgtaagcagcgtcttggcttccgacgtgatccatgcaagtcgtaaggatataccttgtatctttcgcgtaacggcctcccaactcagtgcttctaacaataagtgcagcattttaatgcttgcagatacagaaaacgagaagaataagtgggtaggagtgctgtccgagctgcataaaatacttaaaaaaaacaagtttcgcgacaggagtgtctacgtgcccaaggaagcttatgacagcaccctgcccttaattaagactacccaggccgcggccatcatcgaccacgagaggatcgcccttggcaatgaagagggcctcttcgtggtccatgttaccaaagatgagataatccgtgtgggggataacaagaagatacatcagatcgagcttattccaaatgaccagctagtagcagtcatcagcggccggaatcggcatgtgagactgtttcctatgagtgcactggatggacgggagacagacttctacaagctttcggagacgaaaggctgtcaaaccgttacaagcggaaaagtgaggcacggcgcactgacttgcttatgcgttgccatgaagcgccaggtcctgtgttacgaactgttccagtccaaaacacgacaccggaagtttaaggaaattcaggtaccctataacgttcagtggatggcgatcttttcagagcagctctgcgtggggttccagagcgggtttctgagatatccactgaacggagaaggtaacccgtatagcatgttacactccaacgaccataccctgtctttcatagctcaccaacccatggatgccatttgtgcagtcgagatttccagtaaagaatacctgttgtgctttaattctatcggcatttatactgattgtcagggccgtcgatcccgtcaacaggaactgatgtggccagctaacccctcatcatgctgttacaacgcaccttatctgagcgtgtattccgagaacgccgtggacatatttgacgtgaacagtatggaatggattcagactttgcccctgaagaaggtgcgacccctcaataacgagggttctctgaatttgttgggactggagactatccgcctcatatatttcaagaacaagatggcagaaggcgacgagttggtggttcccgagacttcagacaattccagaaaacaaatggtcagaaatatcaacaataagcgacgctactccttcagggttcctgaagaagaacgtatgcagcaacggcgggagatgctccgcgatcctgagatgaggaataaactgatttcaaaccccaccaactttaatcacatcgcccacatgggacccggtgacggcatccagatcctgaaggacctgcccatgaatccgcggcctcaggagagcaggaccgtcttctccggtagcgtgagtattcccagcatcaccaagagtagacctgagcctgggcggtctatgtcagcctccagcgggctttctgctagaagcagtgcccagaacggcagcgctttgaagagagaattttcaggcggcagctacagtgcaaagcggcagcctatgccctctcccagtgaagggagcctgagtagtggcggcatggatcagggctccgatgcccccgcccgtgactttgacggcgaagatagcgattcacccaggcattcaaccgccagcaactctagtaacctcagttctcccccttctccggcctcgcctcgtaagaccaaatctctttcactagaatcgaccgatagaggctcctgggatccatag

SEQ ID NO: 182286 - DNA, 4917 bp, synthetic construct
  misc_feature 1..4917: note = Description of Artificial Sequence: Synthetic coding sequence
  source 1..4917: mol_type = other DNA
atgagcggcgaggtgcggctgcggcagctggagcagttcatcctggacggtcctgcccagacgaatggccagtgtttcagcgtcgagacccttttggacattctgatatgtctgtatgatgagtgcaataacagcccattgcgccgcgagaaaaatatcctcgaataccttgagtgggctaaaccctttaccagtaaggttaagcagatgagattacatagggaggactttgaaatcttgaaagttattgggcgcggggcctttggggaggtggctgttgtaaaactcaaaaatgctgataaagtgttcgctatgaagatcctgaacaagtgggagatgttaaagcgtgccgagacagcgtgcttccgagaagagcgcgacgtacttgttaatggagacaacaagtggattacaaccctccactacgccttccaggacgacaataacttgtaccttgtcatggactattacgtcggaggtgatcttctgaccctcctgtcaaagtttgaagatagattgccagaggatatggcacggttctatcttgccgaaatggtgatagccattgacagcgtgcatcaattacactacgtgcatcgcgatatcaagcccgacaatatcttgatggatatgaacggccacatccggttggccgatttcggaagttgcctcaaactgatggaagatgggacggtacagtccagtgtggctgttggtacccccgattacatctcccctgagatacttcaagcaatggaggatggcaagggacgttacggccccgagtgcgattggtggtctctcggggtttgtatgtacgagatgctctatggcgaaacccccttttatgcagaatccctggtagaaacttacggcaaaatcatgaaccacaaagagcggtttcaattccccgcccaggttaccgacgtgtccgagaatgccaaagacctcatcagacggctgatttgttcgcgggaacacagacttgggcaaaacggaatagaagactttaagaagcatccattcttcagtggcattgactgggataacattcgaaactgtgaagctccttacatccccgaagtgagcagtcccactgacacaagcaattttgacgtcgacgacgattgtttgaagaactctgaaactatgcctcctcccactcacactgccttcagcggccatcaccttccgttcgttggttttacttatacaagtagctgtgtgctgtctgaccggtcctgcctcagggtcacagccggcccaacctccctagatctggacgtaaacgtgcaaagaacactagataacaacctggcaacagaggcctatgaacggaggattaaacgactcgagcaggaaaagctcgaactcagtagaaagttgcaggagtccacgcagaccgtgcaagcgctgcagtactccactgtagacgggccgctgaccgcatccaaggacctggagattaaaaacctcaaggaggaaattgagaaacttcgcaaacaagtcacagagtcatcacacttagagcaacaacttgaggaagccaatgccgtgcgccaagagcttgacgatgccttccgccagattaaggcctatgagaaacagatcaagactttgcagcaggaaagagaagatctgaacaaactggaggttcacacggaagcactcgccgcagaggctagcaaggaccgaaaactccgggaacaatcagaacactactctaagcagctggaaaatgagctggagggcctgaaacaaaagcagatatcctactcccccggtgtgtgcagtatcgagcaccagcaggaaataaccaagcttaagacagacctggagaaaaaatccatattttatgaggaagaattgtcgaaaagggaaggaattcacgcaaacgaaatcaaaaacttgaaaaaggagctgcatgacagcgaaggacagcagttggctttgaacaaggaaataatgattctcaaagataagttggagaagactcgaagggagtcacagtcagagcgagaggaattcgagtctgaatttaagcagcaatatgagagagagaaagtcctcctgacagaggaaaacaaaaaactcaccagtgagttggacaagctgactacactctatgaaaatctgtcaattcataatcagcagcttgaagaagaagttaaggatttggcggataaaaaggagtcggtggctcactgggaggcccaaatcaccgaaattattcagtgggtttctgacgaaaaagatgcacgagggtatctgcaggctttggccagcaagatgactgaggaacttgaggctctcaggaatagcagcctgggtaccagagccaccgacatgccctggaagatgaggcgatttgccaagctcgacatgtctgcccggttggagcttcagtcagcgctggacgctgagatccgggccaagcaggctatccaagaagaactgaacaaggtgaaagccagcaacatcatcactgagtgtaagcttaaggactccgaaaaaaagaatctcgagctcctctccgagatcgagcagctaatcaaggacactgaagagctaaggtctgaaaaaggcattgagcatcaggacagtcaacatagtttcctggccttcctgaacacacccacagatgccctggatcaattcgaaacggtcgacagtacacccctctcagttcacaccccaaccttgcggaaaaagggatgccccggcagtaccggattccctcccaagcgtaaaacgcatcagttcttcgtaaagagcttcaccactcccacaaagtgccatcaatgtacgagcttaatggttggcctgatccgccagggatgttcttgcgaggtctgtggattctcctgccatatcacgtgtgtgaataaggcccccaccacatgcccagtcccacctgaacagacaaaaggacctttagggattgaccctcagaaagggataggcaccgcttatgagggccacgttcggatccctaaaccagcaggagtgaaaaagggctggcagagggcactggccattgtgtgtgattttaaattgttcctgtatgatattgccgagggcaaagcctcgcaacctagtgttgtcattagccaggtaatcgatatgcgcgatgaagagttctcggtcagtagtgtactcgccagtgacgtgattcatgctagcagaaaggatatcccttgcatcttcagagtcactgcttctcaactttcagcctcaaacaacaaatgctcaatcctgatgctggctgataccgagaatgaaaaaaataagtgggtaggggtcctgtctgagttacataaaatcctgaagaaaaataaatttcgggacagaagtgtgtacgttccgaaggaggcctacgacagcactttgcctttgatcaaaacaacacaggcagcagctatcattgaccacgagaggatcgcattaggcaacgaggaaggactgttcgtggtgcacgtgaccaaggacgaaatcatccgcgtgggcgacaacaagaagattcatcagatcgaacttatccccaacgaccagctggtagcagtaatcagtggaagaaaccgccacgtacggttgttcccaatgtctgctttggatggccgggaaactgacttctataaactctcagagacaaagggatgccagacggtcacctctggaaaagtacgtcatggggccctgacttgcctctgtgtcgcgatgaaacggcaggtgctctgctacgagttatttcagtcaaagacgcgccatagaaagttcaaggaaatccaagttccatacaatgtccagtggatggcaatcttctctgagcagttgtgtgttggattccagagcggtttccttcggtacccacttaatggcgaaggtaacccctattcaatgttgcacagtaacgaccatactctaagttttatagcccatcaacccatggatgccatctgcgcggtggagatttccagcaaggagtacctcttgtgcttcaattcaataggtatttatactgactgtcagggtcgcaggtcacgacagcaggagctgatgtggcctgctaatccttcctcctgctgctacaacgcgccatatttgagtgtgtattccgaaaatgccgtggacatcttcgacgttaattccatggaatggatccaaaccctgccgctcaaaaaagtgcgaccattaaataatgaaggcagcctgaatctgctgggtctggaaacaatcagactgatctactttaagaacaagatggccgagggcgacgaattggtcgtaccggagactagtgataactccagaaagcagatggtacgaaacatcaacaacaaaagacgatactcattccgggtaccagaagaagaacgaatgcagcagaggagggagatgctgagggatcctgagatgaggaataaactgatctccaaccccaccaattttaaccacattgctcacatgggcccgggagacggtatccagatcctgaaggacctgcctatgaacccccgtcctcaggaatcaaggaccgtgttcagcggctccgtaagcattccttcaataacgaagagccggcctgaacccggtaggagtatgagtgcttccagcggactgagcgcccggtcttcagcccaaaacgggtcagcactgaagagggaatttagcggcggctcctatagcgccaagcgtcagccgatgccatccccatctgagggaagtctgtcctctggcggcatggaccagggctcagatgcacctgcaagagacttcgatggggaggactccgactcacctcgccatagcaccgctagcaattcatccaaccttagctcccccccttctccagctagcccaagaaaaacgaaaagcctctctctagagtctacagatcgagggagctgggatccctag

SEQ ID NO: 182287 - DNA, 5160 bp, synthetic construct
  misc_feature 1..5160: note = Description of Artificial Sequence: Synthetic coding sequence
  source 1..5160: mol_type = other DNA
atgagcggcgaggtgcggctgcggcagctggagcagttcatcctggacggccccgcacaaactaacgggcaatgtttttctgtcgaaaccttattggacattcttatttgtctctatgatgaatgcaacaatagtcctttgaggcgcgagaagaatattctagaataccttgagtgggctaagcctttcactagtaaggttaagcaaatgaggctccaccgggaagatttcgagattctgaaggtaatcggccggggagccttcggcgaggtggctgtggtgaaactgaagaacgcagacaaagtgttcgccatgaagattctgaacaagtgggaaatgctgaaacgagcagaaacagcctgttttcgggaggaacgggatgtgttggtgaacggtgacaacaagtggatcaccaccttgcactatgccttccaggacgacaataatctttacctggtgatggattactatgttgggggcgatcttctgacactcctgtcgaaattcgaggaccggttacctgaggatatggctagattctacctggccgagatggtgattgccattgattcagttcaccagttgcattacgtacacagggacatcaaacccgacaatattctgatggatatgaacggacacataagactggcggattttggttcttgtctgaaactgatggaggatggcacggtgcagagcagcgtcgccgttgggaccccagattatatttcaccagagatattgcaagccatggaagatggaaaaggcaggtacggtccggagtgcgattggtggagtctcggggtctgtatgtacgagatgctctatggcgaaaccccattttacgctgaaagcctggtcgagacatatggcaaaattatgaaccacaaagaaaggttccagttccccgcgcaggtgactgacgtttccgagaatgctaaggaccttatacggcgactcatctgcagtcgcgagcatcgtctgggccagaatgggatcgaggatttcaagaagcatccatttttcagcggaattgattgggacaatataagaaattgcgaggctccatacatccccgaggtcagttccccaactgacactagtaactttgatgtcgatgacgactgtctcaagaactcagaaaccatgccgcccccgactcacacggcttttagtggtcatcatctgccctttgtgggattcacttatacctccagctgcgtgctctcagatagatcctgcctccgcgtgacggctggccctacgagccttgacctcgatgttaacgtgcagaggaccctcgacaataatcttgcaacagaggcttacgaaaggaggattaagcgcctcgagcaggagaagctggaactgtctagaaagttgcaggagagcacccagactgtgcaggcccttcaatactctaccgtggacggacccctcaccgctagcaaagatctggaaatcaagaacctcaaggaggagatcgaaaaactgcgaaagcaagtgacagaaagcagccacctcgagcagcaactcgaagaggctaatgccgtgagacaagaactcgatgatgcattcaggcaaatcaaggcatatgaaaagcagatcaagactctccagcaagaacgagaggatctgaataaggagcttgtgcaggctagcgagcgattgaaaaaccagtcgaaagaactcaaggatgcccattgccaacgcaagctcgcaatgcaggagttcatggagattaacgagagactgaccgaacttcatacccaaaagcagaaactggcaaggcatgtgcgagataaggaggaagaagtggatcttgtcatgcaaaaagtcgaaagcctgcgccaagagctgcgcaggactgaaagagccaagaaggaacttgaggtacacacagaagctttggccgccgaggccagcaaagataggaagcttcgggagcagagtgaacattattctaagcagttggagaacgagctggagggtctgaaacagaagcagatctcttactcccctggagtgtgttccatcgagcatcagcaggagatcacaaaactgaagacagatttggaaaagaaatccattttctatgaagaggagctgtcaaagagagaagggatacatgccaatgaaatcaagaacttgaaaaaggaattgcatgatagcgagggccagcagctcgcactcaacaaggaaataatgattctgaaagataaacttgagaaaacccggcgtgagtcacaatccgaacgggaagagttcgaatctgaatttaaacaacaatacgaacgagagaaggtgctgttgactgaagaaaataagaaactaacaagtgagctggacaaattgacgacattgtatgagaacctgtctatccacaaccagcaactggaagaggaggtcaaagatctggcagataagaaagagtcagtggcccattgggaagcacagatcaccgaaatcatccagtgggtcagtgacgaaaaagatgctaggggttatcttcaggccctcgcaagcaaaatgactgaggaacttgaggccctgcgcaacagctcactgggcacacgcgctacagatatgccctggaagatgaggcgatttgcgaaattggacatgtctgcccgcctcgaactgcagagcgccctggacgcagagatccgcgccaagcaggccatccaggaggaactaaacaaagtcaaagcctccaacatcattacagagtgcaagctgaaggactccgagaaaaaaaacctggaattgctgtccgaaatcgaacagctaatcaaagataccgaggagctgaggagcgagaaaggaatagagcatcaggatagccagcactcattcttggcctttctaaatacaccgacagatgcccttgaccagtttgaaacggtggacagcaccccactgtctgtgcatacacccaccctaagaaagaagggctgccccggttccactggtttcccccccaaacggaaaactcaccagttctttgtgaagagtttcactacgcctacaaaatgccaccagtgtacatctctcatggtgggcttgattcggcaaggttgctcttgtgaagtgtgtggtttctcttgtcacattacttgcgtcaacaaggcgcctacaacctgtcctgtgcctcccgagcagacaaaaggcccattaggcatcgatccacagaagggcataggcaccgcctacgaaggacacgttcgcattcccaaaccagcgggggtaaagaaggggtggcagagagccctcgccatcgtctgcgacttcaagctcttcctgtatgacattgccgagggaaaggcaagtcagccatccgttgttataagtcaggtgattgatatgagagatgaggagttcagtgtgtccagtgtgctcgcttctgacgtgattcatgccagccggaaagatatcccttgcatcttcagggtgactgccagccaactgtccgcgagcaataataagtgctcaatattaatgctggccgatactgaaaacgaaaaaaacaagtgggtgggcgtcttatccgaactccacaaaatcttaaaaaagaacaaattccgcgatcggtccgtgtacgtacccaaagaggcgtatgactccaccctgccccttatcaagactacccaagctgccgctatcatcgatcacgaaaggatcgcactgggtaacgaagagggcctcttcgtagtgcatgtgacaaaggatgaaataatccgagtcggagacaacaaaaagatacaccaaattgagctcatacctaatgaccagttggtggctgtaattagcggaagaaaccgacatgtacgattgttcccgatgtctgccctggacgggagggagaccgacttctacaagcttagtgaaacgaagggctgtcaaaccgtcactagtggaaaggtcagacatggagctctcacttgcctgtgcgtggcaatgaaacgccaggtgttgtgctacgagttgtttcaatccaagacccggcacaggaaatttaaggaaattcaagtcccttacaacgtgcagtggatggcaattttttccgagcagttatgcgtggggtttcaaagtggcttcctgaggtacccactcaatggggaagggaatccatatagcatgctccatagcaatgatcataccctgtcatttatcgcccaccaacccatggatgcaatatgcgccgtagagatctcatccaaggagtatttattgtgcttcaactctattggaatctacaccgactgtcagggcaggaggtcccgccaacaggagctgatgtggcctgccaaccccagcagctgctgttacaacgcgccatatctatcagtgtatagtgaaaacgcagtagatatcttcgatgttaactcaatggaatggattcagaccctcccattgaaaaaggtcagaccactgaataatgaagggagcctgaatcttctcggtctggagactatacgattgatttatttcaaaaataagatggctgaaggcgatgagttggtggtgcccgagacatcagacaatagccgtaaacaaatggtccggaatataaataacaagagacggtactctttcagagtgcctgaggaggaaagaatgcagcaaagacgagaaatgctacgcgatcccgagatgcgcaataagcttattagcaacccaacaaactttaaccacatcgctcatatgggccctggcgatggtatccaaatcttaaaagacctgcccatgaacccgcgccctcaggagtcgcgcacggtgttttcaggcagcgtgtccattccctcaatcaccaagtccaggcctgagcctggaagatccatgagtgctagctctggactgtctgcccgttcctctgctcagaacggttccgctctcaaaagagagttttctggcggtagctactcagctaagcgtcagcctatgccatctcctagtgaaggcagcctgagctctggcggcatggaccagggctctgatgctccggcgcgagattttgatggcgaggattctgactctccacggcactcgactgcttctaattcttccaacttatcctcgccaccctcacctgcctctccaaggaaaaccaagtccttaagcctcgagtctacggacagagggtcttgggacccttag

SEQ ID NO: 182288 - DNA, 1641 bp, synthetic construct
  misc_feature 1..1641: note = Description of Artificial Sequence: Synthetic coding sequence
  source 1..1641: mol_type = other DNA
tgagacatcgccgagggcaaggccagccagcccagcgtggtgatctctcaagtaatagatatgagagacgaggagttttcagtaagctcagttctggcttcagacgtgatccatgcctcgcgtaaagatataccttgcatattcagggtgactgcctctcagctgagtgctagtaacaacaaatgttcaatcctgatgttagccgataccgagaatgaaaaaaataagtgggtgggtgtgctctccgagctccataaaatcttgaagaaaaataaatttagagacagaagcgtctatgtccctaaggaagcctacgactctaccctgccattgatcaagacaacccaagcagcggctatcatcgaccatgagagaattgcccttggcaatgaagagggactgttcgtcgtccacgtcactaaggacgaaattattagagtcggggacaataaaaagatccatcagatcgaactaattcccaacgatcaactagtcgcagtcatatcaggccgcaaccgacacgtccggctcttccccatgtctgccctggatgggagagaaacagatttttacaagttgtctgagacaaagggctgtcagacggtgaccagtgggaaagtgcggcatggcgcgttgacatgcctttgcgtagctatgaagagacaggtgctctgttatgaactgttccaatccaaaacccgccatagaaagttcaaggagatccaggttccatataacgtccaatggatggccatattttcggagcagctgtgtgttggcttccaatccggtttcctgcgatatcctttgaatggtgagggcaatccatattctatgctgcattcaaatgaccataccctgagttttattgcgcatcagccgatggatgcaatatgcgccgttgagattagtagcaaagagtacctcctttgctttaattctattggcatctacaccgactgccagggccgccgctctagacagcaagagctcatgtggccagccaacccctctagttgctgctacaacgccccatatcttagtgtgtactccgaaaatgcggtcgatatcttcgacgtaaattccatggagtggatccagacccttccactgaaaaaagtccgaccactcaacaacgagggatctctcaatttactgggactggagacgatccggctgatttactttaaaaacaagatggctgaaggagacgaactggtcgtaccagagacctctgataattcgagaaagcagatggttagaaacatcaataataagcgaaggtacagcttccgcgtgccggaggaggagcgcatgcagcaacgaagggagatgctcagggaccctgaaatgcggaacaagctgatatctaaccctactaatttcaatcacattgcgcatatgggccccggcgacggcatacagattctgaaggacctccctatgaatccccggccccaggaatctagaaccgtgttctccggctctgtcagtattccgtcgatcaccaaatccaggcccgaaccggggcggtccatgtctgcatcctcgggtctgtctgcctcgaaatgccgaggctacaggaaggtcccactgcgccagggggatccccagttgcccccccttttatctagggggtag

SEQ ID NO: 182289 - DNA, 2187 bp, synthetic construct
  misc_feature 1..2187: note = Description of Artificial Sequence: Synthetic coding sequence
  source 1..2187: mol_type = other DNA
tgagtgagcgacgagaaggacgcccggggctacctgcaggccctggcctctaagatgacagaggaattggaagcgctaaggaacagcagtttgggtaccagggctacagacatgccatggaagatgagacggttcgctaagctggacatgagtgccaggctggaacttcagtctgcccttgacgctgaaataagggccaagcaggcaatccaggaggagctgaacaaggtaaaggcctccaatatcattaccgaatgtaagctcaaggactccgagaagaagaatcttgaactcctgagcgagattgaacagctgattaaggacacggaggagttgcggagcgaaaaaggtattgagcaccaggactctcagcatagtttcttagcatttctgaacaccccaacggatgcactcgatcaatttgaagatagcttctcttcctcgtcatccagcttaatagatttccttgacgacaccgaccctgtagaaaatacctacgtatggaacccgtctgtgaaatttcatattcagtcacggagtactagcccctctacaagctcagaggctgaaccagttaaaactgtcgatagcactcctctgagcgtccatacacctacgttgcggaaaaagggatgtcccgggtccaccgggttcccgccaaaacgtaagactcatcagttctttgtaaagtccttcacgactcccactaagtgtcatcagtgtacctctctaatggtcggtctgataaggcagggatgttcctgtgaggtgtgcggctttagttgccacatcacatgtgtgaacaaagcccctaccacttgccctgtgccaccagagcagactaagggtcccttgggaatcgatccccaaaaagggattgggacagcatatgaaggacacgtacgcattccaaagccagcaggtgtgaagaaaggatggcaaagagccctagctatcgtgtgtgacttcaagttatttttgtatgacatagcagagggaaaagcttctcagccctctgttgtcatatcgcaagtcatcgacatgagggacgaggaattttccgtgagcagtgtgctggcatccgatgtgatccacgcctccaggaaagatattccttgcattttcagggttacggcgtcccagttgagtgccagcaacaacaagtgtagcattctaatgctcgctgacaccgaaaatgaaaaaaacaaatgggtgggagtgctgtcagagttgcacaaaatcctgaagaagaataaattcagagatcggagcgtgtacgtccccaaagaagcctacgattccactctccccctgataaaaacaacccaagctgctgcgatcattgatcacgagcgaatcgctctaggcaacgaggaaggcctgttcgtggtgcacgtgactaaggatgagattatcagagtaggcgacaacaaaaagattcaccagattgaacttatcccaaatgatcagttggttgctgttataagcggtcgcaataggcatgtcagactattccccatgagcgccttagacggtagggagacagacttctataagctgagcgagacaaaaggatgccagaccgtgacatctggcaaagtacggcatggcgcgttaacctgcttgtgcgtcgcaatgaaacgccaggtcctgtgctacgagctgttccaatctaagactcggcaccgtaagtttaaggagatccaggttccctacaacgtacagtggatggcaatattctccgaacaactctgcgtggggttccagtcagggtttctgaggtatccgctgaatggagaaggtaatccatacagcatgctgcatagtaacgatcacacattgagtttcattgcccatcagccaatggacgcaatttgcgccgtggaaatttcttccaaagagtatttgctatgctttaatagtattggcatttatacagactgccagggcagacggtcccgacaacaggagctgatgtggcccgctaacccaagctcatgttgttacaacgctccctacctcagtgtttacagcgaaaacgccgtggacatatttgatgtgaattctatggaatggatacagacgcttcccttgaagaaagtccgacctctgaacaacgaggggagtctgaacttactgggactggaaacaattagattgatctacttcaaaaataaaatggcctag

SEQ ID NO: 182290 - DNA, 3147 bp, synthetic construct
  misc_feature 1..3147: note = Description of Artificial Sequence: Synthetic coding sequence
  source 1..3147: mol_type = other DNA
tgagagggcatccacgccaacgagatcaagaacctgaagaaggagctgcacgatagcgagggccagcagctggcactcaataaagaaatcatgattcttaaagacaagctagaaaaaactcgccgggagagtcaaagcgagcgcgaagaattcgaaagtgagtttaaacagcagtacgaaagagaaaaggttctccttaccgaggaaaacaaaaagctgactagtgagttagataagctaaccacactctatgagaacctgagtatccataaccaacagcttgaggaagaggtgaaagatctcgcagataagaaggagagcgttgcccattgggaagcacagatcactgaaattatccagtgggtttcagatgagaaggacgcacgcggctacctgcaagcgttggccagcaagatgacagaggaactggaggccctgcgtaattccagcctcgggacaagggccaccgatatgccttggaagatgaggcggttcgccaaattggatatgtcagccagactagaactccagagtgcacttgatgccgagatcagagcaaagcaggctatccaagaagagctcaacaaggttaaggcaagcaatatcatcactgaatgcaaactcaaagatagcgagaaaaaaaacctagagctcttaagcgagattgaacagctcatcaaggacactgaagaacttagatccgaaaaaggtatcgagcatcaagatagccagcattccttcttagctttcctgaacacacctactgacgcactggatcagtttgaaaccgatcccgtggagaacacgtatgtctggaacccctctgttaagtttcatattcaatcaaggtctacctccccctcaacatcttctgaggcagaaccggttaagacagtggatagtacgccactcagcgtgcacaccccaacattgcgcaagaagggctgtccgggttccacggggtttccacccaaaagaaaaactcaccagttcttcgtgaaatcatttaccaccccgacaaagtgccaccaatgcaccagcctcatggttgggctgatacgccagggttgctcctgcgaggtatgcggcttctcctgtcacattacatgcgttaataaggctcctaccacctgtcccgttccgcctgagcagacaaaaggtccacttggcatagacccacagaagggcataggaactgcttacgagggccacgtgcgtattccaaaaccagctggggttaaaaaaggctggcaaagggccctggcgatcgtgtgtgactttaagctctttctgtatgacatcgcggagggcaaggcgtctcagccatctgttgtgatctcccaagtcatcgacatgcgcgatgaggagttctcagtcagttctgtccttgcgagcgacgtcatacacgcttctaggaaggatatcccgtgcatattcagagtcactgcctctcagttgtccgcttccaacaacaaatgctcgattctgatgctggctgatacagagaacgagaagaataagtgggtcggtgtcctgtccgaactgcataagatcctaaagaagaacaagtttcgagataggtcggtctatgtccctaaagaagcctatgacagcacgttgcctttgatcaagaccacacaggcagctgcgattattgatcatgagcggatcgcactgggaaacgaagaaggactgtttgtggtgcatgtcaccaaagatgagattattagagtcggggacaacaagaaaatccaccaaatcgagctcataccaaatgatcagctggtggccgttatatccggccgcaatcgacacgtccgcttgtttcccatgtctgcactggatggacgagaaaccgacttttacaaactgagcgagaccaagggctgccagaccgtcacttctggtaaggtgcggcacggggcactcacatgtctttgcgtggcaatgaaaaggcaggtcttgtgctacgaactctttcagagcaagactagacacaggaaatttaaggaaatccaggtcccgtacaatgttcaatggatggccatcttcagcgagcagttatgcgttggattccagagcggctttcttaggtatcccctgaatggtgaaggcaatccctattctatgctgcatagtaacgatcatactctctccttcattgcacaccagccgatggatgcaatctgtgccgtcgagatttcctccaaggaataccttttgtgcttcaactcaattgggatctacacagactgccaggggaggcgaagtcggcaacaggagttgatgtggcccgctaatccctcaagctgttgctataatgcaccctacctttctgtatattccgagaatgccgtcgatatcttcgacgtgaattcaatggagtggatccagacacttccacttaagaaggtgaggccccttaacaatgaagggtctctaaacctactgggactggaaaccattagactgatctattttaagaacaagatggcagaaggagacgaactggtcgtacccgaaacatctgataattcccgaaagcagatggtgaggaacatcaacaacaaacgcagatactcatttcgcgttcccgaagaggagcgcatgcagcagcggcgtgaaatgcttagggatcccgaaatgagaaacaagctgatctctaacccaactaattttaaccatatcgctcacatggggccaggcgacggcatccaaatcctaaaagatctcccgatgaatccccgcccccaggagagcaggactgtgttctctggcagcgtgtcaatccctagtatcacaaagagccgccccgaacccggcagaagtatgtccgcttctagcggactcagcgcccggagtagcgctcagaacgggagtgctctgaagcgcgagttctcaggcggctcctattctgctaaaagacagccaatgccctcaccatccgagggctcactttctagtggtgggatggaccagggatcagacgctcccgcacgcgatttcgacggcgaggactccgacagcccacggcattctacagctagcaattcctcaaacctttctagtcccccgagcccggcaagcccaagaaaaacaaagagcctctctcttgaaagcacggatcgaggcagttgggatccatag

SEQ ID NO: 182291 - DNA, 2955 bp, synthetic construct
  misc_feature 1..2955: note = Description of Artificial Sequence: Synthetic coding sequence
  source 1..2955: mol_type = other DNA
tgacagctggaggaggaggtgaaggacctggccgacaagaaggagtccgtggcccattgggaagcacagattaccgagatcatacagtgggtctccgacgaaaaagatgccagaggctatctccaagccctggctagcaagatgacagaagagcttgaggcactgcgtaacagcagtttggggacgcgggctaccgatatgccttggaagatgcgccgcttcgccaagcttgacatgagcgcacgcctggaactgcagtcggccttggacgctgagattagagccaaacaggctatccaggaagaattaaataaggtcaaggcttccaatatcatcacggaatgtaaacttaaggatagcgagaagaagaatttggaactgctgtctgagatcgagcaacttataaaggacacagaggagctgaggagcgagaaaggcattgaacaccaagattctcagcattcattccttgcattcctcaacaccccaacagacgccctggatcagttcgagacagtagattccactccactatcagtgcacacccccacattgagaaagaagggatgcccgggatcaaccggattcccccccaagagaaaaacccaccagttttttgtaaaaagtttcactactcctaccaaatgccaccagtgtacaagcttgatggtcggactgatcaggcagggatgtagttgtgaggtgtgtggattcagctgccacatcacgtgtgtaaataaggctcccacgacctgtccagtaccccctgagcagactaagggacctctgggaatcgacccacagaagggaatcggaacagcttatgaggggcacgtaaggatcccaaaaccagctggggtcaagaagggatggcagcgagctttggcaatagtgtgcgatttcaaactctttttgtacgacattgcagaggggaaggcgtcccaaccttctgtggtgatcagccaagtcattgacatgagggatgaggaatttagcgttagctccgtgctcgcaagcgacgttatccatgcgtctcggaaagatatcccttgtatcttcagagtaacggcctcccagctgtccgcatctaataacaagtgttcgatcctcatgcttgctgacacggagaatgaaaagaataagtgggtcggagttctgtctgagcttcacaagatcttaaagaaaaacaaatttagagaccgtagcgtgtacgtgcccaaggaggcctacgacagcactctaccactcatcaagaccacccaggccgcagccattatagatcatgagcggatcgccttgggcaacgaagaaggcctgttcgtcgtgcatgtcactaaagacgaaatcattagggtcggggacaacaaaaaaatacatcaaattgaattaattcctaacgatcaactggtggccgtcatttccggacgtaacagacacgtgagactgtttcccatgtcagccctcgatgggagagagacagatttctataagttaagcgagacaaaggggtgccagaccgtaacatccgggaaagtaaggcacggcgccctgacttgtctgtgcgtcgccatgaaaaggcaagtcctgtgttacgagctgttccagtctaaaaccagacaccgcaaattcaaagaaattcaggttccatacaatgtgcagtggatggcaatatttagcgaacagctttgcgtggggttccagtcaggcttcctgcgttatccactcaacggggaggggaacccttactccatgctgcactcgaatgatcacacgttgagtttcattgcgcaccagcccatggacgccatctgcgccgtggagatcagttccaaggaatacctcctgtgctttaactctattggcatctacacagactgtcaagggagacgcagccggcaacaggaactgatgtggcccgctaatccctccagctgctgttataatgcaccctacctaagcgtttactctgaaaatgcagtcgacatattcgacgtgaacagcatggagtggattcaaaccctcccactgaagaaggtccgcccattgaacaacgagggaagcctcaatctgctgggcttagaaaccatccggcttatttactttaagaacaagatggctgaaggtgacgaactggtagtgcccgagactagcgacaactctcgcaagcagatggtgcggaatattaacaataaacgccgatactcatttcgggtgcccgaggaagaaagaatgcaacagaggcgtgagatgctgcgcgatcctgaaatgagaaacaaactgatctcaaaccctactaacttcaatcacatagcccacatggggccaggggatgggatccagattctaaaagacctgcccatgcctggatttccctaccccagtccacatcatcactcaggattaatcagcagccccattaacttcgagcatatctaccacatgactgtgaactccgccgagaaattcctctctcctgacagtattaatccagagtacagccctagtttaaggtccgtgcccggcaccccaagcttcatgacgctcagaaatccaaggccccaggagtccaggacggtgttcagcgggtctgtgagtatcccctctatcaccaagtcacggccagaaccgggtaggtctatgagcgcttcatctggactctcagctcgtagctctgcccagaacggatcggcgttgaaaagagagttcagtggtggatcttatagtgccaaacggcagcccatgccgagtcccagtgagggatccttgtcatccggcgggatggatcagggaagcgacgcccctgcaagagacttcgacggagaggactccgattccccacgccatagtactgcctcgaattctagcaacctgtcaagccccccttcgcctgcgtccccaagaaaaacaaagtctctcagtttagagtctactgaccgcggcagctgggacccgtag

SEQ ID NO: 182292 - DNA, 5100 bp, synthetic construct
  misc_feature 1..5100: note = Description of Artificial Sequence: Synthetic coding sequence
  source 1..5100: mol_type = other DNA
atgagcggcgaggtgcggctgcggcagctggagcagttcatcctggatgggcccgcccagacaaacggacagtgtttctctgtagagacccttctcgatatcctgatctgcttgtacgacgagtgtaacaactcacctctgcggcgcgagaaaaatattctagaatacttagaatgggccaaaccttttaccagtaaagtgaaacagatgagattacacagagaggatttcgaaattttgaaagtgattggccggggcgcattcggagaggtagctgttgtgaagcttaaaaacgccgacaaagtctttgccatgaagatcctgaacaagtgggagatgctgaaacgggcagagacagcttgctttcgggaggaacgcgatgttctggtcaacggcgacaacaaatggataacaactctccactacgccttccaggatgacaataatctgtacctggtcatggattactatgtgggcggagaccttctgacactcctttctaagttcgaggaccgcttacccgaagatatggcccgcttctacctagctgaaatggttatcgcgatcgacagcgtgcaccagctgcattacgtacaccgtgatataaagccagacaatatcttaatggatatgaatggtcacatcaggctcgctgacttcggatcctgcctgaaattgatggaggatgggacggtccagagttccgtggccgttggaactcctgactacatcagtcctgaaatcctgcaggccatggaggacggtaaagggcggtatggtcctgaatgcgattggtggtccctgggggtgtgcatgtacgaaatgctgtacggggagacaccattttacgcagaatccctggtggagacctacgggaaaattatgaatcataaggagcggttccaattcccagcccaggtgacagacgtctctgaaaacgcaaaagacctaatcaggcgcctgatttgttcacgcgagcatcggctcggacagaacggcattgaagactttaaaaaacaccctttcttcagcggaatagattgggacaacatacgtaactgtgaagcaccgtacattccagaggtgtcaagtcctaccgatacctccaacttcgacgtcgatgacgattgcctgaagaattccgaaactatgcccccgcctactcatacagcctttagtgggcatcatcttccatttgtggggttcacatacacatccagctgcgtgctcagcgatcggagctgtttgcgcgttaccgctggccctacatccctggacctggatgtgaatgtgcagagaacattagataataacctggccacagaggcttacgagcggaggatcaaacgtctcgaacaggaaaaattggagctttcacggaaactccaggaatctacgcagaccgtacaggccttgcaatattctactgtggatggccccctgaccgctagcaaagacctcgagattaaaaatctgaaggaggaaatcgagaaactacggaagcaggttacagagtcctcgcacctggaacagcagttggaagaggctaatgctgtgcggcaggagcttgacgacgcgtttcggcaaattaaggcctacgaaaagcagatcaaaactctgcagcaggagagggaggatctgaataaggaactcgttcaagcttccgaacgacttaaaaaccagagcaaggagctcaaagacgcgcactgtcaaagaaagctggccatgcaggagttcatggaaatcaacgaaaggcttacagaacttcacacacagaagcagaaacttgcgaggcatgtaagggacaaggaggaggaggtggacctggtgatgcagaaggttgaatctctgaggcaggaattgaggaggactgaaagggccaagaaagagttagaggttcacactgaagcactcgcagcggaagcaagcaaggacaggaagttacgcgaacagagcgaacactattctaagcaactcgagaatgagctggagggtctgaagcagaaacaaatttcatattcccctggcgtttgctctatagaacaccaacaggaaataacgaagctgaaaacagatctcgaaaagaaaagtatcttttatgaagaggaactctccaagagggaaggcatccatgctaatgagattaaaaacctcaaaaaagagttgcatgatagcgagggacagcaactcgccctcaataaggagatcatgatactgaaggacaaactagagaagaccagacgggaaagccagagtgagcgggaggaatttgaatcagagttcaagcagcagtatgagcgggaaaaggttctcctgaccgaagagaataagaagctaacttctgaactagacaagctgacgacactctacgaaaacctgtccattcataaccagcagctcgaggaagaggtgaaggacctagctgataaaaaggagagtgtcgctcactgggaagcccagatcacggaaataatccagtgggtttctgatgaaaaggacgcaagaggttatttgcaagccctggcctcgaaaatgacagaagaacttgaggctcttcgaaactcttctctaggcacgagagcaacagatatgccttggaagatgcgaagattcgccaagttggacatgtctgcaagactcgagctccaaagcgcattggacgccgaaattagagctaaacaggctattcaagaagaacttaataaggtgaaggcaagtaacattattaccgaatgcaaactgaaagacagtgaaaagaaaaacttggagcttctctctgaaatcgaacagttgatcaaggacacagaggaattgaggagtgaaaaagcttccaaggggaggaggacagtggactccactcctctgtcggttcatactccaaccctgaggaagaaggggtgcccaggctctactggtttcccccccaagaggaagacacaccaattcttcgtcaagagcttcaccacacctacaaagtgtcatcagtgtaccagcttgatggtggggctaatccgacaggggtgcagttgcgaagtttgtggcttctcctgccacatcacatgcgttaacaaggcgccgaccacttgtccagttccgcctgagcaaaccaagggcccgttaggcattgacccccagaaggggataggcaccgcttatgaaggacacgtcaggatcccgaagcctgcaggggtgaaaaaaggctggcaaagagctctggcaatcgtctgtgactttaaactgtttttatacgatatagccgaagggaaagctagccagcctagcgtagtgatatcccaggtgattgacatgcgtgatgaagagttttcagtgtcctctgttctggcctctgatgtgattcatgcttcaaggaaagatattccttgcatttttcgggtaaccgctagtcagttaagtgccagcaataataagtgtagcattctcatgctcgcggatacggagaacgaaaagaacaaatgggtcggggtgctgagcgagttgcacaagatcctgaaaaagaataaattccgtgaccggtcagtctacgttcctaaggaagcatacgatagtactcttcctctgataaaaacaactcaggcagccgctattatcgatcacgagagaattgctctgggcaacgaagagggcttatttgtggttcacgtaacaaaggacgaaatcattagagtcggcgataacaaaaagattcaccagattgaactgatcccaaatgaccagcttgtggcagtaatcagcggacggaaccgccacgtccgactgttcccaatgtccgccttagacggaagagaaaccgacttttataagctgtccgaaactaagggatgccagacggttacaagcgggaaggtccggcacggtgccctgacctgtctatgcgtcgcaatgaagcgccaggtgctctgctacgaattgtttcaaagcaaaacaagacatcggaagttcaaggagatccaggttccttacaacgtccagtggatggcaatctttagcgagcagctgtgcgtcggattccagtccggctttcttcggtatcctctgaatggggagggaaacccatactcaatgctgcatagcaacgatcatacactctccttcatcgcgcaccagcctatggacgctatttgcgcagtggagatctcaagcaaggagtatctgctgtgcttcaattcaataggtatttacacagactgtcagggacgcagatcacggcagcaagaactgatgtggcccgccaatccttcgagctgttgctataatgccccgtacttatctgtttatagcgaaaatgccgttgacatcttcgatgtgaactcaatggaatggattcaaaccctccctcttaagaaggtgcgccccctcaataacgaaggtagtctgaacttgctgggcctggagaccattcgactgatatactttaagaacaagatggctgagggggatgaactcgtggtccctgagacatccgataatagcaggaaacaaatggttcggaatattaataacaagcggcgatattccttcagggtcccagaggaagaacgaatgcagcagaggcgcgaaatgctaagagatcccgaaatgcgcaataaactgatctcaaatcctactaacttcaatcacatcgctcacatggggcccggcgatggcatacagattctgaaggacctgcctatgaacccgcggccacaagaatctcggacggtcttttcaggctcagtctctattccatccattaccaaatctcggcctgagcccgggaggtcgatgagcgcatccagtgggctgagcgccaggtcctccgcccaaaacggcagtgccctcaagagggaattttcaggcggtagctatagcgcaaagcgccaaccgatgccatccccatctgaaggaagcctctctagtggcggaatggaccagggcagcgacgctcccgcccgggacttcgacggcgaggacagtgacagcccaaggcactccactgcctcgaactcttctaacctgagttccccaccaagccccgccagccctagaaaaaccaagtccttgtctctggaaagcacagacagaggctcctgggacccctag

SEQ ID NO: 182293 - DNA, 5136 bp, synthetic construct
  misc_feature 1..5136: note = Description of Artificial Sequence: Synthetic coding sequence
  source 1..5136: mol_type = other DNA
atgagcgccaaggtgcggctgaagaagctggagcagctgctgctggacggcccgtggaggaacgaatcagccctgagcgtggaaactctgctggatgtgttggtgtgtctgtacacggagtgtagccacagtgccttacggagggacaaatacgttgctgaatttcttgaatgggcaaaaccctttactcaactagtcaaggaaatgcagctgcacagggaggacttcgaaattatcaaggtcatcggtaggggggcattcggcgaggtggccgtggtgaagatgaagaacaccgagaggatatacgccatgaaaatccttaacaagtgggaaatgctcaaacgtgctgaaacagcctgcttcagagaggaacgcgacgtactcgttaatggggattgtcagtggatcactgccctccattacgcttttcaggacgaaaatcacctgtacctggtgatggactattatgtcggcggggaccttcttacccttctatccaagtttgaggacaagctgccagaagacatggcgcgtttttatattggagaaatggtactggccatcgattctatccaccagttacactatgtgcaccgtgacatcaagcctgacaatgtgctccttgacgtgaacgggcatatacgacttgcggacttcggctcatgtctgaaaatgaatgatgatggaacggtgcaaagctctgtcgccgtcgggacacccgactacatctctcccgaaatcctgcaggcaatggaagatggcatgggcaaatatggacctgaatgtgactggtggagcctaggagtgtgtatgtacgagatgctatacggcgaaacccccttttacgctgagtcactcgtcgagacgtacggtaagatcatgaatcacgaagaaaggtttcaatttccttcccacgtgaccgacgtgagtgaagaggctaaggacctgatccagcggctgatttgttctcgagaacgtcgtctgggtcaaaacgggatcgaggattttaagaagcatgccttcttcgaaggtctgaattgggaaaacattcgcaatctggaagctccttatatccctgatgttagctctcccagcgacacctcaaacttcgatgtcgatgacgatgtactgagaaacacagagatccttcctcccggcagtcatacaggctttagtggtcttcacctcccattcattgggtttaccttcacaaccgaatcatgcttttccgatcgcggctccttgaagtccatcatgcagagtaatacattgacaaaagacgaggatgtgcagcgggacctggaacactccctccagatggaagcctatgaaagacgaatcaggagattggagcaggagaaactggagctttcaagaaagttacaagagtcaacacaaaccgtgcagtctctgcacggtagtagccgagccctgtctaactccaaccgggacaaggagattaaaaaattgaacgaagaaatcgagagattgaagaataaaattgcagatagcaataggctagagaggcagctcgaggacacagtggcactgagacaggagcgagaggacagcacccagcgtcttagaggcctggagaagcagcaccgtgtggtgcgccaagagaaggaggagctccacaagcaattggttgaggcctcagaaaggctgaagtcacaagcgaaggagctcaaagatgcccatcagcaacgtaagttagctttacaggaattttccgagctgaatgaaaggatggctgagctgagggcacagaaacagaaagtcagtagacagttaagagacaaggaggaggaaatggaggtcgcaacccagaaagttgatgcaatgagacaggagatgcgacgcgcagaaaaattacggaaggaacttgaagcccagcttgacgacgccgtcgccgaggcctcgaaagaacgcaaactccgagagcattctgaaaatttttgcaaacagatggagagtgagctggaggcccttaaggtgaaacagggaggacggggcgctggcgctaccctggaacaccagcaggagatctccaagatcaaatcggagctcgaaaaaaaggtcctgttttatgaagaggagctggtcaggcgtgaggctagtcacgtgcttgaagtgaagaacgttaagaaggaggtccatgatagcgagtcccatcagctggccttacagaaggagatcctcatgctgaaagataagctggagaagagcaagagagaacggcacaatgaaatggaagaggccgtggggacgattaaggacaaatatgagcgtgaacgtgcaatgttgtttgatgagaataaaaagctcactgccgagaacgagaaattatgctcattcgtggacaagctcacggctcagaaccgccaactggaagacgagcttcaggatttagccgccaaaaaggagtcggttgctcattgggaagctcagatagcggagataatccaatgggttagcgatgaaaaagatgcccgcggttatctgcaggcactggctagcaaaatgaccgaagagctggaggctctgagaagttcctctcttggctcccggaccctggaccctctgtggaaagtgagaaggtcccagaagttagacatgtcagccagactagagctgcagtctgctctcgaagctgagatccgggcaaaacagctagttcaagaggaattgagaaaggtaaaggacgccaatttgaccttagaaagcaagcttaaggattcagaagctaagaatcgcgagctcctggaggaaatggaaattctgaaaaaaaaaatggaggagaagtttagagcggacacgggccttaaattaccagactttcaggactcaatatttgaatatttcaacacggctcctttagcccacgatcttacatttcggacttctagcgccagtgaacaagaaacccaagcccctaagcccgaggcttcacccagtatgtctgttgctgccagtgaacagcaggaggatatggcaagaccccctcagcgcccttctgctgtgcctctgccaacgactcaggctctagctctcgccggacccaaaccaaaggcacatcaatttagtattaaatctttttcctccccgactcaatgttcccactgcacaagccttatggttggtcttatccggcagggctacgcctgcgaggtctgcagcttcgcctgccacgttagttgcaaagacggggctcctcaggtgtgtcccattcctcctgaacaaagcaagcgaccccttggcgtggatgtacaacgcggcataggtaccgcttacaaggggcacgtgaaagtgccaaagccgacaggtgtcaagaagggatggcagagggcctacgccgtcgtttgtgattgcaaactcttcttgtacgatcttcccgagggcaagtcaactcaacccggagtcatagcctcacaggtcctggatttacgggacgatgaattctcagtctcttctgtactggccagcgatgtcattcacgctacacggagagacataccgtgcatcttccgcgtcaccgccagcctgctaggggcccccagcaagacatcaagccttctgattctgaccgaaaacgagaatgagaagcgaaaatgggtgggcattctcgagggcttacagagtatcctgcataaaaataggctgaggaatcaggtcgtacacgtaccactcgaggcctacgactcttccttgccccttatcaaagcgatactgaccgccgccatcgtggacgccgatagaatcgccgtgggcctagaggaggggctgtacgtcatcgaggtgaccagagacgtgattgtcagagccgccgactgtaaaaaggtgcaccaaatcgagctagctccacgggagaaaatcgtaattctcctctgtggcagaaatcatcacgttcacttgtacccttggagctctctcgatggcgctgaaggctcttttgacatcaagctaccagagaccaaggggtgccagttgatggccactgcgacacttaagcgaaactccggaacttgtctgttcgtcgcggtgaagcgcctaatcctgtgctacgaaatacagcggacaaaaccatttcaccgcaagtttaacgagatcgttgcaccaggctctgtacagtgtctggctgtgctcagagataggctgtgtgtggggtaccctagcgggttttgcctgctgagtatccagggcgacgggcagccgttgaacctcgtaaaccctaacgacccctcactagcttttctctcacaacaaagttttgacgctttatgcgcagtggagctcgaatctgaagagtacttgctttgcttctctcacatgggcttatacgtcgacccacagggacggagggctcgtgcgcaggagctgatgtggcccgctgcacctgtggcatgctcttgctcacccacgcacgtgactgtgtactcagagtacggcgttgatgttttcgatgtgagaaccatggaatgggttcagaccatcggcctgcgtcgcatccggcccctgaactccgagggaaccctcaacctcctaaattgtgagccgcctagactgatatattttaagagcaagtttagtggagcagtcctgaacgttccagacacctctgacaattcgaagaaacaaatgcttagaacacgcagtaaaagaaggttcgtcttcaaggtccccgaggaggaacggttgcaacagagacgggaaatgttgagggaccccgagctgcgcagtaaaatgatcagtaatcctactaatttcaatcatgtcgcgcacatgggccctggtgatggaatgcaggtccttatggacctgcccttatctgctgtcccgcctagtcaggaggaaaggccaggccccgcaccaacgaatctggcgcgccagcctccatcgagaaataagccctacatctcctggccctcttctggaggctctgagccctctgtcactgtgccgctacgcagcatgtcagatcctgaccaggatttcgacaaggagccggactccgacagtaccaaacattccacccctagcaattcctcgaatccctctggacccccaagtcctaacagcccgcaccggagccagttgcccctggagggactggagcagcccgcctgcgacacctag

SEQ ID NO: 182294 - DNA, 1593 bp, synthetic construct
  misc_feature 1..1593: note = Description of Artificial Sequence: Synthetic coding sequence
  source 1..1593: mol_type = other DNA
aaggtgcggcggagccagaagctggacatgagcgcccggctggagctgcagagcgccttggaagccgaaatccgtgccaagcaactggtgcaggaagagctgagaaaagtgaaggacgcgaatttaacactggaatccaagttgaaggattctgaggctaagaatagagagcttcttgaggagatggagatcctgaaaaaaaagatggaagagaagttcagggctgacaccgggctgaaactgcctgactttcaggacagtatctttgagtatttcaataccgctcctctggcccatgacctgaccttccgcacctccagtgccagcgagcaggaaacacaggcccctaagcccgaggcatctccttccatgtccgtcgccgctagcgaacagcaggagccaaaggcccaccaattttctatcaagtcgtttagcagcccaacccagtgttcccattgcacctccttaatggtgggcctgatccgacagggctacgcatgcgaggtttgtagtttcgcatgccacgtttcctgcaaggatggggccccccaggtgtgtcccattccaccagaacagtctaaaaggcctttaggagtagatgtccaacgcggcatcggcactgcgtacaagggccatgtcaaggtcccgaaacccactggtgtgaaaaagggatggcagcgtgcctatgcagtagtatgtgattgcaaactcttcctgtacgacctgccagagggcaaaagcactcagcccggagtgatagcttctcaggtcctggacctgcgggacgatgaattttccgtatcttcggtccttgccagcgatgttatacacgccactcggcgggacatcccctgtatctttcgagtcacagccagccttctcggcgcgcccagcaagacctcatccctgctaatactgacagaaaatgaaaacgaaaaaaggaagtgggttgggatattagagggtctgcaaagcatcttgcataagaacagactccggaatcaggtggtgcacgtgcccttggaagcctatgactccagcctgcccctgatcaaggcaatcctcacagctgctatcgtcgacgccgacaggatcgccgtgggcttggaggaggggctgtacgtgattgaagtaaccagagacgtgatcgtccgagcagcagactgtaagaaagttcaccagatcgagttggctccccgcgaaaaaatagttatcctcctgtgtgggagaaaccaccatgtgcatttatatccttggtcatccctggatggagcagagggtagcttcgatattaagctcccagagacgaagggttgccagctcatggccacagctactttgaagcggaacagcggcacttgcctcttcgtggctgttaaacgactgattctgtgttacgaaattcagcgcacgaaacctttccatcgcaagttcaatgaaatcgttgctcctggctctgtacagtgcttggcggtcctcagagaccgactgtgcgtcggttaccccagcgggttctgcttactgtctattcagggcgacggccagcctttaaacttggtgaatcccaacgatcccagcttagccttcctttag

SEQ ID NO: 182295 - DNA, 4656 bp, synthetic construct
  misc_feature 1..4656: note = Description of Artificial Sequence: Synthetic coding sequence
  source 1..4656: mol_type = other DNA
atggagcggcggctgcgggccctggagcagctggcccggggcgaggctggaggctgccctggattggacggcctgctagacctgctactcgcactgcaccacgagttgagtagtgggccactcagaagggagaggagtgtggcccagttcttaagctgggcctctccatttgtctccaaggtgaaggaactgcggcttcagcgggatgacttcgagatcctgaaggtgataggtaggggcgccttcggagaagtcactgtggtgagacaacgcgatacaggtcagatattcgccatgaagatgcttcacaagtgggagatgctcaagcgggccgagacagcatgtttcagagaagagcgcgatgtattagtcaagggagactccagatgggttaccaccctgcattatgcatttcaggatgaggaatacctgtatctggtgatggactattatgccgggggtgatttactgacgctgctaagccgtttcgaagataggctccctcccgagctcgcgcagttctatctggcggaaatggtcttggccattcattcccttcatcaactaggctatgttcatagggacgttaaacctgataatgtattgctggacgtcaacggccatatcaggctcgctgactttggcagctgcctccggcttaacactaacggcatggtggatagtagcgtcgcagtcggaacccccgattatattagccctgaaatcctccaggctatggaagaagggaagggtcattatggaccccagtgcgattggtggagcctgggcgtttgtgcctatgaactcttgttcggcgagactcccttctacgcagagagccttgtcgagacctacggaaagatcatgaaccacgaagatcacttgcaatttccccccgatgtcccagatgttccagcttccgcccaagaccttattcgacagctcctgtgtcgccaggaagagaggcttgggaggggcggcttagacgatttcaggaatcaccctttctttgagggggtcgactgggaaagattggcctctagtactgctccgtatatcccagagcttcgtggtccaatggacacatccaatttcgacgtcgacgacgatacactgaaccaccctgggactctgccccccccctcacatggcgcgttttctggccaccacctaccatttgtgggctttacctacacaagtggctcccactcgccagaaagtagcagcgaagcatgggccgccctggagcggaagttgcaatgccttgaacaggaaaaggtggaactcagtcggaaacatcaggaagccctgcacgcgccaaccgaccatcgcgagttggaacagttaaggaaagaggtccagaccctgcgagatcgtctcccagagatgctgagggacaaagcctccctttcgcagacagacggacctccagccggaagccctggccaggactccgatctaagacaggagctcgaccgcttgcaccgggagctcgctgagggaagggctggcctccaggcacaggaacaagagttgtgtcgggcacagggccagcaagaggagctactacaaaggctgcaggaagctcaagaacgggaggctgcgaccgccagtcagaccagggctttatcgtcccaactcgaggaagcccgtgctgcccagagggaactggaggcgcaggtatctagcttgtctcggcaagtgacccaactccaaggacagtgggagcaacggctggaggaaagcagccaagccaagacaatccatacggcgagcgaaaccaatggaatgggcccccccgaaggcggacctcaagaagcgcagctgaggaaagaagtggccgctttgcgtgaacagctcgagcaggcccactcccacagaccttctggaaaagaggaagctctctgtcagctgcaggaggagaaccgacggctgagcagagaacaggagcgcttggaagccgagttagcgcaggagcaggagtcgaagcagcggcttgagggcgagcgcagagaaaccgagtccaactgggaagcgcagctggcagatatcctgtcctgggtcaacgatgaaaaggtgagtagagggtacttgcaggcacttgcaacaaagatggccgaagaactggagagcttacggaacgttggcactcagaccttacctgcccgtccgctggatcaccaatggaaggcacgccgattacagaaaatggaagcttctgctagactagaactgcaatctgcacttgaagctgagatacgagccaaacaggggttgcaggagaggcttacacaagtgcaggaagcccagcttcaggcggagagaaggctacaggaagctgagaaacagtcacaagccctacaacaggagcttgccatgctacgggaggagctacgcgccaggggccccgtcgacaccaaacccagtaactcgcttatcccattcctgagctttcggtcaagtgagaaggattccgccaaagaccccggtatcagcggcgaggccacgcgccatggcggtgagccagatttgcggcctgagggtcgcaggtctctcaggatgggggccgtgttccccagagcccccaccgcaaacacggcctctaccgagggtctacccgctaaacctggaagccataccctgcgacccaggagcttcccgagccccaccaagtgtcttcgatgtacttcgcttatgctgggactgggcagacaaggcctggggtgcgacgcgtgtggttatttttgccacactacttgcgctccccaggcaccaccttgtccagtccccccggacctgctgcggactgccctgggggtacaccccgaaaccggaaccggaaccgcttacgagggtttcctgtctgtgcccagaccatctggagtccgtcgtgggtggcagagagtctttgccgccctatctgattcacgcctcctcctgttcgacgctcctgacctgcgactttcgcccccatctggcgcgttactccaagtgttagacttacgagatcctcagttctcagccacaccagtcctggcaagtgatgtgatccacgcccagtcacgcgacctgcctcgtatatttcgggtgaccacgagtcagctggcggtgccacctactacatgcactgttctgctcttggccgagagcgaaggtgagagggagcgttggctacaggtgctcggcgagctgcagcgactactactggatgcaaggcctagacctagacctgtatacactctgaaagaggcttacgataatgggctgcctctgctccctcatactctgtgcgcagctattctcgatcaggatcgcctcgctctgggaacggaggaaggcctattcgtgatacacctcagatctaacgatatcttccaggttggcgagtgtagacgggtgcagcagttgacactctcccccagcgctggccttctggttgtcctgtgtggacgcgggccatccgtacgactgttcgctcttgctgagctggaaaacattgaagtggcgggcgctaagattcctgaatcccgggggtgtcaggttttagccgccggcagtatactgcaggcaagaacgccggtcttgtgtgtggcagtcaaacggcaggtcctatgctaccagctgggacctggacccggaccatggcagcgacgcatccgagaactgcaagcaccagctacagtgcagtctttaggcttgttaggcgatcgtctctgcgtgggcgctgcgggcggcttcgctctctacccgctgctgaacgaagccgctccgttggctttgggggccggccttgtgcctgaggaacttccgcccagcaggggtgggctcggagaagccctgggcgctgtcgagctctccctcagtgaatttctacttctcttcaccacagcaggaatttatgtggatggggcaggtcgcaaatccagaggccacgagctgctgtggcccgctgcaccgatgggctggggctacgccgccccctatctgaccgtgttcagcgagaactctattgacgttttcgacgtacgcagggctgaatgggtgcagaccgtccccctgaagaaggttcgcccacttaatcctgaaggcagtctatttctttacggcacagagaaagtgcgactcacatatcttcggaaccagctggcagagaaggatgaatttgatatccctgacttaacagacaactcacgcaggcagctgttccggacgaaatccaaacgccggttttttttcagggtttctgaagagcagcagaagcaacaaagaagagagatgttgaaggatcccttcgtgcggtccaaactgatatccccgcccacgaatttcaatcatctggtgcacgtggggccagccaacggccggcccggagcacgtgacaaatcccctgcccccgaggaaaagggacgcgtcgcacgtggtagtgggccccaaaggcctcattcattttcggaagcccttcgtcgtcccgccagcatggggtcagaaggcctcggtggcgatgccgacccaatgaaaagaaaaccttggacatccctatcaagtgagtcggttagttgccctcagggcagcctgtcacctgctacatcattaatgcaggtatccgagcggcctcgcagtttaccgctctcacccgagctggagagttcaccttag

SEQ ID NO: 182296 - DNA, 1176 bp, synthetic construct
  misc_feature 1..1176: note = Description of Artificial Sequence: Synthetic coding sequence
  source 1..1176: mol_type = other DNA
atgcccggcccccagggcggccggggcgccgccaccatgagcctgggtaaactgtcccctgttggctgggtttcttcatctcaaggcaaaagaaggcttacagccgacatgatttcacatcctctgggggacttcaggcatacgatgcatgtgggtcggggcggcgacgtgtttggtgatacaagctttctgtctaatcatgggggatcctccggatccacccatcgctccccccgttcctttcttgctaagaaactgcagttggtccgacgagttggagcacccccccgaagaatggctagcccacctgccccaagtccagcaccgcctgcaatttctcctattattaagaatgctatttccctgccacagttgaaccaggctgcctacgactccctggtggttggcaagctgtcatttgacagtagccctacgagtagcacagacggacacagcagctatggacttgactcaggattttgcactatctcaaggttgccgagatctgaaaagccccacgatagggatcgggacggttcgttcccatctgagccaggcctgcgtaggagcgattctttactcagttttcggctggatttagacttggggccttctctgctctcggagctgctgggcgtgatgtctctgcctgaagcccccgccgccgaaacaccagcgcctgctgctaatccaccagcccctacagcaaaccctacagggcccgctgcaaatccacctgccaccaccgccaaccctccagcgccggctgctaacccctcggcacccgccgccacgcccacgggaccagccgctaacccccccgctcccgccgcatcctctaccccacacggtcactgtcctaacggagtcacagcaggactgggccccgtagccgaggttaagtcttcaccagtcggaggggggccccggggacccgccgggcccgctctgggtcgtcattggggcgcggggtgggacgggggacaccactatcccgaaatggatgcacggcaggagagggtagaggtgctgccccaggccagggcatcgtgggagtcactcgatgaggagtggagggccccccaggctgggagccgaacccctgtcccctccactgtgcaggccaacacttttgaattcgcggatgccgaagaagacgacgaggtaaaagtgtag

SEQ ID NO: 182297 - DNA, 183 bp, synthetic construct
  misc_feature 1..183: note = Description of Artificial Sequence: Synthetic coding sequence
  source 1..183: mol_type = other DNA
atgcccggcccccagggcggccggggcgccgccaccatgagcctgggcaagctgtcccccgtgggatgggtttcgtcctcacaggggaaacgccggctgaccgctgacatgatcagccatccacttggtgatttcagacatactatgcacgtggggcggggcggtgacgtattcggcgactag

SEQ ID NO: 182298 - DNA, 213 bp, synthetic construct
  misc_feature 1..213: note = Description of Artificial Sequence: Synthetic coding sequence
  source 1..213: mol_type = other DNA
atgcccggcccccagggcggccggggcgccgccaccatgagcctggggaagctgagtccggtgggatgggtgtcatccagtcagggcaaaaggcgcctgactgctgatatgatatctcaccccttaggcgacttcaggcacaccatgcacgtcggaaggggaggcgacgtctttggcgacacctccttcctgtctaatcacggaggatcctag

SEQ ID NO: 182299 - DNA, 147 bp, synthetic construct
  misc_feature 1..147: note = Description of Artificial Sequence: Synthetic coding sequence
  source 1..147: mol_type = other DNA
atgcccggcccccagggcggccggggcgccgccaccatgagcctgggaaagctttcacctgtcggatgggtgagttcgagtcaaggcaagaggaggctgactgccgacatgatctctcacccattaggggacttccgccacacctag

SEQ ID NO: 182300 - DNA, 633 bp, synthetic construct
  misc_feature 1..633: note = Description of Artificial Sequence: Synthetic coding sequence
  source 1..633: mol_type = other DNA
atgagcaccaaggtgcccatctacctgaagcggggcagccggaagggaaagaaggaaaaattgcgggatttactgtcctctgacatgatttccccgcccctgggagattttagacatactatccacattgggtcgggggggggctctgatatgttcggcgatatctcctttctgcagggcaaattccatcttctgcctggcactatggtggaagggccagaggaggatgggaccttcgatctgccctttcagttcacgcggaccgccacagtatgtgggagggagctgccggatggcccctcccccctgctcaagaacgcaatttcgcttccagtcattggcggtccacaggctttgactctgcctacagctcaggcccctccaaagccacctaggctccatctggaaacaccacagccatctcctcaggaaggcggcagcgtggatatctggagaataccagagaccggttcccctaattcaggtctcacacccgagtccggcgccgaagagccatttctgtcaaatgcgtcttccctcctgtcactgcacgttgatttgggaccttccatattggatgatgtccttcaaattatggaccaggatttggactcaatgcaaattcccacctag

SEQ ID NO: 182301 - DNA, 633 bp, synthetic construct
  misc_feature 1..633: note = Description of Artificial Sequence: Synthetic coding sequence
  source 1..633: mol_type = other DNA
atgagcaccaaggtgcccatctacctgaagcggggcagccggaagggcaagaaggagaaactgagagatttactctcatccgacatgatctcacccccacttggcgatttccgtcacaccatccacatcggatctggcggaggcagtgatatgtttggggacatctcttttctgcaaggaaaatttcacctgcttccaggaacaatggtggagggaccagaagaggatggtaccttcgacctgcctttccagttcaccaggacagcgactgtctgcggccgggaactgccagatggtccatcacctctcctaaagaacgccattagcctgccggtgattgggggcccccaggccctcaccttgccaacggcccaggctccgcccaagccgcctcgattgcatctcgagactccccagcccagccctcaagagggcgggtctgtcgacatctggaggatacctgagacaggatctcctaacagcggactgaccccagagtctggagcagaagaacccttcttaagcaatgcgtcatctttgctgtctctgcacgtcgatctaggcccaagcattttagacgacgtgctgcagatcatggatcaggaccttgacagcatgcaaatcccaacgtag

SEQ ID NO: 182302 - DNA, 633 bp, synthetic construct
  misc_feature 1..633: note = Description of Artificial Sequence: Synthetic coding sequence
  source 1..633: mol_type = other DNA
atgagcaccaaggtgcccatctacctgaagcggggcagccggaagggcaagaaggagaaactgcgggatctcctgagttccgacatgatcagcccgcccctgggggacttccggcacaccatacatattggcagcggcgggggcagtgacatgttcggagatatttcctttctgcagggcaagttccatctactacccggcactatggttgaaggacccgaggaggacgggaccttcgatctgccttttcagttcactcgcaccgcaactgtgtgcggcagggagcttcccgacggacccagcccattactgaaaaatgcaatatctctgcctgttattggggggccccaagccctgactttaccgacggctcaggcaccccccaagcctcctaggctgcacctcgagaccccgcagccctctcctcaggaaggcggctcagtggacatatggcggattcccgaaaccggttctccaaattccgggttgaccccagagtcaggggcggaagagccctttctgagcaacgcctcctcactgttatctctgcacgtcgacctggggccctccatcctggatgatgtgttgcaaattatggatcaagatttagactctatgcagattccgacgtag

SEQ ID NO: 182303 - DNA, 765 bp, synthetic construct
  misc_feature 1..765: note = Description of Artificial Sequence: Synthetic coding sequence
  source 1..765: mol_type = other DNA
atgcccgccaagacccccatctacctgaaggccgccaacaacaagaagggtaagaaatttaaattaagggacattctgagtccagatatgatttcacctccattgggtgatttcaggcacacaattcacattggaaaagaaggacagcacgacgtgtttggtgacattagcttcctccaagggaactacgaattactgcctggtaatcaggaaaaagcgcacctggggcagttcccaggacacaacgaattcttccgtgccaactcaacctctgactcagtctttacggagaccccatcaccagtgctgaagaatgctatttcactgcccacaattggaggatcacaggcattgatgctgccactcctgagtccagtcacattcaacagcaagcaggagagtttcggacctgctaaactgcccagactcagctgtgaaccagtaatggaggaaaaggcccaggagaaatcgagcctattggaaaacggcaccgtgcatcagggggacacaagctggggctcgtccggttcagcaagccagtcttcacagggaagggactcacactcctcatcactctctgaacagtacccagactggcctgcagaggatatgttcgatcatcctaccccctgcgaactcatcaaaggtaagacgaagtccgaggagagtctcagcgatctcaccggcagcctcctgtccctgcagttggacctggggccgagcctgctcgatgaggtcttgaacgttatggacaaaaataaatag

SEQ ID NO: 182304 - DNA, 45 bp, synthetic construct; identical to SEQ ID NO: 76110
  misc_feature 1..45: note = Description of Artificial Sequence: Synthetic coding sequence
  source 1..45: mol_type = other DNA

SEQ ID NO: 182305 - DNA, 108 bp, synthetic construct
  misc_feature 1..108: note = Description of Artificial Sequence: Synthetic coding sequence
  source 1..108: mol_type = other DNA
atgcccgccaagacccccatctacctgaaggccgccaacaacaagaaaggcaaaaagttcaagctgagagatatactctcaccagacatgatcagccctccgctgtag

SEQ ID NO: 182306 - DNA, 651 bp, synthetic construct
  misc_feature 1..651: note = Description of Artificial Sequence: Synthetic coding sequence
  source 1..651: mol_type = other DNA
atgcccgccaagacccccatctacctgaaggccgccaacaacaagaaagggaagaagttcaaactgcgcgacattctgtcgccagacatgatctcccctccactcggggatttcagacacacaatccatataggaaaagaaggccaacacgacgtctttggcgatattagcttcttgcagggcaattacgagttactccctggcaaccaagagaaagctcacctgggacagttcccaggacataatgaatttttcagagccaacagtactagcgactccgtgtttacagaaaccccctcaccagtgcttaagaacgcaattagcctgccaaccatcggaggttcccaggccttaatgctccccctcctgtccccagtcacattcaactcaaagcaagaatcctttggaccagctaaattacctcgtctgtcatgcgagcctgtaatggaagagaaagcacaggaaaaatcctccctgttggaaaatggcaccgtgcatcaaggagacacatcgtggggttctagcgggtccgctagtcaaagctcccaggggagagattcacactcaagctccctgagcgagcagtatccagattggccggctgaagacatgtttgaccacccaaccccatgtgagctgatcaagggttag

SEQ ID NO: 182307 - DNA, 1071 bp, synthetic construct
  misc_feature 1..1071: note = Description of Artificial Sequence: Synthetic coding sequence
  source 1..1071: mol_type = other DNA
atgcccatcctgaagcagctggtgagcagcagcgtgcacagcaagcgtcgttctcgagctgatcttacggcagagatgatttccgctcctctgggcgattttaggcatactatgcatgtggggagagcaggggatgcgttcggagatacatccttcctgaattctaaggcgggagaaccggatggcgagagcctagatgagcaaccatcaagttcaagcagcaagcgcagcctgcttagcagaaagtttcggggctccaaacggtcacagagtgtcaccaggggcgagcgcgagcagagggatatgcttggcagccttagagactccgctctgttcgtgaagaacgcaatgagtcttccccagcttaatgagaaggaggctgcagagaagggcacgtccaagttacctaaatctctgtctagttctccagtgaaaaaagctaatgatggcgagggcggcgacgaagaggccggcactgaagaggctgtgcctcgccggaatggggcagccggcccacacagcccagatccgttgctggacgagcaagcgttcggagacctgaccgaccttcctgtcgtgcccaaggcaacatatgggcttaagcatgctgagtctataatgtcatttcatatagacctaggaccctccatgctgggggacgttctttccatcatggacaaggaggaatgggacccagaagagggagaggggggctatcacggggacgagggggcggccgggaccatcacgcaggccccaccttacgccgttgctgcaccacccctcgcgcgacaagaaggcaaagccgggccagacctcccttctcttccatctcatgctcttgaggatgaaggctgggccgccgccgccccgagtccgggttccgcccgttccatgggatcccataccaccagagattcctcttctctgtcttcgtgtacgtcaggcattctggaggagagaagcccagccttcagaggtccagatcgcgctagagcggccgtttcacggcagcctgataaggaattttccttcatggatgaggaggaggaagatgaaatccgagtgtag

SEQ ID NO: 182308 - DNA, 861 bp, synthetic construct
  misc_feature 1..861: note = Description of Artificial Sequence: Synthetic coding sequence
  source 1..861: mol_type = other DNA
atgcccatcctgaagcagctggtgagcagcagcgtgcacagcaagagacgctcccgcgccgatctgactgccgaaatgattagtgccccgcttggggactttcggcacactatgcacgtgggacgggcaggggatgcttttggagacaccagcttccttaactccaaagctgcagagaaaggaacctcaaaattgcctaagagcctcagctcttcccctgtgaaaaaagccaatgacggcgaagggggggacgaggaggcagggactgaagaagctgttccacggagaaatggtgctgctgggccacattctcctgatcccctcctggacgagcaggcttttggagatctgaccgacctgccggtggtacctaaagctacttacggcctcaagcatgctgagtctatcatgtccttccatatcgatttagggccaagcatgctgggagacgtgctttctattatggataaggaggaatgggatccagaggagggtgaaggaggctaccacggggacgagggggccgccggcactataactcaggctcctccgtacgctgtggccgccccccctctggcccgccaagagggcaaagccggccctgatctgccctcacttccctctcacgcccttgaagatgaggggtgggccgcggcagccccgtctccaggcagcgcccggagcatggggtcccataccacaagggactccagtagtctttccagctgcacttctggcattctggaagagcggagtcctgcctttcggggccctgatagggccagagcagccgtgagtcggcaacccgataaggagttttctttcatggatgaagaagaggaagatgagatccgggtttag

SEQ ID NO: 182309 - DNA, 1551 bp, synthetic construct
  misc_feature 1..1551: note = Description of Artificial Sequence: Synthetic coding sequence
  source 1..1551: mol_type = other DNA
atgaccctgctgatcaccggcgacagcatcgtgagcgccgaggccgtttgggatcatgtgactatggcaaaccgtgagcttgccttcaaggccggcgacgtcattaaggtactggacgcttcaaacaaggattggtggtggggccagattgacgacgaggaaggttggttccctgcctctttcgtaagactctgggttaatcaagaagatgaagtggaggaaggcccgtccgatgtacaaaacggacaccttgatcctaactccgactgcctgtgtttggggcgccctctgcagaacagagatcagatgcgcgcgaacgtgattaacgagattatgagcacggaacgacattacataaagcatctcaaggatatctgcgaggggtacctcaaacagtgccgaaagcgcagagacatgttttcggacgagcagttgaaggtgatatttggcaacatcgaagacatctacagatttcagatggggtttgtgagggacctggagaagcagtacaataatgacgatccccacctgtccgaaatcggcccctgtttcctggaacaccaggacggattctggatctattctgaatactgcaataaccatctcgatgcttgtatggaactatctaaattaatgaaagattccaggtaccagcatttttttgaagcgtgccgtctactccaacagatgattgacatagctatcgatggattcctgctcacccctgtccagaagatttgtaagtaccctcttcaactagcagagcttctcaagtataccgctcaggaccattctgattaccgatacgtcgctgctgctcttgcagtgatgcggaacgtgacgcaacaaattaacgaacgcaagaggaggctcgagaatatcgataagatcgctcaatggcaggccagcgtcttagactgggagggcgaagacattctggatcggagttctgagctaatttatactggggagatggcttggatctaccaaccgtatggacgaaatcagcagcgcgtattttttctgtttgatcaccagatggtgttatgcaagaaggacctgattcgtcgggatattctctactacaaagggcggattgatatggataagtatgaggtagtcgacatcgaagatgggcgagatgacgattttaatgtgtccatgaagaatgctttcaagctgcacaataaggagaccgaggaaatacaccttttttttgctaaaaagctagaggaaaaaatccgttggctccgggcctttagagaggagcgcaaaatggtgcaagaagacgagaaaatcggcttcgaaattagcgagaatcagaagcggcaagccgcaatgacagtccggaaggtccctaagcagaaaggtgtcaattccgctcggtcagtacctcctagttatcctcctcctcaggatcccctgaaccacggacagtatctagtccctgacggcatcgcacaatcccaggtcttcgagtttactgaacccaaaagatctcagtctccattctggcaaaacttttccaggctcactccttttaagaagtag

SEQ ID NO: 182310 - DNA, 1245 bp, synthetic construct
  misc_feature 1..1245: note = Description of Artificial Sequence: Synthetic coding sequence
  source 1..1245: mol_type = other DNA
atgcgggccaacgtgatcaacgagatcatgagcaccgagcggcactatatcaagcatctcaaggacatctgcgagggttacctgaagcagtgtcggaaaaggcgagacatgttcagtgatgagcaactaaaagttatcttcggaaacatcgaggacatctacagatttcagatgggattcgtacgggacctcgagaaacagtacaataatgatgacccacacctgtcagaaatcgggccttgcttcctcgagcatcaggacggtttctggatttatagtgagtactgcaacaaccatttggatgcttgcatggagctctccaaacttatgaaggactccagataccagcacttcttcgaggcttgtcgcctgctgcagcagatgatcgacatcgctattgacgggttccttctcacaccagtgcagaaaatatgtaagtatcccctgcaactggcggaacttcttaagtataccgcgcaagatcatagcgattaccgctacgtggcagccgcccttgccgtaatgcggaatgttacacagcaaataaatgagagaaaacggaggctggagaacatcgacaaaatcgctcagtggcaagcctctgtcctggattgggagggggaagacatccttgaccgcagcagtgagttaatctatacaggcgaaatggcatggatttatcagccatatggccgcaaccaacagagagtgttcttcctttttgaccaccagatggtactctgcaaaaaggaccttattagacgagatattctttactataagggacgtatcgatatggacaagtatgaagttgttgacattgaagacggccgggatgatgactttaacgtttcaatgaagaacgcattcaagcttcataataaggagaccgaagagatccacctgttcttcgccaaaaagcttgaggagaaaattcgctggctgagggcattcagagaagagaggaagatggtgcaagaggacgagaaaatcggattcgagatcagtgagaatcagaagaggcaggcagctatgaccgtgcgaaaagttcccaagcaaaaaggtgtgaatagcgctcgatcagtaccaccctcctacccccctccacaggaccctctaaaccatggacagtaccttgtccctgacggtatcgctcagtcccaagtgtttgagtttacggagcctaaaagatcgcaaagtcctttctggcagaactttagtaggcttacccctttcaagaaatag

SEQ ID NO: 182311 - DNA, 1488 bp, synthetic construct
  misc_feature 1..1488: note = Description of Artificial Sequence: Synthetic coding sequence
  source 1..1488: mol_type = other DNA
atggccaaccgggagctggccttcaaggccggcgacgtgatcaaggtgttggatgcctctaacaaggattggtggtgggggcagatcgatgacgaagaaggctggttccctgctagctttgtgcgattatgggtgaaccaagaagatgaggtcgaggaggggccgtcagatgttcagaacggacacctagatccaaattctgactgtttatgtttgggcaggcctctgcagaacagggatcaaatgagggccaatgttatcaacgagataatgagtacggagcggcactatattaaacacctcaaagatatttgtgaaggctacctgaaacaatgtaggaagcggagggatatgttcagcgacgagcaacttaaggtaattttcggcaatattgaagatatatacaggttccagatgggatttgtgagggatctcgagaaacagtacaacaacgacgacccacatctgtctgagatagggccttgttttcttgagcaccaggacggtttctggatctactcggagtattgtaataatcatcttgatgcctgcatggaactcagcaaactcatgaaggattctcgctatcaacacttttttgaggcctgtaggctgctgcagcagatgatcgacatcgcaatagacggctttctgctgactcctgtgcagaagatctgcaagtaccctcttcagttggcagagcttctcaagtacacagcacaagaccactcggactatcgatatgtcgcagcagccctggccgttatgagaaacgttacacagcagatcaatgagcggaaaagaagactggaaaacatcgataaaattgctcagtggcaagcttctgtgctcgactgggagggcgaagacattctcgatcggagtagcgaactgatttatacaggcgagatggcgtggatttatcagccgtacggtcggaaccagcagagggttttttttctatttgaccaccagatggtgctctgtaagaaggatctcattcgaagagatatcttatattataagggccgtatcgatatggacaagtacgaggtagtggacatcgaggatggcagagatgatgactttaatgtctccatgaagaacgcattcaagttgcacaacaaagaaacagaagaaatccacctgttttttgccaagaagctcgaagaaaaaatcaggtggctgagagcattcagggaagagcgcaaaatggttcaagaggacgagaagataggctttgagatttcagagaatcaaaagcgccaggcggctatgacagttcggaaagtcccaaagcagaagggcgtcaattccgcgaggtcagtgcccccatcatatccacccccccaggaccccctgaaccacggtcagtacttggttccagacggaatcgcccagtcgcaagtgttcgaatttacggaaccaaagagaagtcagagtccattctggcaaaatttcagccgattaaccccattcaaaaagtag

SEQ ID NO: 182312 - DNA, 1437 bp, synthetic construct
  misc_feature 1..1437: note = Description of Artificial Sequence: Synthetic coding sequence
  source 1..1437: mol_type = other DNA
atgctgatcaccggcgacagcatcgtgagcgccgaggccgtgtgggatcacgtcacaatggctaatcgcgagctggctttcaaggccggggacgtgataaaagtgctcgacgcctccaacaaagactggtggtggggccaaattgacgacgaggagggctggtttccagcatccttcgttcgactctgggtgaaccaagaggatgaggtggaagaggggcccagcgatgttcagaacggtcacctcgacccgaatagtgactgcctgtgtctgggaaggccgttacagaatcgtgatcagatgcgcgctaacgtgataaatgagattatgtctacagaacggcattacataaagcacctaaaggacatttgtgaggggtatctgaaacagtgccgaaagcgtcgcgatatgttttctgatgaacaacttaaagttatcttcggtaacatcgaagacatctatcgattccagatgggatttgttcgggatttggaaaaacagtacaataacgatgacccacacttgtcagagattggcccatgttttctcgagcaccaggatggattctggatctactccgagtactgcaacaaccatctggatgcatgcatggagctgagtaaactgatgaaagattcgaggtatcaacacttttttgaggcgtgtcgattgctccaacagatgattgatatcgcaatcgacggcttcttgctcacaccggtgcagaagatctgcaaatatccattacaactcgctgagttactcaagtatacagcgcaggaccactccgactacagatatgtggccgcggccctagctgtcatgaggaatgtgactcagcaaattaatgaaaggaaacggcgattggagaatattgacaaaattgctcaatggcaggcttctgttttggattgggaaggtgaggatatactggaccggtcgtcggagctgatttataccggggagatggcctggatttaccagccctatggtcgaaatcagcagcgggtcttctttctgttcgaccatcaaatggtcctctgcaaaaaggaccttataagacgcgatatcctgtattacaaaggacgcattgatatggacaagtatgaagttgtcgacattgaggacggaagggatgatgactttaatgtttctatgaaaaatgcctttaaattgcacaataaggagactgaggagattcatcttttttttgccaagaaattggaagagaagatccggtggttgcgcgcgtttagggaggaacggaaaatggttcaggaagacgaaaagatcggattcgagatctccgaaaatcagaagaggcaggccgcgatgaccgtgagaaagctccccttcccgcaactttccgaagctcggatctgctcaccaaaaggatttgctagcgtgtttaacggtacatgttgtggcgaatcttag

SEQ ID NO: 182313 - DNA, 732 bp, synthetic construct
  misc_feature 1..732: note = Description of Artificial Sequence: Synthetic coding sequence
  source 1..732: mol_type = other DNA
atgatcgacatcgccatcgacggcttcctgctgacccccgtgcagaaaatatgcaagtatcctctgcagctggccgagctactgaagtataccgcccaagatcactcggattataggtatgtcgccgctgccctcgccgttatgcgcaacgtaacacagcagatcaatgagcgtaagaggcggctggaaaacattgacaaaattgctcagtggcaggcttcggtgctcgattgggaggatctgatcagacgggacattctctattataaggggaggatagacatggacaagtacgaggtggtggacatcgaggacgggagagacgacgatttcaacgtgtcgatgaaaaacgccttcaagctgcacaataaagagaccgaagaaatacatctgttctttgccaagaaacttgaagagaaaatccgatggctgagggcgtttcgggaagaacgaaaaatggtgcaggaagatgagaaaattggttttgagatctctgaaaatcaaaagcggcaggccgcgatgacagtccggaaggtcccgaaacagaaaggagttaactccgcccggtcggtgccccctagttaccctcccccacaagatcccctcaaccacggtcagtaccttgtgccagacggaatcgcacagagtcaggtctttgagttcactgaacctaaacggtcacagtcccccttctggcagaatttcagcaggttaaccccctttaagaaatag

SEQ ID NO: 182314 - DNA, 1392 bp, synthetic construct
  misc_feature 1..1392: note = Description of Artificial Sequence: Synthetic coding sequence
  source 1..1392: mol_type = other DNA
atgcagtggatccggggcggcagcggcatgctgtgggtgaaccaggaagatgaggtggaagaaggcccctctgatgtacaaaatggacatctggatccaaattctgattgcctttgcctgggtcgcccccttcagaaccgcgaccagatgagagcgaatgtgataaacgaaatcatgtcaaccgaacggcattacattaagcacctgaaagatatctgcgaaggttatctgaagcagtgtcggaagcgccgggatatgttttccgatgaacaactgaaggtgatttttgggaacatagaagacatttaccggtttcagatggggttcgttagggatcttgagaaacagtacaataatgatgatccgcatctctccgagattgggccatgctttcttgaacaccaagacgggttctggatctactccgagtactgtaacaaccacctggatgcctgtatggaactttccaaattgatgaaggatagtaggtaccaacacttcttcgaggcatgccgcctcctgcaacagatgatcgacattgcaatcgacggattcttgctgacgcccgtgcagaagatctgtaaatatccactgcagctggccgaactgctgaaatacacagcccaggaccacagtgactaccgctatgtagccgcagccctggctgtcatgcggaacgtgacccagcaaattaacgagcggaagagaagacttgaaaacattgataagattgcccaatggcaagcatcagttctagattgggagggcgaagatatcttggacagatcgtccgagctgatttacactggcgagatggcctggatctatcaaccgtacggcagaaaccagcagagagtgtttttcctgtttgatcatcagatggtgctgtgtaagaaagacctcataagacgcgacatcctgtactacaaagggagaatcgacatggacaaatatgaagtggtggacatcgaggatggaagagacgacgatttcaacgtgtcaatgaaaaacgcatttaagttacacaacaaagagacagaagagatccaccttttcttcgccaagaaattggaggagaagataaggtggctcagagccttccgcgaggagaggaagatggtacaggaggacgagaaaatcggctttgaaatctccgaaaatcagaagcgccaggctgccatgactgtccgcaaggttcccaagcagaaaggtgtgaatagcgccaggtctgtgcccccgtcatatccacctccacaggacccactcaaccacgggcagtacttggtgcctgacggaattgcacagagccaagtgtttgagtttactgagcctaaacgatcccaatctcccttttggcagaatttttctcgcctgacgcccttcaaaaagtag

SEQ ID NO: 182315 - DNA, 2409 bp, synthetic construct
  misc_feature 1..2409: note = Description of Artificial Sequence: Synthetic coding sequence
  source 1..2409: mol_type = other DNA
atgccccggatcatgatcaagggcggcgtgtggcggaacaccgaggacgagatcctcaaagcagccgttatgaagtacggtaagaaccagtggagtcgtatagccagtctactccaccgtaaatctgccaagcaatgcaaggcgcgctggtacgaatggctggacccctcaattaagaaaacagagtggtctcgtgaagaagaagaaaaattgcttcacctggcgaaattgatgcctacccagtggcgcaccatcgcccccatcatcggcaggaccgccgcacagtgtcttgagcactatgaatttctactcgacaaggctgcgcagcgggacaacgaagaagaaacaactgatgaccctaggaaactcaagcccggggagatagacccaaatcccgagaccaagcccgccaggccggatccaatagacatggatgaggacgaattggagatgttgagcgaagcgagggccaggcttgccaacacgcagggtaagaaggcaaaaaggaaggcccgcgagaagcaacttgaagaggctcgacggctggcagctcttcagaaacgccgtgaactgagagcagctgggattgaaatccagaagaaaagaaagaggaagaggggagtggactataatgcagaaataccttttgaaaagaaacccgcactcggattttacgatacaagtgaagagaactaccaggccttagacgctgacttcaggaagttaaggcagcaggacctcgatggcgaactccggtcagaaaaagaagggcgtgatagaaagaaggataaacagcacctaaagagaaagaaagaatccgacctcccttctgccatactgcagacttcaggggtgagtgaattcaccaaaaagaggagcaagctggtgctgccagcgcctcaaatcagcgacgcggaacttcaggaggttgtaaaggtgggacaggcctcagaaatcgctcgccagacagccgaagaatctgggatcaccaacagtgccagctctactctgctgagcgaatataacgtcaccaataatagtgtggcactcaggaccccaaggaccccagcctcacaggaccgaatactgcaagaggcacaaaatctaatggctttgacaaacgttgacacaccactgaaggggggtctgaatacaccactgcacgagagtgatttttcaggtgtcaccccacaaaggcaagtggtccagacccctaatacggtgctcagcaccccattccggactccgtcaaacggggctgaagggctgaccccccggagcggtaccactccaaaaccagtcataaactctacaccaggtcgcacaccactcagggacaaactgaacatcaatccagaggacgggatggctgactattccgacccttcgtacgtgaagcagatggaacgcgaatcccgagaacacctgcgattgggccttcttgggctacccgcccctaagaacgatttcgagatcgtgctgcctgagaatgctgagaaagaactggaggagagggaaattgatgatacttacatagaggatgcagcagacgtggacgcaaggaagcaggccatcagggacgctgagcgtgtgaaagaaatgaaaagaatgcataaggcggtgcagaaggacttgccacggccctccgaagtaaatgagactatcttgcgccctttgaacgtcgagcccccactcaccgatttacagaagagcgaagagctaatcaagaaggagatgatcaccatgttgcactacgatctcctgcaccacccctatgagccaagcgggaacaagaagggtaagaccgtgggattcggaaccaacaactcagagcatatcacatacctggagcacaacccctatgaaaagttctctaaggaggaattgaaaaaggcacaagacgtgctcgtgcaggagatggaggtggtgaagcagggcatgtctcatggtgagctcagcagcgaagcgtataatcaggtttgggaggagtgttactcccaagtgttgtatttgcctggtcagtccagatataccagagcaaaccttgctagcaaaaaagaccggattgagtccttagagaaacggctggagattaatagggggcatatgacgactgaggccaaacgggcagccaagatggagaagaagatgaaaatactgttgggtggataccagtcccgcgccatgggtcttatgaaacagctcaacgatctttgggaccagatcgaacaggcccatttggaactccggacctttgaggagcttaagaagcatgaggattccgcgataccacggcgtttggaatgccttaaggaggacgtgcagcgccagcaggagagggagaaggaactgcagcaccgctacgccgatctgttgctagagaaagaaactctaaaatccaaattttag

SEQ ID NO: 182316 - DNA, 1455 bp, synthetic construct
  misc_feature 1..1455: note = Description of Artificial Sequence: Synthetic coding sequence
  source 1..1455: mol_type = other DNA
atgcggcacagcaagcggacctactgccccgactgggacgacaaggactgggactacggaaaatggcggtctagctcctcacataagcgccgtaagaggtctcactcctccgcacaagagaacaagcgctgtaagtacaaccactctaaaatgtgtgacagccattatcttgagtcacggtccattaacgaaaaggattatcattcccggaggtatatcgacgaatacaggaacgactacacacaggggtgtgaacctgggcaccgccagagagatcacgagagtcgctatcaaaaccactcatccaagagctctgggaggtctggcagatcctcctacaagagcaagcatcgaatccatcattcaacctcccatcgtagaagtcatggcaaatctcatcgtagaaagaggacgcggagtgtcgaggacgacgaagagggccacctgatatgtcagtcaggtgacgtgctgagcgcccgctatgagattgtggacactctgggtgaaggtgcattcggaaaggttgtggagtgtatcgaccataaggccggtggaagacacgtggcagttaaaattgtgaagaacgtggaccgctattgcgaagccgcccggtcagaaatccaggtccttgagcaccttaatactaccgatcccaattccacctttcgatgcgtgcagatgctcgaatggttcgaacaccatggacatatatgtatcgtgttcgagctgcttggactgtctacctatgatttcataaaggaaaacggctttctccccttccgactggaccacatccgaaaaatggcttaccaaatatgcaagtccgttaactttttacacagcaacaagctgacccatacggatctgaagccggagaacatcctgtttgttcagagcgactatactgaagcatacaatccaaaaataaagcgggacgaacgcaccctcatcaatcccgatataaaagtggttgacttcggcagcgctacatacgatgatgaacaccacagcacgctggtctccacaagacactacagggctccagaagtcatcctcgcactagggtggagccagccctgcgatgtttggtctatcggttgcatattgattgagtactaccttggttttacagtgtttccgacacacgattccaaagagcacctcgctatgatggagcgcattcttggacccctgcccaagcatatgattcagaagacaaggaaacgaaagtatttccatcacgaccgtcttgactgggatgaacattcaagcgccggcaggtacgtcagcagacggtgtaaaccgcttaaggaattcatgttgagtcaggacgtggaacacgagcggctgttcgatctgatccagaagatgctcgaatatgatccagctaaacgaatcaccctgcgggaggccctcaagcacccatttttcgacctcctaaaaaagagtatttag

SEQ ID NO: 182317 - DNA, 1365 bp, synthetic construct
  misc_feature 1..1365: note = Description of Artificial Sequence: Synthetic coding sequence
  source 1..1365: mol_type = other DNA
atgcggcacagcaagcggacctactgccccgactgggacgacaaggactgggattacggcaaatggcgatcatctagcagtcacaagaggaggaagcgcagccatagttccgcgcaggaaaacaagcgttgcaagtacaatcattcaaagatgtgtgattctcactatctggagagtcgtagcataaacgaaaaagattaccacagcagacgctatatagatgagtaccggaatgattacacccaaggatgtgaaccaggacacagacaacgggatcacgaaagtcggtatcagaatcattcctctaagtcgtcaggccgctctggaagaagttcgtataaatctaaacatcgcatccaccattcaacatcccaccgcagaagtcatggtgacgagattgtggatacactgggggaaggtgccttcgggaaggtggttgagtgcattgatcataaggccgggggcagacatgtggctgtaaaaattgtgaaaaacgtggatagatattgcgaagccgccaggtcagaaattcaggtcctcgaacacctgaataccacagacccaaactccacctttaggtgcgttcagatgttggaatggttcgaacaccacggacatatctgtatcgtttttgagttactcggtctgagcacctatgactttataaaagaaaatggctttcttcccttcaggctggaccatatcagaaaaatggcctatcaaatttgtaaatcagtgaattttttgcactcaaataaactaacacataccgatctgaagcctgagaacattctatttgtgcaaagcgattataccgaagcatacaaccccaagattaaaagggacgaacggactctcataaatccagacattaaggttgtggactttggtagcgcgacctacgatgacgaacatcatagtaccctcgtctccacccgacactaccgcgcccctgaggtcatcctcgcactgggatggagtcagccatgtgatgtttggtcaattggctgtatccttattgagtactaccttggattcaccgtctttcccacgcacgacagtaaggaacatctggccatgatggaaaggatcctgggtcctctgcccaaacacatgattcaaaaaactaggaagaggaaatatttccatcacgatcggttggattgggacgaacactcttcagcggggaggtatgtctctaggcgatgcaaacctctgaaggagtttatgctaagccaagacgtcgaacatgagaggctctttgacctcattcagaaaatgcttgagtacgacccggcaaaacgaatcacgcttagggaggcactgaagcatccattctttgatctgctaaaaaaaagcatctag

SEQ ID NO: 182318 - DNA, 1581 bp, synthetic construct
  misc_feature 1..1581: note = Description of Artificial Sequence: Synthetic coding sequence
  source 1..1581: mol_type = other DNA
atggccgccggccggcggcccgccagcgccctgtggcccgagcggaggggcagtcctttgcgcggcgacttactggggttccaaaatgtgagggaaccttcttcttgcggtgaaacccttagcggcatgaggcacagtaagcggacatactgcccagattgggacgacaaggattgggactatggcaaatggagaagcagcagctctcacaagaggcgcaagagaagtcattcttcagctcaggagaataaaagatgtaaatataaccattctaagatgtgtgactctcactatctcgagtcccggtctattaatgagaaagactatcattctcgcaggtacatcgacgaataccgcaatgactatacccagggctgtgagcccggccacagacagcgggatcacgaaagcaggtaccagaatcattcctctaagagctccggcaggagcggaaggtcctcttacaaatctaaacacagaatccaccattcgacaagccaccggcgcagccacgggaagagtcatcgacgcaagaggacccgcagtgtcgaagatgacgaggaaggtcatctgatctgtcagagcggggatgtgttgtcagcgcggtacgaaatcgtggatactcttggtgaaggggccttcggcaaggtagttgagtgtattgatcacaaagcaggcggtcggcatgtcgctgttaagatcgttaaaaatgttgatcgctactgtgaagcggccaggtcagagatccaggttctcgagcatcttaacacaaccgacccaaattcgacgtttcgttgcgtgcagatgctggaatggtttgagcaccacggccatatttgtatcgtattcgagctattgggactctctacatatgacttcattaaagagaacggcttcctcccatttcgtctggatcacatccgcaagatggcctaccagatttgcaagtccgttaactttttgcacagtaacaagttgactcataccgacttgaagcccgaaaacatcctattcgtgcagagtgactacaccgaagcgtataaccccaagatcaaacgggacgagagaacactgattaaccctgatatcaaagtggtggattttggaagcgcgacttatgatgatgagcatcactcaacactggtgtcaacccgccattaccgcgcgcctgaggttatcctcgctcttggatggtcccaaccgtgcgacgtctggagtatcggctgcattctgatcgagtactatctggggttcacagtgtttccaacccatgatagcaaggagcacctcgcgatgatggagcgaattctgggaccactgccaaagcacatgattcagaagacaagaaaacggaaatatttccatcacgatcgacttgactgggacgagcatagttcagctggccggtacgtctcacgtcgatgcaagcctctgaaggagtttatgctttctcaggatgtggaacacgagaggctcttcgatcttatacagaaaatgctagagtacgacccagcgaagagaataacactgagagaagcccttaaacacccattcttcgatctgcttaaaaagtcaatctag

SEQ ID NO: 182319 - DNA, 1494 bp, synthetic construct
  misc_feature 1..1494: note = Description of Artificial Sequence: Synthetic coding sequence
  source 1..1494: mol_type = other DNA
atgccccacccccggcggtaccacagcagcgagcggggcagccggggttcctatcgcgagcattacagatcgaggaaacacaagcgccgcaggagtaggtcttggtctagttcatctgataggactagacggcgacgacgcgaggatagctaccacgtgaggagcaggtcttacgatgaccggagtagtgaccgacgcgtttacgacaggcgatattgtgggtcttatagacgaaacgactatagcagggacaggggtgatgcttattatgataccgactataggcattcatacgagtatcagagagagaatagcagctaccgttcacaaagatccagtagacggaagcacagaaggcggcgtaggagatctcgaaccttctcccggagttcttcccacagttccagacgtgcaaaaagcgtggaggatgacgccgaaggtcacttgatataccacgttggcgactggctgcaagagagatatgagattgtttcgacccttggagaagggaccttcgggcgcgtcgttcagtgcgtggaccacagacgtggaggagcaagagtggcactgaaaatcattaaaaatgttgaaaagtataaggaagctgctcgtctcgagattaatgtcttggaaaagatcaatgagaaggatccagacaacaagaatctgtgcgtccagatgtttgattggtttgattatcatggacacatgtgtatttcgtttgagctgctcggcctgtcaacctttgattttctgaaagataacaattacctgccatacccgatacaccaggttaggcacatggcttttcagctgtgtcaggcggttaagttcctccatgataacaaattgacgcacactgacctgaaacccgaaaatatcctgttcgtcaatagcgattatgaattaacttacaacctggaaaagaagcgcgacgaacggagcgtgaagtccaccgctgtccgggtggtggacttcggctcagccacctttgatcatgagcaccactcgacaatcgtttctaccaggcactatcgcgcacccgaagtgatcctggaactcggttggagccagccctgtgacgtatggagcattggctgcatcatcttcgaatactatgtggggtttacgctgttccagacccacgacaatcgcgagcacctcgcgatgatggagaggattctgggaccaatcccaagcagaatgattcgtaagacacggaagcagaagtacttttatcgcgggaggctggactgggacgaaaacacctctgctggccggtatgttagggaaaattgtaaacccctgcgccggtatctgactagcgaggccgaggaacatcaccagctgtttgacctgattgaatctatgctggagtacgaacctgccaaaaggttgaccctgggagaggccctgcagcacccgttcttcgctagactgcgggcagagccgcctaacaagctgtgggactccagccgcgacatatcaaggtag

SEQ ID NO: 182320 - DNA, 1497 bp, synthetic construct
  misc_feature 1..1497: note = Description of Artificial Sequence: Synthetic coding sequence
  source 1..1497: mol_type = other DNA
atgccccacccccggcggtaccacagcagcgagcggggcagccggggaagctacagggaacattaccgctcacggaaacacaaaaggcgcaggtcccgcagctggtcatcgtctagtgaccggacccgccggcgaagaagggaggattcttaccatgtcagatcacgctccagctacgatgatcgaagtagtgacagaagggtgtacgatcgcaggtattgcgggtcctatcggaggaacgattatagccgagaccgcggtgacgcctattatgacacagactatagacatagctatgagtatcaacgtgagaacagtagctatagaagtcagaggtctagcagacgaaaacaccgacggaggcggaggcggagtcgcacattctctcggtcttcgtctcactcctctcgcagggccaagagcgtcgaagatgatgccgagggacatctgatataccatgtcggagattggctacaagaacgttacgagattgtgtccactctgggagaaggcacctttggtagagtggtccagtgtgtggatcaccggaggggcggggcaagggtcgctctcaaaatcatcaaaaatgtcgagaaatataaggaggccgcacgcttggagataaacgtgctggagaaaattaacgaaaaagatccagacaacaaaaatctctgtgtccaaatgtttgactggtttgactaccacggccacatgtgtatctctttcgagctcctgggccttagcaccttcgacttcctgaaagataacaactatttgccctacccaatccaccaggtgagacatatggctttccagctttgtcaagccgtgaagttcctgcacgacaacaagctgacccacactgatctgaagccagaaaacattcttttcgtcaactccgactacgagcttacttacaacctcgagaagaaaagagacgagaggtcagtcaaatccactgcggtccgggtggtggacttcgggtccgctacctttgatcatgagcatcacagcacaattgtgtctaccaggcactatcgcgcacccgaagtaatccttgagctaggatggagccagccgtgtgacgtgtggtcaataggatgcataatctttgaatattatgtcggattcacactttttcagacccatgacaaccgcgaacacctggcgatgatggagaggattttgggccctattccatcaagaatgatccgcaaaacaagaaagcagaagtatttttacagaggaaggcttgattgggacgagaacactagtgccggtaggtatgtgcgggagaattgtaaacccctgcgccgatacttgaccagcgaggccgaggaacaccaccagctgttcgatctcatcgagagcatgttagagtacgaacctgccaaaaggcttaccctaggagaggcacttcagcaccccttcttcgccaggcttcgagccgaaccaccgaataagctgtgggacagtagccgggacatttccagatag

SEQ ID NO: 182321 - DNA, 1500 bp, synthetic construct
  misc_feature 1..1500: note = Description of Artificial Sequence: Synthetic coding sequence
  source 1..1500: mol_type = other DNA
atgccccacccccggcggtaccacagcagcgagcggggcagccggggctcttaccgcgagcattaccgcagccgtaagcacaagcggaggcggtctagatcttggtcttcctctagcgaccggactcgccgccgtcggagggaagacagctaccatgttcgatcccggtcttcctacgatgacagatcatctgaccgtcgagtgtacgatcgtaggtactgcggctcataccggaggaatgactattcacgggacagaggcgacgcatactacgacacggattataggcattcttatgagtaccagcgcgaaaatagctcgtatagaagtcagcggtcgagtcgccgcaagcacaggagacggcgaaggcggtctaggacattctccagaagctcctcgcagcattcttcacgcagagcaaagtcagtagaagacgatgccgaggggcacttgatctatcacgtgggggattggttacaggagcgctacgaaatagtgagcaccctgggcgagggaaccttcggtcgggtggtgcagtgtgtggatcacaggagaggcggagcacgcgtggcgctaaaaatcatcaaaaatgtcgagaagtacaaggaggcggctagactggagataaacgtactcgagaagatcaatgaaaaagatcccgataacaaaaacttatgtgtccaaatgttcgactggttcgattatcacggccatatgtgcatatccttcgagttattagggctgagtacctttgatttcctgaaggacaataactacctgccctaccccattcaccaggtgcgccatatggcctttcagctctgccaggcggtgaagttcctgcacgacaataaactaacacacaccgacctcaaacccgaaaacatcctcttcgtcaatagtgactatgagctgacttataatctggagaagaagagagatgagcggtccgtgaaatcaactgccgttcgcgtggtagacttcggctccgctacatttgatcacgagcaccatagcacaatcgtgtcaaccagacactaccgtgcacctgaggtaattctcgagctggggtggagtcagccatgtgatgtgtggtcaataggctgcattatttttgagtattacgtagggtttacactgttccagacccatgataatcgtgaacatctcgccatgatggagagaatcctgggacctataccctcccgaatgattcggaaaactcgaaaacagaagtacttctaccgcggcagactggactgggatgagaacacatccgcgggccgctacgtacgagagaactgcaagcctctccggcgctacctgacaagtgaggcggaggagcaccaccaactatttgatctgattgaaagcatgctcgagtatgaacccgccaagcggctcaccctgggcgaagccttacagcatcccttctttgctcgcctgcgagctgaaccacctaataaactctgggatagctcgcgcgacattagccgttag

SEQ ID NO: 182322 - DNA, 816 bp, synthetic construct
  misc_feature 1..816: note = Description of Artificial Sequence: Synthetic coding sequence
  source 1..816: mol_type = other DNA
atgttcgactggttcgactaccacggccacatgtgcatcagcttcgaactactcgggttgagcactttcgatttcctgaaagacaacaactacctcccttatccaatacatcaggtgcggcatatggcatttcagttgtgccaggctgtgaagtttctgcatgataataaactgacacacaccgatcttaagccagaaaatattctgtttgtaaatagtgactacgagttgacttacaacctggagaagaaaagagacgagagaagcgttaaaagtactgcagtgcgcgtcgtggacttcggctccgcgaccttcgaccacgaacaccactccaccatcgtgtcaactaggcactatagggcgccggaggttatactggaactcggttggtcgcagccctgcgacgtttggagtatagggtgcataatttttgaatattacgtcggctttacactgtttcaaacacacgataatagagagcatctcgccatgatggaacggatactgggaccaataccaagtaggatgatacggaagacgagaaagcagaaatacttttacaggggcaggctggattgggatgagaatacgagcgctgggcggtacgtgcgggagaattgcaagcccttgaggagatacttaacctctgaagccgaagaacaccatcagctgttcgatctcatagaaagcatgctggagtatgagccagccaagcgcctgaccttaggagaggcacttcagcaccctttctttgctcggttaagagccgagcctcctaacaagctctgggacagtagccgggacatctcccggtag

SEQ ID NO: 182323 - DNA, 1500 bp, synthetic construct
  misc_feature 1..1500: note = Description of Artificial Sequence: Synthetic coding sequence
  source 1..1500: mol_type = other DNA
atgccccacccccggcggtaccacagcagcgagcggggcagccggggaagttaccgggagcactatagaagcaggaagcataagcgccggagatctcgcagctggagttccagcagcgacaggactcggagaagaaggcgggaagattcttatcatgtccgtagtcggtcgagctatgacgatcggtccagcgatcgtagagtttatgatcgaaggtactgcggctcatacaggagaaacgactattcccgcgaccggggggacgcatactatgacacggattatcgacatagctatgaataccaaagagaaaatagttcctatagatcccaaaggagctcaaggaggaagcatagacgcaggaggcgacgtagccggacattctctcggagtagttcccagcatagttcgcgaagggccaagtctgtcgaggacgacgccgagggtcacctgatttatcacgttggcgattggttacaggagaggtacgagatcgtgtcaactctaggggaaggcacctttggacgagtcgtccaatgtgttgaccacagacgcggaggagctagagtagccctcaaaataataaagaacgttgagaaatataaggaggccgctcggttggagatcaatgtgctggaaaaaatcaacgaaaaagaccctgacaataaaaatctttgtgtgcagatgttcgactggttcgactatcacggccatatgtgcattagcttcgagctgctggggttgtccaccttcgatttcctcaaggataataattatctgccgtatcccatacaccaggtacgtcatatggccttccagttatgccaggccgtcaagtttcttcacgataataagttgacgcatacggacttaaagcctgagaacattctctttgtgaatagcgattatgagctcacctacaatttagaaaaaaagcgggatgagcgctctgtgaagagcactgccgtgcgggttgtggactttggcagcgcaactttcgaccatgagcaccactcgaccatcgtctcaacacgtcactaccgagcgcctgaggtgatcctcgagttaggatggtctcaaccctgtgacgtctggtctatcggctgtatcatatttgagtattatgttggctttaccctgttccagacccatgataatcgggaacacctggctatgatggaacgcattttaggccctatcccctcaagaatgatacgtaaaactaggaagcaaaaatatttctatcggggtcggttggattgggacgaaaacacttccgccggtcggtatgtgcgcgaaaactgcaagccactgaggcgctacttgaccagtgaggctgaagaacatcatcagctctttgatctaatcgaatccatgctggagtatgaacctgccaaacgtctcactctgggcgaggctctccaacatcccttttttgccagattgagggccgagccacctaacaagctgtgggactcaagtagggatatttctaggtag

SEQ ID NO: 182324 - DNA, 1473 bp, synthetic construct
  misc_feature 1..1473: note = Description of Artificial Sequence: Synthetic coding sequence
  source 1..1473: mol_type = other DNA
atgcaccactgcaagcggtaccggagccccgagcccgacccctacctctcctatagatggaagaggcgcagatcttactccagggaacacgagggccggctgagatacccctcccgccgggagcctccaccacggcgctcccggtcacgctctcatgaccggctaccctatcagaggcgatatcgcgagcgaagggactctgatacctatagatgcgaagaaagatctccatcctttggtgaggattactacggcccttctagaagccgacatagaagacgctcccgcgagcgcgggccttataggacacggaagcacgctcaccattgccacaaaaggcgcacacgttcatgttcttcagcatccagcagatcgcaacagtcaagtaagagaagctcaaggagtgtcgaagatgataaagaaggccatctggtgtgtagaattggagattggctccaagaaagatacgaaattgtgggaaacttgggcgaaggtacctttgggaaagtggtggaatgtcttgaccatgcaagaggaaaatctcaagtggccttaaagatcatcagaaatgtaggcaaataccgcgaagccgctaggcttgagatcaacgtgcttaagaaaatcaaggaaaaggataaggagaacaaattcctatgtgttctgatgtctgactggtttaacttccacggccatatgtgcatcgctttcgaactcctcggaaagaatacgttcgagttccttaaggagaataatttccaaccctaccccctgccccacgtaagacatatggcttaccagctgtgccacgcgctgcggttcctccatgaaaatcagttgactcatactgaccttaagcccgagaacatactgtttgtgaactccgaattcgagaccttgtacaacgaacacaagagctgcgaggagaaaagtgtaaagaacacttcaataagggttgccgacttcggctcagccacctttgaccacgaacatcacaccactattgtcgccacccggcattatcgccctccagaggttatactcgagctgggctgggcccagccttgtgatgtttggtctatcgggtgtattcttttcgagtattaccggggtttcactctgttccagactcacgaaaacagagaacaccttgtaatgatggaaaaaatactggggcccatcccctctcatatgattcaccgcaccaggaaacagaagtacttttataagggaggcctcgtgtgggacgaaaacagctctgatggtagatacgtgaaggagaactgtaagccactgaaatcctatatgctacaggatagcctggagcacgtgcaactgtttgacctgatgcggcggatgcttgagtttgacccggcccaacgcattactttggccgaagcgctgctccacccattctttgcgggcttaaccccagaagagagaagctttcacacgtcaaggaatccttccaggtag

SEQ ID NO: 182325 - DNA, 459 bp, synthetic construct
  misc_feature 1..459: note = Description of Artificial Sequence: Synthetic coding sequence
  source 1..459: mol_type = other DNA
atgcaccactgcaagcggtaccggagccccgagcccgacccctacttaagctatcggtggaaaagacgaagatcctatagccgtgagcacgagggtagattaagatatccttcccggagggaacctccccccaggcgatcacggtccaggtcccacgatcggctgccatatcagcggcgttatcgcgagaggagggactccgatacttaccgctgtgaggaacgatcgcccagtttcggagaagactactacggtcctagccgatccaggcatagacggcgtagtcgtgaaagaggcccgtacagaactaggaagcacgctcatcactgtcataaacggcgcacgagaagctgctcctcagcctcgtcaatgcggctctggggcacctgggtgaaggctccgctagcccgatggtggtcggcatggacaatgcctgaggggagtcttcgacttccctag

SEQ ID NO: 182326 - DNA, 1404 bp, synthetic construct
  misc_feature 1..1404: note = Description of Artificial Sequence: Synthetic coding sequence
  source 1..1404: mol_type = other DNA
atgcaccactgcaagcggtaccggagccccgagcccgacccctacctatcatatcggtggaaacgacggcgttcctacagccgcgagcacgagggcaggctgcgctacccatccagacgcgaacccccaccaagacgttctaggtcgcggtcacatgaccgtctcccttatcagaggcgctaccgggaacgtcgtgacagcgatacctatcgctgcgaggaacggagcccatcatttggtgaggactactacgggccttctcgcagcaggcataggcgccgcagtcgcgagaggggtccgtacagaacaaggaagcacgcgcatcattgccataaaaggcggactcgcagctgcagtagcgcctcctctcgctctcagcaatcctctaagcggtcttctcgtagcgtggaggacgacaaggagggacacctcgtgtgtagaataggagattggttgcaagagagatggaaatcccaggtggccttaaaaattatcagaaacgtcggaaagtaccgcgaggccgcccgacttgaaattaatgtattgaagaagataaaagagaaagacaaggaaaacaagtttctatgtgtgctgatgtctgactggtttaactttcatgggcacatgtgtattgcgtttgagttgttaggaaaaaatacgttcgagtttttaaaggaaaataatttccagccctatccactgccgcacgtgcggcatatggcctaccagctgtgccacgccctgcgtttcctgcatgaaaatcagctcacacacacggatctcaagcctgagaatattctgttcgtgaattctgagtttgagaccctttacaatgaacataagtcctgtgaagagaagtcagtaaaaaacaccagtataagagtcgctgacttcggatcagcgacattcgatcacgagcatcatacaaccatcgtggccactcgacactacaggccccccgaggtgatcttggagttaggctgggcccagccatgcgatgtttggtcaattggatgcatcctattcgagtactaccgaggctttaccttgtttcagacccatgagaacagggagcatttagtaatgatggaaaagattctgggacctattccatcccacatgatacataggacaagaaaacaaaaatatttctacaaggggggcttagtttgggacgagaatagttcagacgggagatacgtgaaggagaactgcaagcctctgaaaagttacatgctgcaggattctttggaacatgttcagttgtttgacctgatgcggcggatgctggaattcgatcccgcgcagcgcatcaccctcgctgaggccctcctccatccgttctttgctggattgacccccgaggaacggtccttccatacttctaggaatccaagcaggtag

SEQ ID NO: 182327 - DNA, 1473 bp, synthetic construct
  misc_feature 1..1473: note = Description of Artificial Sequence: Synthetic coding sequence
  source 1..1473: mol_type = other DNA
atgcaccactgcaagcggtaccggagccccgagcccgacccctacttgtcctatcggtggaagaggcgaaggtcatatagcagagagcatgagggcagattgcgttacccttcgcgacgtgagcccccaccccgcagaagcaggagccgcagccatgaccggctcccgtaccagcggcgttatcgcgaaaggagggatagtgacacatatcgctgtgaggaacgaagcccctcattcggcgaggattattacggcccgagtcgcagccgacaccggcgccgaagcagagaaaggggcccctaccgcactagaaagcacgctcaccactgccataaacgaagaaccaggagctgctcgagcgcttcgagtcggtcccagcagagctccaagaggtccagccgttcagtggaagatgacaaggaggggcatctggtgtgtcgcatcggagattggcttcaagagagatacgagatagtgggaaatttgggagagggcaccttcgggaaggtggtggaatgcttggaccacgccagaggaaaatctcaagtggccctcaaaattattcggaatgtgggaaaatacagggaggcggccaggctggaaattaacgtcctcaagaagattaaagaaaaagacaaggaaaacaaattcctctgcgtcctgatgagcgactggttcaattttcacggacacatgtgcattgcttttgagctgcttggtaagaacacttttgaattcctgaaggagaataatttccaaccgtaccctcttccccacgttaggcacatggcctatcagttgtgccacgctctgcggttcctacatgagaatcaactgactcatacagatttgaagcctgaaaatattcttttcgttaatagtgaattcgaaactttgtataacgaacacaagtcttgcgaggagaagtcagttaagaacacaagcattagggtcgcagattttggctcagcgacgtttgaccatgagcaccacactacaatcgtcgccactaggcattatcgcccgcctgaagtgatacttgagctgggttgggcccagccttgcgatgtttggtctattggatgcatcctgttcgagtactacagggggttcacccttttccagactcatgagaaccgggagcatttggtcatgatggaaaaaatactggggccgattccctctcacatgatacacaggacgcgtaagcagaaatatttttacaaaggcggtctagtgtgggacgagaattcttcagacggccgttacgtcaaagaaaattgtaaacctctgaaatcctatatgctccaggacagtcttgagcatgtgcaactgttcgacttgatgagaagaatgctcgaattcgaccccgctcagcggattactctggctgaggctctcttgcaccctttcttcgccgggctgaccccagaggaaagatcttttcatacttcccgaaacccttctagatag

SEQ ID NO: 182328 - DNA, 1917 bp, synthetic construct
  misc_feature 1..1917: note = Description of Artificial Sequence: Synthetic coding sequence
  source 1..1917: mol_type = other DNA
atgcccgtgctgagcgcccggcggcgggagctggccgaccacgccggaagcggccggcgcagcggccctagccccacagcgcggtctggaccgcacctgagtgcccttcgggcccagcccgcccgtgcggctcacctgtccggacgcggcacatacgtccgaagagacacagctggcggcggccctggacaggccagacccctcgggcccccaggtacctcccttttgggcagaggagcccgtagatctggagaaggttggtgtcctggcgccttcgaatcaggagccagagccgcaagacccccttcaagagtggaaccccggctcgctactgccgcatctcgggaaggcgccgggctgcctcgtgcagaggttgctgcaggctctggccgtggagcccggagtggggagtggggcttggcagccgctggggcctgggaaactatgcaccactgcaaacggtaccgctccccagaaccagacccatatctgagctatcgctggaaacgccgcaggtcctacagcagggaacatgagggccgtctgcgttatccaagccgcagggaacctccgcccagacgcagtagaagtaggagtcatgaccggctgccctatcagagacgataccgggaacgcagggattccgatacctatcgttgtgaagaaagaagcccatcattcggagaggactactacggcccgtcacggagtaggcatagaaggcggagccgggagcgcggtccttatcggacgcgcaaacacgcccatcactgtcataaaagaagaactcgttcctgtagttccgctagttccaggtcccagcagtcttccaagcggagcagcaggtcagtcgaagacgacaaagaaggccacctggtgtgtcggatcggggattggctacaggagcggtatgagatcgtaggaaacttgggagagggtacctttgggaaagtcgttgagtgtttggatcacgcacgggggaagagtcaagtggccctgaaaattatacgcaatgttggcaagtatagggaagcagctcgattagaaattaacgtgctaaaaaaaattaaagaaaaagataaagaaaataaattcttatgtgtattaatgtcggactggtttaacttccatggccatatgtgtatcgcatttgagctactcggaaagaataccttcgagttccttaaagagaataatttccagccctatcctctgccccacgtgagacatatggcctaccagctgtgccatgctctccgtttcctgcacgagaatcagctgactcacaccgatctgaagccagaaaatatactgtttgtgaatagcgaattcgaaaccctgtataacgagcacaagagctgtgaagagaagagtgtgaaaaacaccagtatccgagtggcagatttcggctccgccaccttcgaccacgagcaccacaccaccatagtggctactcgacactaccgcccaccagaggtcattctcgaactgggctgggctcagccgtgcgatgtatggtctatcggatgtatcctgtttgaatattaccgcggcttcacactgttccagacacatgagaacagggagcacctggtgatgatggagaagatacttggacccattccgtcccacatgatacatcgcaccagaaaacaaaaatatttttataagggcggcttagtgtgggacgagaactcatcagacggaagatacgtgaaagagaattgcaagccactcaagagttatatgctgcaagactcactggagcacgtacagttgtttgatctgatgcgcaggatgcttgaattcgatcccgcacagcgcattacattggcagaggcactactgcacccatttttcgccggattgacccccgaagaaaggtcatttcatactagccgcaacccatccagatag

SEQ ID NO: 182329 - DNA, 327 bp, synthetic construct
  misc_feature 1..327: note = Description of Artificial Sequence: Synthetic coding sequence
  source 1..327: mol_type = other DNA
atgagcctgaccagcagcagcagcgtgcgggtggagtggatcgccgctgtaacgatcgccgctggaactgcagctattgggtacctggcctacaaaaggttctacgtgaaggaccacaggaataaggcaatgatcaaccttcacatccaaaaagacaatcccaagatagtgcacgcctttgatatggaggacttgggggacaaagctgtctattgccggtgttggcggtcaaaaaagttccctttttgcgatggcgctcacaccaaacacaatgaagaaaccggtgataacgtcggtcccctgatcataaaaaaaaaagagacttag

SEQ ID NO: 182330 - DNA, 408 bp, synthetic construct
  misc_feature 1..408: note = Description of Artificial Sequence: Synthetic coding sequence
  source 1..408: mol_type = other DNA
atggtgctggagagcgtggcccggatcgtgaaggtgcagctgcccgcatacctgaaacgtctcccagtcccagagagtataactgggttcgcgcgcctcaccgtgagcgagtggctacgacttctgccctttctgggggtgctggctctactgggatatctggccgtgaggccatttttgcccaagaagaagcaacagaaagatagccttatcaatcttaagatccagaaagaaaatcccaaggttgtgaatgaaattaacatcgaagacctttgtttgacaaaggctgcctattgccgctgttggcggagcaaaaccttccccgcgtgcgatggcagccacaataagcacaacgagctaaccggagataacgtgggaccacttatcctaaaaaaaaaagaggtctag

SEQ ID NO: 182331 - DNA, 384 bp, synthetic construct
  misc_feature 1..384: note = Description of Artificial Sequence: Synthetic coding sequence
  source 1..384: mol_type = other DNA
atgcggggcgccggcgccatcctgcggcccgccgcccggggcgccagggacctgaatccacgcagagacataagtagctggctggcacagtggtttcctcggacccccgcacgcagtgttgtggctctcaagacgcccatcaaggtggagctcgtggctggtaagacttatagatggtgtgtgtgtggaaggagcaagaagcaacctttctgcgacggatctcacttctttcaaaggaccggcctgtccccactgaaattcaaggctcaagaaacacgtatggtggctctgtgcacttgtaaagccacccagagacccccttattgcgatggcacccacaggtcggaaagggtgcaaaaagccgaggtcggttcccccctgtag

SEQ ID NO: 182332 - DNA, 1740 bp, synthetic construct
  misc_feature 1..1740: note = Description of Artificial Sequence: Synthetic coding sequence
  source 1..1740: mol_type = other DNA
atgcccagcgccagctgcgacaccctgctggacgacatcgaggacattgtcagccaagaagacagcaagccacaggataggcacttcgtaaggaaagatgtcgtgcccaaggtgaggcggcgtaacacacagaagtatctccaggaagaggagaactcaccaccgtccgacagcacaataccaggcatccagaaaatctggatacgtacctggggatgctcccataacaactcggacggagagtatatggccggacaattggctgcttacggatataaaataactgagaacgcttctgatgctgatctatggctgttaaactcttgcacagtcaaaaaccctgcggaagaccactttcgtaatagcataaaaaaagcccaggaggaaaacaagaaaatcgtgttagcaggttgtgttccacaagctcagcctaggcaggactatctgaaaggcttgagcataattggcgttcagcaaattgatagggtcgtggaagtggtcgaggagaccataaaggggcacagcgtccgtctacttggccagaagaaggacaacgggaggaggttgggtggtgctaggttagatctccctaagatacggaagaacccccttattgagattatatccattaacactggctgtttgaacgcgtgcacttattgcaaaacaaaacacgcccgtggcaacctggcgagttacccaatcgatgaattggtcgatagggccaagcagtcattccaggagggcgtctgtgaaatctggttaacgagtgaagatactggggcatacggtagagatatcggaaccaacctgcctacccttctgtggaaactggtggaggtaatccctgaaggggccatgctgcgcttgggcatgactaatcccccctacatcctggagcatcttgaagagatggctaaaatcttaaaccatccgagagtgtatgcgtttctgcacatccctgtacagtcagccagtgattcggttctgatggaaatgaagcgggaatattgcgtggcagacttcaaaagagtggttgacttcctgaaagaaaaagttcccgggattactatagcaaccgacattatctgtgggtttcctggagagacggatcaggactttcaggagaccgttaagttggtggaagaatataaatttcccagcctctttattaaccaattctatcctcgacctggcaccccggccgccaaaatggagcaggtgccagcccaggtgaaaaaacagcgtaccaaggatctgagccgagtctttcactcttactctccttatgatcacaaaatcggagagcggcaacaagtgctagtgaccgaggaaagcttcgattctaaattctatgttgcccacaaccaattttacgagcaagtgctggttcccaagaaccccgccttcatgggcaagatggttgaggtggacatctacgagtcgggcaagcacttcatgaaaggccagcctgtgagtgacgcaaaggtgtacaccccttccatttccaagcccctcgctaagggtgaggtttcaggtctcaccaaagattttaggaatggactgggaaatcagctatcatctggctcccacacaagcgcagcctcccagtgcgactctgcaagttctagaatggtgctgccgatgccccgcctccatcaagattgtgctcttcgtatgtctgttggactagcattgctgggactgctgtttgcgttcttcgtcaaggtgtacaattag

SEQ ID NO: 182333 - DNA, 1740 bp, synthetic construct
  misc_feature 1..1740: note = Description of Artificial Sequence: Synthetic coding sequence
  source 1..1740: mol_type = other DNA
atgcccagcgccagctgcgacaccctgctggacgacatcgaggacattgttagccaggaagattcaaagccacaggacagacacttcgtgagaaaagatgtggtgcccaaggtgagacgccggaacacccaaaaatatctacaggaagaggagaatagtcccccctcagattcaaccatcccagggatccagaagatttggatccgcacatgggggtgctcccacaataactcagacggcgagtacatggccggccagctggctgcttatgggtacaagataactgagaatgccagtgacgctgatctgtggcttctaaattcgtgcacagtcaaaaatccggctgaagaccacttcaggaacagcatcaagaaggctcaggaagagaacaaaaagatcgtcctggccggatgcgtgccgcaagcccagcccaggcaggattacctcaaagggctgtcgataatcggagtgcagcaaattgatcgggtggtggaggtggtggaagaaaccatcaaaggacactcagttagactgctaggccagaagaaggacaatggtcggcggctgggcggtgcccgattggacctcccgaagattcggaaaaatcctttaatcgagatcattagcattaatactggctgtctaaatgcatgcacctactgcaagaccaagcatgcaaggggaaatctagccagttatccaattgatgaactagtagacagggctaaacaatcatttcaggagggcgtgtgcgaaatctggctcacatccgaagacaccggcgcatatggcagagacatcgggaccaacctacctactctgctgtggaagctggtggaggtcatcccagagggagccatgttacggctgggcatgaccaaccccccctacattctggagcacctcgaagaaatggccaagatcctgaaccaccccagagtttacgcctttttgcacatcccagttcaaagcgcttccgattctgtgctgatggagatgaaaagagagtactgcgtggctgattttaagcgtgtggtcgattttcttaaagaaaaagttccaggcataactattgccacggatatcatatgcggcttccctggcgagactgatcaggacttccaggagacagttaaactcgtagaagagtacaaattcccttccctgttcatcaatcagttttaccccagaccaggaactcccgcagccaagatggagcaggtcccggcgcaggtcaaaaaacagagaactaaggacctgtcacgtgtgttccacagttactcgccctatgatcacaagatcggggagagacagcaggtgctggtgaccgaagagtctttcgactcaaaattttacgtggcccacaatcagttctacgagcaggtgcttgttccgaaaaatcccgctttcatggggaagatggtggaagtggacatctatgaaagcggtaagcactttatgaaaggccagcccgtgtctgacgccaaagtctacactccatctattagcaaacccttagccaagggcgaagtttctggcctaacgaaggacttcagaaatggcctcggcaaccagctgtcttccggatcccatacaagtgctgcaagccaatgtgactcagcctcatctcgaatggtattgcctatgccccgccttcatcaggactgtgcactgagaatgtctgtgggcctggccctcttaggtctgctgttcgccttcttcgtgaaagtttataactag

SEQ ID NO: 182334 - DNA, 1467 bp, synthetic construct
  misc_feature 1..1467: note = Description of Artificial Sequence: Synthetic coding sequence
  source 1..1467: mol_type = other DNA
atgctgagccggcggtacgagggcgagatccccaagaacatctgcaaacgcaaaaaaaccgtgcatcaggtcactgagaatgctagtgatgccgatctttggcttttgaacagctgcacagtgaaaaatccagctgaagaccatttccgcaattcgatcaagaaggcacaggaagagaacaagaagatcgtattggcaggatgtgtcccacaggctcagccaagacaggattatctgaagggtttatcaatcatcggcgtccagcagattgatcgggtcgtagaggtggtggaagagacaatcaagggccactctgttcgacttcttggccagaaaaaggataatgggcggcgactaggcggtgcgcgcttagacctacccaaaatccgtaagaatccactgattgaaatcatctcaattaacactggttgcctgaatgcctgcacctactgcaagactaaacatgcccggggaaacctggctagctatcctatcgatgaactcgtggatcgggccaagcagagctttcaggagggcgtgtgtgagatctggttgacatccgaggatacaggagcttatggcagagacatcggcactaatctgcctaccctgttatggaaactcgtcgaagttatacctgagggtgcgatgttgcgtttggggatgactaacccaccatatatccttgagcatcttgaagaaatggccaaaatcctcaaccacccacgggtgtatgcatttctccacatccccgttcagtcagctagtgactcagtcttgatggaaatgaagcgcgagtattgtgtcgctgactttaaaagagtggtcgattttctgaaggagaaggtgcccggcatcacgattgcgaccgatatcatctgtgggttccccggtgagacagaccaggattttcaggagaccgtgaagctagttgaggagtacaagttcccatccctttttatcaaccagttctatccaaggccgggcacccctgccgccaagatggagcaggttccagcacaggtgatcggagaacgacagcaggtcctggtcaccgaagaatccttcgattccaagttctacgtcgcacataaccaattttatgaacaggtgctggtgccgaaaaaccccgcttttatggggaaaatggttgaggtggacatttatgagagtggcaagcacttcatgaagggacaacccgtgtccgatgccaaagtgtatactccttcaatctccaagcctcttgccaagggggaggtctccgggttgaccaaggacttccggaacggcctcgggaatcagttgtccagcggctctcatacatcagctgcgtcacagtgcgatagtgcctcctccagaatggtgctgccgatgccgcggctacaccaagactgcgcattgcggatgagcgtggggctggcactcctagggcttctctttgcattttttgtcaaggtctacaactag

SEQ ID NO: 182335 - DNA, 4824 bp, synthetic construct
  misc_feature 1..4824: note = Description of Artificial Sequence: Synthetic coding sequence
  source 1..4824: mol_type = other DNA
atgatggacctggtgctggaggaggacgtgaccgtgcccggcaccctcagcggctgcagtggtctagttcctagtgtaccagacgatctggacggaattaacccaaacgccggcctgggcaatgggcttctccccaacgtgtccgaggagaccgtgagccccacgagggccaggaatatgaaggactttgagaaccagataacagagctgaagaaggagaatttcaacctaaagttgaggatctattttctggaggaaaggatgcaacaagagtttcacggtccaacagaacatatatacaagaccaacattgaactgaaagtcgaggtggagagccttaagcgggagctacaggagagagagcagctgttgataaaggcatccaaggccgttgaatctctcgccgaggccgggggctctgagatacagagagtcaaggaggacgcgaggaagaaagtgcaacaagtggaggatctactcacaaaacggattctcctgctcgaaaaagccaaggacgtgacagctgcgcaggctgaacttgagaaggccttcgccggcacagaaactgagaaggccttacgactgagactcgaaagtaagctgagtgaaatgaagaaaatgcatgagggagacctggcaatggcattagtgctagacgaaaaagataggttgatcgaagagctgaagctgagtcttaagagtaaagaagccctcattcagtgtcttaaggaagaaaagagccagatggcatgtcctgatgaaaatgtgtcttccggtgagctgcgcgggctgtgtgcagcccctagggaagagaaagaacgagaaacagaagccgcacagatggagcatcagaaagagcgcaattccttcgaggagcgcatccaggcacttgaagaggatctgagagaaaaagagagagagatagctacagagaagaaaaacagtttgaagagggacaaagccatccagggcctgacgatggccctgaagtctaaggagaagaaggtggaggaattgaattcagaaattgagaagctctccgctgcctttgctaaagcacgcgaggcccttcagaaggcccagacacaggagtttcagggctcagaagactatgagaccgccctgtcaggcaaggaggccttatccgcagctctgcggagccagaacctgacaaagtcaactgagaaccaccgcctgcgccgatccatcaagaaaataacccaggagttgagcgatttgcagcaggagagagaacgcctggagaaagatctggaggaggcgcaccgggagaaatccaaaggagactgtaccatccgcgacctgaggaatgaggtggagaagctccgtaacgaagtgaacgaaagagaaaaagccatggaaaacagatataagagtcttctcagtgaatctaacaaaaaactgcacaatcaggagcaagttatcaagcacctcactgaaagtacaaaccagaaagatgtgctgcttcagaagtttaacgagaaagacctcgaggttatccagcagaactgttaccttatggcagccgaggacctcgagctcagatccgagggcctcattactgaaaaatgttccagccaacagccccccggctcaaagaccatcttttcaaaggaaaagaagcaaagttcagattacgaggagctgatccaggtgttgaaaaaggagcaggatatctatacccatctggtgaagagtctgcaggaatcagacagtatcaacaatctgcaagcagagctgaacaagatctttgcactgagaaaacaacttgagcaagatgtgttaagctaccagaacttgaggaagaccctcgaagagcagattagcgaaatccggagaagggaggagtctttcagcctgtattccgatcagacttcttacctgagtatctgcttggaagagaacaatcggttccaggtagaacacttctcccaagaggaactcaagaagaaggtctccgacctaattcagttggtgaaggagctgtatacagacaaccagcatctcaagaagacgatcttcgacctttcatgcatgggatttcagggcaatggcttcccagacaggttggcctcgaccgaacaaactgaggaggccaagaagtcccgacttcccattctgattaagcctagtcgaagcctcggcaacatgtacagactgccagcgactcaggaggtggtgacgcagttgcagtcgcagattctagaactgcagggcgaactcaaagagtttaagacctgtaacaagcagctccatcagaagctcatactagcagaagccgtcatggaaggcaggccgactcccgacaagactctgctcaacgctcaacccccagtgggagctgcctatcaggacagccccggggagcagaagggtattaaaaccacatccagcgtgtggcgggacaaagagatggattctgatcagcaacgctcctacgagatcgatagtgagatctgtcccccagatgacttggctagccttccgtcttgtaaggagaaccctgaggacgtgttgagcccaactagcgtggcgacttatttgtcatcaaagtctcagccatctgccaaggtgagcgtcatgggcacagaccagagcgagtccatcaatacctcaaacgaaaccgaatatctgaagcagaaaattcatgacttagaaacggaactcgaggggtaccaaaacttcattttccagctgcagaaacactcccagtgcagtgaggctataatcacggttctctgcggcacagagggagcccaagacggactgtcgaagccaaagaatggaagtgatggggaggaaatgaccttctccagcctacaccaggtccggtacgtgaagcatgtcaagattcttggacccctcgccccagaaatgatagatagcagagtattagaaaatctcaaacagcagctggaggagcaggagtacaagctccagaaggagcagaatttgaatatgcagctcttttcagagatccacaatctgcagaataaatttcgggatctttcaccaccaagatatgactcgctggtgcaaagccaagccagggagctgagcttacagagacagcagatcaaagatggacacggcatctgcgttattagcagacagcacatgaacaccatgatcaaagcttttgaggagctactgcaggccagtgatgtggactactgcgtggccgaaggatttcaggaacaactgaaccagtgcgctgagttgctggagaagcttgagaagctcttcctcaacggtaagagcgtcggcgtggagatgaacactcagaacgaattgatggaaagaatagaggaggacaacctgacctatcaacatctgctcccagaatctccagaacctagtgcgtcccatgctttgagtgactatgagaccagcgagaaatcatttttctcacgcgaccaaaagcaggataatgaaactgagaagaccagcgtcatggttaattcattctctcaggatttactgatggagcatatccaggaaattcggacacttcgtaagaggcttgaggaaagcataaagacgaatgaaaaattaaggaaacagctcgagcgccagggatctgaattcgtacagggatctaccagcatctttgcctccggctccgaactgcactcgtcccttacgtctgaaatccattttctgcggaaacagaatcaggccttgaatgccatgctgattaaaggctcacgcgataagcaaaaagaaaacgataagctgcgggaaagtcttagccgcaagacagtaagtctagaacacctgcaacgggagtacgcctccgtgaaagaggagaatgaaaggttgcaaaaagagggatcagaaaaggagagacacaatcaacaactgatccaggaggtgagatgctccgggcaagagctgagcagagttcaagaggaagtgaaactgagacagcagctactgtcccagaacgataaactcctgcagagcctccgggtggaacttaaagcctatgaaaaactggacgaggaacatcggcgcctaagagaggcttccggcgaaggatggaaagggcaggatcctttccgggatctgcattctttattgatggagatccaggccttgagactacagctcgaaaggtcaattgaaacatcttccaccctgcagtcaagattgaaggaacagctcgcacgcggtgcagagaaagcccaggagggggccctgactctggccgtgcaggcggtcagcatccctgaagtgccactgcagcccgataaacacgatggagataaatatccaatggaatcagataacagctttgatctttttgactcaagtcaggctgtgacccccaaaagtgtcagcgaaacaccgcccctgagcggcaatgatacagattcactatcttgcgacagcggtagcagtgcgacatcaacaccctgtgtgagcagactggtaactggtcatcatttgtgggcatcaaaaaatggccgtcatgtccttggactgatcgaagactatgaggcactcctgaagcaaattagtcagggacagcgcttgcttgccgaaatggacatccagacccaggaagcaccaagcagcacttctcaggaacttggcactaaagggcctcatcctgctcccctcagtaagtttgtgagctctgtgagcaccgctaagctgacgctggaggaagcttaccggcgcctgaaactcctctggagagtctcattgcccgaagatggacagtgtccccttcactgtgaacaaatcggcgaaatgaaggcagaggtgaccaagctacacaaaaagttgaaaaagtcctag

SEQ ID NO: 182336 - DNA, 5682 bp, synthetic construct
  misc_feature 1..5682: note = Description of Artificial Sequence: Synthetic coding sequence
  source 1..5682: mol_type = other DNA
atgatggacctggtgctggaggaggacgtgaccgtgcccggcaccctctcagggtgtagtgggttagtgccttctgttcctgacgatctcgatggcattaatcctaacgcaggtctgggaaatgggctactgcccaatgtaagcgaggagacggtgtcccccacacgggctagaaacatgaaggactttgaaaaccaaatcacagaactcaagaaagaaaactttaatctcaagctgaggatctatttccttgaagaacggatgcaacaggaatttcatggcccgaccgagcatatctataagactaacatcgaattgaaagtggaggtagagtctcttaaacgagagctgcaggaaagggaacagctgttgatcaaagctagtaaggccgtggagagcctcgccgaggccggagggtctgaaattcagcgggtcaaggaggacgctcgtaaaaaggtgcagcaggtagaagatcttctgacaaagagaattctgcttctggagaaggatgttaccgctgctcaggcagagctggagaaagcttttgcgggcaccgaaacggagaaagccttacgcttaagactggagtctaaacttagcgaaatgaaaaaaatgcacgaaggggacctggctatggctcttgtcttggacgagaaagatcgtttaatcgaggaactcaagttaagcttgaaaagcaaggaagcccttatccaatgtctaaaggaagagaaatcccagatggcttgtcctgatgaaaacgtgtcttccggcgagctgcgcggactgtgcgccgcaccgcgtgaagagaaggagagggaaacagaagcagcccagatggaacatcaaaaagagcgcaactctttcgaagagcgtattcaggcattggaagaagacctgagggaaaaggaaagggaaatcgcaactgagaagaagaactcactcaaacgcgataaagccatccaggggttaactatggccctgaaaagtaaagagaagaaagtggaggagttgaacagcgagatcgagaaactaagtgcggcttttgccaaggcacgggaggctctccagaaagcccaaacacaggagtttcaggggtccgaggactatgaaactgccctctccgggaaggaagccctgagtgctgccctgcgaagtcaaaatctcacaaagtcaacggagaatcaccggctgcgccggtcaattaaaaagataacccaagaacttagtgacctgcaacaggaaagggagcgccttgaaaaggacctagaagaggcccaccgtgagaaaagtaagggagactgtaccatccgagatctacgaaacgaagttgaaaagctgagaaacgaagtgaacgagagagagaaggcaatggagaatcgatataaatcactgctttcagaaagcaacaaaaagctccacaaccaggagcaggtgatcaagcacctcacagaaagtactaatcagaaggacgtgctgcttcaaaagttcaatgagaaagatttggaagtcatccaacagaattgctatctgatggctgctgaggacctggaactaagatcggagggtctgataacagagaagtgttcatcccagcagccccctggcagtaaaactatattcagcaaggaaaagaaacagtcttcagattatgaggaattaattcaggtcctgaaaaaagagcaggacatctacacacatttagtgaaatctctgcaggaatccgactcaataaacaacctccaggccgaactgaacaaaattttcgcccttcgcaagcagttggagcaagacgtactgagctatcagaatctgaggaaaactctggaagaacagatcagtgagattagacgcagggaagaggagtctttttccctttacagcgatcagacaagctatttgtcaatatgtctcgaggagaacaaccgattccaagtagagcatttcagtcaagaagagctcaagaaaaaggtaagcgatttaatccagctggtgaaggaattgtacacagataatcagcatcttaagaagactatctttgatctcagctgtatgggatttcagggcaacgggttcccggacaggctcgcttctactgaacaaacagaactcctagcgagtaaggaggacgaagataccatcaaaatcggcgaggacgatgagataaattttttgtcagatcagcatctccagcaaagcaacgagattatgaaggacttgtctaaggggggctgtaaaaatgggtatctgcgacatactgagtctaaaatctctgactgcgatggtgcgcacgcgccaggctgtttagaggagggcgcgttcattaacttactggcccccctgtttaatgaaaaggccacattacttctggagagccgccccgacctgctgaaggttgttagggagcttctgctgggccagctcttcctgactgaacaagaagtgtcgggggagcacctcgatgggaaaacagaaaaaacacccaaacagaaaggcgagctcgtccacttcgtccagacaaactcattctccaagccccacgatgaactgaaattatcctgcgaggcccagttggtgaaggccggggaggttcccaaagttggccttaaggatgcatccgtgcaaaccgtggcaaccgagggcgatctgctgcgctttaaacacgaagctactcgcgaagcttgggaggagaagcctattaacacagccctgtcagccgaacaccgccccgagaacctgcacggtgttcccggctggcaggccgcccttctatccttaccaggaataaccaatcgcgaagctaagaagtcacgcctccctatcctgattaaaccaagtcgatccttgggcaatatgtatcgcctcccggccacacaggaggtagtcactcagctgcaaagccagatactcgagttacagggcgagcttaaggagttcaagacctgcaataagcagctgcatcaaaagttaattctggccgaggcagtcatggaagggaggcccacccctgataaaaccctgctgaatgcccagccccccgtgggagccgcctatcaggactcaccaggggaacaaaaggggatcaaaaccacatctagtgtttggagggacaaagaaatggattccgaccagcagagatcctatgagattgactccgaaatttgtccacccgacgatcttgcctccctcccttcttgtaaagagaatccagaggacgtcttgtctccaactagcgtggcaacctatctaagctctaagtcccagccatccgcaaaggtgtctgtgatggggactgaccaatctgaaagcataaataccagcaacgaaactgagtacctgaagcagaagatccacgacctggagactgagctcgagggttaccagaactttatctttcagttgcagaagcacagtcaatgttcggaagctattattacggtgctgtgcggtacagaaggcgcccaggacggattgtctaagccaaaaaacggctccgacggggaggaaatgaccttctcctcattacaccaagttcgctatgtgaagcacgttaaaatcctgggaccacttgctccagagatgatagattccagggtgctcgagaatctgaaacagcaactcgaagagcaggagtacaaacttcagaaagagcagaatttgaacatgcagctgtttagcgagatccataatttgcagaataagtttagggatctttccccccctcggtacgacagtttagtccaatcccaggccagagaattaagcctccagcgacagcagataaaagatggacatggaatctgtgtaatctcacgacagcatatgaacaccatgataaaagccttcgaagagttgcttcaggctagtgatgtcgactattgcgtggcagagggattccaggagcagctgaatcagtgtgcggagttgttagagaagctcgaaaagctgttcttaaacggaaaatctgtgggagtagagatgaacacgcaaaacgagctcatggaacgcatcgaggaggacaatttgacgtatcagcacctgctccccgagtcaccagagcctagtgccagccatgcactcagtgactacgagacttcagagaaatcctttttctcccgagaccagaaacaggataacgagactgaaaagacctccgtgatggtcaactctttcagtcaagatttactcatggagcacattcaagaaatacgtaccctgcgtaaaaggctggaggagagcatcaaaactaacgagaaactgcgcaaacaactcgagcggcaaggtagtgagttcgtgcaaggaagtacatcaatattcgctagcggaagcgagcttcacagtagtctgacatctgagattcactttctccggaagcagaaccaggcgctgaacgccatgctgatcaagggtagcagggataagcagaaagagaatgacaagctaagagaaagcctgtcgaggaagacagtttcccttgagcacctgcaacgagaatacgccagtgtgaaagaggagaatgagcgattacagaaggaggggtccgagaaggagcgacacaaccagcaactcatacaggaggttagatgttcgggtcaggaactctctcgcgtgcaggaagaggtcaagctccgccagcaactcttgtcccagaatgacaagctgctccaatccctcagggtagagcttaaagcctacgagaagctagacgaagagcacaggcggctgcgagaggccagcggggaagggtggaaaggccaggatccgttcagggatctgcattctttgttgatggaaattcaagccctgcgcctgcaattggagcgaagtattgagactagcagcactttacagagcagactgaaggagcagctcgccagaggggctgaaaaagcccaagagggggccctgacactcgctgtgcaggcagtgtctatacccgaggtacctttacaaccagacaaacacgacggggataagtatccgatggagtcagacaattcttttgacctcttcgatagttctcaggccgtcacccccaaatcggtgagcgagaccccccctctctctggaaacgacaccgatagcctgtcctgcgatagcggaagcagcgctacctccaccccttgtgtgtcgcggctcgtgaccggccaccatctgtgggccagcaaaaatggccgtcacgtgctcggactcatcgaggactatgaggcccttctaaagcagatatcgcagggtcagagattgctcgcggagatggacatccagacacaggaggctccgtcctccacatcacaggagctcggcaccaaggggcctcacccagccccactctctaagttcgtgtcatccgtgagcaccgccaagctgaccctggaagaggcatacaggcgcctgaaattgctgtggcgcgtgtccctgcctgaagacgggcaatgtccactccattgtgagcagataggtgaaatgaaagccgaggtcaccaagctacacaagaagttgtttgaacaggaaaagaaacttcagaataccatgaagcttctacagctgagtaagcgtcaagaaaaagtgatctttgatcagttggttgtgacgcacaagatcctgcggaaagcacggggtaatctagagcttcgacctggcggcgcccacccgggcacctgctccccttcccgccccgggagttag

SEQ ID NO: 182337 - DNA, 5559 bp, synthetic construct
  misc_feature 1..5559: note = Description of Artificial Sequence: Synthetic coding sequence
  source 1..5559: mol_type = other DNA
atgatggacctggtgctggaggaggacgtgaccgtgcccggcaccctgtcaggctgttctggcttggtgccctccgttcctgacgacctcgatgggatcaaccccaatgccggcttgggcaatggcctactgcctaatgttagcgaagagactgttagcccaacccgagctagaaatatgaaagactttgagaatcagatcactgagctcaagaaagagaactttaacctgaagttacgcatctatttcctggaggaacgcatgcagcaggaattccacgggccaacagagcacatttacaaaactaatatcgagctgaaagtggaggtggaatctctcaaacgggaattacaggagcgcgagcagctcctcattaaagcctcaaaagccgtggaaagcctcgccgaagccggtggcagtgagatccagcgggttaaggaggacgcccgcaaaaaagtgcaacaggttgaggatctgttgactaaaaggatccttctgctcgagaaagatgtcactgccgcacaggccgaactagaaaaagcgtttgcaggaactgagaccgaaaaggcccttcggctccggctagagtccaaactcagcgagatgaagaagatgcatgaaggagatcttgctatggctcttgtgttagatgagaaggacagactgattgaagagctcaagctgagtttgaaatctaaggaggctcttattcaatgcctgaaggaggagaagtcgcagatggcgtgcccagatgaaaacgtctcctctggagagctcaggggcctctgtgctgcgccccgcgaggaaaaagagagggagacagaggcagcccagatggagcatcaaaaggagagaaactcctttgaggagcgcatacaggctctggaagaggatctccgcgaaaaggagcgcgaaatcgccaccgagaaaaaaaatagtttaaagagagataaagcgatccagggactgactatggcgttgaagtccaaggaaaagaaggtcgaagagttgaactctgaaatagaaaagttaagcgccgcatttgccaaagctagagaagcgctgcagaaagcgcagacacaggagttccagggatctgaagactatgagacagccctgtctggcaaagaagcgctcagcgcagcgttgcgaagccagaatctaacaaaaagtaccgagaatcaccgcttgcgaagatccataaagaagatcacccaggagctgtcagatctgcaacaggagagagagcgtttggaaaaagatctggaagaagcacatcgcgaaaaaagcaagggagattgcaccattcgcgacctgaggaacgaagtggaaaagctgagaaatgaagtaaatgaacgggagaaggctatggagaacaggtataagtctctcctctcagagagtaataaaaagctgcacaaccaagagcaggtgataaaacatctcactgagtccacgaaccagaaagatgtgctgttgcagaaatttaatgaaaaggatctcgaagtcatccagcagaattgctatctgatggctgctgaagacctggagcttcgctccgagggcttgatcacagagaagtgttccagtcagcagccgccgggtagcaaaactattttttccaaggaaaaaaagcagtcctctgactacgaggaactcattcaggtgctgaaaaaggagcaagacatctatacgcatttggttaagtccttacaggagtctgactctattaataatctgcaggccgagctgaataaaattttcgccctacggaagcagctggaacaggatgttctctcttatcagaatttgagaaaaaccttggaggagcagattagtgagattcggaggagagaggaagaatcctttagcctgtactcagatcaaacctcttatctgtcaatctgccttgaggaaaataacaggttccaggttgagcatttctcccaggaagaactcaagaaaaaggtgagtgaccttatccagttggttaaggaactctataccgacaaccagcatctgaagaaaactatctttgacttgtcctgcatggggtttcagggaaacgggtttcctgatcggcttgccagtaccgagcaaactgaattgctagctagtaaagaggacgaagatacaattaaaatcggggaggacgacgaaatcaatttcctgtctgatcaacatctccagcagagcaacgaaatcatgaaggacttatctaaaggcgggtgcaaaaacggctaccttaggcatacagaaagtaaaatttcagattgcgacggggctcacgctcctggatgtctcgaggagggagcctttataaatctgctcgcacctctgtttaacgagaaagccaccctcctcctggagtcgcggcctgatctgctaaaagtggtccgcgagctgctacttggccagctattcctgaccgagcaggaggtgtcaggcgaacacttggacggcaaaacagagaagaccccaaagcagaaaggcgaattggtccactttgtacagaccaatagcttcagcaaacctcacgatgagctgaaactgagctgcgaagctcagctcgtgaaagccggagaggtcccaaaggtaggcctgaaggatgcgtccgtgcagaccgttgccacagagggggacctgctgagattcaagcacgaggcgacccgggaagcatgggaggagaaacccatcaacaccgcgctgtccgccgagcatcgaccagagaatctgcacggagtgccaggctggcaagccgctctgctgagtctgcctggtattacaaatcgggaggctaagaaaagtcgcctcccaatcttgataaagccatcaagatcattgggcaatatgtataggttgccggcaactcaagaggtggtcacacaactgcagtctcagatcttggagcttcagggcgagcttaaagagttcaagacatgcaataaacaactgcatcagaagcttattctcgccgaagcagtgatggaggggcggcctaccccggataaaactctccttaatgactctgagatctgcccccccgatgacctcgcttctctaccaagttgtaaggagaacccggaggacgtgctctcccccacctccgtcgcaacctacttgagcagtaaaagtcaacctagcgcaaaagtctcagtgatgggcactgaccagtctgaatctattaataccagcaatgaaacagagtatcttaagcaaaagatccatgatcttgaaacggaattggaaggctatcagaatttcatcttccaacttcaaaagcactcccaatgcagtgaggccatcatcaccgtgctgtgtggaactgaaggcgctcaggacggactgagcaagccaaagaatggatcagacggtgaagaaatgactttttcttctctgcaccaggttcggtatgtgaagcatgtgaaaattctcggtccactcgccccggagatgatcgactctagggtgctggaaaacttgaagcaacagctagaagaacaagagtacaagctccagaaagagcagaacctgaacatgcagctgttttcggaaattcacaacttgcagaataagtttagagacctgtctcccccaaggtatgactcgttggtgcaaagccaggcccgagaacttagcctacaaagacaacagatcaaggacggccatgggatttgcgttatctcccgccagcacatgaacacgatgatcaaagccttcgaagagctgctgcaggctagtgacgttgactactgcgtcgccgaaggatttcaagagcagctcaatcagtgcgctgagctgctggagaaacttgaaaagttgtttttaaacggcaagagcgtcggcgtcgagatgaacacccagaacgagctcatggaaaggatcgaggaggataatcttacctatcagcacttattgcctgagtctccagagccttcagcgagtcatgctctgagtgattatgaaacttcagagaaatcattcttctctcgggaccagaaacaagataacgaaactgaaaaaacatccgtgatggttaacagtttttcccaggacctcctaatggaacatatacaggagattcggactctgcggaagcggctggaggagagtatcaaaactaacgagaagctgcggaagcagttggaacgtcagggaagcgagttcgtccagggcagtacttcaatttttgcatctggttcggagctccatagctctttaaccagtgagattcactttttaaggaagcagaatcaggctctgaacgccatgctaatcaaagggtctagagataagcagaaagagaacgataaactgcgtgaaagcctcagccgcaaaaccgtttctttggagcacctccaacgggagtacgcgagcgtgaaggaagagaacgagagattacaaaaagaggggtctgaaaaggaaagacacaatcagcagctcatccaagaggtgcggtgtagtgggcaggagctgtccagggttcaggaagaagtcaaattaaggcagcagctgctgtctcaaaatgataagttgctccagtccctaagagtcgaattgaaggcttatgagaaactggacgaagaacatagacggctacgagaagcctccggagaagggtggaaagggcaggatcctttcagagatcttcatagccttcttatggagattcaggctctgaggctgcaactggagaggagcattgagacgtcctccacactgcagtcccggctcaaagagcagctagcgagaggtgccgagaaggcccaggaaggggctttaactctggctgtgcaggctgtgagcattcctgaagttcctctgcagcctgacaagcacgatggggacaagtatcctatggagtccgacaattcttttgacctctttgacagctctcaggcggtaactccaaaatctgtatcggaaacacctcctctctccggcaatgacacagactccttaagctgtgattctggctcctcagcaacctctacgccttgcgttagccgcctcgtgacaggccaccatctatgggcgtctaagaacggacgccatgtgctgggtttgatcgaagattacgaggcgttgctgaagcagatatctcaaggacaacgcctgttagctgagatggatattcagacgcaagaggctccctcaagtacctcacaagagctgggaacaaaaggaccccaccccgcacccctgtcaaagtttgtatcgagcgtgagcaccgcaaagctcacgttagaagaagcttaccgacgcctaaaactgttatggagagtgtccctgcctgaggatgggcagtgccccttgcactgtgaacagataggcgaaatgaaggccgaggtcactaaattgcataagaaactgttcgagcaagaaaagaaactccaaaacacaatgaaattgctgcagctcagtaagaggcaggagaaagtgatcttcgaccagttggtcgtaacacataagattctgaggaaagctcgcggcaacctggagttgaggccaggcggcgcacacccaggaacatgctcacccagcagacctgggtcgtag

SEQ ID NO: 182338 - DNA, 5445 bp, synthetic construct
  misc_feature 1..5445: note = Description of Artificial Sequence: Synthetic coding sequence
  source 1..5445: mol_type = other DNA
atgatggacctggtgctggaggaggacgtgaccgtgcccggcaccctctccgggtgcagcggactggttccctcagtgcccgatgatctggacggcattaacccaaacgccggtttgggaaatggcctgctgcctaatgtgtcagaagagactgtcagccctacccgcgcaagaaatatgaaagatttcgaaaaccaaataactgagctgaagaaggagaatttcaatctgaagctgcgaatctattttctcgaggaacggatgcagcaggaatttcatggacctactgaacacatctataagacaaatattgaattaaaagtggaggtagaaagcttgaagagggagcttcaagaaagagaacagctgctgataaaggcaagcaaggccgttgaatcactcgccgaggctgggggttccgagattcagagagtcaaggaggatgcaaggaaaaaggtgcagcaggtcgaggacttactgacgaagagaatcctgctgctcgaaaaagacgtcaccgctgctcaggcagagctggagaaagcctttgccggcacggaaacagagaaagctctgaggctgcgcttagagagtaagctgtctgaaatgaaaaagatgcatgagggcgatctcgcaatggcattggtgctcgatgaaaaggatcggctaatcgaggagctgaagctttccctcaagagtaaagaggctttgatccagtgcctgaaggaagagaaatcacagatggcatgcccggacgaaaatgtctcttccggggaactgcggggattatgcgccgcacctagggaggaaaaagagcgcgaaacagaagcagcccaaatggagcatcaaaaagagagaaactctttcgaagagaggattcaagctctggaagaggatttacgggagaaagagcgcgagatcgcgacagaaaagaagaattccctgaaaagagataaagctattcaggggctcacaatggccctcaagagtaaggaaaaaaaagtcgaggaactgaactctgagatcgaaaagttgtcagcagcatttgccaaggctcgcgaagccctgcagaaagcacagacccaggagttccaggggagtgaggattacgaaactgcccttagtggaaaggaagccttatccgccgcactccgttcacagaatctaacaaagtccaccgagaaccatcgtctccgcagatctatcaagaagatcacacaggagctgtccgacctccagcaggagcgggaacgcctggaaaaggacctggaagaggctcatcgggaaaagtcaaagggcgactgcaccatccgagatctgagaaacgaggtcgagaagttgcggaatgaggttaacgaaagggagaaagctatggagaacaggtacaagagcctgctgtctgagtccaacaaaaaactgcacaaccaggaacaggtgattaagcacctcaccgaatctacaaaccagaaggacgttctcctgcagaagtttaatgaaaaggatctagaagtgatacagcaaaattgttaccttatggcagcggaagatcttgaactgagatcagaggggctgattaccgaaaaatgttcctcccaacagccgcccgggagcaaaaccatattttccaaggagaagaaacaaagctctgattatgaagagcttatccaagtgctgaagaaagagcaggacatttatacacaccttgtgaaatcgctgcaagagtcagattctattaacaacctgcaagctgagctgaacaagatttttgctctcagaaaacagttggaacaggacgtattgtcctaccagaacctgcgtaagaccctggaggagcaaattagtgagattagacggagagaggaggagtctttctctctatacagtgaccagacgagctacctgtcaatctgtttggaagagaataaccgattccaggttgaacatttcagccaggaggaactgaagaagaaagttagcgatttaatccaactggttaaggagctctacacggataatcagcacttaaaaaaaaccatctttgatttgagctgtatggggtttcagggtaatggattccccgatcggctggcaagcacagaacagacagagttactggcctctaaagaggacgaggacaccatcaaaattggcgaagacgacgagattaactttctctctgaccaacaccttcaacagtctaacgaaatcatgaaggacctcagcaagggcggatgcaagaacggatacctgcgccacacagagagtaaaatcagcgattgtgacggggcacacgcccccggctgcttggaagagggcgcattcataaacctgctggcaccactgttcaacgaaaaggctactctccttctggagagcagacccgacctattaaaagttgtgcgggagctcctcctgggccagctctttttgacagagcaggaggtcagcggtgagcacctggacgggaagacagaaaagacacctaaacagaaaggtgagttagtgcatttcgtacaaacaaattcgttttctaagccccacgatgaattgaaactcagctgcgaggcccagcttgtcaaggctggcgaggtgccaaaggtcggccttaaagatgcctccgtccagactgtcgctactgagggagacctcctccgtttcaaacatgaggccactcgagaagcttgggaggagaagccgatcaatacggccctctcagccgagcaccgacctgagaaccttcatggcgtgccgggttggcaagcagccctcctatcactcccaggcattacgaatagagaggcgaagaagagcaggctccctatcctgattaagccaagtaggtccctgggcaacatgtatagactgccagctacacaggaggtcgtgacacagctgcaaagccaaattctggaactccagggagaactcaaagagtttaagacgtgtaacaagcagctccatcagaagctgattctagctgaggccgttatggaaggacggcccaccccagacaagacactgctgaacgcccagccccccgtgggtgccgcctatcaggacagccctggagagcagaaaggcatcaagacgactagtagtgtgtggagggataaggagatggattccgatcaacagagaagttacgaaatcgattctgaaatatgtccacctgacgacctggcctctctgccctcctgcaaggagaaccctgaggacgtgctgtctcccacttcagtggccacctacctaagtagtaaaagccagccatccgcaaaagtttcagtgatggggacggatcaatccgagagcatcaacactagcaatgagactgagtacctcaaacagaaaattcacgacctcgagaccgaactagagggttatcagaacttcatttttcaattacagaagcacagccagtgcagtgaagcaatcatcactgtgctatgcgggacagaaggggcgcaggatggcctgagcaaacctaagaatggaagcgatggagaggagatgacgttttccagtctgcaccaggtcagatacgtaaagcatgtgaagatcttaggccccctcgcgcccgagatgatcgactcacgagttctggagaacttaaaacaacagttggaagaacaagagtacaaattgcagaaggaacagaacttgaatatgcagctcttctcagaaattcacaacctgcagaataagttccgagaccttagcccgcctcgatatgatagcctggtccaatcccaggcacgggaactgagcttacagagacagcagattaaggacgggcatggaatctgtgtcatttccaggcagcacatgaatactatgataaaggctttcgaggaactgctgcaagcgagtgatgttgattattgcgtggccgaaggttttcaagaacagctgaaccagtgtgctgagctgctcgagaagctagagaagcttttcttgaacgggaagagcgtaggggttgaaatgaacactcaaaatgagctaatggagcgaattgaggaggacaacctgacataccaacatttgctgcctgagtccccagaaccctctgcttctcatgctctctctgactacgagacttccgaaaagtccttcttctctcgggaccagaaacaagacaatgaaaccgaaaagacatcagtgatggtgaattcgtttagtcaggatttgctcatggaacatattcaagagattagaacgctgcggaaaaggcttgaggaatccataaaaactaatgagaagttgagaaaacagctcgaaaggcaggggtccgaattcgtccagggatccacttcgatatttgccagcggctcagaacttcatagttcactgacaagcgaaattcacttccttcgcaagcagaaccaggcacttaacgccatgttgatcaagggcagcagagataaacagaaagagaatgataagctgcgtgagagcctatcccgcaaaaccgtgtcccttgagcatttacagcgcgaatacgcctcggtgaaagaggagaacgaacggctacagaaggagggaagcgagaaagaacgccataatcagcagctgatccaggaagtcagatgcagtggacaggagctgtcccgggtgcaagaagaggtaaaattaaggcagcagttactgagtcagaacgacaaactgctgcaatccttaagggttgagcttaaggcgtatgaaaaacttgatgaggaacatagaagactgcgtgatggggacaagtatccgatggagtcagacaactcttttgacctgttcgatagtagccaggccgttaccccaaagtcagtcagcgagactcctccactcagcggtaacgacactgactcactgtcatgcgatagcgggagcagcgcaacttcaaccccttgcgtttcgcggttggtcaccggccatcacttgtgggcctccaagaacggacgtcatgttctaggactcattgaagactacgaggccttgttgaaacagattagccagggccagagattgctggccgaaatggatattcaaacccaggaggcacccagctctacttctcaggaactaggtacaaaaggtcctcacccagccccccttagcaagttcgtgtcctcagtgtcaaccgccaagctgacgctggaagaggcttacagaaggctcaagttgctttggcgcgtgtccttgccggaggatggccagtgtcctctgcactgcgaacagattggcgaaatgaaggccgaggtgacgaagttgcacaagaagttgttcgaacaggaaaaaaagctccagaatacgatgaagctgctccaattaagtaaacgccaggaaaaggtgatatttgatcagctcgtggtgacacataaaattctgagaaaggctcggggaaatctggaactgcgcccaggcggcgcccatcccgggacgtgctccccaagtcgtccaggatcatag

SEQ ID NO: 182339 - DNA, 5586 bp, synthetic construct
  misc_feature 1..5586: note = Description of Artificial Sequence: Synthetic coding sequence
  source 1..5586: mol_type = other DNA
atgatggacctggtgctggaggaggacgtgaccgtgcccggcaccctctccgggtgtagtggcctggttcctagcgtgcccgacgaccttgacgggattaaccccaatgcaggcctggggaatgggctgcttccgaatgtgtctgaggaaactgtcagccccacccgggcccggaatatgaaagacttcgaaaatcagattacagaactgaagaaggaaaacttcaacctgaaactacgcatctatttcctagaggagagaatgcagcaggaatttcacgggccaaccgagcacatctacaagacaaatatcgaattgaaggtggaagtggaaagtctgaagcgtgagctccaagagcgggagcagttgctgatcaaagcatccaaggccgtcgaatccttggccgaagctggaggcagcgaaatacagcgcgtaaaagaggacgcacggaagaaagttcagcaggtggaggatctgttgacaaagcggatcctgctgctggagaaagatgtgactgctgcacaggcggaattagagaaggcttttgctggaactgagactgagaaggcactgcgcctcagactggagtctaaactgtctgagatgaaaaagatgcatgaaggcgatctcgctatggcactcgttttggatgaaaaagatcgactgattgaagagctcaaattgtccctaaaatccaaggaggctttaatccagtgcctgaaggaagagaagtcccagatggcctgtcccgatgaaaacgtgagctcaggagaactgaggggcctctgcgccgctccacgagaagaaaaggaacgcgaaacggaggccgcgcagatggagcatcagaaagaacgtaatagcttcgaagagcgcattcaagctctcgaggaggacctgcgagagaaggagagggagattgccaccgaaaaaaaaaactcactcaagagggacaaagccattcaggggctcacaatggcactgaagagcaaggagaaaaaggtcgaagagctcaatagcgaaatcgaaaaattatctgcagcgtttgccaaggccagggaggccctgcagaaggctcaaactcaggagtttcagggttcggaggactacgagaccgctttgtccggcaaagaagccctgtctgcggccttgcgttctcagaatctgacaaaaagtacggagaaccatcgcttgcggcggtctatcaagaaaattactcaggagctcagtgacctgcaacaagagcgcgaacggctggaaaaggaccttgaagaggctcaccgcgaaaaatcaaaaggggactgcacgatccgggatctgcggaacgaagtggaaaaactgcggaacgaggtaaatgagcgggaaaaagccatggaaaatcgatataagtccctgctgtcggagagtaacaaaaaactgcataatcaggagcaagtgattaagcatctgacagagtccactaaccagaaagacgtgctgcttcagaaattcaacgaaaaggatttggaggtcatccagcagaattgctacctcatggctgcagaggacttggagcttcgatccgagggccttatcaccgaaaagtgctcctcacagcaaccgcctgggagcaaaactatcttttccaaggagaagaaacagagctctgattatgaggaactcatccaggttctgaaaaaagagcaggatatctacacgcacctcgttaaatcactccaggaatctgactcaatcaataacctacaagccgaactcaacaaaatatttgctctgcgaaaacagctggagcaggacgtcctcagctatcagaatctaagaaaaaccctagaggagcaaattagtgagatcaggcgtcgagaggaagaatcattctccttatactccgaccagacctcctatctcagtatctgcctggaggagaataatcgcttccaggttgagcatttctcacaggaggaactgaaaaaaaaagtcagcgacctcattcagctggtgaaggaactctacacagataatcagcatctgaaaaaaactatattcgatctatcctgcatggggttccaggggaatggctttcctgatcggttagcctccaccgagcagacagaaatcatgaaggacctctctaaaggagggtgtaaaaatggctatctgcgccacacggaaagtaaaatatcggactgcgatggggcacacgccccgggctgcctggaggagggggcttttataaatctcctggctcctctgttcaatgagaaggctaccctgctcctcgagtcgcgtccagatcttctcaaagtggtgcgtgaactactgctgggtcagctgttcttgactgaacaagaggtttctggcgagcacctggacggaaaaactgagaaaactccaaagcagaaaggcgagctcgtccactttgtgcagactaatagcttctcaaaacctcatgatgaactcaaattgtcttgtgaagcacaactggtaaaagcaggggaggtccccaaagttggacttaaggatgccagcgtgcaaaccgtcgcaaccgagggtgatttgctgcgatttaaacatgaagccacccgtgaagcatgggaggagaaacctatcaatactgccctaagcgccgaacatcggccagagaacttacacggagtgcccggatggcaggccgcgttgctcagtctacctggcatcactaacagggaggctaagaaaagccggcttcccatcctgattaaaccttccagatcccttggcaatatgtatcggttgccagccacgcaggaggtcgtcacacagcttcagagccagatcctggaactccagggagaactcaaagagtttaagacatgcaataaacagcttcatcagaagctgattctcgccgaggccgtgatggagggacggccaacaccagataaaacactgctgaacgcgcagccgccagttggagcagcttatcaggatagtcccggggagcagaagggcatcaagacgacttcaagcgtttggcgagacaaggagatggattcagaccaacagaggtcttacgagatcgactccgagatctgtccccctgatgatttagctagtttgccctcatgcaaagagaacccagaagacgttctctctcccacttccgtcgccacttacctctcttccaaaagtcaacccagcgccaaggtgtccgtcatgggcacggatcagtctgagagcataaatacctcaaacgagaccgagtacctcaagcagaagattcacgatttggaaactgagttagagggctaccagaattttatcttccagctccagaaacactcccagtgcagcgaagctatcattaccgtgttgtgcggcaccgaaggtgcacaggatggtttaagtaaaccaaagaatggttctgacggggaagagatgaccttttcctcgctccaccaggtgcgctacgtcaagcatgtcaaaatcctgggacctcttgcccctgaaatgatagactcccgtgtgctggaaaatctcaaacagcaactcgaagagcaggagtataagctgcagaaggagcagaatcttaatatgcagctcttcagcgaaatccacaatctgcagaacaagttcagagacctgagtcctccacggtatgacagcctcgtgcaatcccaagccagagaattgtctctacagaggcagcaaataaaagatggacatggcatttgcgttatcagcaggcagcatatgaacacaatgatcaaagccttcgaagagctactacaggccagtgatgttgactactgcgttgcggagggtttccaggaacagctgaaccagtgtgccgagttattagagaagctggaaaaactctttctgaacgggaagagcgtcggagtagagatgaatacgcaaaacgagttgatggagaggattgaggaggataaccttacatatcagcatttactgcctgaatctccagaacccagcgcctctcatgcgctgtccgactatgaaacctctgagaaaagtttcttttcccgagaccaaaagcaggacaatgaaacggagaagacatccgtcatggtcaatagcttctctcaagacctattgatggagcacattcaagagatacggaccctgcggaagcgcttggaagagtctataaagactaatgagaagctacgtaagcaactggaaagacagggaagtgaattcgtgcaagggagtactagcatttttgcctcagggagcgagctgcacagctctctgacaagcgagatccacttcctccgaaagcagaaccaagccctgaacgctatgttgattaagggcagtcgagacaaacagaaggagaatgacaagctacgtgagagcctatcacggaaaactgtatcactcgagcatttacagagagagtatgcctctgtcaaggaggaaaatgaaagactgcaaaaagagggatcagagaaagaacgacataaccagcaattgattcaggaggttaggtgctctgggcaagaacttagtcgggtgcaggaagaagtcaaactgcggcagcagttgctgtcccagaacgataagctgctacaatcactgcgggtagaactaaaggcctacgagaagctggacgaggaacaccggagattacgcgaagcttcaggagaaggatggaaaggacaagacccctttcgggacctgcattctctgctcatggaaatacaggcactacggctacagctggaaagatcaatcgaaacttcgtcgactctgcaatcccgcctcaaggaacagctggcaagaggggccgaaaaggcgcaagagggagcccttacactggcggttcaggccgtgagtattcccgaggttccgctccagccggacaagcacgacggcgacaagtatcctatggagtccgacaacagcttcgatttgtttgattctagtcaggccgtaactcctaaaagcgtcagcgaaacaccaccactgagtggtaatgacactgactctctgagctgcgacagtgggagcagcgctacgagtaccccttgtgtaagccggctcgtgacaggtcaccatctgtgggcaagcaagaatggtaggcacgtcttaggactaatcgaggattatgaggcactgcttaaacagatctcacagggccaaagactcctggcagaaatggatattcagactcaggaggctccatcctctacaagtcaggagttaggaaccaagggcccccaccctgcacccttaagtaagtttgttagtagtgtctctacagctaagctgactctggaagaggcctaccgcagactgaagctactttggcgtgtgtctctacccgaagacggccaatgccccctccactgcgagcaaatcggagagatgaaggccgaggtgactaaacttcataagaagctgttcgagcaagagaaaaaacttcaaaacaccatgaaattattgcagctgtccaaaaggcaggagaaggttatttttgaccagctcgtagtgactcacaaaatactgaggaaagcaagaggtaaccttgagctgaggcctggaggtgcacatcccggtacctgctctccctccagaccgggaagctag

SEQ ID NO: 182340 - DNA, 1521 bp, synthetic construct
  misc_feature 1..1521: note = Description of Artificial Sequence: Synthetic coding sequence
  source 1..1521: mol_type = other DNA
atggaggaccaccagcacgtgcccatcgacatccagaccagcaagctgcttgactggctggtggacaggcgccattgctctctcaaatggcagagtttggtgctcacgattagggagaagatcaatgcggctatacaggacatgcctgagagtgaggaaattgcacaattgctgtccggcagctatattcactatttccattgtctgcgaattcttgacttgctgaaggggaccgaggcttcaaccaaaaacatctttggtcggtacagttcccagaggatgaaggactggcaggaaataatcgcactttacgaaaaggataatacatacctcgtggagctttcctccctgctggttcgaaatgttaactacgagatacctagcctcaaaaagcagattgcaaaatgtcaacaactgcagcaggagtacagcagaaaagaagaagaatgccaagccggggccgccgaaatgcgagaacagttctaccattcctgcaagcagtacgggatcactggtgagaacgtgcggggagagttactggctctggtcaaggatctgccatcccagctcgcggagataggagccgctgcacagcagagtctgggggaggctatcgacgtctaccaagcctctgtgggatttgtctgcgaatcccctactgaacaagtgttacccatgctgcgattcgtccagaaacgaggcaacagcaccgtttacgagtggagaaccggtactgagccttcagtggtggaacgaccccacctggaggagctacctgaacaggtggccgaagacgccattgattggggagacttcggggtggaagccgtgtccgaagggaccgacagcggaatatccgctgaagcggctggtattgattggggtattttccccgaatctgattcaaaggacccgggaggggacggcatagactggggggatgatgcggttgcgttgcagattaccgtcttggaagccgggactcaggctcctgagggagtggccaggggccctgatgcactaacactgctggaatacaccgagacccgtaaccagttcctggacgagttaatggagcttgagatttttctagcccaaagagccgtggagctgagtgaggaagccgatgtactgtcagtatctcagtttcagttggctcctgccatcctgcaaggacaaactaaggaaaagatggtaactatggtgtcggtgcttgaagatctgataggcaagttaacaagcctgcaactgcagcatttgttcatgatcttggcgagtccgcggtatgtggaccgggtgaccgagttcctgcagcagaagctgaaacagtctcagctgctggccctgaagaaggagctaatggtgcaaaaacagcaggaagccctagaggaacaggctgctctggaaccaaagctagacctattgctcgagaagaccaaagaattacaaaagctgattgaggccgacatctctaaacgatactctgggcgtccggtgaatctgatgggcacctctctgtag

SEQ ID NO: 182341 - DNA, 1596 bp, synthetic construct
  misc_feature 1..1596: note = Description of Artificial Sequence: Synthetic coding sequence
  source 1..1596: mol_type = other DNA
atgcggcggcagagcatgaccagcgccacccgggacctgcacaccgccctggacggcaaggcaactcagggcggtaaaaaggaccaccagcatgtcccaatcgacattcaaaccagcaagctgctggactggctcgtcgaccgccgtcactgctcactgaaatggcagagtctggtcctcacgattagagaaaagatcaatgccgcaattcaggacatgcccgaaagtgaggagattgcccaacttcttagcggcagctatattcactacttccattgtttgaggatccttgatctgctaaaagggacggaagcctccacaaagaatatctttggaagatactcttcccagagaatgaaagactggcaagagattatcgccctctatgaaaaggataacacatatttggtggaactatcttcactgctggtgcgaaatgtcaactacgagattcccagtcttaaaaagcaaatcgctaaatgtcagcagctgcagcaggagtactctaggaaagaagaagaatgtcaggctggggctgcagaaatgcgagagcagttttaccatagctgcaagcaatacggcattaccggcgaaaacgtgcggggggagctgctggcgttggttaaagatctcccctcacagctcgctgaaatcggtgccgccgcccagcagagtctcggggaagccatagacgtgtatcaggcatcagtcggcttcgtctgcgaaagcccaaccgagcaggtattgcccatgctgcggttcgtccagaagcgtggaaattcaaccgtgtacgaatggcggactggcaccgagccttctgtggtggagcgcccccacttggaggagttaccggaacaggtggcagaagatgcaattgattggggggatttcggtgtcgaagcggtttccgaaggcacagacagcgggatcagcgctgaagcagcgggaatcgattggggaattttcccagagtccgactccaaggatccaggaggcgacggtatagattggggagacgacgcagtggcactgcagattacagtccttgaggcgggaactcaagctcctgagggggtcgctcgcggcccggacgccttaaccttgctggagtacacggaaacccggaatcaatttctggacgagctgatggagctcgaaatattcttggctcaacgagcagtagaactctccgaggaagccgacgtgctgagcgtctcacagtttcagctagctccggctatactccagggacaaacgaaggagaagatggtgaccatggtcagcgtgcttgaagatctgatcggtaaattaacatctttgcagcttcagcatctctttatgatcctggcaagcccccgttacgttgaccgagtcaccgagtttttgcagcaaaaattgaagcaatcacagcttcttgcactcaaaaaagagctgatggtgcagaagcaacaggaggccttggaggagcaggcagctctcgaaccgaagctggacctgctgctcgagaagaccaaggagttgcagaaactcattgaagctgatattagtaaacggtatagcggtagacccgtcaacctgatgggaacatccctatag

SEQ ID NO: 182342 - DNA, 3864 bp, synthetic construct
  misc_feature 1..3864: note = Description of Artificial Sequence: Synthetic coding sequence
  source 1..3864: mol_type = other DNA
atgcaccccgacctgggccccctgtgcaccctgctgtacgtgaccttaaccatcttgtgttcttccgtgagctctgacctagcgccttattttacctcggagccccttagtgccgtgcaaaagcttggcggccccgtagtgctccattgttcagctcaacccgtcacaacccggatttcatggctgcacaacggaaaaacattggacggtaatctggaacacgtaaagatccatcagggtactctgacgattctgtcattaaactcttctctgttgggttactatcagtgtctggcaaataattccataggtgccatcgttagcggtccagcaacagtctccgtggccgtgctgggcgacttcggctcttctacgaaacacgtgattaccgccgaggaaaagagtgcaggcttcataggctgcagggtgccagaatcaaatcctaaggcggaagttcggtacaagatccgaggcaagtggctagagcattccaccgaaaactatttgatcctgccaagtggcaacctccagatattgaatgtgagcctggaggataagggatcgtataaatgcgccgcctataatccagtcacccaccagttaaaagtggagcctattgggaggaagttactggtatctcggccatcttcagacgatgtccatattttacaccccacgcactcacaggctttagcagtcctaagtcgttccccggtgacgttggaatgcgtggtgtccggggtgcctgccccccaggtgtattggcttaaggacggacaggacattgcgcccggatcaaactggcgacgcttgtactcccacctggccactgattcggtggatcccgctgattcaggcaattattcttgcatggcgggtaataaaagtggggacgttaagtatgtaacctatatggttaacgtcctcgagcacgcttcaatttcaaagggactccaggaccaaatcgtctccttaggagccacagtccatttcacgtgcgacgtccacggtaaccctgcccctaattgtacctggttccacaatgcccagcccattcatccctctgcccgccatcttaccgctgggaatggtcttaaaatctccggcgtaactgtagaggacgtggggatgtaccagtgcgtcgcggataacgggattggatttatgcattccacaggtaggctggaaatagaaaacgacggcggatttaaaccagttataatcacggccccagtttccgcgaaagtagccgatggcgattttgtcacattgagttgcaatgcatccggtctgccagtgcctgtgatcaggtggtacgattctcacggtctgattacaagccacccaagccaggtcttacgctcaaagagtcgaaagagccagctgagtcggccagaaggccttaacctggagcctgtttacttcgtcctcagtcaagccggagcctcctcccttcatattcaggctgtcacacaggaacatgccggcaaatatatctgcgaagctgccaacgagcacggcactactcaggccgaggctagtctgatggttgtacctttcgagactaatacaaaggctgaaactgtgactttgccagatgctgctcaaaacgatgatagatcaaaaagggatgggtcggaaacgggattgttgtcttccttcccggtcaaggtgcacccttccgcagtggaatctgcaccagagaagaacgcgtctgggattagcgtcccggacgccccaatcatactcagtcctccccaaacgcatacacccgatacatacaatctcgtatggcgcgccggaaaggacggtggtctgccgatcaacgcttatttcgttaagtaccgaaaattggacgacggtgttgggatgctcggctcttggcatacagtgagagtgccaggtagcgagaatgagctgcacctggcagagctggagcccagtagcctttacgaagttctgatggttgccaggagtgccgccggagagggtcagcccgctatgcttacattcagaacctcaaaggagaagactgcctcttccaaaaacacccaggcttcctcccctccagtgggaattcccaagtatcccgttgtgagcgaagccgccaataataatttcggcgtggtgctgaccgattcaagtaggcactcaggcgtgccagaggcacctgaccgcccaactatctccaccgcctccgagacttcggtctatgtgacctggattcctagagcgaacggcggatctccaatcaccgcctttaaggttgaatacaagagaatgagaacctctaattggctcgtagccgccgaggacatacccccgtctaagctaagcgtggaagtccgttctctggagcccggatccacctataagtttagagtgatagccatcaatcactatggggagtccttccgctcatctgccagccggccctatcaagtagtcggcttcccaaaccgtttttcctctcggcctattaccggcccacatattgcttatacagaggctgttagcgacactcagatcatgctcaagtggacctatatcccctctagtaataataatacacctattcaaggattttacatttattaccgcccaactgattcggataacgacagcgattacaagcgagacgttgtggagggatcaaaacagtggcacatgattggacacctgcaacccgagacctcttacgacatcaaaatgcagtgctttaatgagggcggagagagcgaattttctaacgtgatgatctgcgagacaaaggtgaagagagttccaggggcttctgaatacccagtgaaggacctgagtaccccaccgaactcgctcggctccggcggaaacgtgggcccagccactagcccagcgcgaagtagcgacatgctttacctcatcgtcggctgcgtcctgggcgtgatggtcctaattcttatggtgtttatcgctatgtgcctgtggaagaaccgacagcagaacactatacagaagtatgatccgccaggttatctgtaccaagggagtgacatgaatggtcagatggtggattacactacactgtccggcgcatctcaaattaatggaaatgtacacgggggcttccttactaatggagggctgagctccggctactcacatctgcatcacaaagtcccaaatgcggttaatggtattgttaatggcagtctgaatggtggcctgtactcaggccacagcaacagcctgaccagaactcacgtggattttgaacaccctcatcacctcgtaaacggggggggtatgtatacagctgttcctcagattgaccccctggaatgtgtgaattgcaggaattgtagaaataacaacaggtgcttcaccaagaccaactcaacatttagtagcagtcctccacccgtcgtgcccgttgtggccccatatccgcaggacggtcttgaaatgaagcctctgtctcacgtgaaagtgcccgtgtgcctgaccagtgccgttcccgactgtggccagcttcccgaggaatccgtaaaagacaacgtggagcccgttccgacacaacgtacttgttgccaggatatcgtgaacgacgtcagcagtgacgggagcgaggaccccgctgaatttagcagagggcaggaaggtatgattaatttacgcatccctgatcatttgcagctcgcgaagtcgtgcgtgtgggagggagatagctgtgcccatagtgagacagagatcaatatagtatcctggaacgctctgatcttgccccctgtgccagagggatgcgccgagaaaacaatgtggagtccaccaggcatccctctcgactctcccaccgaagtcctacagcagccacgtgaaacttag

SEQ ID NO: 182343 - DNA, 3795 bp, synthetic construct
  misc_feature 1..3795: note = Description of Artificial Sequence: Synthetic coding sequence
  source 1..3795: mol_type = other DNA
atgcaccccgacctgggccccctgtgcaccctgctgtacgtgaccctgactatcctatgttcttcagtatcctcagacctggctccttatttcactagcgagccattgtcagccgttcagaaattgggggggccggtggttttacactgctctgcccagcctgttaccactaggatctcttggctgcacaatgggaaaactttggacgggaaccttgagcacgtgaaaattcaccagggcactcttaccatcctcagcctcaactcatccctgctggggtattaccaatgcctggccaataactctattggcgctatcgtgtctgggcccgctaccgttagcgtggccgtgcttggggacttcgggtcgtctaccaaacacgtgattacagccgaagagaaatcagccgggtttattggctgtagagtacctgaaagcaatccaaaggccgaagtccgatacaagatccgaggtaagtggctggaacatagtacagaaaactacctcatcctaccttccggaaacctgcagatccttaatgtgagtctcgaggataagggtagctacaaatgcgcagcttacaatcctgttacacatcagcttaaggttgaacctattggcagaaaactactcgtttccagacccagttccgacgacgtacatatattgcacccaacccatagccaagcattggcagtgctgtctcggtcacctgtgacactggagtgcgtggtgagcggagtgcccgccccacaggtctactggctgaaggacggccaggatatagccccaggctctaattggaggcgcctgtatagccatctagccacagattctgtcgaccctgcagatagtggtaactacagttgcatggccgggaataaaagtggcgatgtaaagtacgtgacctatatggtcaacgtcttggagcacgcatccatttcaaaaggcctgcaggatcaaattgttagcctcggcgcaaccgtccacttcacatgtgatgtgcacggtaatcctgcacctaactgcacatggttccataatgcccagccgattcatccgagtgcgcgccatttgaccgccggcaatggtctcaagatctccggtgttaccgttgaagacgtggggatgtaccagtgtgtggccgacaacggcatcggcttcatgcacagcacaggccggctagaaattgagaatgatgggggattcaagcctgtgatcatcaccgctcccgtgtcagctaaggtagccgatggagacttcgtgactctgtcatgcaatgccagtggcctacccgtgcccgtcatcaggtggtacgatagccacggtttgatcaccagccacccatcccaggtactgcgctctaaatccaggaagtctcagctgagtcgacccgaaggactgaacctcgaaccagtctacttcgttctgtcacaagccggtgcatctagcttgcacatccaagcagtgacccaggagcacgccggcaagtatatctgcgaggcggcaaacgagcatggaaccacgcaagccgaggcctcactcatggtggtgccgttcgaaactaataccaaggccgaaacagtgacgctgcctgatgcagctcagaacgacgaccgcagcaagagggacggctccgagacgggcctacttagctcttttccagtcaaggtgcatccaagtgccgtggagtccgcaccagagaagaatgcaagtggcattagcgtgcctgatgcaccaattattttgagtcccccgcagacacatactcccgacacctacaatctggtgtggagagcgggaaaagatggcggtctgcctatcaatgcgtacttcgtgaagtatcgcaagctggatgacggagtgggtatgctcggatcttggcacacagtgcgagtgccagggtcagaaaacgagctccacctggctgaactggagccctccagcctctacgaagtcctgatggtggcaagatccgccgccggtgagggacagcctgcaatgttaaccttcagaacttcaaaggagaaaacagccagcagtaagaacacccaggcttcaagccccccagttggaataccaaagtacccagtcgtaagtgaggcagctaacaataatttcggagtggtgcttactgattcctcacgccattctggagtcccagaagccccagataggccaactattagtacggcctcagaaaccagcgtctatgtgacttggatacctcgcgcaaacggggggtccccgatcaccgcttttaaagtcgagtacaagagaatgcgaacttccaattggctggtcgctgctgaggacatcccacctagcaaactctcagtggaggtgcgcagcttggagcccggtagcacgtacaagtttagagtcattgcgataaaccactacggagagtcctttagatcaagcgcctctaggccataccaagtcgtaggatttcctaaccgtttctcctccaggccaataaccggcccgcacatcgcctacacggaggctgtgagtgacactcagattatgctgaaatggacatacatcccctcgtcaaacaacaacacacctatccaaggtttttacatttactatcgccccaccgattccgataacgactccgactacaaacgagacgtcgtggaaggatccaaacagtggcacatgatcgggcatctccagccagaaaccagttatgacattaaaatgcagtgtttcaatgagggcggagaatcagaattttctaatgtaatgatatgcgaaaccaaggttaagcgggtgcctggggcgtcagaatatccagtgaaagatctctccacaccgcctaattccctgggcagcggagggaacgtcggcccagccacgtccccagctagatccagcgacatgttgtacctgatcgtgggatgcgtccttggcgtcatggtgctcattcttatggtttttatcgcgatgtgtttgtggaaaaacagacagcagaacacaatccagaaatacgatcctcctgggtatttataccagggatccgacatgaatggacagatggtcgactataccaccctctctggagcctcacagataaatggcaatgtgcacggcggcttcctgacaaatggtggtctttctagcggatacagtcacttgcatcacaaggttccaaatgctgtgaacggcatcgtaaatggatccctgaacggagggttgtattcaggccactcaaactccctgacgcggacacacgtggactttgagcatccacaccacctggtgaatggcggtggaatgtatacagccgtgccacagatagaccctctcgagtgtgtgaactgccggaattgccgcaacaacaataggtgttttactaaaacgaacagtaccttcagttcttcccctcctcctgtggttccggtggtggccccctatccccaagatgggctggagatgaaaccattatcacatgtgaaggtccctgtttgtctaacctcggctgttcctgattgcgggcaactacccgaagagtcggttaaagacaacgtggaaccggtccctacacagaggacatgctgccaggatatagtaaacgacgtaagttctgacggatcagaggatcctgccgaattttcacgtggtgacagctgtgctcactccgagacagagattaacatagtaagctggaatgcactgatcctgccccctgtgccagaaggctgtgcagaaaaaacgatgtggtctcctccgggcatccccctagatagtcctacagaagtgctccagcagccacgggaaacctag

SEQ ID NO: 182344 - DNA, 1386 bp, synthetic construct
  misc_feature 1..1386: note = Description of Artificial Sequence: Synthetic coding sequence
  source 1..1386: mol_type = other DNA
atgctggagctgcggcaccggggcagctgccccggcccccgggaggccgtgtcgcctccacatagagaaggagaggcagctggaggggaccacgagacagagagtacctctgataaggagactgacatcgacgacaggtatggggatcttgactccagaaccgactcagatatccccgagatacctccttctagtgataggaccccagaaattttaaaaaaggccctttcaggactaagctcaagatggaaaaactggtggatcaggggcattttgactcttacgatgatatctctctttttcctcatcatatacatgggatcctttatgctcatgctgttggtgctgggtatccaggtgaagtgcttccatgagatcattaccattggatacagggtttaccactcctatgatttgccctggttcagaactctgtcatggtattttctgctttgcgtaaactatttcttctatggcgagacagttgccgactattttgcaaccttcgtacaaagagaagaacaattacagttcctcatccgttaccaccggttcatctcatttgctctgtatctggctgggttttgcatgtttgtcctgtccctggtgaagaagcactaccgccttcagttttacatgtttgcatggactcatgtaaccctcctgatcaccgtgactcaaagccatctagtgattcagaatcttttcgagggcatgatttggtttctcgtccctattagctctgtgatttgtaacgacattacagcctacctctttggttttttcttcggcagaactccgctgattaaactctctcctaaaaaaacatgggaaggcttcataggtggttttttttcaacggtagtgtttggcttcatagcggcatacgtgctgagcaaatatcagtattttgtttgtcccgtggagtaccgaagcgatgtcaactccttcgttaccgagtgtgaaccctccgagctattccagctgcagacttattcgctcccccccttcttaaaggcagtactgcgccaggagcgggtgagcctctaccctttccaaatccactctattgccctgagtacattcgcctctctcatcggacccttcggagggttctttgcttcgggcttcaaacgcgcttttaaaatcaaggatttcgccaacactatccccggccacggcgggattatggacaggttcgactgccagtatctcatggcgactttcgtgcacgtgtatattacatccttcattcgcggacccaatccctccaaagtgctgcagcagctcttggtgttgcagcctgaacagcagcttaatatttacaagacgctgaagacccacctgatcgaaaaagggatccttcagccgaccttgaaggtatag

SEQ ID NO: 182345 - DNA, 978 bp, synthetic construct
  misc_feature 1..978: note = Description of Artificial Sequence: Synthetic coding sequence
  source 1..978: mol_type = other DNA
atgagccggctgcggcacccccggacccggtacttcctgctgtgcgtgaactactttttctatggcgagacggtaacagattatttcttcacactcgtccagcgcgaggaaccgttgcgcatactgagcaaataccaccgcttcattagcttcactctgtatctgataggattttgcatgttcgtgttgtcactggtcaagaaacactaccggctgcagttttacatgttcgggtggacacacgttacattgctcatcgtagtgactcaaagccacctagtgattcataacctgttcgaaggaatgatttggttcattgttccgatctcctgcgtcatttgcaacgatatcatggcctacatgtttggcttctttttcgggagaactcctctaattaaactatcccccaagaagacctgggagggcttcataggcggcttttttgccactgtggtcttcgggttactgcttagttacgtgatgtctggatatcgatgcttcgtgtgcccagtagaatacaacaatgatacgaattctttcactgtcgattgcgagccatccgatctcttcaggctgcaggagtacaatattcccggcgtcatccagagcgtcatcggctggaagacagtgcggatgtatccgtttcagatccacagtatcgcattatccactttcgcatcgttgatcggtccatttgggggcttcttcgcgtcaggatttaagcgggcatttaagattaaagacttcgccaatactatccccggccatggtggcattatggaccggttcgattgccaatatttgatggccactttcgtgaacgtctacatcgcaagctttatccggggtcccaacccctctaagttgatccaacagttcctcactttaaggcctgatcagcagctccatatttttaacactctgcgaagtcatctgattgacaaggggatgcttacctccaccacagaggacgagtag

SEQ ID NO: 182346 - DNA, 753 bp, synthetic construct
  misc_feature 1..753: note = Description of Artificial Sequence: Synthetic coding sequence
  source 1..753: mol_type = other DNA
atgagccggctgcggcacccccggacccggtggaagaactggtgggtacgcggtatccttaccctcgccatgatcgcttttttttttattatcatatacctgggtccaatggtgttaatgatcattgtcatgtgcgttcagatcaaatgtttccacgagatcatcaccatcgggtataacgtgtaccactcttacgatctgccctggtttcgcacgttatcctggtattttcttctatgtgtgaactatttcttttatggagagaccgtgaccgactatttcttcactctggttcagagagaggagccgctgcggattcttagcaagtaccacaggttcatcagctttacactgtatctcatagggttttgcatgtttgtcctgagtctagtcaagaagcactaccgccttcaattctacatgtttggttggactcacgtcaccttactgatagttgtgacacaatctcacctggtgatccataatctgtttgaaggtatgatttggttcatagtcccgatctcctgtgttatttgtaatgacatcatggcgtatatgttcggtttcttctttggacgtacccccctgattaagctcagccctaagaaaacatgggagggtttcatcggcggctttttcgcaacagtggtgtttggtctactactgagctacgttatgagtggctaccgatgcttcgtgtgtcccgttgagtataacaatgacaccaattcattcactgtcgactgcgaatag

SEQ ID NO: 182347 - DNA, 1338 bp, synthetic construct
  misc_feature 1..1338: note = Description of Artificial Sequence: Synthetic coding sequence
  source 1..1338: mol_type = other DNA
atgaccgagctgcggcagcgggtggcccacgagcccgtggccccccccgaagacaaggagagcgaaagcgaggcgaaggttgacggggagaccgcctcagactctgaatcccgggcggagtccgctccacttccggtgtcggccgatgacactcctgaagtgttaaatagggccctgtcaaacctgtcttctcgatggaaaaactggtgggtcagaggcattttgactctggccatgatcgcttttttttttatcattatataccttggccccatggttttgatgatcatagtcatgtgtgtacagattaaatgcttccatgagatcatcacgataggatataacgtgtatcactcttatgacctgccatggtttaggactctatcctggtactttctcctatgtgtcaattacttcttctatggagaaactgtgactgattatttcttcaccttggtgcaacgggaagagcctcttcgtatcctttcaaaatatcatagatttatttcctttacactttatctgatcgggttctgtatgtttgttctgagcctggtcaaaaagcactacaggctgcaattctatatgtttggttggacacacgtaacccttctgattgtggtcacccagtcccacttagttatccataacctgtttgaaggtatgatttggttcatcgtccctatcagttgcgtcatctgcaatgacattatggcatacatgttcgggttcttctttggccgtactcctctgattaaactgtcacctaaaaaaacctgggagggcttcattgggggattttttgctactgtggtgttcggtttgttgctatcctacgttatgtccggctaccggtgttttgtgtgtcctgtcgaatacaacaacgacactaatagtttcactgtcgactgcgagccctccgacttgtttcgcctgcaggagtataacatccccggcgtgattcagtctgtgattggatggaagacagtgcgtatgtatccattccagattcactcaattgccctttccacttttgccagccttattggcccctttgggggatttttcgcgagtggatttaagagagcatttaagatcaaagacttcgccaatactatccctggacacggaggcatcatggacaggttcgattgccagtacctgatggctacattcgtcaatgtgtacatcgcgagttttatcagaggacctaacccatccaaactcattcagcaattcttaacactgagacccgatcagcagcttcacattttcaacacgctcagatcacatcttatcgacaagggcatgttgacctctactaccgaggatgagtag

SEQ ID NO: 182348 - DNA, 648 bp, synthetic construct
  misc_feature 1..648: note = Description of Artificial Sequence: Synthetic coding sequence
  source 1..648: mol_type = other DNA
atgttcgtgctgagcctggtgaagaagcactaccggctgcagttctatatgtttggatggacacacgtgacattgctaattgtggtgacccagtcccatctcgtcatacataatctatttgagggcatgatatggttcattgtgcccatttcttgtgttatctgtaacgacattatggcctatatgtttggttttttcttcgggcgcacgcccttgattaaactgtcccctaagaaaacatgggagggattcatcggcggtttcttcgcgaccgtggtcttcggcttgctgaaaactgtcaggatgtaccctttccagattcatagtatcgccctatctacgtttgctagccttattggtccattcggtggatttttcgcctctggattcaaacgagcctttaagatcaaagactttgcaaacaccatcccgggccacggcggcattatggatagattcgattgccaatacctaatggccacgttcgtaaacgtgtacattgcaagctttattcgtggacccaatccatctaagctcatccagcaattccttacccttaggcccgaccaacagttacacatctttaacaccttgaggtcccacctgattgacaaggggatgttgacctctacaaccgaagatgagtag

SEQ ID NO: 182349 - DNA, 3675 bp, synthetic construct
  misc_feature 1..3675: note = Description of Artificial Sequence: Synthetic coding sequence
  source 1..3675: mol_type = other DNA
atggagcccctgctgctgggccggggcctgatcgtgtacctgatgtttcttctgcttaaattctcgaaggcaatcgagattccctcatctgtccagcaggtccccaccatcatcaaacagtccaaggtgcaagtggctttccccttcgacgaatacttccagattgagtgtgaggcgaaggggaatcctgagccaaccttttcatggaccaaagatggaaatcccttctattttactgatcataggatcatccccagtaataattccgggacatttaggatcccaaacgagggacacataagccatttccaaggaaaataccggtgcttcgcatcaaataagctgggaattgccatgtccgaagagatcgagttcatcgttccgagcgtgccaaagttccccaaagaaaagatcgaccccctggaggttgaagaaggggatccaatcgtcctcccttgcaatcccccaaaggggcttccgccactgcatatatattggatgaacatcgagctggaacacattgagcaggacgagagagtgtacatgtcccaaaaaggtgacctttacttcgccaacgttgaggagaaagattcgaggaacgactattgctgctttgcggccttcccccgcctgaggacaatagttcagaaaatgcctatgaaattaactgtgaacagccttaaacacgcaaacgacagctcatcatccacagagatagggtccaaggctaactctattaagcagcggaaacccaaactgctcctgccccccaccgagtcgggatcagagtcctccatcaccattctcaaaggtgagatcctgctgctggaatgctttgccgaaggtcttcccacaccccaggttgattggaataagattggcggtgacctacctaagggccgtgaaacaaaagagaactatggtaaaacactgaagattgagaacgtgagttatcaggacaagggcaactaccgctgcaccgctagcaacttccttggtaccgcaacccatgatttccatgttatcgtcgaggaaccccctaggtggacaaagaaaccccagagcgctgtgtattccaccggatccaatgggatcctgctttgcgaggccgaaggggaaccccagccgaccatcaagtggcgcgtgaacggcagcccagttgataatcatcccttcgccggggacgttgtatttccgagagagataagtttcacaaatttacagcctaaccatacagctgtatatcagtgtgaagcctccaacgtccacggcaccatcctggcaaacgcaaacatcgatgtagttgacgtgcggcccctaattcagacaaaggatggcgaaaactacgcgaccgtcgtcgggtacagcgctttcctccattgtgagttctttgcctcaccagaggctgttgtctcctggcaaaaggtagaggaagttaagccccttgaggggcgccgctatcatatttacgaaaatggcaccctacaaatcaacaggaccactgaggaggacgcaggatcatactcctgctgggttgagaatgctattggtaagacagcagtgacggctaatctggacattcgaaacgctacgaaactccgagtgagtcctaagaaccctcggatcccaaaactgcacatgctggaactgcactgcgaatctaagtgtgattcccacctcaagcattcactcaagctcagctggtctaaagatggagaggcattcgaaatcaatgggaccgaagatggccggatcattatcgacggcgccaaccttacaattagcaacgtaacgctggaagaccaaggcatttattgttgctcagcccacacggcactggacagcgcggctgacatcacccaggtcacagtgctagacgttccggacccaccagagaacctgcacctgtctgaacgtcagaaccgatccgtgaggctcacatgggaggccggcgccgatcataattccaacatctccgagtacattgttgagtttgaggggaataaggaagaacccggtagatgggaggaactgacacgcgtgcaagggaaaaaaacaactgtcattttgccccttgctcccttcgttcgctaccagtttagagtgattgccgtgaatgaagtgggtagaagccaaccaagccagcccagtgaccatcacgagacacctccggctgctcctgatcgaaatcctcagaacatcagggtgcaagcaagccagcccaaagaaatgattattaagtgggagcccttgaagtccatggagcagaatggccccgggttggagtacagggtcacgtggaagccacagggcgccccggtggaatgggaagaagaaacggtgacaaaccacacccttagggtcatgacgcctgctgtttacgctccatatgacgtgaaagtccaggcgattaaccagcttggctccgggcccgatcctcaaagcgtgaccctgtactctggagaggactatcctgatacggcgcctgtgatacacggagtagacgtcatcaattcaacactggtaaaggtgacttggtctactgtaccaaaggatcgggtacatggcagattgaaaggctatcagataaactggtggaagaccaaatctctgctggacggtaggacgcacccaaaggaagtgaacatcttgagattttcaggccagcgcaattctgggatggttccatcactcgatgcattttcagaatttcacctgactgtgttggcctataactccaagggcgcaggccctgagtcagagccttacatctttcagaccccggaaggcgtcccagagcaacctacattcctcaaggtgatcaaagtggataaggataccgcaaccttgagctgggggctgcctaagaagcttaacggtaacttgactgggtatctactgcaatatcagatcattaatgacacctacgagatcggtgagctgaacgacatcaacattactaccccctcgaaaccttcgtggcacttgtccaacctcaatgctaccacaaagtacaaattttatcttcgggcgtgcacatctcagggctgtggtaaacccattactgaagagtccagtaccctgggcgagggctcaaagggaattgggaaaatctcaggagtgaacttgacacaaaagactcacccaattgaggtgtttgagccgggggcagagcacattgtgcgccttatgacgaaaaactggggggacaacgatagcattttccaggacgtgatcgagacccggggcagggagtatgcagggctgtacgatgatatttccactcaaggctggtttatcgggctaatgtgcgctattgctctcctcactcttctgctcctcacggtgtgcttcgtgaagcgcaatcggggaggaaagtattcagtgaaggagaaagaagacttgcacccagaccccgagattcagtctgtgaaggatgagacctttggcgaatacagcgattccgatgaaaaacccctgaaggggtcactgcgctccctcaaccgcgacatgcaacccaccgaatctgcagactcactcgtggagtacggtgaaggcgatcatgggctctttagcgaggatgggtcctttataggtgcttatgctggcagcaaagaaaaagggtctgttgaatcaaacggctcctccactgcaaccttccctctacgcgcgtag

SEQ ID NO: 182350 - DNA, 3627 bp, synthetic construct
  misc_feature 1..3627: note = Description of Artificial Sequence: Synthetic coding sequence
  source 1..3627: mol_type = other DNA
atggagcccctgctgctgggccggggcctgatcgtgtacctgatgtttttactgttaaagttctccaaagccattgagatccctagcagtgttcagcaagtcccgacaattattaaacagtccaaggtgcaagttgccttcccatttgacgaatactttcagattgaatgtgaggctaaaggtaatcccgaacccacattctcttggactaaggacggcaatcctttttactttacggatcacagaatcatcccctcaaataattctgggacattccgaatccctaatgagggacatatatcccactttcaaggtaaatatcgatgcttcgcttcgaacaagcttgggattgcgatgtccgaagagatagaatttatcgtgcccagcgtacccaagttccccaaagaaaaaatagatccgctggaagttgaagaaggcgatcctatagtcttaccttgtaacccacctaaggggctcccgcccctacacatttactggatgaatatcgagctcgagcacatcgaacaagatgagcgggtgtacatgagtcaaaaaggtgatttgtatttcgccaacgtggaagaaaaggattcacggaacgactactgttgtttcgccgcatttcctcgcctccgcaccattgtgcagaagatgcccatgaagctcacagtcaactcctctaacagcattaagcaacgtaagcctaaactactgctgcctcctactgaaagcggttcagagagcagcatcacaattctcaaaggtgagatcctgctgctggagtgctttgctgaagggctgccaacgccccaggtcgactggaacaaaatcggcggagatctacctaaaggccgcgagacaaaggaaaactatggcaagactcttaagatcgaaaatgtctcttaccaggataaagggaattatcgctgcacagccagcaacttcttaggaacggcaacgcacgatttccacgttatcgtggaggaacctccccggtggacaaagaagccccagtcagctgtatactcaactgggagcaatgggatcctcctgtgtgaggccgaaggcgaaccgcaacctacaattaagtggagggtgaacgggagtccagtggacaatcatcccttcgcaggtgacgtcgttttccctcgcgagatctcttttaccaaccttcaacccaatcacacagcagtctaccagtgcgaagcttctaacgtgcacgggacaattctggctaatgctaatatcgacgtggttgacgtacgtcctttaatccagacaaaagatggtgaaaactatgctaccgtggtgggttacagcgctttcctgcactgtgagtttttcgccagtcccgaggctgttgtgagttggcagaaagtggaagaggtcaaaccactagagggccgccgctaccatatctacgagaatggcactctccagatcaacaggacgacggaggaggacgccggttcctatagttgttgggtagaaaacgctataggcaagactgctgtgaccgctaacctggatattagaaatgccacaaagttaagagtttctccaaagaaccccaggattccaaaattacacatgctggaacttcactgcgaatccaaatgcgactctcatcttaagcactctctcaagttgtcatggagtaaggacggagaagcattcgaaatcaatggtaccgaggatggaagaatcataatcgatggggcaaatttgacaatcagcaacgtgaccttagaggaccagggaatctactgctgttctgcccacaccgcgcttgattccgccgccgacattacccaggtgaccgtgctcgatgtccccgacccacctgagaacctacacctttccgagcggcaaaacagatcagtgagattaacttgggaagctggagccgatcacaatagtaacattagcgaatacatcgtggagtttgagggcaataaagaagaaccagggagatgggaggaactgactcgcgtgcaaggaaagaaaactactgttattctccctctggcgccatttgttcgttatcagtttcgggtcattgccgttaacgaagtgggcagaagtcagccctctcagcccagcgaccatcacgagaccccgcctgctgcacccgatcgcaaccctcagaatatccgtgttcaggcctcccaacctaaagaaatgattattaagtgggagcccctgaaaagtatggagcagaatgggccaggtctggaatatcgtgtgacttggaagccacaaggcgctcccgtcgagtgggaggaagaaactgtgacgaatcacactctgagagtcatgacgcccgccgtttatgcaccttacgacgtgaaagtacaggccataaatcagctgggctcgggtcccgatccacaatccgtgactctgtatagcggagaggattacccagatactgcacccgtcattcatggagttgatgttatcaactctacattggtcaaggtcacgtggtctaccgttccaaaagacagagtccatggcaggctgaaaggataccaaatcaattggtggaagacaaagtcactgcttgatgggcgaacacatcctaaggaggtaaatatcttaagattctccggccagaggaattctgggatggtcccttcattggatgcattctccgaattccacctaactgtccttgcatataacagcaagggagccggtccggagtccgaaccttatatctttcagacccccgaaggggtccccgaacagcctactttcttgaaagttatcaaagtggacaaggacacagccaccctgagctggggtttgcccaaaaagctcaacgggaatctgactggctacctccttcaataccagattattaatgacacttatgagattggggagctgaatgacataaatatcaccacaccctcaaagccatcctggcatttaagcaacctgaatgcaacaaccaagtataagttctacttgcgtgcatgcacaagccagggctgtggaaagcccattaccgaggaatcttctacactcggcgagggaagtaagggaattggcaaaataagcggagtcaacctcacccaaaaaactcacccgattgaggtgtttgaaccaggggctgaacacattgtgcgtcttatgactaagaactggggcgataatgattctatctttcaggatgtgatcgaaacacgagggagagagtatgccgggctgtatgatgacatcagcacacaaggatggtttatcggcctgatgtgcgccattgccctgctcaccctcctgttgttaaccgtttgctttgtgaagaggaacagaggcggcaaatactcagtgaaggagaaggaagacctgcacccagatcccgagattcaaagcgtgaaggatgagacctttggcgaatacagcgactcggacgagaagccactgaaaggttcccttagaagtttgaatagggacatgcaacctactgagtccgctgattccctagtggagtacggcgagggcgatcacggtctgttcagcgaggacggcagtttcatcggtgcctacgcaggctccaaagaaaaggggtcagtcgaatctaacgggtcttcaacagcgacctttcctctgcgtgcctag

SEQ ID NO: 182351 - DNA, 291 bp, synthetic construct
  misc_feature 1..291: note = Description of Artificial Sequence: Synthetic coding sequence
  source 1..291: mol_type = other DNA
atggagcccctgctgctgggccggggcctgatcgtgtacctgatgtttttgctgcttaagttttcgaaggctattgagattccaagtagcgtccagcaagtgccgacgatcattaagcagagcaaggtgcaggtggccttcccctttgatgaatatttccaaatcgagtgcgaagcaaagggaaacccggagcctaccttttcctggactaaagacgggaaccctttttattttactgaccaccgaataatcccctccaataactcaggtacattccgaatccctaattag

SEQ ID NO: 182352 - DNA, 201 bp, synthetic construct
  misc_feature 1..201: note = Description of Artificial Sequence: Synthetic coding sequence
  source 1..201: mol_type = other DNA
atggagcccctgctgctgggccggggcctgatcgtgtacctgatgttcctactactgaaattctctaaggccatcgaaatcccctcatctgttcagcaagtacccacaatcatcaagcaatccaaggtgcaagtcgcatttcccttcgatgaatactttcagatcgagtgcgaagccaaggggaacccggaacccacttag

SEQ ID NO: 182353 - DNA, 546 bp, synthetic construct
  misc_feature 1..546: note = Description of Artificial Sequence: Synthetic coding sequence
  source 1..546: mol_type = other DNA
atggagcccctgctgctgggccggggcctgatcgtgtacctgatgttcctcctgctgaagttctcgaaggccatcgagatcccatcaagcgtacagcaggtgcccaccattattaaacagtccaaagtccaggtagcattcccctttgatgagtatttccaaattgaatgcgaagccaagggcaacccagaacccaccttttcctggaccaaggatggcaatcccttttattttaccgatcaccgtattatcccgagcaacaattctgggacattccgaatcccaaatgagggtcacatatcccactttcagggcaagtacaggtgtttcgcctcaaacaaacttggaattgccatgtccgaagagatagagttcatcgtgccatcagtcccaaagttccctaaggaaaagatcgatcctttagaggtcgaggagggcgatcctatcgtgctgccttgtaatcctcccaaaggcctgccccccctgcacatatactggatgaacattgaacttgaacatatagagcaggacgagcgtgtctactag

SEQ ID NO: 182354 - DNA, 954 bp, synthetic construct
  misc_feature 1..954: note = Description of Artificial Sequence: Synthetic coding sequence
  source 1..954: mol_type = other DNA
tgaagcgtgaccctgtacagcggcgaggactaccccgacaccgcccccgtcattcacggggttgacgtaatcaattctacacttgtcaaagtaacgtggtccacagtgccaaaagaccgggtgcacggaaggctgaagggctatcagataaactggtggaagacgaagtctctacttgatggccgaacgcaccctaaggaggtcaacatactaagatttagcggacagcgcaacagcggaatggttccgagcctggatgctttctctgagttccacctcacagtgctcgcctataacagcaaaggagccggccccgagtcagaaccatatatattccagacccccgagggggttcctgagcagcccacattcctgaaggttatcaaggtcgataaagacactgcaactctgtcctgggggttgcccaaaaagttaaacggaaatctaacaggttatctgttacagtaccagattattaacgacacctacgaaataggtgagctgaacgatattaacatcactaccccctcaaagccatcttggcaccttagtaacttaaacgccaccactaagtataagttctatcttagagcatgcacctctcagggttgtggaaagcccattactgaggagtccagtacgctcggagaaggaaagtacgcgggtctctatgatgatatttctacgcagggttggttcatagggcttatgtgcgcaattgctcttctcaccttattgctccttaccgtctgtttcgttaaaaggaaccggggcgggaagtacagcgtgaaggaaaaagaagatctgcatccggatcctgagattcagtctgtgaaggacgagacattcggggaatatagcgatagtgatgaaaagcccctgaaagggtcgttgcggtctctcaaccgagatatgcaacccacggagagcgcggactccctagtggagtattag

SEQ ID NO: 182355 - DNA, 258 bp, synthetic construct
  misc_feature 1..258: note = Description of Artificial Sequence: Synthetic coding sequence
  source 1..258: mol_type = other DNA
atggagcccctgctgctgggccggggcctgatcgtgtacctgatgtttcttctgcttaaatttagtaaggccatcgaaattccctccagcgttcagcaagtgcccactattattaaacagagcaaggtgcaggtcgcattccctttcgacgagtatttccagatcgaatgtgaggccaagggcaatcctgaaccaactttttcatggactaaggatgggaaccccttttacttcactgaccaccgcatcatcccctag

SEQ ID NO: 182356 - DNA, 450 bp, synthetic construct
  misc_feature 1..450: note = Description of Artificial Sequence: Synthetic coding sequence
  source 1..450: mol_type = other DNA
atggagagccggggcaagagcgccagcagccccaagcccgacaccaaggtgccgcaggtaacaactgaggccaaagtgcccccggccgcagatgggaaggcccctctcaccaagccatctaaaaaggaggctcccgccgagaaacagcagcctcctgccgcccctaccacagcacctgcgaagaagacatccgctaaggctgatcctgctttgctgaataaccacagtaatttaaagcctgccccaaccgttccgtcttccccagacgcaacacctgagcctaaagggcccggagatggagccgaggaagatgaagccgcgtccggaggtcccggaggccggggtccctggagttgtgagaacttcaaccccctactcgtggccggcggggttgcagtcgcggccatcgctctaatactcggcgttgcttttctggtccgcaaaaagtag

SEQ ID NO: 182357 - DNA, 627 bp, synthetic construct
  misc_feature 1..627: note = Description of Artificial Sequence: Synthetic coding sequence
  source 1..627: mol_type = other DNA
atgagcagcgagcccccccccccctaccccggcggccccaccgcccctttgctagaggagaagtctggcgcccctccaacccccgggcgatccagccctgccgtaatgcagcccccaccaggtatgccgctgccacctgctgacattggtccaccgccttacgagccacccggacacccaatgccccaaccagggtttataccaccccatatgagcgcagacgggacctatatgcctcccggcttctatccaccccctgggccgcatcctcccatggggtactatccaccgggaccttataccccaggaccctatcccggacctggcgggcacaccgccaccgtgcttgtgccttccggagcggctactacagtcaccgtcctacagggtgagatctttgagggagccccagtgcagaccgtgtgcccgcactgccagcaggctattactacaaaaattagctatgagatcggcctcatgaattttgtgctgggctttttttgctgtttcatgggatgcgaccttggttgctgcctcatcccttgcttgatcaacgacttcaaggatgtcactcatacctgtccctcatgcaaagcatacatctatacttacaaacgcctttgttag

SEQ ID NO: 182358 - DNA, 456 bp, synthetic construct
  misc_feature 1..456: note = Description of Artificial Sequence: Synthetic coding sequence
  source 1..456: mol_type = other DNA
atggccgccagcaccagcatggtgcccgtggccgtgaccgccgccgtagcccctgtgctgagcatcaactctgacttctcagatctgagagaaattaagaagcagctattgctaatagcaggactgactagggaaaggggtttgctgcactcttctaagtggtctgcagagctcgccttctcgttgcccgctctcccccttgccgagttgcagcctccaccaccaatcacagaagaagatgctcaagatatggatgcttacacactggctaaagcatatttcgatgttaaagagtacgatcgagctgcgcacttcttacatgggtgcaatagcaagaaggcatatttcctctatatgtacagtcggtatctcgtgcgggccattctcaagtgccacagcgctttttctgaaacctctatcttcaggactaatggtaaagttaagtctttcaaatag

SEQ ID NO: 182359 - DNA, 1794 bp, synthetic construct
  misc_feature 1..1794: note = Description of Artificial Sequence: Synthetic coding sequence
  source 1..1794: mol_type = other DNA
atggccgccagcaccagcatggtgcccgtggccgtgaccgccgccgtcgccccagtgctcagcattaactccgatttctcagatttacgcgagattaagaagcagctgctgctcatagccggcctgacccgggagcgcgggctcttgcattcttcaaaatggtcggccgagttggccttctcgctccctgcattgcctttggcggaactgcagcctccacctccaattaccgaagaggacgcccaagatatggatgcatacaccttggctaaagcctactttgacgtaaaggaatatgacagagctgcacatttcctccatggctgtaattcaaagaaggcatacttcctgtatatgtacagtaggtacctaagtggcgaaaaaaagaaagatgacgaaacggtcgattccctgggccctctggaaaaaggtcaggtgaagaacgaagcattaagagagttacgcgtggagctgtccaaaaagcaccaggcccgtgagctcgacgggtttggactttatctgtatggggtggtgctccggaaattggacctggtgaaggaagctatcgacgtgttcgtggaggcaacccatgtgctgcctcttcattggggagcttggttagagctgtgcaacctaattacggataaggagatgctgaagttcctttctctaccagatacttggatgaaagaattcttccttgcgcatatctatacagaattgcagctgatagaagaggcactccagaaatatcagaatttgattgatgtaggtttttctaaatcaagctatatcgtctcacagattgcagtggcataccataacatccgggatattgacaaagctctgagcatatttaacgagctccggaaacaggatccttaccgtattgagaatatggacacttttagtaacttgctgtatgtgcggtcaatgaagtctgagttgagctatctggctcacaacttatgcgagattgataaatacagagtggagacctgttgtgtgatcggcaattattactctctgagaagccagcatgaaaaggctgcgctctactttcagcgggccctgaaactcaacccgagatatctaggtgcatggacacttatgggccacgagtatatggagatgaaaaacaccagcgcagcaatccaggcttatcgccatgcaatcgaggtcaataagagagattacagagcctggtacggcctcggccagacatatgagatacttaaaatgccattttactgcttgtactattacaggcgcgcgcatcagctgcggccgaatgatagtcggatgctcgtggccctaggtgagtgttatgagaaactcaatcaacttgtggaggccaagaaatgttactggcgcgcttacgccgttggtgacgttgaaaagatggctctggtgaagctagcgaagctgcacgaacagctgaccgagtcagaacaggctgctcaatgttacattaagtacatacaggacatctactcatgcggtgaaatagtggaacaccttgaggagagcaccgctttccggtacctggctcagtactattttaagtgcaaactgtgggacgaggccagtacctgcgcccagaaatgttgtgccttcaatgatacccgagaggagggtaaggcccttctgcgacagattctgcagctgaggaaccagggcgagacccccacgaccgaggtacccgctcccttttttttgccagcatccctgagtgccaacaacacacccacccggcgggtatccccactaaatttgagttctgtcacaccatag

SEQ ID NO: 182360 - DNA, 1575 bp, synthetic construct
  misc_feature 1..1575: note = Description of Artificial Sequence: Synthetic coding sequence
  source 1..1575: mol_type = other DNA
atggagctgggccccgagcccccccaccggcggcggctgctgttcgcctgtagccccccgcccgcaagtcagccagtagtaaaagcgctgttcggggcgagcgctgcaggaggcctaagccctgtcactaatctaaccgtgaccatggaccagctgcaaggactagggtccgattatgaacagcccctcgaggttaaaaataatagcaacttgcagcggatgggtagttccgaaagcacagactccggattctgcctcgactcgcctggccctcttgacagcaaggagaatcttgagaacccgatgcgccgcattcatagtttacctcagaaactactgggctgcagccccgctctgaagaggagtcatagcgatagtctagaccacgacatcttccagctaattgacccagatgagaacaaggaaaatgaagccttcgaatttaaaaaaccagtcagaccggtgagccgcggctgcctgcattctcacggcctacaggaggggaaagatctttttactcagcggcaaaattcggctcctgcacgaatgctgtcttcaaacgagagagactctagcgagcctgggaacttcataccgctgttcacaccccagtcccccgttaccgccacactttccgacgaagacgatggattcgtggacctcctggatggcgaaaatctgaagaatgaggaagagacaccatcatgtatggctagcttgtggaccgctcctctggttatgaggaccaccaacctcgataatcgatgcaaactgttcgactctccctctctatgctcttctagtaccagaagtgtcctcaagaggccagagcgctctcaagaagagtccccgcctgggagcacaaagaggagaaaatcaatgtctggcgcttctcctaaggaaagcacaaacccggaaaaagcccacgagacgttgcaccagtcgctttccctggccagtagtccaaagggcactatcgaaaacattctggacaacgaccctagagatctgataggggatttctctaagggatatctctttcacactgtagccggcaagcaccaagacttgaagtatatatcacctgaaatcatggcctcggtcttgaacggaaaattcgccaacctgattaaggagtttgtgattattgactgtagatacccttacgagtatgaaggtgggcacattaaaggagccgttaacctccacatggaggaggaagtggaagactttctcctcaaaaagcccatcgtgccgacagacgggaagcgcgttatcgtggtatttcattgtgagttctcatctgaacgggggcctcgtatgtgccgctatgtgagggaaagagaccgtttgggtaatgagtaccctaaactgcactaccccgagctgtacgtgctaaagggtggctataaggaattttttatgaaatgccagtcttactgtgaaccccctagttacagacccatgcatcatgaagattttaaggaagacctgaaaaagtttcgcacgaagtcccggacctgggcgggcgagaaaagcaaaagagagatgtattctcgactaaaaaaactgtag

SEQ ID NO: 182361 - DNA, 1455 bp, synthetic construct
  misc_feature 1..1455: note = Description of Artificial Sequence: Synthetic coding sequence
  source 1..1455: mol_type = other DNA
atggagctgggccccgagcccccccaccggcggcggctgctgttcgcctgctccccaccacccgcgagtcaacccgtggttaaggcactttttggcgcgagcgcagcgggcggattgtcccctgtgacgaacttgacggtcaccatggaccagttgcaggggttggggtcagattatgagcaaccactggaagtcaagaataatagtaacctccagaggatgggaagcagtgagtctacagactccggcttctgcttggacagcccagggccactcgactccaaggagaacctggaaaatccaatgaggcggattcactccctaccccaaaaacttctgggctgttctcccgcgctgaaaagaagccattcagatagcctggaccatgatatattccagctaattgatcccgatgaaaacaaggagaacttgagctccaacgaaagggacagctctgaacccggcaatttcatcccactgttcacaccccaatcccccgtgaccgccacactcagcgacgaggacgacgggtttgtcgacctgctcgacggggagaatctcaagaacgaggaggaaaccccaagttgcatggcctccttgtggaccgccccactggtgatgcggacaactaacctggacaatagatgcaaattgttcgatagtccgagcctgtgctcgagctcaacccggagcgtcctgaaacgacccgaaaggtcccaggaagagagtccacctgggagcacaaagcgacgcaagagtatgtctggagcctcccccaaagagtctacaaatccagagaaggcccatgagacacttcatcagtcactgtcgctggctagttcccctaagggaacaatagagaacatattagataatgatcccagagacctgatcggggatttcagcaaagggtatctcttccacacagtcgctggaaaacaccaggacttgaaatacatttcaccggaaattatggcctcagtgctcaacggcaaatttgccaacctgatcaaagagtttgtcattatagactgccggtacccctacgaatacgaaggagggcatatcaagggggctgttaatctgcatatggaggaagaagttgaggacttcctgttaaagaagcctattgttcctacggatgggaaacgagttatcgtagtgttccactgcgaattcagctcagagcggggtccacgtatgtgtcgatatgttcgagagagggatagactcggcaatgaatatcctaaactccactatccggaactttatgtcctgaaaggtggatacaaagagttctttatgaagtgccagagctactgtgaacccccctcctaccggcccatgcatcatgaagacttcaaagaagacttaaagaaattccgaaccaaatctcgcacgtgggcaggagagaaatcaaagagggagatgtactcccgccttaagaagctgtag

SEQ ID NO: 182362 - DNA, 432 bp, synthetic construct
  misc_feature 1..432: note = Description of Artificial Sequence: Synthetic coding sequence
  source 1..432: mol_type = other DNA
atggagctgggccccgagcccccccaccggcggcggctgctgttcgcgtgtagcccacccccagcttcacagcccgtcgtaaaagccctgttcggggcctcagccgcagggggtttgtctccagtgaccaatcttacagtgacaatggaccagcttcaagggcttgggagcgattacgagcagcctctggaagtcaaaaataattccaacttgcagcgaatgggcagctccgaaagcaccgattcgggattttgtctggactcacctggccctctggatagcaaggagaatctggaaaatcccatgaggaggatacacagcctcccgcagaagctcctcggatgttctcctgccctgaaacgcagtcattcagattcgttagaccatgatatttttcagctgatcgaccccgacgagaataaagagaactag

SEQ ID NO: 182363 - DNA, 1743 bp, synthetic construct
  misc_feature 1..1743: note = Description of Artificial Sequence: Synthetic coding sequence
  source 1..1743: mol_type = other DNA
atggaggtgccccagcccgagcccgcccccggcagcgccctgagccccgccggtgtttgtggcggagcccagcggccagggcaccttcccggccttctccttggctcacacgggctgttgggcagtcctgttagagctgcagcaagtagcccggtcacgactctcacccagactatgcatgatttggccggattaggttctgagacccccaaatcccaggtgggaactctcctgtttcgcagtaggtctaggttaacacacctgtcacttagcagaagagcatcagaaagctccctgtcatccgaatcttccgagtcttccgacgcagggttgtgcatggacagtccctctcctatggatccccacatggctgagcagaccttcgaacaagccatccaggcggctagccggatcattcgaaacgaacagtttgccattcgaaggtttcagtctatgcccgtcaggttgctcggccattcaccagtgctgcgcaatataaccaattcacaggctccagacggacgtcggaagagtgaggcagggtccggggctgcttcaagctcaggcgaagacaaggaaaatgacggctttgtgtttaaaatgccgtggaagccaacacacccaagcagcacgcacgcactcgcagagtgggcctctcgccgagaggccttcgctcagaggccttcctcagccccagacttgatgtgcctaagtcccgatagaaaaatggaagttgaggaactgtctccattggccttggggaggtttagcctgaccccggccgaaggcgacacagaggaagacgacggcttcgtggacattctcgagtcggatctcaaggacgacgatgccgtgccgccggggatggagtccctgattagcgcccctcttgtaaagactcttgagaaggaggaagaaaaagatctggtgatgtattctaagtgtcagcgtcttttcagaagcccgtctatgccatgtagcgtgatcaggcccattctcaagaggctggaaaggccacaagatagggatacacccgttcaaaacaaaagacgacggtccgtcacacctcccgaggagcagcaggaggccgaggagcccaaggctcgggttctgcgctccaagtcgctgtgccacgatgaaatcgaaaatctgctggactccgaccaccgtgagctgatcggggactactcgaaggcattcctgctccagactgttgacgggaagcaccaggacttgaaatacatctccccggaaacgatggtggctctcctcacagggaaatttagtaacatagtggataaattcgtcatcgtggactgccggtacccatacgaatacgaaggaggccatatcaagactgctgtgaatttgcctcttgaacgggatgctgaatcattcttgctgaagagtccaattgctccatgttcactggataagagagtcatcctgatttttcactgcgaatttagctcggagagggggccgaggatgtgtcgattcatcagagagcgcgacagagcagtgaatgactaccccagtctttattacccagaaatgtatattcttaaaggcggttataaggaattctttcctcagcatcctaacttttgcgaaccacaggactatcgtcccatgaaccacgaggctttcaaggatgagctgaaaacatttcgtctgaagacacggtcctgggcgggagaaagatcccgcagagagttgtgtagccgcctccaggaccagtag

SEQ ID NO: 182364 - DNA, 1620 bp, synthetic construct
  misc_feature 1..1620: note = Description of Artificial Sequence: Synthetic coding sequence
  source 1..1620: mol_type = other DNA
atggaggtgccccagcccgagcccgcccccggcagcgccctgagcccagctggcgtgtgcggcggtgctcagcggccaggacacctacccggactgctgctaggttcccatgggctgttgggtagcccagtgcgcgctgccgcgagctcacctgttacaaccttaacccagactatgcatgatctggccggactgggtagtgagacgccaaagtcacaagtcgggaccctgctattcagatcccggtcccgcctgacccatctttcactgtcccgccgggcatcagagagctccctgtcaagcgaatcatctgaaagctccgatgccggcctgtgtatggacagcccgagccctatggacccccacatggcggagcaaacctttgaacaagccattcaggccgctagcagaattattcgaaacgaacagttcgccattcgaaggttccagagcatgccggatggtttcgtcttcaagatgccctggaagcctacccatccctcttctacccacgccttggccgagtgggccagcagacgcgaagctttcgctcagcgccccagtagcgcccccgacctcatgtgtcttagccccgatcgcaagatggaagtggaggaattatccccactcgctctcggcagattttcactcaccccagccgagggggacacagaggaggacgatggctttgtggatattctggaatcagatctgaaagacgatgatgctgtgccccctggaatggagagtcttatttcagcgccactcgtgaagaccctagagaaggaggaagaaaaagatttagtcatgtatagcaaatgccaacgcctcttcaggtcaccctctatgccctgctcggtgatccgcccaatcctgaagcggctcgaacgccctcaggaccgggacacacctgtgcagaataagcgtagacgctccgtgacaccacccgaggagcagcaggaggccgaggaacccaaagctagagtcctgaggtcgaagtctctgtgtcatgacgaaattgagaaccttctggattcagaccacagagaactgatcggggattacagtaaggctttcttgctgcaaaccgttgatggaaagcatcaggaccttaagtatataagtcccgaaactatggttgccctcttgactggtaaattctctaacatcgttgataagttcgttattgttgactgccgatatccatatgaatatgaaggcggacatattaaaaccgccgtgaacctcccattggagagggacgccgaatcatttctgctgaaatcccctatcgctccctgtagcctggataaaagggtcattctgatttttcactgtgagttctcttccgaaagaggaccgcggatgtgcagatttatccgggagagggatcgtgccgtcaacgactacccatccctgtactacccagagatgtatatcctgaaaggcggatataaagaatttttcccacagcatccaaatttttgtgaaccccaggattatcgccccatgaatcacgaggccttcaaagacgagttaaagaccttcagactgaagacaaggagctgggctggtgagaggtccaggcgcgaactgtgttcgcgcctacaagatcagtag

SEQ ID NO: 182365 - DNA, 1551 bp, synthetic construct
  misc_feature 1..1551: note = Description of Artificial Sequence: Synthetic coding sequence
  source 1..1551: mol_type = other DNA
atgcacagcgagacccccaagagccaggtgggcaccctgctgttcagaagccgcagcagactgactcacctgtccctcagtcgtcgggcaagtgaatcctcgctgtcctctgagagttcagagagttccgacgctggactctgtatggattctccctcccctatggacccccacatggcagagcagacatttgaacaggccatacaggcagcttccaggatcatcaggaatgagcagttcgctattcgtaggtttcaaagcatgccagttcgcctactgggacattccccagttctaaggaatattactaattctcaggccccggatggtcggaggaaatccgaagctggttccggggcggcatcttcctcaggagaggataaggaaaatgatgggttcgtgttcaagatgccatggaaaccaacacatcccagctctacacacgccctggctgagtgggcgagtagaagagaggcatttgcgcagagaccatcgagcgctcctgacctgatgtgtctgtcacctgaccgtaagatggaagtggaggagctgtcacctctggccctggggaggttttctctcactccagctgaaggtgacactgaagaggacgacggtttcgtggacattctggagtctgaccttaaggatgatgacgcggtgccacccggcatggaatccctaatctctgcacccttagtgaagacactggaaaaggaagaagagaaggacctggttatgtattcaaagtgtcagaggctgttccgcagcccttcaatgccctgttccgtcatcaggcccattctcaaacggctggagagacctcaggatagggacacacccgttcagaataagcggcgccggtccgtgaccccccccgaggaacaacaagaggctgaggaaccaaaggcgcgggtgttgcggtcgaaatccctgtgccacgacgagatcgagaacctactggatagcgaccaccgggaattaatcggcgattactccaaggcttttctgctgcagactgttgacgggaaacatcaagaccttaaatatatctcgcctgaaaccatggtagccttactgactgggaaattttctaacatagtggacaaattcgtgattgtggactgccggtacccctatgagtacgagggaggacacatcaagaccgctgtgaacttaccgctggaaagagacgcagaatccttcctgctgaagtcccccattgcaccctgctctctggataagagagtcatcctgatatttcactgtgagttttcaagtgaacgcggcccacgtatgtgtcgcttcatcagggaacgcgatcgcgccgtcaatgactaccctagcctgtactatcctgagatgtatatcctcaaaggcggatacaaggagttctttccacagcatccgaacttctgcgagccacaggattatcggccaatgaatcatgaagcatttaaggatgagcttaagaccttccgcttaaaaaccagatcttgggctggagagaggagtcggagagaactgtgttctagactgcaggatcaatag

SEQ ID NO: 182366 - DNA, 1470 bp, synthetic construct
  misc_feature 1..1470: note = Description of Artificial Sequence: Synthetic coding sequence
  source 1..1470: mol_type = other DNA
atgcacagcgagacccccaagagccaggtgggcaccctgctgttccgcagtcgttctcgcctgacccacctgagtctctcaagacgggctagcgaaagcagcctctcttccgaatctagcgagtcttcagacgcaggcctttgtatggacagtcccagccccatggaccctcatatggcagaacagacctttgaacaggcaatccaggccgcttcacggatcatcagaaacgaacagtttgctattcggcggttccagtctatgcctgtgaggttgctgggtcatagccccgtcctacgcaacatcacgaacagccaagcaccagacggcagaagaaaatcagaggccggctcgggagccgccagtagtagtggcgaagataaagaaaatgacggcttcgtttttaagatgccatggaaacctacccacccaagtagtacacacgccctagcagagtgggcttctagaagagaggccttcgcccagagaccgtcttctgcgcccgatctcatgtgtttatcccccgacagaaagatggaggttgaagagttgtccccattggctctcggacggttctccctcacccccgctgagggagatacagaggaggacgacggttttgtcgatatacttgagtccgatctgaaggatctggtgatgtacagcaaatgtcagaggctctttcgcagcccaagcatgccttgctctgttattagacctatactcaaaaggctggagaggccccaagaccgtgacacccctgtccagaacaagcggagaagaagcgttacacccccagaagaacaacaggaggccgaggaacccaaggctcgggtactcagatcgaagtcgctctgtcatgacgagatcgagaatctccttgactccgatcatagggaactgatcggagactattcaaaagcttttttgttgcagacggtcgacgggaagcatcaggatctgaagtacatctcccccgagaccatggtcgcgctgctgaccgggaaattcagcaatatagtagataaattcgtgattgtggactgtaggtacccatacgaatacgagggtggccacataaagactgcagtcaacctgccactggagcgtgacgccgagagctttttactaaaatccccaattgctccctgtagcctggataagcgcgtgatcctgatttttcattgcgaatttagctcagagaggggaccacgcatgtgtagattcattagagagagggacagagccgtgaacgactatcctagcctgtactaccccgagatgtatattctgaagggcggatataaagaatttttcccacagcatccaaacttttgtgaacctcaggattatcgcccaatgaaccacgaagcttttaaagatgaactgaaaacctttaggctcaaaaccagatcatgggccggagaacgttctcgcagagaactgtgtagccgcctccaggatcagtag

SEQ ID NO: 182367 - DNA, 1701 bp, synthetic construct
  misc_feature 1..1701: note = Description of Artificial Sequence: Synthetic coding sequence
  source 1..1701: mol_type = other DNA
atggaggtgccccagcccgagcccgcccccggcagcgccctgagcccggccggggtgtgtgggggcgcccagcgccccgggcacttgccaggcctgttactgggttcgcacggactccttggcagcccagtgagggccgctgcatcatcccccgttaccactctgacacagaccatgcacgacctcgccggccttgggtcccgctcccgtctgactcacctttcactgtcaaggagagcgtctgaatcctccctgtcatctgagtctagtgagagcagcgatgctggcctctgcatggactctcctagcccaatggatcctcatatggccgaacagaccttcgaacaggctattcaggcggcctcacggattattaggaatgagcaatttgcaatccgccgctttcagtctatgccagtccggctattaggccacagcccggtcctccggaatatcactaactcgcaggcacccgacgggcgcagaaaatccgaagctggatccggagccgcaagctcatccggtgaagacaaggaaaatgatggattcgttttcaagatgccatggaagcccacccacccaagtagcacacacgcccttgcggaatgggccagtagacgagaggcattcgcccagcgcccgtcttcagcaccagacctgatgtgcctgtcccctgacagaaagatggaggttgaagaactgtcaccacttgcacttggccggttctccctgaccccagctgaaggagatactgaggaagacgatggctttgtggatatactagagagtgatttgaaggacgatgatgctgtgccccctggcatggagagccttatcagcgcccctctggtgaaaaccctggaaaaggaagaagaaaaggaccttgttatgtacagtaaatgccaacggttgttccgcagtccaagcatgccttgctccgtcattaggcctatcctgaaacgcctcgaacggcctcaggatcgggatactcctgtacagaacaaacgaaggaggtccgtgactcctcccgaggagcagcaggaagcagaggagcccaaggcaagagttctgaggagcaagtcattgtgccacgatgagatcgagaatctgcttgactcggaccacagagaactgattggggattattccaaagccttcctacttcagaccgtagatggcaagcaccaggacctgaagtacataagtcccgagaccatggtggctttgctaactggcaaattctcaaacatcgtggataaattcgtaattgttgactgtaggtatccatacgaatatgagggcggtcacataaagaccgcggttaacctccccttagaacgagacgccgagtctttcttgctaaagagcccaatcgccccctgttccttggacaagcgcgtcatcttgattttccattgcgagttctcctcagagcgaggtccccgcatgtgtagattcattagagagcgcgaccgggcggttaacgactaccctagcttgtattatcccgagatgtacatcctgaaggggggatacaaagaatttttccctcagcaccccaacttttgcgagccacaggattaccgccccatgaaccatgaagcttttaaagatgaactgaagacctttcgcctgaaaacaagatcatgggcaggcgagcgaagtcgccgcgaactgtgttctcgtctgcaagaccagtag

SEQ ID NO: 182368 - DNA, 2475 bp, synthetic construct
  misc_feature 1..2475: note = Description of Artificial Sequence: Synthetic coding sequence
  source 1..2475: mol_type = other DNA
atgaccgtgctgcaggagcccgtgcaggccgccatctggcaggccctcaatcactatgcctaccgtgacgccgtgttcctggccgaacgcctgtatgccgaggtgcactctgaggaggcgctgttcttactggcaacctgctactatcgctcaggaaaagcatacaaagcctataggctactgaaggggcactcttgcactacccctcagtgcaagtacctgcttgcaaaatgttgtgtggatttgagtaagctcgccgagggggaacagatcctgagcggaggcgtatttaacaaacagaaaagccacgacgatatcgtgactgagtttggggatagcgcctgtttcacgttatccctgctgggccatgtctactgtaagaccgacaggctggccaaaggtagtgagtgttaccaaaagtctctgagcctgaatccattcctgtggtcacccttcgagagcttgtgtgagattggcgaaaagcccgaccctgatcagactttcaagttcacctccctccagaacttcagcaactgcttgcccaattcatgcactactcaagtgccaaaccacagcctgagccacaggcagcctgaaactgtgttaacagaaacccctcaggacaccattgagctgaacagactaaacttggaatcatctaattccaagtatagcctgaatactgattccagcgtaagctacattgatagcgctgtgatatcccctgacacagtgccccttggcaccggaacaagcatcctgtcgaagcaggttcagaacaaaccaaagacaggtaggtccctgttggggggccctgccgcactgtctcctctcacccccagcttcggtattcttcccctcgagaccccgtctcctggggatggctcctatctacagaactacaccaatacccctcctgtgattgacgtgccaagcacgggagcaccaagtaaaaagagtgttgcaagaattgggcagacaggtactaagtctgtcttttcccaatctggcaatagtcgcgaggtgactcccatcttggctcagacacagtccagcgggccccagacctctacgactcctcaagtgctgagtcctactattacgtctccaccaaacgcacttccccgcagaagcagccgcctgttcacatcagattcttctaccaccaaagaaaattcgaaaaaattgaaaatgaaatttcccccgaaaattccaaataggaaaaccaagagcaaaaccaacaagggcgggatcacgcagcctaacatcaacgattccctggagattacaaagcttgatagttcgattatttccgaaggaaagataagtaccatcactcctcaaattcaggcttttaatctacagaaggcagcagctgaaggcttaatgagccttttacgcgagatgggcaaggggtacctcgccctctgttcttacaactgtaaggaagcaattaatatattatctcacctgccgtcccatcattataacaccgggtgggtactctgccagatcgggcgcgcctacttcgaactgtcagagtatatgcaggcagagagaatcttctccgaagtgcgccggatcgagaactacagggtagaagggatggaaatctattcaactaccctgtggcacctgcagaaggatgtcgccctgtctgtcctgtccaaggatctgacagacatggacaaaaactcacctgaggcctggtgcgctgccggcaactgtttctcactgcagcgtgagcacgatatcgcaattaagttcttccagagggcaatccaggtggaccctaactatgcatatgcctacacgctgcttgggcacgagtttgtactgacagaggagctcgataaggcattagcgtgcttcaggaacgccatacgcgtgaacccgaggcattacaacgcttggtatggcctgggtatgatttattataaacaggagaaattctctctcgcagagatgcattttcaaaaagctctggacatcaatccccagtcctccgttctcctctgtcacataggggtggtgcagcacgccctgaagaagagtgagaaagctctcgatactctaaacaaagctatcgtgatcgatccaaaaaaccctctgtgcaagttccacagagcatccgtccttttcgcaaacgaaaagtataaaagtgccctgcaagagctggaagaactcaagcaaattgtaccaaaggaatccctggtttacttcctaataggcaaagtgtataaaaagctgggacagacgcatctcgccctaatgaacttttcatgggccatggacctggaccctaagggcgccaataaccagattaaggaggcaatcgacaagcgctatcttcccgacgatgaggagcccattactcaggaggagcaaataatgggcaccgacgagtcccaggaatcctcgatgacagatgcggacgatacccaactccatgccgcagagtctgatgaattctag

SEQ ID NO: 182369 - DNA, 2292 bp, synthetic construct
  misc_feature 1..2292: note = Description of Artificial Sequence: Synthetic coding sequence
  source 1..2292: mol_type = other DNA
atggccagcaccaagcccctgtgcctgccccggtgcggcttcccccgtaggacacccttgtgccggcggttggctgaaggagaacaaattctgtcagggggtgtgttcaataaacagaagtcgcacgatgatatcgtgacagaatttggcgactctgcttgctttactttgtctctcctggggcacgtgtattgtaaaaccgatcgactcgctaagggtagcgagtgctaccaaaagagcctgagcctgaatccgtttctttggtcacctttcgaatccctatgcgaaattggagagaagccagatcccgatcagactttcaaattcaccagcctgcagaacttcagcaattgccttccaaactcttgcaccacacaggttccgaaccattctttgtctcaccgacagcctgagacagtgctgactgagacacctcaggataccatcgagctgaatcgccttaatctcgagtcctcaaactctaagtattcactgaacactgactcttctgttagctacatagattcagccgtgatctctccagatacagtacccctgggtaccggaacctccatcttgtctaagcaggttcaaaacaaaccaaagactggtaggtcgctgctgggcggccctgccgcgctgtcgccactgacacctagtttcgggattctccccctggagacacctagccccggagacggatcctatctgcagaactataccaatacccctccagtgatcgacgtgccaagcactggtgcgcctagtaagaagtctgtggcgaggattggtcagacgggaaccaagtccgttttcagccagagcggcaactctagagaggttacccctatcctggcacagactcagtcctccgggccacagacatcaactactcctcaggttctcagtcccacaattacttcccctccaaatgctctcccccgaaggagttccagactattcacatcggatagctccaccacaaaagagaatagcaaaaagctgaagatgaagttcccccctaaaatacctaacaggaagaccaaatctaagacaaataaaggaggcattacacaacccaacatcaatgattccttagagattaccaagttggactcatcaattattagcgaaggcaagatctccaccattaccccccaaatccaggccttcaatttacagaaagccgcagcagaaggactcatgtctcttctcagggagatggggaaaggctacctcgccctatgctcctataattgtaaggaagccattaatattctgagccatcttccctcacatcattataacaccggttgggtgctgtgccagataggccgcgcctatttcgagttatcagagtacatgcaagctgagcgtattttcagcgaagtgaggcggatcgagaattaccgggtagaggggatggagatctactccaccacactttggcatcttcagaaagatgtcgcgctgtcagtactgagtaaagacctcacggatatggataaaaattcacccgaggcatggtgcgcagcgggtaactgcttcagtctgcaacgggagcacgatattgccatcaagtttttccaacgggctatccaggtggatcctaactatgcctatgcatatactttgctcgggcatgagttcgtactgacagaagagctcgacaaggcactcgcctgctttcgcaacgccatcagggtcaacccgcgtcattacaatgcctggtatggcctaggcatgatttattacaagcaggagaaatttagcctggccgagatgcacttccagaaagctctagacataaatccacagtcttccgtgttgttgtgtcacatcggggttgtgcagcatgctctgaagaagtccgagaaagcacttgacacattaaacaaagcgattgtgatagacccaaagaaccccctttgcaaatttcatagagcaagcgtcctgtttgccaatgagaagtataagagcgcactacaggaactagaggaactgaaacagattgttcctaaagaatctcttgtctactttcttataggaaaagtgtataaaaagttggggcagacacacctagccctgatgaattttagctgggcgatggatcttgacccgaagggcgccaacaatcaaatcaaggaggcgatcgataagaggtatctaccagacgacgaagagcccattactcaagaagaacagatcatgggaacagatgaatctcaggagtccagcatgactgatgctgacgacacacagctgcacgccgccgaatcagacgagttctag

SEQ ID NO: 182370 - DNA, 2472 bp, synthetic construct
  misc_feature 1..2472: note = Description of Artificial Sequence: Synthetic coding sequence
  source 1..2472: mol_type = other DNA
atgaccgtgctgcaggagcccgtgcaggccgccatctggcaggccctgaaccactacgcctatagggatgccgttttcctggccgaaagattatatgcagaagtgcatagcgaagaggccttgttcctgctggcaacatgttattacaggtccggaaaagcatataaagcataccggctgctgaagggccattcatgtactactccccaatgtaagtacctgctcgcgaagtgctgtgtggacctgtccaaactcgcagagggagaacaaatactatcgggcggggtgtttaataagcaaaagagtcacgatgatatcgtaactgaattcggcgactccgcctgcttcaccctctccctactgggccatgtctactgcaagacagataggctggccaaagggtccgaatgctaccagaaaagcttaagtttaaatccatttttgtggtcgccattcgagtcgttatgtgagataggagaaaaaccggaccccgaccagaccttcaaatttactagcctgcaaaattttagcaactgtctgccaaattcctgtaccacgcaggttcccaatcactcacttagtcaccgccagcccgaaactgtgctcactgaaactccacaggacacaatcgagctcaacagactcaatctggaatcctcaaactctaagtattccttgaacaccgatagcagcgttagctacattgactccgctgtcatttctccagacactgtcccacttggaactggaacctctattctgtccaagcaagtgcagaacaagcccaagaccggacgcagcctcttgggaggacctgccgctttgtcacccctcacccccagtttcggtattctccccctggaaacacctagtcctggagacggaagttacttgcagaattataccaacacccctccggtcatcgacgtaccttcaacgggggcgccatccaagaagtctgtggcacgaattggccagaccggaacaaaaagtgtcttcagtcagtccggtaactcgagagaggttacgcctatcttagcacagacacaatcatctgggcctcagactagtactactccccaggtgctgtctcctactattacctcacccccgaatgcccttcccaggcggagttcacggttatttacctcggacagtagcacgacgaaggagaattccaaaaagctcaaaatgaagttccccccgaagattcccaaccggaaaacaaagtctaaaactaacaaaggagggattactcaaccaaatataaacgattcccttgaaataaccaaactcgactcaagcatcatcagcgagggtaagatctcgacaataacccctcaaattcaggcttttaatcttcagaaggccgccgccggactgatgtcactgctgcgcgaaatggggaagggttatctggccttatgtagctacaattgtaaggaagccatcaatattctgtctcatcttccctctcaccattacaatactggctgggtcctatgccagatcggacgcgcttatttcgaactttcggaatatatgcaggcggagaggattttcagcgaagtgcggagaatcgagaactacagggtcgaagggatggaaatctattccactactctgtggcacctccaaaaggacgttgccctcagtgtgctgtctaaggacctcacagacatggacaaaaatagtcctgaggcatggtgcgccgccggaaactgtttttccctgcaacgggaacatgatattgcaatcaagttcttccaaagggccatccaggtggatccgaattacgcttacgcttacactctgctgggccatgaatttgtgcttactgaggaactggacaaggccttggcctgtttccggaacgcaatccgcgtaaacccacggcattacaatgcatggtacggattaggcatgatttactataagcaagagaagttcagccttgcagagatgcactttcagaaggctctggacatcaatccacagtccagcgtcttgctgtgccatattggcgtcgtccagcacgcactcaagaaaagcgagaaggcgctcgataccctgaataaagccattgtaatcgacccgaaaaacccactttgtaaatttcaccgggcttctgttctgttcgctaatgagaaatataaatccgcactccaggaactggaggagttgaaacagatcgttcccaaagaatccctggtctacttcctgattggaaaggtctataaaaagttgggtcaaacacacttagcattaatgaatttcagctgggcgatggatttggatcctaagggggctaataaccaaatcaaagaggctatcgacaaacggtatttgcccgacgatgaggagcccatcactcaggaggagcagatcatggggacagacgaaagtcaggagagttctatgaccgacgctgatgatacacagctccatgctgccgaaagtgacgaattctag

SEQ ID NO: 182371 - DNA, 2493 bp, synthetic construct
  misc_feature 1..2493: note = Description of Artificial Sequence: Synthetic coding sequence
  source 1..2493: mol_type = other DNA
atgaccgtgctgcaggagcccgtgcaggccgccatctggcaggccctgaatcattacgcctatagagatgcagtgtttttggctgaacgactctatgctgaggtgcacagtgaagaggctctatttctgctggccacttgttactatcgaagcgggaaggcatacaaggcctaccgtctgctgaagggccacagctgcaccacgcctcaatgtaagtacctgctagccaaatgctgcgttgacctgtccaaacttgcagaaggcgagcagatcctcagtggtggggtgtttaacaagcaaaaatcccatgacgatatcgttacagaatttggagactcagcttgcttcaccctgtccctgctagggcacgtctactgcaagacggataggttggcaaaggggagcgaatgctaccagaagagcttatcacttaatcccttcctgtggtctcccttcgaatcactctgcgaaattggcgagaaaccggatccagatcagacctttaagttcacaagcctgcagaacttctccaactgcctgcctaactcttgcacaacacaggtccctaatcacagcctcagccacagacagcctgagactgtgttgacagaaacccctcaggatacaattgagctaaatcgactgaacctggaaagttctaatagtaagtactccctgaatactgacagctccgtgtcgtacatcgacagtgccgtgatctccccagacacggtaccattaggcaccgggaccagtatcctaagtaaacaggtgcagaataagccgaagaccggccgcagcctgcttggcggtcctgccgcattatctcccctgactccatctttcgggatactccctttagagaccccttcccccggcgacgggagctatctacaaaactacacgaacacgccgcctgtcatagatgtcccatctaccggcgcaccatctaagaaaacatttcgggttctgcagagcgtagcaagaataggccaaaccggaaccaagtccgtattctctcagtcaggtaacagccgcgaggtgacacccatcttggctcagacccagtccagcgggccccagacttcaacgacacctcaggtgctttcacccactataacgagtccacctaatgcactgccccgtaggagttccaggctttttacctctgacagctccaccaccaaagagaattctaaaaaactgaagatgaaattcccacccaaaatcccaaaccgcaagacaaagtccaagactaataagggcggcattactcagcctaacatcaatgactctttggagatcacaaaattggattcatccatcatcagcgaagggaagattagcaccattacacctcagattcaggctttcaacctgcagaaagccgccgcagagggactgatgagcctcctgagggagatgggaaaagggtacttggccctctgttcatataattgcaaagaggcaataaacatcctgagccatctgccatctcaccattacaataccggctgggtactttgccagatcgggagggcttatttcgagctctccgagtacatgcaggctgagcgaatcttcagtgaagtccgtcggattgagaactatcgcgtcgagggtatggagatctattcaacaaccctctggcacttgcaaaaggatgtggccttgtccgtcctgtctaaggatctgacggacatggacaagaactctccagaggcctggtgcgcagccggaaactgcttttcactccagcgggagcacgacattgccatcaaattctttcagcgggccatccaggtcgatcctaactatgcctacgcttatacactcttaggccacgaatttgtcctcaccgaggagctcgacaaagcactggcgtgttttcggaacgcaatcagggtaaatcctcggcattacaacgcctggtatggactgggcatgatatactacaagcaggagaaattttccctggccgagatgcactttcagaaagctctcgacatcaacccacaatcttctgtgttgttatgtcatatcggcgtggttcaacacgcgctcaagaaatcagaaaaagctctggataccttgaataaggcgatcgtcattgatcccaagaatccgctgtgcaaatttcacagagcgtcggtcctctttgctaatgagaaatacaaatcagccctgcaggaactcgaagagctgaaacagatcgtgccaaaagagagcctggtttattttctgatcgggaaggtttataagaagttgggccagacccacctagccctgatgaacttttcatgggccatggatctcgacccaaagggcgccaacaatcagattaaagaggccatcgacaagcgctacctgccggatgatgaagagcccatcacccaggaggaacaaataatggggaccgacgaaagccaagaatcctcgatgaccgatgctgacgatactcaactgcacgccgcggagtccgacgagttctag

SEQ ID NO: 182372 - DNA, 1740 bp, synthetic construct
  misc_feature 1..1740: note = Description of Artificial Sequence: Synthetic coding sequence
  source 1..1740: mol_type = other DNA
atgagcgccgccatcgccgccctggccgccagctacggcagcggctctgggagtgagagtgatagcgattccgaatcctcaagatgtcctctgcccgcggccgacagtctcatgcacctaaccaaatccccaagctcaaaaccatcactggcggtggccgtggactccgcacctgaagtggcggttaaggaagatttggaaacaggtgtacatctggatccagcagtgaaggaagttcaatataaccctacctacgagaccatgtttgcccctgagttcggtcccgagaacccgttcagaacccagcagatggcagcgccccgtaacatgctcagcggctatgcggaaccggcgcacattaacgattttatgtttgagcaacagcgacgcactttcgccacctacggctacgccctggatccttccctcgataaccaccaggtgtccgcaaagtacattggatctgtcgaagaggccgagaaaaaccagggcctgacagtatttgagaccggtcaaaagaagacggaaaagaggaaaaagtttaaggagaacgacgcgtctaacatcgacggctttctcggtccctgggccaagtacgtggacgaaaaggacgtggccaagccttccgaagaagaacagaaagaactggacgaaatcaccgcgaaacgccaaaaaaaaggaaaacaagaagaagagaagcctggggaggaaaagaccattcttcacgtgaaagaaatgtacgactaccagggccgatcatatcttcacattccccaggatgttggagtgaaccttagatccactatgcctcccgagaagtgctatttacctaagaagcagattcacgtctggtcggggcataccaaaggagtttccgctgtccggttgtttcctctgtctggacaccttcttctctcttgcagtatggattgcaaaatcaaactgtgggaggtctacggcgaaagacgctgcttacgaacattcataggacattccaaagctgtcagggatatttgcttcaacacagcaggcacccaatttctgtcagcagcgtatgaccgttatctaaaactctgggatacagaaacgggacagtgcataagtaggttcactaatcgcaaggttccttattgcgtcaaatttaacccagacgaagataaacaaaacctgttcgtagcggggatgtcggataagaagatcgtgcagtgggacattagaagcggggaaattgtgcaagagtacgataggcacctgggggctgtcaacaccatcgtgttcgtggacgaaaataggcggttcgtttctacttcagatgataagtctctgcgagtttgggaatgggatattccagtggactttaagtatatcgctgagcctagcatgcacagcatgcctgcggtgacgctgtcccccaatggaaagtggctcgcttgccagtccatggataaccagatcctcatttttggggcgcagaatagatttcgactgaacaaaaaaaaaatcttcaaaggtcacatggttgcaggttacgcttgtcaggtggacttttcccccgacatgtcttatgtgatcagcggtgacgggaacggaaagctgaacatatgggattggaaaactactaagctgtatagtcggtttaaggcgcatgataaggtgtgcattggggccgtgtggcatcctcatgaaacctctaaagttatcacctgcggatgggacgggctgatcaagctatgggattag

SEQ ID NO: 182373 - DNA, 1620 bp, synthetic construct
  misc_feature 1..1620: note = Description of Artificial Sequence: Synthetic coding sequence
  source 1..1620: mol_type = other DNA
atgagcgccgccatcgccgccctggccgccagctacggcagcggctcagggtctgagagcgacagtgactccgagagttcccgctgtccacttccagctgccgacagccttatgcacctgactaagtccccatcatcaaagccgagtcttgctgttgccgtcgatagcgctcccgaagtcgctgtgaaggaggatctcgagactggggtccacctagacccagccgtcaaagaggtgcaatataatccgacttatgagactatgtttgcacctgagtttgggcctgaaaatccctttagaacccaacagatggcggcccctcggaatatgttgagtggatacgcagaacctgctcatattaacgattttatgttcgagcagcagcgccgtacattcgccacatatggctacgccttggatccctctcttgacaatcaccaggttagtgcgaagtatatcggctccgtggaagaagcagagaaaaaccagggtctaaccgtctttgagacaggacaaaagaaaacagaaaaacgcaagaaatttaaggaaaatgacgccagcaatatagacgggtttctcggtccctgggctaaatatgtggacgaaaaagacgtggctaagccgagtgaggaagaacaaaaggaactggacgagatcactgccaagcgccagaagaagggcaagcaggaagaagaaaaacccggcgaagagaagactattctgcacgttaaggagatgtatgattaccagggaagatcatatttgcacatccctcaggacgttggggtaaatttaaggagcacaatgccgccagaaaagtgttacctgccaaaaaagcagatccatgtctggagcggccataccaagggcgtaagtgctgtgaggctgttcccactgagcgggcacttacttctgagctgcagtatggattgtaagattaagctgtgggaagtatacggggagcggaggtgtcttcgcacatttatcggccacagtaaagctgtgcgtgatatatgctttaacaccgcaggaactcagtttttgagtgcagcctatgacaggtaccttaaactatgggatacagagaccgggcagtgcatctctcggtttacaaacagaaaggtgccctactgtgtcaagtttaaccctgatgaggataagcagaacctgttcgtcgctggcatgtcagataaaaagatcgtgcaatgggacatcaggtctggggagatcgtccaggagtatgacaggcatctgggagcggtgaacaccattgtcttcgtggacgaaaaccggaggttcgtcagcacatccgatgataaatctcttagagtgtgggaatgggatattccagtggacttcaagtatatcgcagaacctagcatgcattcaatgccagcggtcacgctgagtccaaatggcaagtggctggcctgtcagtcgatggataaccagatactaattttcggggctcagaatagatttcgacttaataagaagaaaatcttcaaaggtcatatggtggccggctacgcctgtcaggtcgatttctcaccagatatgcgggtgccccaatccttccaaaacttgaaggaggtcactgcaggcccacaggagggatag

SEQ ID NO: 182374 - DNA, 1740 bp, synthetic construct
  misc_feature 1..1740: note = Description of Artificial Sequence: Synthetic coding sequence
  source 1..1740: mol_type = other DNA
atgagcgccgccatcgccgccctggccgccagctacggcagcggcagtggcagtgagagtgactccgattccgaaagctcaaggtgccccctgccagcagctgattcattaatgcatttgacaaagtcaccttcctcaaagccctccctcgccgtggcagtagattctgcacccgaagtggctgtcaaggaagacctcgagaccggcgtccacctggatccagcagtgaaggaggtccaatacaatcctacatacgagacaatgttcgcgccggaatttgggccagagaacccgtttaggacacaacagatggccgcgcctcgtaacatgctttccggctacgccgagcccgcacacatcaatgatttcatgtttgagcagcagaggcgcacctttgctacttatgggtatgcgctggaccccagtttggacaaccatcaggtaagcgccaaatacattgggtccgtggaagaagcggagaagaatcagggccttaccgtgttcgagacaggtcagaagaagacagaaaaaagaaagaagttcaaggagaacgatgcgtctaatattgatggcttcctcggtccatgggccaagtatgttgacgagaaggacgttgccaaacccagcgaagaggagcaaaaggagctggacgaaattacggccaagaggcagaagaagggaaagcaggaggaggaaaagcctggtgaggagaagacaattctccatgtgaaagagatgtacgactatcaaggcagatcgtacctccatataccccaggacgtcggcgtcaacctcagaagtacaatgcccccagaaaagtgttatctccccaaaaagcagatccatgtctggagcggccatactaagggggtgagcgctgtgaggttatttcctctgtccggccatctgctgctcagttgcagcatggactgcaagattaaattgtgggaagtctatggggagagacgctgtctaagaacctttattggccactcaaaggctgtgcgcgacatctgctttaataccgctggcacccaatttctgtccgccgcttacgacagatatctcaaattgtgggacacggaaaccgggcagtgtatttctcggttcacaaaccgcaaagtgccatattgcgtaaagtttaatccagacgaagacaagcaaaatttgttcgtggctggaatgtctgataagaagatcgttcaatgggacatccggagtggcgaaatcgtccaagagtacgaccggcatttaggagcagtgaataccatcgtttttgtagatgagaatcggagatttgtatcgacaagcgacgacaaatccttacgggtgtgggaatgggatatccctgtagactttaagtacatcgccgagcctagcatgcatagcatgcccgctgtcaccctgtctcccaatggaaagtggcttgcctgccagtcaatggacaatcagatcctgatctttggggcccagaaccgctttcggctcaataagaagaagatattcaagggccacatggtggccggatatgcatgccaagtcgacttctcgccagatatgtcttacgtcatcagcggcgatggaaatggcaagctcaatatctgggactggaaaaccacaaagctctatagcaggttcaaggcccatgacaaggtctgcatcggggccgtgtggcatccacacgaaacaagtaaggtgattacatgtggctgggacggtctgatcaagctgtgggactag

SEQ ID NO: 182375 - DNA, 1620 bp, synthetic construct
  misc_feature 1..1620: note = Description of Artificial Sequence: Synthetic coding sequence
  source 1..1620: mol_type = other DNA
atgagcgccgccatcgccgccctggccgccagctacggcagcggctctgggtccgagtcagacagcgattccgagtcttcccgttgccctcttcccgccgccgacagcctgatgcacttgaccaaatcccctagctctaaaccatccttagctgtggccgtggatagcgcacccgaggtggccgtgaaagaagatttggaaactggagtgcatttagaccccgcagtgaaggaggtgcagtataaccccacctacgagacaatgttcgctcccgaatttgggcctgagaatccgttcaggacgcagcagatggccgcacctagaaacatgctgtcagggtatgccgaaccagcccacatcaacgacttcatgtttgaacagcagcgtagaaccttcgccacctatggctatgcgttggatcccagtttagataatcaccaagtgtctgccaagtatattgggagtgtggaggaagccgagaaaaatcagggcctcactgtgtttgaaactggtcagaaaaagacagagaaacgaaaaaagttcaaggagaacgacgcctccaatattgacgggttcctgggtccttgggcaaagtacgtggatgagaaggacgtggccaagccgtccgaggaggaacagaaggagctcgacgaaataactgcgaagcgtcagaagaaggggaagcaggaggaagagaagccaggggaggagaagaccatactccacgtcaaagagatgtacgattaccagggtagatcttacctgcacattccacaagacgtgggcgtgaatctccgctccacgatgccacctgaaaagtgctatctgccgaagaaacagatccatgtctggtccggccacaccaagggggtcagcgccgtgaggctgtttcccctttctggccacttgctgctgagctgctcaatggactgcaagatcaaactctgggaggtgtacggagaaagaaggtgtctgagaacttttataggccacagtaaggccgttcgcgatatctgtttcaacactgcgggtacacagtttctgagtgccgcctacgaccgctacctcaaactgtgggacaccgaaaccggccagtgtatcagccgcttcacaaatcggaaagtgccttactgtgtgaagtttaacccagacgaagataagcagaacctcttcgttgctggaatgagcgacaaaaaaatcgtgcagtgggacattcgctccggagagattgtgcaggagtatgatagacatctcggggctgtgaatactattgtgtttgtggacgagaataggcgatttgtgagtactagcgacgacaaatcgcttagagtctgggagtgggacatacccgtggattttaagtacatcgcagagccctctatgcacagcatgcccgccgtgaccctcagcccaaacggcaaatggctagcttgccaatcaatggataaccagattctgatcttcggtgctcaaaaccgatttaggctaaacaaaaagaaaattttcaaaggccatatggttgccggctacgcctgtcaagtggatttcagtcccgacatgagggtgccccagtcttttcagaacctcaaggaagtcacggcaggacctcaggaggggtag

SEQ ID NO: 182376 - DNA, 378 bp, synthetic construct
  misc_feature 1..378: note = Description of Artificial Sequence: Synthetic coding sequence
  source 1..378: mol_type = other DNA
tgaaacatgctgagcggctacgccgagcccgcccacatcaacgactttatgtttgagcagcagcgtagaacattcgcaacctacggctacgccctggatcccagtctggacaaccatcaggtgagtgccaaatacattggatccgtcgaagaggcagagaaaaatcaagggctgaccgtgtttgagaccgggcagaagaagactgaaaagcgaaaaaaatttaaagagaatgacgccagtaatatcgacggttttctgggcccttgggcaaagtacgtggacgagaaagatgtggccaagcccagcgaggtgagctttgatgtgttcaactgccagtttcgctatacattgtatctctacgaaggctacctccattag

SEQ ID NO: 182377 - DNA, 495 bp, synthetic construct
  misc_feature 1..495: note = Description of Artificial Sequence: Synthetic coding sequence
  source 1..495: mol_type = other DNA
atgagcgccgccatcgccgccctggccgccagctacggcagcggctctgggtccgagagtgactcagattcagaatcctctcgctgccctcttcctgcagctgattctttgatgcacctcactaaaagtccatccagcaagcccagcttggccgtggccgtggacagtgcccccgaggtggccgtgaaagaagacctcgaaacaggagtgcacctggaccctgctgtgaaagaagtgcagtataatcccacctacgaaaccatgtttgctccggagtttggaccagagaatccctttcgcacacagcagatggccgctcctcgtaatatgctctctgggtatgccgagcctgctcatattaacgatttcatgttcgaacagcagcgtcggacctttgcaacatacggctacgccttagaccctagtttagacaatcaccaggtctcggcaaagtacattgggtctgtagaagaagcagaaaaaatcaaggtctag

SEQ ID NO: 182378 - DNA, 213 bp, synthetic construct
  misc_feature 1..213: note = Description of Artificial Sequence: Synthetic coding sequence
  source 1..213: mol_type = other DNA
atggccgccccccggaacatgctgagcggctacgccgagcccgcccatatcaacgacttcatgttcgagcagcagcgtagaacattcgctacttacggctatgcgctcgacccgtctttagataaccaccaagtgtcggccaaatacattgggtctgtggaagaggccgagaagaaccaaggcctgactgtattcgagaccggacagaagtag

SEQ ID NO: 182379 - DNA, 1305 bp, synthetic construct
  misc_feature 1..1305: note = Description of Artificial Sequence: Synthetic coding sequence
  source 1..1305: mol_type = other DNA
atgagcatcctgaagatccacgcccgggagatcttcgacagccggggcaaccccactgttgaagttgacttgttcactagtaagggcctgttccgagccgccgttccttcaggggcaagtacaggtatctatgaagccctggaacttagggacaacgataagacaagatacatgggcaagggcgtttcgaaagctgtcgaacacataaataaaacaattgctcctgcacttgtgtcaaagaagctcaatgttaccgagcaggagaaaattgacaaactgatgattgagatggatggtaccgagaacaaaagtaagtttggcgcaaatgcgatccttggtgtttcacttgcagtttgcaaagccggggctgtggagaaaggggtccccttgtacaggcacatcgcagacctggccgggaactctgaagtcatcctgcctgtacccgcttttaatgtgattaatggagggagccacgcaggcaacaaattggcgatgcaggaatttatgattcttccagtgggagcagcaaattttagagaggcaatgcggatcggcgctgaagtgtaccacaatctgaagaatgtcataaaagagaaatacggcaaagatgccacaaacgttggagacgaaggagggttcgctcctaatattttggagaacaaggagggcctcgaattacttaagacggctataggcaaggcaggatataccgacaaagttgtcatcggtatggacgtagcagcttcagagttcttcaggtcagggaaatacgacctcgatttcaagtctccagacgatccatcccggtacatctcgcctgaccagctggccgatctatacaagtccttcattaaggattaccccgtggtttcaattgaggacccttttgatcaagacgactggggcgcttggcaaaaattcactgcgtctgccgggatccaggtggttggggacgacctcacagtgaccaaccctaagcggatcgcaaaggccgttaatgagaagtcatgcaattgtctcttattgaaggtcaatcagattggatcagtaactgagagccttcaggcgtgtaaactggcccaggctaacggttggggggtgatggtgagccatagatctggcgaaaccgaggacaccttcatagcagacttagtagtcggcttgtgcaccggccagattaaaacaggggccccctgtcggagtgaacgtttagccaaatacaatcagttactcagaatcgaggaggaactgggttcaaaggccaaatttgccggacgaaactttcgcaatcctctcgccaagtag

SEQ ID NO: 182380 - DNA, 360 bp, synthetic construct
  misc_feature 1..360: note = Description of Artificial Sequence: Synthetic coding sequence
  source 1..360: mol_type = other DNA
atgcggaagaccgccagcagctgccccgccagcctgacctgcgactgttatgccaccgataaggtctgctccatttgtctgagcagaagacaacaagtcgctccaagggccggaacccctggctttcgagcccccgaggtccttaccaaatgccctaatcagaccactggcaagagcatcttatgctcaaaagaagtacctgcccaggacctgagaaaactgtgcgaacggttgagaggcatggactctagcaccccaaaactgacctccgatatccaaggtcacgcaagtcaccaacccgccatcagcgagaaaactgaccacaaggctagttgtctcgtgcagacgccacctggctag

SEQ ID NO: 182381 - DNA, 474 bp, synthetic construct
  misc_feature 1..474: note = Description of Artificial Sequence: Synthetic coding sequence
  source 1..474: mol_type = other DNA
atggaggccagcctgggcatccagatggacgagcccatggccttctcaccccagagagacaggttccaggccgaaggttctctgaaaaaaaatgagcagaactttaaactggccggggtgaagaaggatattgagaagttgtatgaagccgtgccccagctcagcaatgtttttaaaattgaagataaaataggggaaggcaccttttcgtccgtttacctggctactgcccaactccaggttgggcccgaagagaaaatcgctctgaaacatttaataccgacttcccaccctattcgcatagccgctgaactccagtgtttgactgtggctgggggacaggataatgtcatgggagtgaaatattgcttccgaaagaatgaccatgtagtgattgctatgccttaccttgagcacgagagcttccttgacatcctgaatagcctctccttccaagaagttcgcgaatactag

SEQ ID NO: 182382 - DNA, 1725 bp, synthetic construct
  misc_feature 1..1725: note = Description of Artificial Sequence: Synthetic coding sequence
  source 1..1725: mol_type = other DNA
atggaggccagcctgggcatccagatggacgagcccatggccttctctcctcagcgggacagattccaggctgagggttctttgaaaaaaaacgagcaaaactttaagctggccggagtgaagaaagatatcgaaaagttgtatgaggctgtgccccagctgagtaatgtgtttaagatcgaagataaaatcggggaaggcacctttagctccgtgtacctcgcaactgctcagctgcaggtgggccccgaagaaaaaattgcactaaaacatctgattccgacctcccaccccatccgcatagccgccgaactccagtgccttactgtggccgggggccaagacaatgtcatgggggtcaagtactgttttcggaaaaatgaccatgtcgtgatcgccatgccatatctggaacacgaatcattcttggatatactaaactcattgagttttcaagaggtgcgcgaatacatgctcaatttgtttaaggcactgaagcggatacaccagttcggtattgttcacagggacgtgaagccaagcaacttcctttacaaccgcagactaaagaagtacgccttggtcgacttcggccttgctcaggggacacatgacacaaagatcgaactccttaaatttgtgcagtccgaagctcaacaggagagatgcagccaaaacaagtcccatataattacaggcaacaagattccactgtcaggccctgtgcctaaggagttagatcaacagtcgaccactaaagcaagtgtgaagaggccatacaccaatgcccagattcagatcaagcagggaaaggatgggaaagaaggatctgtcggcctgtccgtgcagcgctccgtcttcggagaacgcaactttaacatacactcctccatatcccatgagtcccccgcagtgaagctgatgaagcagtctaagacagtcgatgttctctcccggaagctggctaccaagaagaaggcaataagtaccaaggtgatgaattctgccgtcatgcggaagaccgcgagcagttgtcctgccagccttacttgcgattgttacgccacagacaaagtgtgttctatctgtctctcacggcggcagcaagttgcaccaagagcgggcactcccggatttcgagctcccgaggtgttaacgaagtgccctaatcagacgaccgcaatcgatatgtggtccgccggcgtcatctttctcagtctgctgagcggtcgctaccctttctacaaggccagcgatgacctcacagcgctggcccaaattatgactatcaggggatcgagggagacgatccaggcagcaaagaccttcggcaaatcaattctgtgcagcaaagaggttccagcgcaggacctgcgaaagctgtgcgagcgtctcaggggaatggacagctccactccaaaactgacttcagatatacagggtcacgcaagccaccaacccgccatcagcgaaaaaaccgatcacaaggccagctgcttggtgcaaacccctcccggccagtatagcggtaactcttttaaaaaaggcgatagtaactcttgcgagcattgcttcgacgaatataacacaaacctcgagggctggaatgaggtgccagacgaagcctatgatctgctggacaaacttctggatctgaaccccgcctcccgtattaccgctgaagaggccctcttgcaccccttctttaaagatatgagtctttag

SEQ ID NO: 182383 - DNA, 1641 bp, synthetic construct
  misc_feature 1..1641: note = Description of Artificial Sequence: Synthetic coding sequence
  source 1..1641: mol_type = other DNA
atggaggccagcctgggcatccagatggacgagcccatggccttcagcccccagagagaccgcttccaggccgaaggaagcctcaaaaagaacgagcagaatttcaaattagcaggtacattttcatcagtctacctggccaccgcacaactccaggttggtccggaggagaagattgctctgaaacatctcattcctacctcacaccccattcgcatcgccgctgagctccagtgcctgaccgtagcgggagggcaggacaacgtaatgggggtgaagtactgctttaggaaaaatgaccatgtcgtgattgcaatgccctatctcgaacacgagtcctttctggatatattaaactccctgtctttccaggaagttcgcgaatatatgctgaacctgtttaaggcattgaagaggattcaccagttcggaatcgttcacagggatgtgaagccaagcaacttcctgtacaatagaaggttaaaaaagtatgctttagtggatttcggactagcccagggaactcacgatacaaaaatcgagctgttgaagtttgtgcagagtgaggcgcagcaggaacggtgttcccagaacaagtctcacattattaccggaaataagatccctcttagtggacccgtccccaaggagcttgaccagcaaagcaccacaaaggcgagtgtcaagcgcccctacacaaatgcccagatacagataaagcagggcaaagacggaaaagaaggaagcgtgggactgtctgtgcaaagaagtgtttttggagagcgtaatttcaatatccatagttccatcagccatgagtcgccggccgtgaagcttatgaagcagagtaagaccgtggacgtactgtcacggaaactggccacaaaaaaaaaggcgataagcacaaaggtgatgaatagcgccgtgatgcgaaagaccgcaagctcatgtcctgccagcctcacgtgcgactgctatgccaccgacaaggtgtgctcaatttgtctatccaggcgtcagcaggtggcccctcgcgctgggacgcccgggttcagggccccggaggtgttaaccaagtgccccaatcagacgaccgccatcgacatgtggtccgcgggagtaattttccttagtttgctcagcggcaggtaccctttctacaaggcaagcgacgacttaaccgccctcgcccagattatgaccatcagggggtctagagagactatacaggccgcgaaaacctttggtaagtcaatcctgtgttctaaggaggtgccagcccaagacttgcgaaagctgtgcgaacgtttaaggggcatggactcaagcaccccaaagcttacgtccgacatccaaggacacgcgtcgcatcagccggccattagtgaaaaaaccgatcacaaagcctcttgcctcgtgcagacaccccccggacagtactctgggaactcatttaagaagggcgactctaactcttgtgagcattgttttgatgagtacaacaccaatctggaggggtggaacgaggtgcctgacgaggcttacgacctactggataaactgttggacctgaacccagcctctagaattacagccgaagaagcactcctccaccccttctttaaggatatgtctttgtag

SEQ ID NO: 182384 - DNA, 3453 bp, synthetic construct
  misc_feature 1..3453: note = Description of Artificial Sequence: Synthetic coding sequence
  source 1..3453: mol_type = other DNA
atggcccagttcggcggccagaagaaccccccctgggccacccagtttacagccaccgccgttagccagcccgctgccttgggtgtccaacaaccttcccttctcggcgccagccctactatctacactcagcagactgccctggccgcggccggcctcactacacaaactcctgccaattatcagctgacccagacagctgccctgcagcagcaagccgccgctgccgccgccgccctgcagcagcaatatagtcaaccccaacaggctctgtactctgtgcagcaacagcttcagcagcctcagcaaacgctccttacccagcctgccgttgccctgcccacttcattatctcttagcactccgcagccaacagcccagattaccgtgtcttatcctaccccgcgatcgtcccaacagcagacccagcctcagaaacagcgagtgttcaccggagtcgtcacaaagctccacgatacttttggattcgtggatgaagatgtattcttccagttgtccgcggtgaaaggaaagacgccccaagtcggcgatagagtcctcgtagaggccacatacaacccgaatatgccctttaaatggaacgcccagcggatacaaactctgccgaaccaaaaccagagtcaaacccaacctctgctcaagacacccccggccgtcttgcagcctattgcaccacaaacaacctttggtgtgcagactcaacctcagccgcaatcactattgcaagcccagatctcagctgcctccattacgcctctgctccagacccagccccagcctctgcttcagcaaccacagcagaaagccggtctgctgcagcccccggttcggattgtttcccagccccagcctgcaaggcgcttggatcctccctctaggttttcaggccggaatgatcgcggggatcaggtccccaacaggaaggatgaccgttctcgagagagggaaagagagaggaggagaagtcgggaacgctctccacagcgaaagagatcccgggagagatcacccaggagagagagggagaggtcaccccgccgggtgaggcgggttgtcccccggtacaccgttcagttcagcaagttttcactcgattgcccttcttgcgatatgatggagctgagaagaaggtaccagaatctctacattccttcagattttttcgacgcacagttcacatgggttgatgccttcccgctgagccggccatttcaactcggcaactactgtaacttctatgtgatgcaccgcgaagtggaatcactggaaaagaatatggccatcctggatcccccagacgccgatcacctctatagtgccaaggtaatgttgatggcctcgccatcaatggaagatctctaccacaagagctgcgcgctggcggaggacccacaagagctcagagacggatttcagcatccggccagactggttaagtttctcgtgggaatgaaaggcaaagatgaagctatggcgatcggtgggcattggtccccatctctcgacgggccagatcccgaaaaggaccctagcgttctaattaagacggcgatccgctgttgcaaagcgctgactggtatcgacttgtctgtgtgcactcagtggtaccggtttgccgaaattcgataccataggccagaggaaactcataaggggaggaccgttccggcgcatgtggagactgtagttctgttttttccagatgtgtggcactgcttaccaacacgcagcgaatgggagaccctgtcccggggatataaacagcagctggtggaaaaactgcagggtgaaaggaaagaagctgacggggagcaggacgaagaggagaaagatgacggtgaagcaaaagaaatttccacgcctactcattggtcgaaactggatcctaaaaccatgaaggtgaatgatctgcgcaaagagcttgaaagtcgggctctgagcagtaaaggattgaagagtcagcttattgcacgattgactaaacagctcaaggtggaggagcagaaggaggagcagaaggagctcgagaagagcgagaaggaagaagacgaagatgacgaccggaagtccgaggacgacaaggaagaggaagagcggaaaaggcaggaagagatcgagcgacaacgcagggaacgacgttatatcctgcccgatgagccagcaattattgtacaccctaattgggcagctaagtctgggaagttcgattgtagcattatgtctcttagcgtgctgctagattaccggttggaggacaacaaagagcatagcttcgaggtaagtctgttcgcagaattgtttaacgaaatgctgcaacgagacttcggcgtacgtatctacaaatcattgctatctctgcctgagaaagaggataagaaggagaaggataagaaatctaaaaaagacgaaagaaaggataaaaaagaggaacgagacgacgagactgacgagcccaaaccgaagaggcgcaagtctggggacgataaggataaaaaggaggatcgtgacgaacgtaagaaggaggataagagaaaagatgactcaaaggatgatgatgaaaccgaggaggataacaatcaggatgagtacgatcccatggaggcagaagaggccgaggatgaagaggatgatcgggatgaagaggagatgactaaaagggacgataagcgggacataaatcggtactgcaaggagcggcctagcaaagataaggagaaggagaaaacacaaatgataactattaaccgggatctgctcatggcattcgtgtactttgatcaaagtcactgtggctatctgttggaaaaggatctggaagagattctctatactctggggttacatcttagtcgggcccaggtcaaaaaactgctaaacaaagtggtgctgcgcgagtcttgcttttacagaaagctaacagatacatccaaggacgaagaaaatcatgaggagtccgaaagcttacaggaggatatgctgggtaataggctgctattacctacccctacagtgaagcaagagtccaaagacgtggaagagaacgtggggcttattgtttacaacggtgccatggtggatgtgggttctctgcttcagaaactggaaaaatctgaaaaggtccgggctgaggtggaacagaaactccagttgcttgaggagaagactgacgaagatgaaaagacaatcctgaatctcgagaattctaacaagagcctctctggtgagctccgtgaggtcaagaaggatctatcacaacttcaggaaaatcttaagatctcagaaaacatgaacctgcagtttgagaaccagatgaataagacaattagaaacctctctactgtgatggatgagatccatacggtactgaaaaaagacaatgtgaaaaacgaggacaaggaccaaaagtctaaggaaaatggagctagtgtttag

SEQ ID NO: 182385 - DNA, 3408 bp, synthetic construct
  misc_feature 1..3408: note = Description of Artificial Sequence: Synthetic coding sequence
  source 1..3408: mol_type = other DNA
atggcccagttcggcggccagaagaaccccccctgggccacccagttcaccgcgacagccgtgtcccaaccagccgctctcggagttcagcagccctctctactcggcgcttcaccaactatctacacacagcagacagctcttgcagctgccggactgactacacagactcctgcaaattatcagctcacacaaactgcagccctacagcagcaggcagcggccgccgctgccgccctgcaacagctgcagcagcctcagcagactctgctgacacagcccgcagtcgcattgcctacttcactgtcattatccaccccacagcctacagcacagataactgtctcttatccgactccgaggtcctcacagcagcagacccaaccacaaaaacaaagggttttcaccggtgtggtgactaagctgcacgacacttttgggtttgtggatgaggacgtcttctttcagctgtctgccgtgaaggggaaaactcctcaagtaggagatcgcgtgcttgtagaggcaacctacaaccccaatatgccctttaagtggaatgctcagaggatccagactctgcctaaccagaatcaatctcagacacaacccctcctgaagacaccgccggccgtcctccaacccatcgcgccacagactacattcggagtgcagacgcagccgcagccccagagcctgcttcaggcccagatttcagccgcatcgattactccactgctccaaacacagccccagccattattgcagcaaccacagcagaaggccgggttgctgcagccaccagttagaatcgtcagtcaaccccaacctgctagacgcctggaccccccgtcaagattctctgggcggaatgataggggagatcaggtgcctaataggaaagacgatcgatcccgagaacgtgaacgtgaacggagaaggagcagagagcggtccccccaacggaagcgttcccgggaacggtccccacggcgcgagcgcgaacgatcgccccgcagagtccgaagagtggtgccgcggtatacggtgcaattcagcaagttttctctggactgcccaagctgtgatatgatggaattgaggcgaaggtatcagaacctgtacattccatccgactttttcgacgctcagtttacttgggtggacgcattcccacttagccggccttttcagctaggtaattactgcaacttttatgtaatgcaccgggaggtggaatccctagagaaaaacatggccatcctagaccccccagacgctgatcatctgtattccgcaaaggtcatgctaatggcaagcccctctatggaggatctatatcataagtcttgcgcgctcgcagaagacccccaggagcttcgcgacggatttcagcaccccgcgagactcgtcaaattccttgtgggtatgaagggcaaggatgaggccatggccattggcggtcactggtccccgagcttagatggcccggatccggagaaggatcccagtgtgctcataaagaccgccatccggtgctgtaaggctttgacaggtatcgacttgtctgtctgtacccagtggtatcggtttgctgagatccggtatcacagaccggaagaaactcacaaaggcagaacagtgcctgcccatgtcgagactgtggtgctcttcttccccgatgtctggcactgtctccccaccagatctgaatgggaaacactatcgcggggctataaacagcagctggtggaaaaacttcagggcgagcggaaagaggctgacggcgagcaggatgaagaagagaaggatgacggggaagccaaggaaataagcaccccaacccattggagcaaactggatcccaaaacaatgaaggtcaacgacctgcgtaaagagctggagtctagagctctgtcaagcaagggcttaaagagccagctgattgccaggctcactaaacagcttaaggtagaggaacagaaggaggaacaaaaggagctggagaagtccgaaaaggaggaggatgaagatgacgatcgcaagtccgaagatgataaagaagaagaggaacgaaagcgccaagaagaaatagaacggcagagaagggagcgccgctatatcttacctgatgaaccagcaattatcgttcaccctaactgggctgccaagagcgggaaattcgactgttcaattatgtccctgtcagtgctgcttgattatcggttggaggataacaaagagcatagtttcgaagtgtctctgtttgccgaactctttaatgagatgctgcaaagggactttggggttaggatctacaagagtcttctgtctctcccggaaaaggaggacaagaaagaaaaggacaagaagtctaaaaaggacgagcggaaggataagaaagaagaacgcgacgatgagacagacgagcccaagcctaaaagaagaaaatcaggcgacgacaaagacaaaaaggaagaccgcgacgagcggaagaaggaggacaagcgaaaagatgactccaaggatgacgacgagacagaagaagacaacaaccaggatgaatacgacccaatggaagcagaggaggccgaggatgaagaagatgatagagatgaagaggagatgactaaacgcgatgacaagagagacatcaatcgctactgtaaagagcgaccctccaaggataaagagaaggagaaaactcaaatgataactatcaaccgggacctactgatggcattcgtctattttgatcagtctcactgtggctacctgctcgagaaggatctggaagaaatcttatatacacttggactacatctctcccgggcacaggtgaaaaaactccttaataaggttgtgcttagagagtcatgcttttacagaaagctgaccgatacctctaaggacgaagaaaaccacgaagagagtgagtccctgcaggaggacatgctcggaaaccggctgcttcttcctacacccacagtgaaacaggaatccaaggacgtcgaggagaatgtgggtctgattgtttacaatggagccatggtggatgtgggctcactgctccaaaaactcgaaaagtccgagaaggtgcgggcagaagtagagcagaaactgcagctgctggaggagaagacagatgaggatgagaagacgattttgaaccttgagaatagtaataagtccctaagcggtgagcttagagaggttaagaaggatttgtcccaactacaggaaaacctgaaaatctccgagaatatgaatttacagtttgagaaccaaatgaataagacaatcaggaacctttccacagtgatggacgagattcatacagtgttaaaaaaggacaatgtcaagaatgaagataaagatcagaagagcaaagagaatggcgcgtctgtgtag

SEQ ID NO: 182386 - DNA, 360 bp, synthetic construct
  misc_feature 1..360: note = Description of Artificial Sequence: Synthetic coding sequence
  source 1..360: mol_type = other DNA
atggcccagttcggcggccagaagaaccccccctgggccacccagttcactgctacggccgtgagtcaaccagcagcgctgggtgtgcagcagccatcactgctcggagcaagtcccaccatctatactcagcaaacggcgctggctgctgccggcctcacaacccagactccagcgaattatcaactgacccagacagctgcacttcagcaacaagccgcagctgcggcagccgctctgcagcaacagtacagccagcctcaacaggctttatactctgtccagcagcagctgcagcaacctcagcagacactgttgacccaacctgcagtggctctgccaacaagcttgtcactctag

SEQ ID NO: 182387 - DNA, 516 bp, synthetic construct
  misc_feature 1..516: note = Description of Artificial Sequence: Synthetic coding sequence
  source 1..516: mol_type = other DNA
atggcccagttcggcggccagaagaaccccccctgggccacccagtttaccgcgaccgccgtctctcaacctgctgcacttggggtacagcagcctagcctcctgggagcttctcccactatctacacacagcagacagctcttgccgcggcaggcctaacaacccagactcccgcaaactatcagctcactcagactgccgccctccagcaacaggcagccgcagccgctgcagccttacagcaacagtactctcagccacagcaggccctatattccgtccagcagcagctccagcagccccagcagaccctgcttacccaaccagctgttgccctgcctacctccttgtccttatctacacctcagcccaccgcccagattacggtgtcataccctacaccacggtcatcccagcagcagacacagccccagaagcagcgagttttcactggggtagtgaccaaactgcacgatacctttggtttcgtcgacgaggatgtgtttttccagtag

SEQ ID NO: 182388 - DNA, 3132 bp, synthetic construct
  misc_feature 1..3132: note = Description of Artificial Sequence: Synthetic coding sequence
  source 1..3132: mol_type = other DNA
atggcccagttcggcggccagaagaaccccccctgggccacccagtttaccgccaccgctgtgtcacaacccgccgctttgggtgtgcagcagccttctcttctgggcgcatccccaacgatctacacccaacagactgccctggccgccgctggactgacaactcagacccccgcgaactatcagctgacacagaccgccgctttacagcagcaggccgcagcagccgctgcagcgcttcagcagctgcagcagccgcagcaaacactgctgacccagccagcggtcgcacttccgaccagcctgagcctttccacgcctcagccaaccgctcagattacagtgtcttatccgaccccccgatcctcccaacagcagacacaaccacaaaaacagcgggtcttcacaggagttgtaacgaaattacatgacacattcggtttcgtcgacgaggatgtcttctttcaattgtctgcagtcaagggcaaaaccccccaggtcggcgaccgtgtgctcgtcgaagctacctacaatcccaacatgccttttaaatggaacgctcagaggattcagacactacctaatcagaatcagtctcaaactcaacccctacttaagacaccacctgcagtcctgcagcctatcgcaccacagacaactttcggggtccagacccagccccagccccagtctctattacaagcgcagatctctgccgcttccattaccccattgctccagacacagcctcagccactccttcaacagcctcaacagaaagcaggcctgctgcagccacctgtgaggatcgtatctcagcctcagcctgcgaggcgtcttgatccacccagtagattttccggtaggaatgatcggggggaccaggtgcccaaccggaaagatgatcgatcgcgggaacgggagagagaacgccggcgatcccgggaacgaagcccccagagaaagcggtctagagagcgcagccctagacgagagcgcgaacggagccctcgacgtgtccggagggtggtgccacgctacacggtgcagttctctaagtttagcctagattgtccaagctgtgacatgatggaactgcgtcgaagatatcaaaatctctacattccttcggatttttttgacgcgcaattcacgtgggtggacgcctttccgttaagtagaccattccagcttggcaattactgcaatttctacgtcatgcaccgcgaagtagagagtctcgaaaagaacatggcaattcttgatccaccagatgcggatcatctgtacagcgcaaaggtcatgctcatggcctctccctctatggaagatctgtaccataaatcgtgcgctcttgccgaggacccacaggagctgagggatgggttccagcacccagctagactggtcaagttcctggtgggaatgaagggcaaggatgaggccatggctattggaggccactggtcacctagcctcgacggtccagaccctgaaaaggatccgagcgtattgatcaaaaccgctatccggtgctgtaaagcattgactggaatcgatctgagcgtgtgcacacagtggtacaggttcgctgagatccgttatcaccgaccagaagaaacacataagggtcgtaccgtccctgcacacgtggaaacagtggtgctctttttccctgatgtatggcactgcctgcctacccgaagtgaatgggaaactctgagtcgggggtataaacagcaactggtggaaaagcttcagggggagcgcaaagaagccgacggtgaacaggatgaagaagagaaggatgatggggaggcaaaagagatcagcacccctacccactggagtaaactcgatccaaaaactatgaaagtgaatgatctgagaaaggaactggagtcccgtgccctgtcctctaaggggttgaagtcccagctgatcgcgcggctgactaaacagctgaaagtggaagagcagaaagaagaacagaaggagctggagaaatctgagaaagaagaagacgaggatgatgaccgcaaaagcgaggatgacaaggaagaagaagaaaggaagaggcaggaggaaatcgaaaggcaacggcgggagcgacgctatattctacccgacgaacctgccattatcgtccatccgaactgggccgccaagtccggtaagttcgattgcagcatcatgtctctttctgtactcctggactacagactagaagataataaggaacactcttttgaggtttcactctttgccgagcttttcaacgaaatgctgcagagagactttggggtccgcatctataagagtctgctatctcttccggagaaggaggataaaaaggagaaggacaagaaatccaagaaggatgaacggaaggataagaaggaagagcgagatgacgaaacggacgaacccaaacctaaaagaaggaaatccggggacgataaggacaagaaggaggacagggacgagcggaaaaaagaggacaagcgtaaagacgacagtaaagacgacgacgagactgaagaggataacaaccaggacgaatacgaccctatggaggctgaggaagctgaagatgaagaagatgaccgtgacgaagaggaaatgaccaagcgcgacgataagagagacatcaatcgttattgtaaggagcggcctagcaaggataaagaaaaggaaaaaacacagatgatcaccatcaaccgtgatttactcatggcttttgtgtactttgatcagtcacattgcggatatctcctcgagaaagaccttgaagaaatcctgtataccctcggccttcatctcagccgggcccaggttaagaaattgctcaataaagtggtcctacgggagagctgcttttaccggaagcttacagacaccagtaaagacgaagagaaccatgaggagtctgagtctcttcaggaagacatgctaggaaacagactactgctgccaacccctacagttaaacaagagtctaaagacgtggaggaaaacgtcggactaatagtgtataacggagccatggtggacgtgggctccctgctgcagaagctagaaaagtctgaaaaagttcgcgcggaggtcgaacaaaaactgcagctgctctag

SEQ ID NO: 182389 - DNA, 726 bp, synthetic construct
  misc_feature 1..726: note = Description of Artificial Sequence: Synthetic coding sequence
  source 1..726: mol_type = other DNA
atgttcgcccggggcctgaagcggaagtgcgtgggccacgaggaggacgtggaaggggcattagcggggttgaagacagtatccagctactctttgcagaggcagtctctccttgatatgtccctggtcaagctgcagctctgccatatgctggtggagccgaatctgtgtaggtccgtgctgatagccaatacggttagacagattcaggaggagatgacacaggacggaacttggcggactgtggcgccccaggccgcggaacgagcccctcttgatcggctagtcagcactgaaattctctgccgtgctgcatggggacaggagggcgctcatcccgcacctggcctcggagatggtcatacacagggccctgtctctgatctgtgtcctgttacttccgcccaggccccccgtcatctacagtcttctgcatgggaaatggacggccctcgcgagaatagaggcagttttcacaagtctttggatcaaattttcgaaactctcgaaacaaagaatcccagctgcatggaggaactcttctccgatgttgatagtccttattacgatctcgatacagtgctgactgggatgatgggcggagcacggcctggaccttgtgaggggctcgaagggctggctcctgccacacccggcccatcctcttcttgtaagtcggacctgggggaactggaccatgtggtagagatcctggtcgagacatag

SEQ ID NO: 182390 - DNA, 726 bp, synthetic construct
  misc_feature 1..726: note = Description of Artificial Sequence: Synthetic coding sequence
  source 1..726: mol_type = other DNA
atgttcgcccggggcctgaagcggaagtgcgtgggccacgaggaggacgttgagggggcactggccggcttgaagaccgttagctcgtattcccttcagagacagtccctgctggacatgagcctggtcaagcttcagctatgccacatgctcgtggaacctaacctctgtcgtagtgtgctcatcgcaaatactgtccgacaaatacaggaggaaatgacacaagatgggacctggagaaccgtcgcaccacaggccgcagagcgcgcgcccctggacagactcgtatcgaccgaaattttgtgccgtgctgcatggggacaggagggcgctcaccccgccccagggcttggggacggccacacccaagggcccgtctccgacttgtgtccagtaaccagcgcccaggccccaaggcacctgcagagtagcgcttgggagatggatggccctcgcgagaatcggggttctttccataagagcctggatcaaattttcgaaactctcgagactaagaatccctcatgcatggaagaactcttctccgacgtcgatagcccctattatgatctagataccgtgcttacgggcatgatgggtggggctaggccaggcccctgtgagggattggaaggccttgcccctgccactccgggcccaagtagctcgtgtaagtctgacctcggagagcttgaccatgtcgtggaaattctggtggaaacttag

SEQ ID NO: 182391 - DNA, 759 bp, synthetic construct
  misc_feature 1..759: note = Description of Artificial Sequence: Synthetic coding sequence
  source 1..759: mol_type = other DNA
atgagcggccggcggacccggagcggcggcgccgcccagcggagcggaccaagagctccgagccctaccaaaccattgcgaagaagccaaaggaagtccggttccgagttaccatccattctacctgaaatttggcctaaaaccccgagcgcagctgccgtgcgaaaaccaattgtgctcaagcggattgttgcacacgctgtcgaggtgcccgcagtgcagagcccacggagatcaccgaggatatcattcttcctagaaaaggaaaacgagcccccaggcagggagttaacaaaggaagatctgttcaaaacccatagtgtgcccgctacacccactagcacccctgtcccaaaccctgaagctgaatcaagcagtaaagagggggagcttgatgctagggacctggagatgagtaagaaggtcagaaggtcttacagccggctggagacactggggtccgcttcaacttctaccccggggcggcggtcatgcttcgggtttgagggactccttggcgctgaggatctgtcaggggtgtctccagtagtctgttccaagttgacagaagtaccgcgtgtttgtgccaagccttgggctcctgacatgaccctgcctggcatttcccccccgcccgaaaagcagaagaggaagaagaagaagatgccagaaattcttaagacagagctggacgaatgggccgcagcaatgaatgccgaatttgaggcggccgagcagtttgatttgctggttgaatag

SEQ ID NO: 182392 - DNA, 216 bp, synthetic construct
  misc_feature 1..216: note = Description of Artificial Sequence: Synthetic coding sequence
  source 1..216: mol_type = other DNA
cagttcctggaccaggaggactggggcccccagcggaccagcaaggagattaggcaacttcagaatgactgcatgagactgcgagagtctttgaacaccacccaggtgcataacctggccctgggcgaaaaactccagaatctgccaaccctgctctacaagtcacttaaagaaggagcacaagcaatccaagaagaagcacaagctatacaatag

SEQ ID NO: 182393 - DNA, 1353 bp, synthetic construct
  misc_feature 1..1353: note = Description of Artificial Sequence: Synthetic coding sequence
  source 1..1353: mol_type = other DNA
atggacgcccggcgggtgccccagaaggacctgcgggtgaagaagaacctgaaaaaattcaggtatgtgaaactaatttctatggagacatctagtagcagtgatgacagctgcgactccttcgctagcgacaacttcgccaatactaaaccgaaattccggtccgacatttctgaagaactggcaaatgtgttttatgaagatagtgataacgagtctttctgtggcttctctgagtccgaagtccaggacgtgctcgaccattgcgggttcctacagaagccccggccagacgtcaccaacgagctggcaggaatctttcacgccgactctgacgatgagagtttttgtgggttcagcgaatccgaaatccaggatggaatgcggctgcagagcgtgcgggaaggttgtcgaacaagatcccagtgtagacactcagggcccctaagagtcgccatgaaattccccgcgcggtctactcgcggcgccaccaacaagaaggccgagtcacggcagccgtctgagaactctgtgacggactcaaattccgactccgaagatgagtcaggcatgaactttctcgagaagcgggcattaaatattaaacaaaataaggcgatgctagctaagctgatgtccgaacttgagagctttccaggttcatttcgagggagacacccactgccaggcagtgactcacagagtcgtaggcctaggagacgtacgttcccaggcgttgcctcacgcaggaatcccgagaggcgcgcacggccactgacaaggagccgatcgcggatcttgggaagcctcgacgctctccctatggaggaggaagaggaggaagataaatacatgttggtcagaaaaagaaagaccgtagacgggtatatgaatgaggacgatctcccaagaagccgtcgctctcgaagctccgttaccttaccccacattatacgaccagttgaggaaataactgaggaggaactagagaacgtgtgcagcaatagtagagaaaaaatttacaatcggtccttgggttctacttgccatcaatgtaggcagaaaactatcgatacgaagacgaattgccgcaacccagattgttggggtgttaggggccagttctgcggtccttgcctgcgtaataggtacggggaggaggttcgagatgccctgttggacccgaactggcactgccccccttgccgtggaatctgcaattgttctttctgcagacagcgcgacggtcgttgtgccacaggggtgctggtttatcttgcgaagtatcacggcttcgggaacgtgcatgcgtatctgaaaagcctgaaacaggaatttgaaatgcaggcttag

SEQ ID NO: 182394 - DNA, 1116 bp, synthetic construct
  misc_feature 1..1116: note = Description of Artificial Sequence: Synthetic coding sequence
  source 1..1116: mol_type = other DNA
atggacgcccggcgggtgccccagaaggacctgcgggtgaagaagaatctgaaaaagttcaggtacgttaagctgatctcaatggagaccagcagtagctcagacgacagttgcgactccttcgcatcggacaattttgctaacactagacttcagtctgtgcgagagggctgtcgtactaggtctcagtgccgccactccgggcctctgcgggttgctatgaagtttcctgcgcgctctaccaggggggccaccaataagaaggcggagagcaggcaaccatctgaaaatagtgtgaccgactcaaactctgactctgaagacgaaagtggcatgaacttcctggaaaaaagggcgctgaatataaagcagaataaggctatgctggctaagttgatgagcgagttggagagctttccgggctcatttcgtggtcggcacccactccccgggagcgactctcaatctcgaaggccccgccgacgcacctttcccggagtggcaagcaggcgcaaccccgagcgccgggcccgacctctaaccagatccaggtctcgaatactgggctccctggacgcccttcctatggaggaagaagaggaagaggacaaatatatgctggtgagaaaaaggaagaccgtggatggctacatgaatgaggacgatcttcctagaagtcgcagaagtagatcctccgttacactcccccacatcattcggccagtcgaagagataacagaggaggaactggagaacgtttgtagcaatagcagagagaaaatttacaatcggtcactaggaagtacctgtcaccagtgtaggcagaagacaatagatacgaaaactaattgcagaaaccccgattgctggggtgttcgggggcagttctgtgggccctgcctgagaaaccggtacggtgaggaggttagagatgctctgttagatcccaattggcactgcccaccctgccggggaatctgcaattgcagcttctgcagacagagagacggacggtgtgcaacaggagtcctagtgtatctggccaagtatcacggcttcggaaatgttcatgcatatctcaagtccctgaagcaggagttcgagatgcaggcttag

SEQ ID NO: 182395 - DNA, 966 bp, synthetic construct
  misc_feature 1..966: note = Description of Artificial Sequence: Synthetic coding sequence
  source 1..966: mol_type = other DNA
atggacgcccggcgggtgccccagaaggacctgcgggtgaagaagaatctgaaaaagtttcgatatgtcaagctcatcagcatggagacctcctcatctagcgacgattcctgcgactccttcgcctccgataattttgccaacacacggctgcagagcgttagggaggggtgtaggactcgctcacagtgtagacactccgggcccctccgcgtggctatgaaatttccggccagatctaccagaggcgcaaccaataagaaggccgagagcagacagccctccgaaaattctgtgactgactctaatagcgatagcgaagacgaatccggcatgaatttccttgagaagcgcgcactgaacataaagcagaacaaggccatgctagcaaagttaatgagtgaactggaatcctttccaggatcttttcgcggccggcatcccctgcctgggtccgacagtcagtctcggcggcctagacggaggacctttccaggggtggctagccggcgcaatcccgagcgtcgggcccgcccactcaccaggtcgaggtctcggatcctgggctctctcgacgcgctgcctatggaagaggaggaagaggaggataaatatatgttggtgagaaagaggaagaccgtggatggctatatgaacgaggatgacttgccacgttctaggaggtcgcgcagcagcgttacccttcctcacattattagaccagtggaagagattacagaggaggaacttgagaacgtatgtagcaattcaagggaaaagatctataatcgctctcttaactggcactgtccaccatgtcgagggatctgcaattgtagcttctgtaggcaacgagatggtcggtgcgcaactggtgtcctcgtgtacctggccaaataccacggtttcggaaatgtccatgcgtatctcaaatccctcaaacaggaattcgaaatgcaagcgtag

SEQ ID NO: 182396 - DNA, 1263 bp, synthetic construct
  misc_feature 1..1263: note = Description of Artificial Sequence: Synthetic coding sequence
  source 1..1263: mol_type = other DNA
atggagaccctgagcagcgaggagagctgcgacagcttcgacagcctagagagcgggaaacagcaggacgtaaggtttcatagtaagtattttaccgaagaactgcgtagaatatttatcgaggacacggatagcgaaacggaagactttgctgggttcacccaatcagaccttaacggcaagacaaacccagaagttatggttgtggaaagcgacctgtcggacgacggcaaagcaagtttggtgtctgaggaagaggaagacgaagaggaagataaggccactcctcgcagatcccgatcaagacgcagctccatagggcttcgtgtggcttttcagtttcccacaaagaagctcgcgaataaacctgataagaattctagtagcgaacaacttttttcatccgcacgtttacaaaacgagaagaagacaatacttgagaggaaaaaagactgtagacaggtgattcagcgcgaggattctacaagtgaatccgaagacgattctagagatgaaagtcaggagagctcagatgccttgctgaagcggaccatgaacattaaagaaaataaagccatgctcgcccaactgttagccgagttaaacagcatgcccgattttttccccgtgaggacgcctaccagtgcctctagaaagaagaccgtgagaagagcctttagtgagggccaaattacccgtaggatgaaccccacacgaagtgccagaccgcccgaaaaattcgctcttgaaaactttacagtgtcagccgcaaagttcgctgaggaattctactctttcaggcgccgcaaaacgatcggaggaaagtgcagggagtatcggcgaagacacagaatatcctctttccggccagtggaagacatcaccgaagaagatctggaaaacgttgccatcaccgtgagggataaaatctatgataaggtcctgggcaacacgtgccaccagtgcaggcagaagaccatagatactaaaaccgtctgtcgcaaccagggctgctgtggcgtccggggccaattttgcgggccctgcctccgcaatcgctacggagaggatgtgagatcagctctgctggaccccgattgggtgtgcccgccttgtcgcggcatttgcaactgttcgtactgtagaaagcgtgacgggcgttgcgccactggcattctgatccatcttgcaaagttctatggctatgataacgtcaaggaatacctggagagcctacagaaggaactggttgaagataactag

SEQ ID NO: 182397 - DNA, 1227 bp, synthetic construct
  misc_feature 1..1227: note = Description of Artificial Sequence: Synthetic coding sequence
  source 1..1227: mol_type = other DNA
atggagctggccacccggtaccagatccccaaggaggtggccgacatttttaacgcaccatctgatgacgaggaattcgtaggcttcagggatgacgtacctatggaaacattgagcagtgaggaatcctgtgactcttttgatagtttggagtctgggaagcaggttgttgaaagcgatttgagcgatgacggaaaggcgagtctggtgtccgaagaggaagaggacgaagaggaagataaagccactcctcgacggagccgttctagaagaagctctatcgggctacgggtggcatttcaattcccaactaaaaaattagctaacaagcccgacaaaaatagttcctcggagcaactcttcagtagcgctcgactccaaaacgaaaagaaaaccattctggagcggaagaaggactgcaggcaagttatccagagggaagattccacttctgaaagcgaggatgattctagggatgagtctcaagagagctctgacgcactgcttaagaggactatgaatatcaaagaaaataaggcaatgctggcccagctcttggccgaattaaacagtatgccggatttttttcctgtgaggacacccacatcagccagccggaagaaaacagtgaggagagcgttttccgagggacagatcactcggagaatgaacccaacccgaagcgcccgaccgcccgagaagtttgccctcgagaacttcaccgtctcagcagctaaatttgcagaggagttctactcgttccggagaagaaaaaccataggggggaagtgtcgggagtataggcggaggcatcggatttcatcgttcagacccgttgaggatattactgaggaagatctcgagaatgtggcaataactgttagggacaaaatctatgacaaggtgctgggcaacacttgccatcagtgccgtcaaaagacgattgacaccaaaaccgtctgcagaaaccagggctgttgcggagtgaggggccaattttgtggcccctgcctcaggaatcgctatggggaggacgtgcggagtgcacttctggaccccgattgggtttgccctccttgtaggggaatctgtaactgtagctactgtaggaaacgtgacggcagatgtgccactgggattctgatccatctggctaaattctacgggtacgataatgttaaggagtacctggaatccttacagaaggagctggtcgaggacaattag

SEQ ID NO: 182398 - DNA, 1365 bp, synthetic construct
  misc_feature 1..1365: note = Description of Artificial Sequence: Synthetic coding sequence
  source 1..1365: mol_type = other DNA
atggagctggccacccggtaccagatccccaaggaggtggccgacatcttcaacgcaccaagcgacgatgaagaattcgtgggtttcagagacgatgtgccgatggaaacgctgagctctgaggaatcttgcgattcattcgattcccttgaatcaggtaagcagcaggatgttagattccactcaaaatatttcaccgaagaactgaggcgcatattcatagaagacactgactctgagactgaggatttcgcaggcttcacccagagcgacctgaacggtaaaaccaatcctgaagtcatggtggtggaaagcgacttgtccgatgatggaaaggccagtctcgtctccgaagaggaggaggatgaggaggaggacaaggcaacacccaggcgctcccgtagtcggcgttcctccattgggctcagagtggcatttcagttcccgacaaaaaagcttgcgaacaaacctgacaagaatagtagtagcgaacagctgttttcaagtgctagattgcagaatgagaagaagaccattctggagaggaaaaaggattgccgacaggtcattcagcgggaggattccactagcgagtctgaggatgactccagagatgagtcacaggaaagctcagatgccctgctgaaacgcacaatgaacatcaaggaaaataaggccatgctggcacagctgctagccgaactgaactccatgcctgatttctttcccgttaggacccccacctctgcttctcgaaaaaagacagtccgccgcgcgttttccgagggacagatcacacgccgcatgaatccaacgagaagcgcgaggccccctgaaaagttcgcccttgagaatttcactgtctccgctgcaaagtttgccgaggagttttactcttttcgccgcaggaagactattggaggtaagtgccgggagtatcgcagaagacaccggatatcttctttccgacctgtcgaggacatcacagaagaggacttggaaaatgtggctatcactgtccgcgataaaatatatgataaggtgttgggcaacacctgccatcagtgccgacagaagacaatcgacaccaagacagtgtgtcggaaccagggctgttgtggggttcgcgggcagttttgcggaccgtgcctgcgcaacagatacggggaggacgtgaggtccgcccttctggatcccgattgggtgtgccccccgtgtaggggcatctgtaattgcagctactgtagaaagcgggatggtcgatgcgctactggtatcctgatccatctggccaagttctacggttatgacaatgtaaaagaatatctggaaagcctgcagaaggagctcgtcgaagataattag

SEQ ID NO: 182399 - DNA, 291 bp, synthetic construct
  misc_feature 1..291: note = Description of Artificial Sequence: Synthetic coding sequence
  source 1..291: mol_type = other DNA
atggagaccctgagcagcgaggagagctgcgacagcttcgacagcctggaatctggaaagcaacaggacgtgcgcttccatagcaagtatttcacagaggaattgaggagaatttttatcgaagatacagactctgaaacagaagattttgccggtttcacccagtccgacttgaacggaaagaccaaccccgaagtgatggtggtggagagcgacttaagcgatgacggcaaggcatcgctggtgagtgaggaagaagaggacgaagaagaggataaggccacgccatag

SEQ ID NO: 182400 - DNA, 843 bp, synthetic construct
  misc_feature 1..843: note = Description of Artificial Sequence: Synthetic coding sequence
  source 1..843: mol_type = other DNA
atggccccccggaagggcagcagccgggtggccaagaccaacagcctcagacggaggaagctggcctcattcctaaaggactttgacagagaggtggaaatacgaatcaaacagattgagtcagacagacaaaatctcttaaaagaggtggataacctctataacattgagatcctacgcctgccaaaggccctccgggagatgaactggcttgactactttgctctcggtgggaataaacaggccttggaagaggccgcaactgctgatctcgacataactgagattaataagctgacggcagaagccatacagacaccgctcaagtccgctaagactcgcaaagtgattcaggtagacgagatgatcgtggaggaggaagaggaagaagagaacgaaagaaagaacctgcagaccgcccgggtgaaacgctgtcctccctccaagaagcgcactcagagcattcagggaaagggtaaagggaaaagatcctctcgtgccaacaccgtaacgcccgccgtgggcaggctcgaggtttccatggtaaaaccaactcctggcctcacacctagatttgatagcagggtgttcaaaactcccggcctccgcaccccagccgccggcgaacgcatttacaatatttctggaaacgggtcacctttggctgactcgaaagaaatcttcctaaccgtacccgtaggcggtggggaatctttaagactcctggcgagcgaccttcagcgccattcaattgcccagctcgaccccgaggccctcggtaatattaagaagctcagcaacaggcttgcccaaatctgttcatctatacgtacgcataagtag

SEQ ID NO: 182401 - DNA, 843 bp, synthetic construct
  misc_feature 1..843: note = Description of Artificial Sequence: Synthetic coding sequence
  source 1..843: mol_type = other DNA
atggccccccggaagggcagcagccgggtggccaagaccaacagcctcaggcggcgcaagctagcctcctttctcaaggacttcgatcgcgaggtggagatcagaattaagcagatagaaagtgaccgccagaatctgctcaaggaggtggataacctgtacaacatagagattctcaggcttcccaaagccctccgagagatgaactggctggattacttcgccctgggtggcaacaagcaggccttagaggaggctgccacagccgacctggatatcacggaaattaacaaactaaccgcagaagcaatacagacaccactgaaatctgcgaaaacacggaaggttatccaggttgatgaaatgatcgttgaggaggaggaggaggaagagaacgagagaaaaaacctccaaactgcccgggtcaagcgatgcccgccatcaaaaaaaagaacgcagtcaatccaggggaaggggaaaggaaaacgcagctctcgggcaaacacagtgacccccgcggtcggaagactcgaagtgtcaatggttaagcccacgccggggctcacccccaggtttgacagcagggtcttcaagacaccaggattgcggactcccgcagccggcgagaggatatataatatctccggtaacggttcaccactcgcagactccaaggagatctttctgaccgtgcctgtgggaggcggagaaagtctgcgacttttagcctccgacttgcaaagacatagtatagcccaactagaccctgaggccctgggtaacatcaagaagctgtcgaaccgccttgcccagatctgctctagcatccggacccataagtag

SEQ ID NO: 182402 - DNA, 414 bp, synthetic construct
  misc_feature 1..414: note = Description of Artificial Sequence: Synthetic coding sequence
  source 1..414: mol_type = other DNA
atgcccaacttcgccggcacctggaagatgcggagcagcgagaactttgacgagctacttaaagccctaggcgtgaacgctatgctccgaaaggtagccgtcgcggccgcatcaaaaccacacgtagaaataaggcaggatggcgatcagttctacattaaaacaagcactacagtgcggacaaccgagattaacttcaaagtaggcgaaggattcgaagaggagacagtggatgggcgcaagtgccgctctctggcaacttgggagaacgaaaacaagatccactgcacccaaaccctgcttgagggtgacggccccaaaacctactggacgagagaactggctaatgatgagttgattcttactttcggcgcagacgatgtggtttgtacgcgcatatacgttagagagtag

SEQ ID NO: 182403 - DNA, 249 bp, synthetic construct
  misc_feature 1..249: note = Description of Artificial Sequence: Synthetic coding sequence
  source 1..249: mol_type = other DNA
atgcccaacttcagcggcaactggaagatcatccggagcgagaactttgaagagttgttgaaggttctgggcgtgaacgtaatgctgagaaaaattgcggtcgccgctgccagtaaaccagcagtggagatcaaacaagagggagatactttttacatcaaaacctcaacaaccgtgagaacaaccgaaataaattttaaggtcggtgaagaatttgaggaacagaccgtggacggcaggccctgctag

SEQ ID NO: 182404 - DNA, 417 bp, synthetic construct
  misc_feature 1..417: note = Description of Artificial Sequence: Synthetic coding sequence
  source 1..417: mol_type = other DNA
atgcccaacttcagcggcaactggaagatcatccggagcgagaacttcgaggagctgctcaaagtgctgggtgtgaacgtgatgctcagaaaaatcgctgtggccgcggcctccaaacctgctgtggagattaaacaggagggtgacacattttacattaagacctcgacgacagtgagaactaccgagattaactttaaggtaggggaagagttcgaagaacagaccgtggatggacgaccatgtaaatccttagtgaaatgggaatctgaaaacaagatggtttgcgaacagaaattgttgaagggtgaaggccccaagacctcgtggacacgggagctgactaatgacggagagctgatcctgacaatgacggcagacgatgtggtttgcacccgggtttacgtgagagaatag

SEQ ID NO: 182405 - DNA, 417 bp, synthetic construct
  misc_feature 1..417: note = Description of Artificial Sequence: Synthetic coding sequence
  source 1..417: mol_type = other DNA
atgcccaacttcagcggcaactggaagatcatccggagcgagaacttcgaagaacttctcaaggtcctcggcgttaatgtgatgctgaggaagatagctgtcgccgcagcctctaagccggcagtggaaatcaaacaagagggggacactttctatatcaaaacctcaacaactgtgcggactactgagatcaactttaaggttggcgaggagttcgaagagcagacggtcgatggacgtccctgtaagagtttggtgaaatgggagtcggaaaataaaatggtgtgtgaacagaagttgttgaaaggcgaaggtccgaagactagctggacacgagagctgaccaacgacggcgagctcattctgacaatgacagccgatgacgtggtgtgcaccagggtttacgtgcgcgaatag

SEQ ID NO: 182406 - DNA, 744 bp, synthetic construct
  misc_feature 1..744: note = Description of Artificial Sequence: Synthetic coding sequence
  source 1..744: mol_type = other DNA
atgggcaccagcagcaccgacagccagcaggccggccaccggcggtgctccacatctaatacatctgctgagaacttgacatgcctttctctccccggaagtcccggcaaaaccgccccccttcccggcccagcccaggccggagcgggacagcctctcccaaaaggatgcgccgctgtcaaagccgaggtgggaataccagcacctcacacaagccaggaggtgcgcattcatattagaagactgctcagctgggcggcccccggagcttgcggccttcggtccacgccatgcgcactgccccaggccctcccacaagcacgtccttgtcctggtaggtggtttttcccgggctgctccctgcccaccggcggagctcagactatactctctctctggacctggagacattttctcaactgggcgctccagcagagagaggagaatagcggacgcgcgcgtagggttccgcctgtgcctcggaccgctcctgtgtccaaaggcgagggatctcacccgccacagaactccaatggcgagaaggtgaaaactataacacctgatgtaggattgcaccagtcactgacctctgaccctactgttgccgtgctgagagccaagcgagctccggaggcccatcctcccaggagctgcagtggatccttgacagccagggtttgccacatgggtgtgtgtcagggccaaggtgatacagaggacgggcggatgacactgatggggtag

SEQ ID NO: 182407 - DNA, 744 bp, synthetic construct
  misc_feature 1..744: note = Description of Artificial Sequence: Synthetic coding sequence
  source 1..744: mol_type = other DNA
atgggcaccagcagcaccgacagccagcaggccggccaccggcggtgctcaaccagcaacacttcggctgagaatctcacctgcctgtcactcccgggctcgccgggcaagacagctcctctgccgggaccggcccaggctggtgctggacagccactcccaaagggttgtgctgccgttaaggcagaggtggggatccccgcccctcatacgagtcaggaagtcaggatacatattcggcgtctgcttagctgggccgctcctggtgcatgcggcttgcgctctacaccatgcgcgctgccccaggccttgcctcaggcacggccctgtccaggtcggtggttctttcccggatgtagcctaccaacaggcggagcgcagactatcttatcactgtggacttggcggcactttcttaactgggccctgcaacagagagaggagaacagcggcagggcgagacgggtgccgccggtacccagaacggccccagtcagtaagggcgagggcagccatcctccccaaaactccaacggagaaaaggtgaagacaattacccccgatgtgggactccaccagtctcttacctctgatcccactgttgcggttctgagggcaaaaagagctcctgaagcacacccgcctcgctcctgttccggctcactcacagcccgtgtgtgccacatgggcgtatgccaaggtcaaggagacaccgaggatgggagaatgaccctaatgggttag

SEQ ID NO: 182408 - DNA, 4218 bp, synthetic construct
  misc_feature 1..4218: note = Description of Artificial Sequence: Synthetic coding sequence
  source 1..4218: mol_type = other DNA
atggccgcccggagcccccccagcccccaccccagcccccccgcccggcagcttggtccccgctccccacgggtggggcgtggcgcggaagtgcacgctatgcgttcagaggcttctggctttgcaggcgcagccagagaggtggttgctgacgaatcggataagatatgggtgggagaggaggggagtggtggcagacgtggccctggcggagccgcacccgctcatgcccccttacttagcgcccccatggggagccgccgcctggagggcattagtgtcgaggaagcgatggtgactcgcactcagcttctcgaagaggaactgagctcactcaaggaagaactagccctgtgtcaggctgacaaggagttcgtgtggagtctctggaagaggttgcaagtgactaacccagatcttacccaagtagtctctctagtcgtagagagagagaagcagaagtccgaagcaaaggaccggaaagtcttagaaatactgcaggttaaggatgccaagatccaggagtttgaacagagagaatccgttctgaagcaagagatcaatgatcttgtgaagcgaaaaatcgctgtcgacgaagagaatgcttttctccggaaggagttcagcgaccttgagaaaaagttcaaagataagtcacaagaaatcaaagacacaaaggaatgcgtccaaaacaaggaggagcagaaccggctggtcattaaaaatctggaagaggagaataaaaagctctcgacccgatgtactgatctgctcaatgatctggaaaagttgagaaagcaggaggcccacctgaggaaggagaagtacagtactgatgcaaagattaagacattcgaggataacctaattgaagctcggaaggaggtggaagtttctcagagcaagtataacgccctgtcattgcaactgtccaataaacagaccgaattgatccaaaaagatatggacattactctcgtaagacaagaactccaggagctacagaatttatataagcagaactcaacgcacactgctcagcaggctgagctaatccaacagctgcaggtgttgaacatggatactcagaaagtgctgagaaatcaggaggacgtccacacagccgaatctatctcctaccagaagctgtacaacgaactccatatctgtttcgagactacaaaaagtaatgaagccatgctgagacaatcagtgactaacctacaggaccagctactccagaaggagcaggagaatgcaaagttaaaagagaaactgcaggagagtcagggggctccactgccactgcctcaagagagcgaccccgattactctgctcaagtccctcacagaccttctctatcttcactggagacattgatggtgagtcagaagagcgagatagaatatcttcaggaaaagctcaagatcgcgaacgaaaaattgagcgaaaatataagtgccaataaaggtttttctagaaagtcgataatgacatctgcagagggcaagcacaaggagcctccagtaaagagaagtcgctcgctgagcccaaagagcagtttcacagatagtgaggagctccagaaattacgcaaggccgagcgtaagattgagaatctggagaaggccctgcagttgaaatctcaggaaaacgacgagctgcgcgatgctcatgagaaaaggaaggaacgcttacagatgctccagaccaactatcgtgctgtgaaggagcaactgaaacagtgggaggagggctccggtatgacagagatcaggaaaataaagcgggcagaccctcagcaacttagacaggaagatagtgacgcagtctggaatgagcttgcctatttcaaaagggagaaccaggagctcatgatccaaaagatgaatcttgaggaagaactagacgagctcaaggtgcacatctctattgataaggccgcaatccaggaactgaataggtgtgtggctgagcgtcgcgaagagcagctgtttagatctggcgaagacgatgaggtaaagaggtcaaccccggaaaaaaatggcaaagagatgcttgagcagacgctgcaaaaagtcactgagttagagaaccgcctaaagtccttcgagaaaaggtccaggaaactgaaggaaggtaacaaaaaactgatgaaggaaaacgattttcttaagagcctgcttaaacagcagcaggaggacaccgagacccgggagaaagagcttgagcagatcattaagggatccaaggatgtcgagaaggaaaacactgagcttcaggttaagatttccgaattggaaaccgaagtcacgagcttgaggcgtcaagtcgctgaagccaacgccctccggaacgaaaacgaggaactcatcaatccaatggagaaatctcaccaatctgctgacagagccaagtcagaaatggctactatgaaagtcagatctggacggtatgactgcaaaacaactatgaccaaggttaagttcaaggctgcgaaaaaaaactgttccgtcggccggcaccacacagtgctgaaccacagtattaaagtgatgagcaatgtctttgaaaacctctctaaagacggatgggaggacgtgagcgaaagctcctctgacagtgaggcccagacatcgcagaccctgggcacaattatcgttgagactagtcagaagatttccccgacggaggatggaaaggaccagaaagagtccgacccaactgaggattcacagacccagggcaaagaaatcgttcaaacatacctgaatattgatgggaaaactcccaaggactattttcatgacaaaaacgccaagaaaccaacttttcagaaaaaaaactgcaagatgcagaaaagtagccataccgctgtgcccacccgggtcaacagggagaaatacaaaaacattacagcccagaaatcaagcagtaacattattctgttacgagaaaggattatatctcttcaacaacagaattctgtgttgcagaatgctaagaagacagctgagttgtccgtgaaggagtataaggaggtgaacgaaaaactcttgcatcagcagcaggtgtccgaccagcgctttcagacatctaggcagactattaaaaaactgaatcttgacctggctggcctgcgtaaggagaaggaggacctgttaaaaaaattggaaagcagtagtgagataacctcgctggccgaagagaacagccaagtgacattcccaagaatacaggttactagccttagccctagccgaagtatggatttggagatgaaacaactgcagtataaattgaaaaacgccacaaatgaacttacgaagcagtcctctaacgtgaaaaccctcaagtttgaacttcttgcaaaagaggaacatattaaggagatgcatgagaagatctcacggatggagagggatatcaccatgaagagacatttgattgaagatctgaagtttcggcagaaagtgaacctggaaagcaacaaatcatttagcgagatgctgcaaaatctggacaagaaagtcaagacactgaccgaagagtgtagcaacaaaaaagttagtatcgattcccttaaacagagattgaacgttgccgtcaaagaaaaatcccaatacgaacagatgtaccaaaaatccaaagaggaactcgagaagaaagatctgaagctgactttgcttgtctccagaatttccgaaaccgaaagcgctatggcggagattgagaccgcagccagtaaacagcttcaggagctggcgcttcagtcggagcaagtcttagagggcgcacagaaaacgctgctcctcgccaacgaaaaggtggaagagttcaccacattcgtcaaggcactggctaaagaactgcaaaatgatgttcacgttgtgcggaggcagataagagagctaaagaagatgaaaaaaaaccgcgatgcatgcaagactagcacacataaagcacagacacttgccgcttccattctgaatataagtcgcagcgatctggaagagattctcgacaccgaggatcaggtggagattgaaaaaaccaagatcgacgctgaaaatgacaaggaatggatgctctatatccagaagttacttgagggacaatccctggccctaagtccaagattgaagtgcaacggtgctattgtcgcccaccagaaccttcggctgccggactcctctagcagcgccagtgcttcatag

SEQ ID NO: 182409 - DNA, 1176 bp, synthetic construct
  misc_feature 1..1176: note = Description of Artificial Sequence: Synthetic coding sequence
  source 1..1176: mol_type = other DNA
atggccgcccggagcccccccagcccccaccccagcccccccgcccgccagctgggtcccagatctccacgagtgggaagaggagcggaggtgcatgctatgcgttctgaagcatctggatttgccggggcagccagggaggtggttgccgacgagtctgataagatctgggtgggcgaggagggctcaggtggccggcgagggcccgggggggctgcacccgcccatgcacctctccttagcgccccaatggggagcaggaggcttgaaggaatctccgtggaggaggccatggtaacccgcacccagttgctcgaggaggaactgtctagcctaaaggaagaactggcactgtgtcaggccgataaagagttcgtgtggagtctttggaaacgcctacaggtgacaaatcccgacttaacacaggtggtttcccttgtcgttgaacgggagaaacaaaagtctgaagcaaaagaccggaaggtgcttgagatccttcaggtcaaggatgctaagattcaggagtttgagcaacgggagtcggtgctgaagcaagagatcaacgatttggtgaagaggaagattgccgtcgatgaggagaatgctttcctcaggaaagaattcagtgatctcgaaaaaaaattcaaggataaatcacaggagatcaaggatacgaaggaatgcgtgcaaaacaaggaggagcagaacaggttggtgattaagaacttggaagaggaaaataaaaagctgtcaacaagatgtactgacctcttgaacgatctcgagaaactgcggaagcaggaggcgcaccttcgcaaggaaaagtactccacagacgcgaaaattaagacatttgaggataacctcatcgaagcccggaaggaagttgaagtcagtcagagcaagtacaacgccttgagtctgcagctcagcaacaagcagacggagctcatccagaaggacatggatatcactctggtgagaaaagagctccaggaactgcaaaatctgtacaaacagaactcaacccatacagctcagcaggcagagcttattcaacaactgcaggtgctgaacatggacactcaaaaggtgttgcgaaaccaggaggacgtccatactgccgaaagcatttcctaccagaaagtctgcttttattccgtgattaaaatgtag

SEQ ID NO: 182410 - DNA, 4221 bp, synthetic construct
  misc_feature 1..4221: note = Description of Artificial Sequence: Synthetic coding sequence
  source 1..4221: mol_type = other DNA
atggccgcccggagcccccccagcccccaccccagcccccccgcccgccaactcggccctcgaagtccacgcgtcggccgcggcgctgaggtgcatgccatgcgttcagaggcctctggcttcgctggcgcagctcgggaagttgtggctgacgaatcggataaaatctgggtaggagaggagggatcaggagggcggcgaggacccggcggggccgcccccgcacatgcaccattactgtctgctccaatgggtagccgacgcctggaagggatcagtgtggaggaggccatggtaacgagaacacaactactggaagaggagctgtcaagcctgaaagaggagctggcattatgtcaggccgacaaggagtttgtatggtccctctggaaacgcctgcaggtgacgaatccagacctgactcaggttgtctccctggtcgtagagagagaaaaacagaaaagcgaagccaaggataggaaggtgcttgaaatcctgcaggttaaagatgccaagatacaggagtttgagcaacgggaaagcgtgttgaaacaggaaatcaacgacctggttaaacgcaagattgccgtggacgaagaaaacgctttcctgaggaaggagttttcggatctcgaaaaaaaattcaaggataagtcgcaggagattaaagacacgaaagagtgtgtgcagaacaaggaggaacagaatagattagtgatcaaaaatctggaggaggaaaacaaaaagttgagtaccagatgcacagatctattgaacgatctggagaagctaaggaagcaagaggcacacctaaggaaggaaaaatactcaaccgacgccaagataaaaactttcgaagacaacctgatcgaggcccgtaaggaggtggaggtttcacagtctaagtacaacgctctctccctgcagctctccaacaaacagactgaattgatccaaaaggacatggacatcactcttgtacgaaaggagctgcaggaactccagaatctttataaacagaattccactcacaccgcccagcaggcggagcttattcagcaattgcaggtgctgaacatggatactcagaaagtcctgcgcaaccaggaggacgtccacactgccgagtcgatctcttatcagaaactgtataacgagttacatatttgctttgagactactaagtcaaacgaggcaatgctgcggcagtcggtgacaaacttacaagaccagctcttacaaaaggagcaagagaacgccaaactgaaggagaaactccaagagtcgcagggagctcccctgcctctgcctcaggaatccgatcccgattacagcgcacaggttccacatcgaccatccctgtcttcccttgagacactgatggtgtctcagaagagtgagatcgagtacctgcaagagaaactgaagatagcaaacgagaaactgagcgagaatatctccgcaaataagggtttctcccggaaaagtattatgacttccgccgaggggaagcacaaggagccacctgtaaaaagatcgcgctctctgagcccgaagtcatcatttacagattccgaagaactccagaagcttcgcaaggctgagcgtaaaatagagaacctggaaaaagccctccaactaaagagccaagagaatgacgaattgagggatgctcatgaaaaaagaaaggaacgattgcagatgctccagaccaactatcgtgctgtgaaagagcaactcaagcaatgggaggaggggtcgggtatgacggagataaggaagattaaacgggccgatccccaacagttgcgacaggaagactcagatgccgtttggaacgagctcgcctattttaaaagggaaaaccaagaactgatgattcagaagatgaacctggaggaagagttggacgagctgaaggtgcacatttcaattgacaaggctgccattcaggagctgaatcggtgcgtagccgaaagacgagaagagcagttgttccgcagtggggaggatgatgaggtgaagagaagcacaccagagaaaaatgggaaggaaatgcttgaacagaccttacagaaagtcaccgaacttgagaatcgcttaaagagtttcgagaagagatcacggaagctgaaggaaggtaacaaaaagttgatgaaggaaaacgacttcctgaagagtctcctcaagcagcaacaggaggacaccgaaacgcgcgaaaaggaattagagcagattattaaaggatccaaagatgttgagaaggagaataccgaattacaggtcaagatttcggagctggaaactgaggtgacgtctctaaggcgtcaggtggccgaagcaaacgctcttcgcaatgaaaacgaggaactcattaatcctatggagaagtcccaccaatcagcggatcgcgcaaagtccgagatggccacaatgaaagtgagatctggaaggtatgactgcaagacaactatgaccaaggtgaagtttaaagcggcaaagaagaactgctcagtgggacgccaccacactgttctgaatcatagcatcaaggtgatgtccaatgtctttgagaacctgagcaaggatggttgggaagacgtttctgagagtagcagcgatagtgaagcacagactagccagacccttggtacaataatcgttgaaacatcccaaaaaatcagcccgaccgaggatgggaaagatcagaaggagtcagatccaacagaagactcacagacccaaggcaaggaaattgttcagacctatctgaacatcgacggtaaaacacccaaggactacttccacgataaaaacgcgaaaaagccgaccttccaaaagaaaaattgtaaaatgcaaaagagcagtcacacagcggtgcccactagggtgaatcgcgagaagtataaaaatattaccgcccaaaagtcatcttctaatatcatccttctccgggaacgtatcatctcgctgcagcaacagaacagcgttctgcagaacgccaagaaaacagctgagctctctgtcaaggagtataaggaagtgaacgagaaattattgcatcagcagcaggtgagcgaccagcgctttcagacctcgcggcagaccatcaagaaactgaacttggacctggccggactgagaaaagagaaggaggacctactgaagaagttagaatcctcaagtgaaatcacatctttggctgaagagaatagccaagtgacctttcctcgcatacaggttacatctctgtctccgagcaggtctatggacttggaaatgaagcagctgcagtacaaacttaagaatgccaccaacgaattaacaaaacagtcatccaacgtcaaaactttaaagttcgagcttctcgcaaaagaggagcatattaaagagatgcacgagaagatttctcgcatggagagggatatcacaatgaaaagacacctgattgaggatctcaaattccgtcaaaaagtgaatttagagagcaacaagtcctttagcgagatgctccagaacctggacaaaaaagtaaagactctaaccgaggagtgttcaaataaaaaagtctcgattgattccctcaagcagaggctgaatgtggcggtgaaggagaagtcccagtatgaacagatgtaccagaagtctaaggaggagcttgaaaagaaagatctgaagctcaccctactcgtgagccgcatttccgaaacagagtcggcgatggcagaaatagagactgccgcttccaagcagctgcaagagctggcattacagagcgagcaggttcttgagggtgcgcagaagactctgctgctcgccaacgaaaaagtggaagagttcacaacctttgttaaagccctggccaaggagctccagaacgacgtccacgtggtaagacgccagatacgtgaattgaaaaagatgaagaagaaccgagatgcctgtaagacctctacacacaaagctcagacactggctgctagcattctgaatatctcccggagtgacctggaggagattctggataccgaggaccaagtagagatcgagaaaactaagatcgatgctgagaacgacaaggagtggatgctttatatccaaaaattgctggaaggtcaattgcctttcgcctcatatttgttggaggctgtgctggagaaaattaatgaaaaaaaaaagctcgtagaagggtatttcacgattatgaaggacatccggtag

SEQ ID NO: 182411 - DNA, 4221 bp, synthetic construct
  misc_feature 1..4221: note = Description of Artificial Sequence: Synthetic coding sequence
  source 1..4221: mol_type = other DNA
atggccgcccggagcccccccagcccccaccccagcccccccgcccggcagctaggacctagatctccgcgagtgggacgtggtgccgaggtgcacgccatgaggtccgaggcatcaggattcgccggagccgcccgtgaggtggttgcagacgagtccgacaaaatctgggtgggcgaggaagggtcaggaggccggagggggcccggaggggccgcccccgctcacgcccctctgctatctgccccaatgggctcccgaaggcttgagggcatctctgtggaggaggccatggtcacaagaacgcagctgcttgaggaagaactcagtagcctgaaggaggaactggccttatgccaagccgacaaggagtttgtttggtctttatggaaaaggctgcaggtcaccaatccagacctgactcaggtggttagcctggttgttgagcgggaaaaacaaaagtcggaggctaaggataggaaggtactcgaaattctgcaagtaaaggatgctaagatccaggagtttgaacagcgtgaatcggtcctcaaacaggaaattaacgaccttgtgaagcgcaagatagccgtcgacgaagaaaacgctttccttcgtaaagagttcagcgatctagagaaaaagttcaaggataagagccaggagataaaggacacaaaagagtgcgtgcagaacaaggaagaacagaacagactggtgatcaaaaacctggaagaggagaataagaagctcagcactaggtgcactgatttgctcaatgacctagagaaactgagaaagcaagaggctcacctcagaaaagaaaagtactccacagacgccaagatcaagacctttgaggataatttaattgaggctagaaaggaggtggaggtcagccagtctaagtataatgcattgtccttgcaactgagcaacaagcagacagagctcatccagaaagatatggatattaccttagttagacaggagctgcaggagctgcagaatctgtataaacagaattcaacacacaccgcgcagcaggccgaattaattcagcagctccaggttctcaatatggacacacagaaggttttgcggaatcaggaagacgttcatacggcggaatcaatctcataccagaagttatacaatgaactacatatctgcttcgaaaccactaagtcaaacgaggccatgctaaggcagtcagtgaccaatctccaagaccagctgttgcaaaaagaacaggagaacgcgaaactgaaggagaagctgcaagaatcacagggggcccctctgcctcttcctcaggaatccgaccccgattactccgcacaggtgcctcaccgtccctccctgagcagcctggaaactttgatggtgtcgcagaaatctgagatcgaatacctgcaggagaaactgaagattgcaaacgagaaattgagtgagaacatcagtgctaacaaagggttctcccgcaaatcaataatgacttccgccgaaggaaaacacaaggagcctcccgtaaagcggtctcgcagcctgtcacccaagtccagttttaccgattcagaagaactacagaagttgcgtaaggcggagagaaagatagaaaaccttgagaaagctctgcagctcaaatcacaggagaacgacgagctgcgggacgctcacgaaaaaaggaaggagaggctgcagatgttacaaactaactatagagccgttaaagaacagctcaagcagtgggaagaaggctcagggatgacagagataagaaagatcaagcgcgccgacccgcagcaactgcggcaagaagactctgatgcagtgtggaacgagctcgcatattttaaaagggaaaaccaggagctcatgattcagaagatgaacctcgaagaagaactcgatgagctgaaggtgcacatcagcatcgataaagccgccattcaggagttgaaccggtgtgtagctgagaggcgggaggaacagttgtttagaagcggagaggatgatgaggtgaaaaggagtacgcccgagaaaaatggaaaagagatgcttgagcagacgctgcagaaagtaaccgaactagagaatcgcttaaaaagctttgaaaagagatctcggaagctcaaggagggaaataaaaaactgatgaaagaaaatgattttctcaagtcccttctgaagcagcagcaagaagacaccgaaacccgagagaaagagttggagcagatcattaagggcagcaaggatgtggagaaggagaacaccgaactccaggtgaagattagtgaacttgaaacggaggtaacgtcacttcggcgacaggtagctgaggctaacgcactgaggaacgaaaacgaggagctgatcaacccaatggagaaatctcatcagtccgctgatcgggcaaagtcggaaatggctaccatgaaagtacgaagtggcagatacgattgtaagacaacgatgacaaaagtgaagttcaaggcagccaagaagaattgttctgtgggtcgacaccataccgttctaaatcacagtatcaaagtgatgtcgaatgtgtttgagaatctctctaaggatggttgggaggatgtgtcagaatcatcgtccgattctgaagcacaaacctcccagactttaggcactataatcgtcgagacctcacaaaaaatctcgcctactgaggatggaaaggaccaaaaggaatcggatcccacagaggattcacagacgcaggggaaagagatagtgcaaacttatctgaatattgacggcaaaacacctaaggactatttccacgacaaaaacgctaagaagcccaccttccagaaaaagaactgcaagatgcaaaagtcctctcacacagccgtgcccacgcgggtgaacagggagaagtacaagaatatcacggcccagaagtcctcctccaacattatcctactgagagagcggatcatttctcttcagcagcagaacagcgtgctgcagaacgccaagaaaaccgccgaactgtctgtgaaggagtataaggaggtgaatgagaaactactccaccagcaacaggtgtctgaccaaaggttccagactagcagacagactataaagaaattaaatctggatctagcaggactgcggaaagaaaaggaggacttacttaaaaaactggaatcgagttcagagatcaccagcctcgctgaagaaaactctcaagtcacatttcctagaatccaggtgacatctctgagtccgtcacggtccatggacctggaaatgaaacaattgcaatacaagctgaaaaacgccacgaacgagctaactaagcaaagctccaacgttaagactctgaaatttgagctgctggcaaaagaggagcatataaaggagatgcatgagaaaatctctcggatggaacgtgatatcacgatgaagcggcacctaattgaagatcttaaatttcgccagaaggtgaatctagagagtaataagtctttctctgaaatgctccagaacctcgataagaaggtgaagactttaaccgaagaatgtagcaataaaaaggtttcaattgactctctaaagcaaagattgaacgttgcagtcaaggaaaagtcacagtacgagcagatgtaccagaagagcaaggaggagctggagaaaaaggatctgaaactgacattactggtgtctcgcatctcagaaaccgaaagcgcgatggctgagatagaaacagcggcctctaaacagctgcaggaactggccctgcagtcagagcaagtcctggaaggcgctcagaaaactcttttactggccaatgagaaagttgaagaattcactacattcgtgaaagctcttgctaaggagctgcagaatgatgtacacgtagtgcgcagacaaattcgcgagctgaagaagatgaaaaaaaaccgggatgcctgcaaaacctctacacataaggcacagactctcgctgcgtccatccttaatataagcagaagcgatctggaagaaattctggacaccgaggaccaagtcgagattgagaagactaaaattgatgccgagaacgacaaggaatggatgctgtatattcagaagctgctagaaggacagctgcctttcgcaagctacctccttgaggccgtcctggagaagattaatgagaagaaaaaacttgtggaagggtacttcaccatcatgaaggacatccgatag

SEQ ID NO: 182412 - DNA, 519 bp, synthetic construct
  misc_feature 1..519: note = Description of Artificial Sequence: Synthetic coding sequence
  source 1..519: mol_type = other DNA
atggccagcggcttcaagaagcccagcgccgccagcaccggccagaaaagaaaggtggccccaaaacccgaactcaccgaggatcagaaacaggaggtgagagaggctttcgacctctttgatgtggatggctccggtacaattgatgcaaaggaactcaaggtggctatgagggctctgggttttgaacctcgcaaggaggaaatgaagaagatgattagcgaggtcgaccgagaaggcaccggaaaaatctcttttaacgactttctggcagtgatgacccagaaaatgtcagaaaaggatactaaggaggaaatcctaaaggctttccgtctgttcgatgacgatgaaactggcaaaataagcttcaagaacctgaaaagagtggcgaatgagttgggcgagaacctgaccgacgaagaactgcaggagatgattgacgaagcagaccgggacggagacggcgaagttaatgaagaagagttcctgcgcatcatgaagaaaacctccctttattag

SEQ ID NO: 182413 - DNA, 519 bp, synthetic construct
  misc_feature 1..519: note = Description of Artificial Sequence: Synthetic coding sequence
  source 1..519: mol_type = other DNA
atggccagcaacttcaagaaggccaacatggccagcagcagccagcgcaagagaatgtcacctaagcccgaactgactgaagagcaaaagcaggaaattcgagaggctttcgatctgtttgacgcagacgggactggtaccattgacgtcaaagagctcaaggtggctatgcgagccctgggctttgaacctaaaaaggaagagattaagaagatgataagtgagatagataaggagggcacaggcaagatgaattttggagattttctgaccgtgatgacacagaagatgtctgagaaggacactaaagaagagatccttaaggcttttaaactgttcgatgatgatgagaccggtaaaatctcctttaaaaacctgaagcgtgttgcaaaggagctgggtgagaacctaacagacgaagagctacaggaaatgatagacgaggccgaccgcgatggagatggagaagtgtcagaacaggagtttttgcgaataatgaaaaaaacttcactgtactag

SEQ ID NO: 182414 - DNA, 378 bp, synthetic construct
  misc_feature 1..378: note = Description of Artificial Sequence: Synthetic coding sequence
  source 1..378: mol_type = other DNA
atggccatgcaggccgccaagcgggccaacatccggctgccccccgaagtcaatcggatcctgtatatcagaaacctgccctacaagataacagccgaggagatgtacgacatctttgggaaatacggccctatcagacagatccgggttggtaacacacccgagacacgggggaccgcctatgtcgtttacgaagatatcttcgacgccaaaaacgcttgcgatcatctgagcggtttcaatgtgtgcaatcgctatctggtggtcctctattataatgcgaacagagcgttccagaagatggacacgaagaaaaaagaggagcagctgaagctgctgaaagaaaaatatggcatcaacaccgaccctcccaagtag

SEQ ID NO: 182415 - DNA, 423 bp, synthetic construct
  misc_feature 1..423: note = Description of Artificial Sequence: Synthetic coding sequence
  source 1..423: mol_type = other DNA
atgggcccccggcggcggagccggaagcccgaggccccccggcggcgcagccctagtcctacccctacccccgggcctagccggcgtgggccatctctgggcgcaagcagtcaccagcacagtcgaaggagacaggggtggctgaaggaaatccgcaagctccagaaatccacccacttactgataagaaagctccctttttcaaggctggcaagagagatctgcgtaaaattcacccgcggtgtggacttcaattggcaggcacaagcccttttagccctgcaagaagccgctgaagccttcttggttcacctgtttgaggatgcttatctcttgactttgcatgctggtcgcgtgacactgtttccaaaggacgtgcagctagccagacggattagaggcctcgaagagggcctggggtag

SEQ ID NO: 182416 - DNA, 1800 bp, synthetic construct
  misc_feature 1..1800: note = Description of Artificial Sequence: Synthetic coding sequence
  source 1..1800: mol_type = other DNA
atgggccccaagcggcggcagctgaccttccgggagaagagccggattattcaggaagtggaagaaaacccagatcttcggaaaggtgaaattgccaggcggttcaacatccctccgagtactctgagtaccattctgaaaaataagcgcgctattcttgccagtgaacgaaagtacggggtggcctctacatgtaggaaaacaaataaactgtccccgtacgacaaacttgaaggcctgctgattgcctggtttcagcagataagggctgccggtttaccagttaaagggatcattctgaaagagaaggctctgcggatcgctgaggagttggggatggacgattttaccgcctcaaatgggtggctagaccgctttcgaaggagacacggcgtagtgtcatgttctggcgtagcgcgtgctcgggcacgaaatgcggcgcctagaactccagctgcaccggctagtccagctgccgtgccaagtgaggggtcagggggctcaacaacggggtggagggcacgagaggagcagcctcctagtgttgcagagggatatgcatcccaggacgtcttctccgcgacggaaaccagtttatggtatgatttcttaccagatcaggccgccggtttgtgtggcggggatggaaggccgagacaggccactcagcgtctctctgtactactatgtgccaatgcggacggaagcgagaagctgccccctctggttgcagggaaaagtgcgaaaccaagagccggacaggcaggactcccctgcgactatactgcgaactccaaaggaggggtcacgacgcaagccctcgctaagtacctgaaagcactcgacactaggatggctgcagaatctagaagggtgcttctactagctggacgactggccgctcagtcactggacacaagtggcttgcgacatgtgcaattggcgttcttcccgcctgggaccgttcaccctctggagaggggcgtggtccagcaggtgaaaggccactaccggcaggcaatgctgctgaaagcaatggccgccctagaaggacaggatccctcaggactccagcttggcctgacagaggcattacattttgtggccgccgcatggcaggccgttgagccaagcgacatagccgcctgtttcagagaagcaggctttggcggtggccctaacgccactataaccaccagcctgaaatccgaaggggaagaagaagaggaggaggaggaggaagaggaggaggaggagggcgaaggagaggaagaggaagaggaaggggaagaagaggaggaagagggcggcgagggggaggagcttggagaagaggaggaggtggaggaagaaggcgatgtcgacagcgatgaagaggaggaggaggacgaagagagctcttccgaaggcctggaggctgaagattgggctcagggagttgtagaagcaggagggagctttggagcgtatggcgcgcaagaggaagcccaatgtcccacactccacttcctggaaggcggggaggactctgactctgatagtgaggaagaggatgatgaagaagaagatgatgaagacgaagatgatgatgatgacgaagaggacggagatgaggtgcccgttcctagcttcggcgaggccatggcttatttcgccatggtgaaaagatacctgacctcattccccatagacgatcgcgtacagtctcacattctccaccttgaacacgacctggtgcacgtaacgcgaaaaaaccatgcacggcaagccggagttcgtgggctaggccaccagtcctag

SEQ ID NO: 182417 - DNA, 417 bp, synthetic construct
  misc_feature 1..417: note = Description of Artificial Sequence: Synthetic coding sequence
  source 1..417: mol_type = other DNA
gaggacgaggagagcagcagcgagggcctggaggccgaggactgggcccagggggtggtggaggctggcggaagtttcggagcatatggagcccaggaggaggctcaatgtcccactttacacttcctggagggtggtgaagacagcgattccgactctgaggaggaggatgacgaagaggaagatgacgaagatgaagacgacgacgatgacgaggaagacggcgacgaagtgccagtgccgtcttttggagaagccatggcttactttgcaatggtcaagcgctatctgacgagttttcctatagacgaccgcgtgcaaagccatatcctgcatctcgagcacgacttagttcacgttacaaggaagaatcacgcccggcaagccggggtcagaggcttgggccatcagtcctag

SEQ ID NO: 182418 - DNA, 2832 bp, synthetic construct
  misc_feature 1..2832: note = Description of Artificial Sequence: Synthetic coding sequence
  source 1..2832: mol_type = other DNA
atggccgccagcggcctggaccacctgaagaacggctaccggcggcggttctgtaggccatcgagggcacgtgatatcaacaccgagcagggtcagaatgttctcgagattctccaagactgctttgaggaaaaatccctcgccaacgatttcagtacgaattcaactaaatccgtgccgaattccaccagaaagataaaggacacatgcatccagagcccgtcaaaggaatgtcagaaatcccaccccaagtctgtgccagtctcaagtaagaagaaggaagcgagccttcaattcgtagtcgagccaagcgaggctaccaatcggagcgttcaggcgcatgaagtgcaccagaagatcctcgccacagatgtctcctctaaaaatacaccagacagtaaaaagatttcaagtcgaaatatcaacgaccatcacagcgaggctgatgaggaattttacctgagcgtgggctctccttcagttttgctagatgctaaaacatccgtttctcagaacgtcatcccatcctctgcccagaagcgcgagacttacactttcgagaacagcgtgaatatgttgccttcctctaccgaggtgtcagtgaaaacaaagaaacgactgaactttgacgacaaggtgatgctgaaaaaaatcgagattgataacaaggtgtcagatgaggaggataaaacctccgaggggcaggagcgcaagccaagcggatcatcccagaatcggattagagactctgaatacgagattcaaaggcaagccaagaagtcatttagcacgctctttctggaaacagtaaaaaggaagtcggagtcttctcccatcgtgagacacgccgcaacggcccccccacacagttgcccgcccgacgacaccaagcttatagaggatgagtttattatagacgaatcagatcaatctttcgcatctcgttcgtggattaccatccctagaaaggccggcagccttaagcagaggacgattagtcctgccgagagcactgcactgctgcagggacgtaagtcacgcgagaaacatcataatatcctgcccaaaactctagctaacgataagcatagccataagcctcaccctgttgagacctcccagccctcggataagacggtgctagatacctcctacgcactaataggagagacagtaaataactatcgatccaccaaatatgagatgtacagtaagaacgccgagaaaccttcccgctctaagcgcactatcaaacagaagcaacgacgtaagttcatggctaaaccagctgaggaacaactggacgtggggcagtctaaagacgagaacattcacacctcccatatcacccaggatgagtttcagcggaactcagaccgcaatatggaggaacacgaagaaatggggaatgactgtgtgtcgaagaagcagatgcctcctgtgggctctaagaagagctctactcggaaagacaaagaagagtcaaaaaagaaaaggttttcaagtgaaagcaagaataagctggttcccgaggaggtgacctctactgtcacaaagtctcgcagaatttctaggagaccatctgactggtgggtggtcaagagtgaagagtctcctgtctactctaactcctcagtgcggaacgagcttcccatgcaccacaattcttcccggaaaagtactaaaaaaaccaaccaatcatccaaaaatatacgaaagaagaccatacccctgaaacgccaaaagaccgctacaaaggggaaccagagggttcagaaattcttgaacgccgagggcagcggggggatcgtcggccatgatgaaattagtcgttgttccctaagcgagccattagaatccgacgaggccgatctcgccaaaaaaaaaaacttagactgttctagatctacccgctcgagcaaaaatgaggataatatcatgaccgcgcagaatgtgcctctcaagccccagaccagcggatacacgtgcaatatcccaaccgagtccaatttagattctggagagcacaaaacgtctgtcctcgaggagagcggcccaagtagacttaacaataactatttgatgtccggtaaaaatgatgtagacgatgaggaagtccatggctcatcggacgacagcaagcagagtaaagtcatcccaaaaaatcgtatccatcacaagttggtgctgccttcaaatactccgaatgtacgccgcaccaagcgtacccgcttgaagccacttgaatactggaggggtgagcggatcgattaccaggggaggccatctggaggatttgtcattagcggtgtcctgtccccggacacaatcagttctaagagaaaggctaaagaaaacataggcaaggtgaacaagaagagcaataaaaagcgtatatgtctggacaacgacgaacgaaagaccaacctgatggtaaatctgggtattcctcttggagacccactgcagccaacaagagtcaaggacccggaaacaagggagatcattttgatggatctggtcagaccccaggatacttatcagtttttcgtgaagcatggcgagctgaaagtatataaaactctggacacaccctttttttcaacgggtaaattgattttaggacctcaggaagaaaaaggcaagcagcacgtaggacaggacatcttggtcttttacgtcaatttcggcgatctgctttgcacactccatgagaccccatatatcttgtccaccggagatagcttttatgtgccaagtgggaactactacaatatcaagaacctcaggaatgaggaatccgtactcctcttcactcagataaagcgctag

SEQ ID NO: 182419 - DNA, 8106 bp, synthetic construct
  misc_feature 1..8106: note = Description of Artificial Sequence: Synthetic coding sequence
  source 1..8106: mol_type = other DNA
atggccgaggagggcgccgtggccgtgtgcgtgcgggtgcggcccttaaatagccgagaggagtccctgggagagacggctcaagtgtattggaagacggataacaatgtgatctatcaggtagatggtagcaaaagttttaatttcgatagggtcttccacgggaatgagacaacgaaaaacgtttacgaagagattgccgctccaatcatcgatagcgcaattcagggatataatggcacaatatttgcctatggccagaccgcttctggtaaaacttatacgatgatgggatctgaagatcatctgggcgtcatccctcgcgccatccatgatatcttccagaaaattaagaagtttccggacagggagttcctcctacgagtctcttatatggagatttacaacgagaccattaccgacttactctgtggaactcaaaaaatgaaaccgctgattatcagagaggacgtgaaccgcaacgtgtacgtggccgacctgactgaagaagtggtgtatacaagtgaaatggctctaaagtggatcacaaagggggaaaaaagccggcactacggcgagacaaagatgaaccagcgctcttctaggtcccatactattttccgaatgattctcgagtctagagagaagggtgaaccctctaattgcgaggggtcagtgaaagtgagccatcttaatttggtggatctggccggcagcgagagagcggcacagaccggagctgctggggtacggctaaaagaaggctgcaatatcaaccgttccctgttcatcctgggccaggtgataaaaaagcttagcgatggacaggtgggaggtttcattaactatcgtgatagcaagctgactcgcattctacagaatagcttgggagggaacgccaagactcgcatcatttgtacaataacacccgtaagcttcgacgaaacactgacggccttgcaatttgcttccaccgctaagtatatgaaaaatacgccctacgtgaatgaggtctccacagacgaggcactgttgaaaaggtatcgaaaggagatcatggacctgaagaagcagctcgaggaagtctcgctggaaacacgcgcgcaggcgatggagaaggaccagttggctcagctgctggaggagaaagatctgcttcaaaaagtccagaacgaaaagatagagaatttgacccggatgctcgttacatcaagcagcctaaccttgcagcaggaactcaaggctaagaggaaaagaagagtcacttggtgtcttgggaaaatcaataaaatgaagaatagtaactatgctgatcaatttaacatccccacaaatatcaccacaaaaacacacaaactttccattaatctgttgcgggaaatcgacgaaagcgtgtgtagcgagagcgacgtcttcagcaacaccctggacacgctctccgaaatcgagtggaacccagccaccaagttgctaaaccaggaaaacattgaaagcgaactaaactctcttagggcagactatgacaacctcgtgttagattatgaacagctccgtactgagaaagaagagatggagctgaagctcaaggaaaagaatgacctcgatgaatttgaggcattagagcgcaagactaagaaagaccaggagatgcagctcattcacgagatctccaacttaaagaatctggtgaagcacgccgaggtgtacaatcaggacttagaaaacgaactctcatccaaggtcgaattgctgcgagaaaaggaggatcagataaagaaactgcaggagtacattgactcccagaagctggaaaatatcaagatggacttatcttactcattagaaagcatcgaggacccgaagcagatgaaacagactctctttgatgctgagaccgtagcgctcgatgcaaagcgcgaatccgccttcctgagaagtgagaacctggaactgaaagagaagatgaaagagctggccacaacttacaaacagatggagaatgacatacaattgtaccaatctcagcttgaagctaaaaagaaaatgcaggtggaccttgaaaaggaactgcagagcgctttcaatgaaatcaccaagctgactagcctcatcgacggtaaagttcctaaggatctcctttgcaatctggagcttgagggaaagatcacagatttgcagaaggaactaaacaaggaggtggaggagaacgaagctctgagagaggaggtcatattactcagcgaactcaagtcactcccctcagaagtcgagcgcctgcgcaaagaaatccaggacaagtctgaggaactgcacattatcacttccgagaaagataagttattctccgaggttgtccacaaggaaagcagggtgcaaggactgctcgaggagattggcaagactaaagacgacctggctacgactcaaagtaactataagagtacagatcaggaatttcagaattttaagacattgcatatggatttcgagcagaagtataaaatggtgttggaggaaaacgaacgaatgaaccaagagatcgttaatctgtcgaaggaagcccagaagtttgacagtagcctgggagccctgaagaccgagctgagttacaaaacacaggagctgcaagaaaagacacgggaagtgcaggagagactgaacgagatggagcagctcaaagagcaactcgaaaaccgcgattctacactgcagactgttgagcgcgagaagacgctcatcaccgaaaaactccagcagacgcttgaagaagttaaaaccctcacccaagagaaggatgacctgaagcagctccaggagtctcttcagattgagcgcgatcagctcaagtcagacattcacgatactgtcaacatgaacatagatacacaagagcagctacgcaacgcactagaatcactcaaacagcatcaagagacaattaacacgctgaaatccaagatctccgaagaggttagccgcaatcttcacatggaagaaaatactggtgagacaaaggatgagttccagcagaagatggtgggcatcgacaagaaacaagacctcgaagctaagaacactcagacattaactgcagatgttaaggacaatgagatcattgagcagcagaggaagattttttccctcatccaggaaaaaaatgaactgcagcagatgctagaaagcgttatagcagaaaaagagcagttaaagactgatctgaaggagaatatagagatgaccattgagaaccaggaggagttacggctcctgggagatgaactgaagaagcagcaggagattgtggctcaggaaaaaaaccatgcaattaaaaaagagggcgagttgtcaaggacctgtgacagactggcagaagtcgaggagaaactgaaagagaagtctcagcagctgcaggagaaacagcaacaactactcaacgtacaggaggaaatgagcgagatgcaaaaaaaaataaacgaaatcgaaaaccttaaaaatgaacttaagaataaagagctgacgttggagcatatggagacagaacggctggagttggcccagaagctaaacgagaattacgaggaagtcaagtcgatcacgaaggagcggaaagtgctcaaggagctacagaaatccttcgagactgagagagatcacctgaggggatacatccgcgagattgaagcaaccggcctgcagaccaaggaggagctcaagatcgcccacattcatctcaaggagcatcaagagacgattgacgaacttcgcaggtctgtgtctgaaaagaccgcgcagatcatcaacacacaggatctggagaaatcgcacacaaaattgcaagaagaaatcccagttctgcatgaggagcaggagctgctgccaaatgtaaaggaagtcagcgaaacccaggaaaccatgaatgagcttgaactactcaccgaacaaagtactaccaaggacagcacaactctagcaaggatcgagatggagcgcctgcggctcaacgaaaagtttcaggagtcccaggaagagattaagagtctaacaaaagaacgggacaatttgaagacaataaaagaagccctcgaggtgaaacacgatcagctgaaggaacacattcgcgagaccttagcaaagatccaggaaagtcagtcaaagcaggagcagtctcttaatatgaaggagaaagacaatgaaacaacaaagattgtgtcggaaatggagcagtttaaacccaaggattccgctctgttgcggatcgagattgagatgctgggcttatccaagcgcctccaggagtctcacgatgagatgaagtccgtggccaaagagaaagacgacctccaaagactgcaagaggtcctgcagtctgaatctgaccaactgaaggagaatataaaagaaatcgtggctaagcatctcgaaacagaggaagaactcaaggttgcccactgctgcctaaaggagcaggaagagaccattaatgagctaagggtgaatttatcagagaaagagaccgaaatttccactatccagaaacagctggaggccatcaatgataagctgcagaataaaatccaagagatatatgagaaggaggagcagttcaacattaagcaaatcagcgaagtgcaggagaaagtgaacgaactgaagcaattcaaggaacacagaaaggccaaggacagcgcattgcagtctatagaaagcaagatgctagaactgactaaccggctgcaagaaagccaggaggagattcagatcatgatcaaagagaaagaagaaatgaagcgagtgcaggaggccctgcagattgagcgtgaccagctgaaggaaaatacgaaggaaattgtcgcaaaaatgaaggagtcacaggagaaagagtaccagttcctgaaaatgactgctgttaacgagacccaggaaaagatgtgtgagattgagcacttgaaagagcagttcgaaacccagaaactaaacctggagaacatcgaaacagagaatattcggctgacccagatattgcatgagaacctcgaggaaatgcgctccgttactaaagagagagacgatttgcgctcagtagaggaaaccctgaaagtggaaagggatcagttgaaggagaatcttagggagacaatcacccgcgatctcgaaaagcaggaggagctgaaaatcgtgcatatgcacttgaaagaacatcaggaaacaattgataagttacggggcatcgtaagcgagaagacaaatgaaatttctaacatgcagaaagacctggagcatagcaatgatgctctgaaagctcaggatctgaaaatccaagaagaactcaggatcgctcacatgcacttaaaagaacagcaagaaaccattgacaagctgcgtggcattgtgtccgaaaagacagacaaactaagtaatatgcagaaggacttggaaaactccaacgccaagctccaagagaaaatccaagagctgaaggccaatgaacaccaactgataactctgaagaaggatgtcaatgaaacccagaaaaaagtatctgaaatggagcagctcaagaagcagattaaagaccaaagtttaaccctgtccaagttggaaatcgagaacttgaacctcgcccagaaacttcatgagaatctcgaggaaatgaaaagcgtgatgaaagagcgggataaccttcgcagggttgaggagacattgaagcttgaacgcgatcagctcaaagagtctctgcaagaaaccaaggctagggatctggaaatccaacaagaattgaagaccgctcggatgctgagtaaggagcataaagaaaccgttgacaagctgcgagaaaaaatttcggaaaaaacaatccaaatctccgatattcaaaaggacttggataaatcaaaagatgagttgcagaagaagattcaggaactgcagaaaaaggagctgcagttgctcagagtgaaggaggacgttaacatgtcccacaaaaagatcaacgaaatggaacagctcaagaaacagtttgaggcacagaatctcagcatgcaatctgtgcgcatggacaactttcagctcactaagaagctgcacgaatcactggaggagatccgaatcgttgcaaaagagagagatgaactgcgcagaataaaagagagtctgaaaatggagagggaccaattcatcgcaaccctgcgcgagatgatcgctcgcgatcgccaaaaccaccaagtgaagcctgagaagagactgctctccgacggacagcagcacctgactgagtcattacgagagaagtgcagtcgcataaaagagctgctgaaacgatactctgaaatggacgatcactacgagtgcctaaataggttgagcctagaccttgaaaaagaaattgaattccagaaagagctgagcatgagggtgaaggctaacctgagcttaccataccttcagactaaacacatagaaaagttgtttacagccaatcagcgctgtagtatggaattccacagaatcatgaaaaaactcaagtacgtgctgtcctacgtaaccaaaatcaaggaagagcagcatgagagcattaataaatttgaaatggattttatcgatgaggtggagaaacagaaggaactattaatcaagatccagcatctccagcaggactgcgacgtcccttcacgggaacttcgggacctcaaattgaatcagaatatggacctgcacatcgaagagatattaaaggacttctccgagtctgaatttccaagcattaaaacagagtttcagcaggtactgtccaatagaaaagagatgacccagtttttagaggaatggctgaacacccgatttgatatagaaaagttaaagaatggcatccaaaaagaaaatgaccgcatctgtcaggtgaacaacttcttcaataacaggataatcgctatcatgaacgagtctaccgagttcgaggagcgttctgcgaccatcagcaaggaatgggagcaagatttgaagtcactgaaggaaaagaatgagaagctgtttaaaaactatcagacactcaaaacctctttggcctccggagcccaggtcaatcctaccactcaggataacaagaaccctcacgtgacgagccgagcaacccaattaaccactgaaaagataagggagttggaaaatagcctccatgaagcgaaggaaagtgctatgcataaggaatctaagattattaaaatgcagaaggaactggaagtgactaatgacatcatagccaagttacaggcaaaagtgcacgagagtaacaagtgtctcgagaagaccaaggaaaccatacaagtgttacaggacaaggtcgcactcggggctaaaccgtataaggaggagatcgaggacctgaaaatgaagctagtgaagatagacctcgagaagatgaagaatgcaaaggagtttgagaaggagatatcggccaccaaggccacagtggagtaccagaaagaggtgattaggctgctgcgcgagaacctacggaggtcacaacaggcgcaggacacaagcgtcattagcgaacacacagacccacagccatctaacaaacccctgacttgcggtggcgggagcgggatcgtccaaaacaccaaagcactcattctcaagagcgaacatatccgtctggaaaaagaaatttcaaaattgaaacagcagaacgagcagctaattaagcagaagaatgagctcctgagcaataaccagcacctctctaacgaggttaaaacttggaaggagcggactctgaaaagggaagcgcataaacaggttacttgcgagaacagccctaaatctcctaaggtcactggcaccgcttcgaagaagaagcagataactccaagccagtgcaaagaaagaaatctgcaggatcccgttcctaaggagagcccgaaatcttgctttttcgacagcaggagcaagagcttaccctctccacaccccgtccggtattttgacaattccagcctcggcctgtgtccagaggtacagaatgcgggggctgaaagcgtggattctcagccaggaccctggcacgcttcttctgggaaggacgtgcccgagtgtaagacccagtag

SEQ ID NO: 182420 - DNA, 7743 bp, synthetic construct
  misc_feature 1..7743: note = Description of Artificial Sequence: Synthetic coding sequence
  source 1..7743: mol_type = other DNA
atggccgaggagggcgccgtggccgtgtgcgtgcgggtgcggcccctcaactcacgagaggaatcgctgggagaaaccgcccaggtgtactggaagacagataataacgtgatatatcaggtcgacggatctaaatccttcaatttcgacagagtcttccacggaaacgaaaccactaagaacgtttacgaagagatcgctgctccgattatagattccgcaattcagggctacaatggcaccattttcgcctatggccagaccgccagtggcaagacttatacaatgatgggctccgaagatcatctgggagtcatccctcgtgctattcacgacatcttccagaaaataaaaaagttccccgatcgggagttcctgctgagggtctcctatatggaaatttataatgaaacaataacagatttgctgtgtgggacgcagaagatgaaacccctgatcatcagggaggatgtgaataggaacgtgtatgtggctgacctgactgaagaggttgtgtatacctcggagatggctcttaagtggattactaagggtgaaaagagtcgccactatggcgagacaaaaatgaaccaacggagcagccggagccatacgatcttccggatgattctcgaatcccgggagaaaggcgagcccagcaactgcgagggatctgtgaaagtcagccatctgaatctggtagatcttgcagggtccgaacgcgccgctcagaccggcgctgctggggttcgccttaaagaaggctgcaatatcaatcggtccctgttcatcctgggacaggttattaaaaaactatcggacgggcaggtgggaggcttcatcaactatagggacagcaaacttacccgtatccttcagaattccttggggggcaatgctaaaactcgaatcatttgtactatcacccccgtatccttcgatgagacgctgacggcgcttcagtttgcttcaactgctaaatacatgaagaacacaccatatgtcaacgaagtatcaaccgacgaggccttgctgaaaaggtacagaaaggaaattatggacctgaaaaaacagctggaggaggtgagtctcgagactagagcccaagcaatggagaaggatcagctggcccaactgctggaggaaaaggacctgttgcagaaagtgcagaatgaaaagatcgagaatctgacccggatgctagtgacgagcagcagccttaccttgcagcaggaactgaaggctaaacggaaaaggcgggtcacatggtgcctgggaaaaatcaataagatgaagaattctaactatgctgatcagtttaatatcccaactaatatcaccaccaagacccataaacttagcataaatttgctccgggagatcgatgaaagcgtctgcagtgaaagtgatgtgttcagtaacacccttgacaccctttctgagattgaatggaaccccgcgacaaagctgctgaatcaagagaacattgagtccgagctcaacagcctaagagctgactatgataatctagtgctggattacgaacagctgaggaccgagaaagaggagatggaactgaaactgaaggaaaagaacgacctggacgagttcgaagctctagaacgaaagacaaagaaggatcaggagaacgagctctcaagtaaagtggaacttttgcgggagaaggaggatcagattaagaagctgcaggaatacatagacagtcagaaacttgaaaatataaaaatggacctgagctactccttggagagtattgaggatcccaagcagatgaaacaaaccttatttgacgcagagaccgtagccttagatgccaaacgtgagtctgcctttctgagatctgaaaatctggagctgaaagaaaaaatgaaggaattggccaccacctataagcagatggaaaacgatatccaattgtatcagtcccagctggaggcgaaaaaaaaaatgcaggttgaccttgagaaagagctgcaatccgcattcaatgagataaccaagttgacctctctgattgatggaaaggttcccaaggaccttctatgtaatctggagctggaggggaaaattaccgatttgcaaaaagaattgaacaaggaagttgaggagaatgaggctttgcgagaggaagtgatcctgctctccgaactgaagagcctccccagtgaggtggagagattgcggaaggagatccaggataaatccgaggagctacacatcataacctctgagaaagacaaattgttttccgaggtagtgcataaagaatcccgggtgcagggcctcttggaagagatcggtaagaccaaagacgatctggctaccacccaatccaactataagagtaccgaccaagagtttcagaacttcaaaacactccatatggactttgaacagaagtacaagatggtcctggaggaaaatgagaggatgaatcaggagattgttaacctgagtaaggaagctcagaagtttgacagctctctcggcgctttgaagactgaattgtcctacaagacccaggaactgcaggagaagactagggaagtccaagagcgacttaatgagatggaacagctgaaggagcaactggagaaccgagatagcacactgcaaacagtagaaagagagaagactctgattaccgaaaaacttcaacagactctagaagaagttaaaacccttacccaggagaaggacgacctcaaacaactccaggaatccctccagatcgagcgcgaccaattaaaatctgatattcacgacacagttaacatgaatattgacacgcaggagcagcttcgcaacgctttggagtcactgaaacaacaccaggagacaattaacactctgaaaagtaaaatctccgaggaagtctcgcggaacttacatatggaagaaaatacaggcgaaactaaggatgaatttcaacagaaaatggtcgggatagacaaaaagcaggaccttgaggcaaagaacacacagacccttacggcagacgtaaaagataatgaaattatagaacagcagcgcaagatttttagtctgatccaagagaagaacgaattgcagcagatgctcgagtccgttatagccgaaaaagagcagttgaagacagaccttaaggaaaatatagaaatgacaattgagaaccaagaagaactgcgacttctgggcgatgagctgaagaagcagcaggagattgtggcccaagagaaaaatcacgccatcaaaaaagaaggggagttgagcaggacttgcgataggctcgcagaagtggaggaaaaattgaaggagaagagtcagcagttacaggagaaacaacagcagctgctgaatgttcaggaggagatgtcagaaatgcagaaaaaaatcaacgagattgagaatctgaaaaacgagttgaagaataaggagctaacacttgaacacatggagactgaacgactcgaactagcccaaaagctgaatgaaaattatgaagaagtcaaatctatcacaaaagaaagaaaagtgctcaaggaactccagaagtccttcgagacagaacgggaccacctcagggggtatatccgtgaaattgaggcaaccgggctgcaaactaaagaggaactcaagatcgcccacatccacctaaaagaacaccaagagacaatagacgagcttcggcggtccgtgagcgagaagactgcccaaatcattaacacacaggacttagagaagtcccacactaaactgcaagaggagatcccagtcctgcacgaagagcaggaactgttacccaatgtgaaggaagttagcgaaacccaggaaactatgaatgaattagaactattgacagagcaaagtactacaaaggatagcaccactctggcccgtatagaaatggagaggttgaggctgaacgagaagttccaagagagtcaggaagaaatcaaaagcctgaccaaggaacgagataatttgaaaaccattaaagaggcccttgaagtgaaacatgatcagctaaaggagcatattcgggaaacccttgcaaaaatccaggagtcccagtccaagcaggaacagtccctaaatatgaaggagaaggacaacgaaactacaaaaattgtcagtgagatggaacagttcaagccgaaggattccgccctgcttagaatagaaattgaaatgttgggattgagcaagcgactccaggagtcacacgatgagatgaaatctgtggcgaaagagaaggacgatctccaacgcctccaggaagtcctgcagtcagaatccgatcaactcaaggagaacattaaggaaattgttgctaagcacttggagactgaggaagaactaaaggtggctcattgttgtttgaaagaacaagaggagacgatcaatgagctcagggtcaatctctccgagaaagagacagagatctcgaccattcagaagcaactggaagctatcaacgacaagcttcagaataaaattcaagagatctatgagaaggaagagcagttcaacattaagcagatctccgaagtgcaggaaaaagtcaatgagctaaagcagttcaaggaacacaggaaggctaaagactcggcactgcagagcattgaatcaaaaatgctggagctcacaaaccggctgcaggagtctcaagaggagatccaaattatgattaaggaaaaggaggagatgaagagagtgcaggaggccctgcagatcgagcgagaccagttaaaggaaaatacaaaggagattgttgctaaaatgaaagagagccaggaaaaagagtaccagttcctgaagatgacggctgtaaacgaaacccaagagaagatgtgcgaaatagagcatttaaaagagcagtttgaaacgcagaagctcaaccttgagaacatcgagaccgaaaacattcgccttactcagattctacacgagaatctggaggaaatgaggtctgtcactaaggaaagagatgacctgcggtcagtcgaagagaccctgaaagttgagagggaccagcttaaggaaaacctgcgcgagaccatcacccgggatcttgagaaacaggaagagctcaagatcgttcatatgcacctgaaggaacaccaggagactattgataagctgcggggcatcgtgtcagagaaaacaaatgagatttccaacatgcagaaggatctcgagcacagcaatgacgcacttaaagcacaagacttgaagatacaggaggagttgagaatagcccatatgcacttaaaagaacagcaggaaacgatcgataagctgcgggggatcgtgtctgagaaaacagataagctgtctaacatgcaaaaggacctggagaatagtaatgcaaagctgcaggagaaaatccaggagcttaaggcgaatgaacaccagctgattaccctgaagaaagacgtgaacgaaacccaaaagaaggtgtcggagatggagcaactcaaaaaacagattaaagatcagtcactgacactgtcaaagctggaaattgagaacctgaatcttgctcaaaaattgcacgagaacctcgaagagatgaagtcggtgatgaaggagagggataaccttagacgggtggaggagaccttgaagttagagcgtgatcagcttaaagagagtctccaggagacaaaagcgagagacttggagatccaacaggaactgaaaaccgcaagaatgcttagtaaagagcacaaggagactgtggacaagctgagggagaagatctctgagaagaccattcagattagcgacattcaaaaggacctggacaaaagcaaggacgaactgcaaaaaaagcaggacaggcagaaccaccaagtaaaacctgagaagaggctcctgagcgatggccaacagcacctgactgagtccctccgagaaaagtgttctcggattaaagagctgctgaagcggtattcagaaatggacgaccattatgagtgcctgaatcgcctgtccctagacctggaaaaagaaattgagtttcagaaagaactctccatgcgggtgaaggccaatctgagcctgccctaccttcagaccaaacatatcgaaaaactgtttactgcgaatcaacggtgttccatggaatttcatagaatcatgaaaaaacttaagtatgttctttcatacgtgaccaaaattaaggaggaacagcacgagtctatcaacaagttcgagatggattttatcgacgaggttgagaaacaaaaggaactcctgatcaagatccagcatctccagcaggattgtgacgtgcctagccgcgaactccgcgacctcaaactgaaccaaaatatggacctgcatattgaggaaatactgaaggatttctctgagtcagagttccctagtattaaaaccgagtttcagcaagtgttgagcaaccggaaagaaatgacacagttcctggaagaatggttgaacacccgcttcgacattgagaagcttaagaacggaatccagaaagaaaatgaccgaatttgccaggtgaataacttcttcaataaccgtatcatcgccattatgaacgagagcacagagtttgaagagagaagcgctacaatttcaaaagagtgggaacaagatctaaagtctctgaaagagaaaaacgaaaagctctttaagaactaccaaacgttgaagacaagtctcgccagcggagctcaggtgaatccaacaacacaggacaataaaaaccctcatgtgacctcgagggccacgcagctgactaccgagaagatccgcgaattggaaaactcattgcacgaggcgaaagagtccgcaatgcataaagagagcaagatcatcaagatgcagaaggagctggaagtaacgaacgatatcatagctaaactgcaagctaaagtacatgagtccaataaatgtctcgagaagactaaggaaaccattcaagtcctacaggacaaagtggctctgggagccaaaccttacaaagaggaaattgaggatcttaagatgaagctggtcaagatcgacttggaaaagatgaaaaacgccaaagagttcgaaaaagaaatctctgccaccaaggctacagttgaatatcaaaaagaggtcattaggctgctgagagagaacctaaggcggtcgcagcaggcccaggatacttctgttatctccgagcatactgaccctcagccctctaataaacccctgacttgtgggggcggatccgggatcgttcagaacacaaaagctctgattctgaagagcgagcacatccgcctggagaaagagatttcaaagctcaagcagcagaacgaacagctaattaagcaaaaaaacgagctactttctaacaaccagcatctgagcaatgaggtgaagacatggaaagaacgaaccctcaaacgggaggcccataagcaggtcacctgcgagaactctcctaaaagccccaaggtgacaggcaccgctagcaagaagaagcagatcacaccatctcagtgcaaggagcggaatctgcaggatcctgtgcctaaagagagcccaaaaagctgtttctttgacagcagatcaaaatcattgcctagcccccatccagtacgttactttgacaacagctctttgggtttgtgtccagaagtgcaaaatgctggtgctgaaagtgtcgactcgcagcccggaccgtggcacgctagctccgggaaagacgtgcccgagtgcaagacacaatag

SEQ ID NO: 182421 - DNA, 7038 bp, synthetic construct
  misc_feature 1..7038: note = Description of Artificial Sequence: Synthetic coding sequence
  source 1..7038: mol_type = other DNA
atggccgaggagggcgccgtggccgtgtgcgtgcgggtgcggcccttgaattcgagagaagaaagtctaggtgagacagcccaggtttattggaaaaccgataacaacgtgatctaccaggtggatggcagcaaatcttttaatttcgaccgggtatttcacggtaatgagacaaccaagaacgtttatgaagaaatcgctgcccctatcatcgattcagctatccagggctacaatggaaccatcttcgcctacggacagactgccagcggaaagacatatactatgatgggatccgaggatcatttaggcgtaatccctagagccattcatgatatcttccaaaaaattaaaaagttcccggaccgagagtttctcttgcgggtctcgtacatggaaatctacaacgagactattaccgacctgctttgtggaactcagaagatgaaacccctcataatcagggaagatgttaatcggaacgtgtacgttgctgatcttaccgaagaggtagtgtacacgtccgagatggccttaaagtggattactaagggggaaaaatcccggcactatggtgaaacaaaaatgaaccagcgcagtagtcgatctcacaccatctttcgaatgatcctagagagcagagagaaaggcgaacctagtaattgtgaaggaagcgtcaaggtaagtcacctcaatcttgtcgacctcgccgggagcgaaagagcggcccagactggggcagccggggtgcgcctgaaagagggctgtaatatcaaccgatcattgttcattctaggacaggtcatcaaaaagctctcggacggtcaggtgggggggttcatcaactatcgtgattctaagttaaccagaattctgcagaacagcctcggcggcaatgccaagacacgtatcatatgcacgatcaccccagtctctttcgatgagacactgactgctttacaattcgcttccaccgcaaagtatatgaagaacacaccttatgtgaacgaggtgtcaacagatgaggccctactaaagagataccgcaaggagatcatggaccttaaaaagcaactggaagaggtgtccttagaaacccgggctcaggcaatggagaaggatcagttggcccagttgctggaagagaaggaccttctccagaaagtgcagaatgagaagatcgagaatctcacaaggatgcttgtcacctcctccagtctgactctccaacaggagctgaaggctaaacgtaagcgaagggtgacctggtgcttgggtaagatcaacaagatgaagaattcaaactatgcagatcagttcaacattccaacaaatatcacaaccaagacgcacaagttatccattaacctcctgcgggagattgatgagagcgtctgctcagagagtgatgtattttctaacaccctcgacacgctgtccgaaattgagtggaacccggcaacgaagctgctcaatcaagaaaatatagagagcgagctgaatagtctccgcgctgactatgacaatttggtgctggactatgagcagctcaggacagagaaggaggagatggagctgaagctgaaggagaaaaatgacctggacgagtttgaagctctggaaaggaaaacaaagaaggaccaggagatgcagttgatccacgagataagtaacttgaagaatctagtcaaacacgctgaagtgtataatcaggacctcgaaaatgaactaagctctaaagtggagttgcttcgggagaaggaagatcagatcaagaagcttcaggagtacatcgactcccagaaacttgagaacataaagatggacctgtcctactctctggaatccatcgaagaccctaagcagatgaagcaaactctgtttgacgccgagaccgtggctctagacgctaagcgggaatcagcgtttctcagaagcgaaaacttagaacttaaggagaagatgaaggagctggccaccacttataagcaaatggagaatgacattcagctgtatcagtctcaactggaggctaaaaagaagatgcaggtggacttagagaaagagctgcaaagtgcctttaacgaaattactaaactcacaagccttattgatggaaaagttcccaaagacctgctctgtaatctagagttggaaggaaagatcacagacctacagaaagagctgaacaaggaggttgaagaaaacgaagcattgcgagaggaggtgatactgctgtctgaactcaaaagcttgccaagtgaagtggaacggctcaggaaagaaatccaggataaatccgaagagctccacataatcacttctgagaaggacaaactctttagcgaggtcgtacacaaggagtctagagttcaggggctgctggaagaaataggcaagactaaagacgatctagctacgacacaaagtaattacaaatccactgatcaagagttccaaaactttaaaactttgcatatggactttgagcagaaatacaagatggtcttggaagagaacgagcgcatgaaccaggagatcgtcaacctttcaaaggaggcccagaagttcgattcttccctgggggcgttaaagactgagctctcttataagacacaagagctgcaagaaaaaacgcgtgaggtgcaggaaagacttaacgaaatggagcaactcaaggagcagctcgaaaatagggattccaccttgcagactgtggaaagagaaaagaccctcatcacagagaagctccagcagaccctggaagaggtcaaaactctgacccaggaaaaagatgacctgaagcagctacaggagagtctccagatagagagagatcagctgaagtcagacatacacgacacggtgaatatgaacattgacacacaggagcagctgcgcaatgccctagaaagtttgaagcagcaccaggagaccatcaacaccctgaaaagcaagatctctgaggaagtgtcccggaatttgcatatggaagagaatacaggcgaaactaaggatgagttccaacagaagatggtcggtatagacaagaagcaggacctagaggcgaaaaatactcagacactaacagcagacgtgaaagacaacgaaatcattgagcagcagcggaagatctttagtcttatccaggaaaaaaacgagctgcagcagatgctggagagcgtgattgctgagaaggaacagcttaaaacagacctgaaggagaatatcgagatgactattgaaaaccaagaggagctcaggctgttgggtgacgaactaaaaaagcagcaggaaatcgtcgcacaggagaagaaccatgccataaaaaaagaaggagagctaagccgtacatgcgacagactggcggaggtggaagaaaaactcaaagaaaagtctcagcagcttcaggaaaaacagcagcagctactcaacgtacaggaagagatgagtgaaatgcagaagaaaattaacgagatagagaacctgaagaatgagctcaagaacaaggagctgacacttgagcacatggagactgagcgcctcgagcttgcccagaaactcaacgaaaattacgaagaggtaaagagtatcacgaaggaacgtaaagtgctgaaagagcttcagaaatcttttgagactgagcgggaccacttgcggggatacattagggagatcgaagctactggcctgcagacgaaagaggagcttaaaattgcccacatccatcttaaggaacaccaggagacgattgacgaactcagacgctctgttagtgaaaaaacagcacaaattatcaatacacaggatcttgagaagtcccataccaagttgcaggaggaaataccagtcttgcatgaggaacaggagctgctgcctaatgtgaaagaagtatctgagactcaggagaccatgaatgagctagaactcttgacagaacagagcaccaccaaggattccactactctggcacgaattgagatggagcggctgagactcaatgagaagttccaggagtctcaagaggaaattaagtctctgacaaaagaaagagacaatctgaaaacgattaaagaagccttagaagtgaagcacgatcaactgaaagagcacatcagagagacactggcaaagatccaagaatctcagtctaagcaggaacaaagcctgaatatgaaagaaaaggataacgaaactaccaaaatcgtgtcggaaatggaacagttcaagcccaaagacagcgccctactaagaattgagatcgaaatgctgggtctctccaaaagattgcaggaatctcacgacgagatgaaaagtgtggcaaaggagaaggacgaccttcaacggcttcaggaagtgctgcaaagtgaaagcgatcaacttaaggaaaacattaaggagattgtggccaagcacttggagacagaggaagaacttaaggtggcccactgctgcctcaaagagcaggaggagacgataaacgaactgcgcgtcaacctgtcagagaaagaaaccgagatttctacgattcagaagcagctggaggccattaatgataaactccaaaacaagattcaggaaatttatgagaaggaagagcaattcaatattaagcagatctcggaggtgcaagaaaaagtcaacgaactgaagcagtttaaagagcacaggaaggctaaagactccgcactccaatcgattgaatcaaagatgctggagttaacaaacagactgcaggagagtcaagaagaaattcagatcatgatcaaggaaaaggaggaaatgaagcgtgttcaggaggccctgcagattgaacgcgatcagctgaaggaaaacactaaagagattgttgccaagatgaaagagagccaggaaaaggaataccagttcctcaagatgacggccgtgaatgaaacgcaagagaagatgtgcgaaatcgagcacttaaaagaacaatttgagactcagaaacttaacttagagaacattgaaacagagaacatccgcctcacccagattctgcacgagaatctcgaagagatgagatcagtaactaaggaacgagacgacttgcggtctgtagaggaaaccctcaaggtcgagcgagaccagctgaaagaaaatctgagagagacaattacccgtgacctcgagaaacaggaggagctgaaaatcgttcacatgcatctgaaggaacatcaggagaccattgataagctgcgcggcatcgtgagtgaaaagactaatgagatctcgaacatgcagaaggacttggaacattcaaacgacgccttaaaagctcaggatctgaaaatccaggaagagctccggatagctcatatgcacctgaaagagcagcaagaaacaattgacaaattacggggcatcgtgagcgaaaagaccgacaaactgtctaacatgcaaaaagatctggagaacagcaacgcaaagttacaagaaaagattcaggaactcaaagccaatgagcaccaactcatcactctgaagaaagatgtgaacgaaacacagaagaaagtcagcgaaatggaacaattgaaaaagcaaatcaaggatcaaagtctgactctgtcaaagttagagattgagaacctaaacctcgcacagaagctgcatgaaaacctggaggagatgaagagcgtgatgaaggagcgggataacttgcgcagggtcgaagaaacgttgaagctggagagagatcagctgaaggaatccctccaggagactaaggccagagatcttgagatccagcaagaactgaaaaccgccaggatgctctcaaaggaacacaaagagaccgttgacaagctgagggaaaaaatctcagagaagaccattcagatctccgatattcagaaggatctggacaaatccaaggatgaactacagaaaaagatacaggagctgcagaagaaggaactccagctactcagggtgaaagaagacgtgaacatgtctcataagaaaattaatgaaatggagcagctcaaaaagcagttcgaggcgcaaaatctcagcatgcaatcagtgcggatggacaactttcaactgactaaaaagttacacgagtcactagaggagatccgaatcgtggcaaaggagcgcgatgaactgcggaggatcaaagagtctctcaagatggaaagggaccagtttattgctacactgcgcgagatgatagcccgggaccgtcaaaatcaccaggtgaaaccagagaagcgcctgctttctgatgggcaacagcacctcacagaatcccttcgtgaaaaatgttctcggatcaaagagttgttaaaacgttatagcgagatggacgaccactacgaatgccttaatcgcctgagtctggatctcgagaaggaaattgaatttcaccgcattatgaaaaaactgaagtatgtgctgtcctacgtgacaaagatcaaagaggaacagcatgaaagcataaataaatttgaaatggacttcattgacgaagtggagaagcaaaaagagctcctcattaagattcaacacctgcagcaggactgtgacgtcccaagtagagaactgagagacctgaagcttaatcagaatatggatctccacattgaggagatcctgaaagatttctccgagagcgaatttccatctattaaaacagagtttcaacaggtactcagcaatcggaaagagatgacccagtttctggaggagtggctaaacactaggttcgacattgagaagctgaagaacgggatccagaaggaaaatgataggatttgccaggtgaataatttcttcaacaaccggatcatcgctatcatgaacgagtcgacagagttcgaagaaaggagtgctacgatttcaaaagaatgggagcaggacctgaagagtctgaaggaaaagaacgagaagttgttcaaaaactaccagacactgaagacctccttagcaagcggcgcacaagtgaacccaaccacccaggacaacaagaacccccatgttacaagccgtgccacacaattgacaacagaatag

SEQ ID NO: 182422 - DNA, 9345 bp, synthetic construct
  misc_feature 1..9345: note = Description of Artificial Sequence: Synthetic coding sequence
  source 1..9345: mol_type = other DNA
atgagctgggccctggaggagtggaaggagggcctgcccacccgggccctacaaaagatacaggaactggaaggccaactggataaattaaaaaaggaaaagcagcagcgccaatttcagctggactccctcgaggcagccctgcaaaaacaaaaacagaaggtcgagaatgagaaaaccgaaggaaccaatctgaaacgggagaaccaaaggctcatggagatttgcgagtcacttgaaaagaccaagcaaaagatcagtcacgagcttcaggttaaggagagtcaagtaaatttccaggaaggccagctcaactcgggtaagaagcagatcgaaaagctggaacaggagttaaaaagatgcaagtcggaactagagcgcagccaacaggctgcacagtcagctgacgtgtctctgaacccctgcaacaccccgcaaaagatattcaccacccccctgacacccagtcaatattacagtgggtccaagtacgaggatctgaaggaaaaatataacaaggaggtcgaggagagaaagcggttggaggcagaggtcaaagccctgcaagcgaaaaaggcgtcacagacgttacctcaagctaccatgaaccaccgggacatcgctaggcaccaagcgtccagtagcgtattttcttggcagcaagaaaagacaccttctcatctttcatcaaatagccagagaacaccgatccggcgggacttctccgccagctatttttccggagaacaagaggttaccccttcccggtctacactccagattggcaaacgagacgcaaacagttccttttttgataattcctcctcccctcacctgcttgaccaactgaaggcgcagaatcaggagctccgaaataagatcaacgagctagagttacggctccagggtcatgaaaaagaaatgaaaggacaggtgaataagttccaggaactgcagctacagctggagaaggccaaggtggaactcatagagaaagaaaaagtcctgaataaatgtcgcgatgagctggtgcggaccaccgcccagtatgaccaagccagcaccaagtacaccgccctggagcaaaagctgaagaaactcaccgaggacctatcttgccagaggcaaaacgcggaatccgctcggtgttctctggaacagaaaatcaaggagaaagaaaaggagttccaagaggagctgtcaagacagcagaggtctttccagactctcgaccaagaatgtatccagatgaaagcccggctgacccaagagctgcagcaagccaaaaacatgcataacgttctccaggccgaattagacaaactgactagcgttaagcagcagctagagaataatctagaggaattcaagcaaaagctgtgcagggctgagcaagccttccaggcctctcagataaaggagaatgaactccggagaagcatggaggagatgaagaaagagaataatctgttgaaaagtcattcagagcagaaggcccgtgaggtatgccacctcgaagcggagctaaagaacatcaaacagtgcctcaatcagagtcagaacttcgctgaagaaatgaaagcgaaaaacacctctcaggagactatgttgagagacctgcaggaaaaaataaatcagcaggagaactcgctgacactcgaaaaactgaagctggcagtagcagatttagaaaagcagcgggattgttctcaggacttacttaaaaagcgcgaacaccacatagaacagctcaacgacaaactgagtaagacggagaaggagagcaaagcactgctctctgccctggagttaaaaaaaaaagaatatgaagagctcaaggaagagaagaccctttttagttgttggaagtctgaaaacgaaaaactgctgactcagatggagtcagagaaggagaacttacagagcaagattaaccatctggagacatgcctcaagactcaacaaatcaagagccacgaatataatgagcgggtccggacacttgagatggatagagaaaaccttagtgtcgagattaggaatcttcacaacgttcttgactccaaatctgtggaggttgagacgcagaagttagcctatatggaactgcagcagaaagcagaatttagtgatcagaagcatcagaaagagatcgagaacatgtgtctgaagacaagccagctgacaggtcaggtggaagatttggagcataagttgcaacttctatccaatgagatcatggataaagacaggtgttaccaagacctacatgcagagtacgaatcccttcgcgacttattgaagtcaaaggacgcttctctcgtcactaacgaggaccatcagagatcattgctggcattcgatcagcagcccgctatgcatcactccttcgctaacatcattggggagcaggggtcaatgccgagtgagcgctcggaatgtaggctggaggcagatcaatcacccaagaacagcgctattcttcaaaaccgcgttgactctttggagttctctctggagtcgcagaaacagatgaactccgatctccagaaacagtgtgaagaacttgtccaaataaagggcgagatcgaggaaaatctgatgaaggctgagcaaatgcaccagagcttcgtggccgaaactagccagcgaataagcaagctgcaagaagatacttcggcacatcagaatgtggtcgctgagacactctccgcattggaaaataaagagaaagaactccagctgctaaacgataaggtcgagaccgaacaagcagagattcaggagctgaagaaatccaaccatcttctcgaagactcactgaaagagttgcagctgctaagtgaaaccttgagcctggagaaaaaggagatgagcagcataatcagtctgaataagagggagatagaagaactgacccaggaaaacgggacattaaaagaaataaatgcctctctaaatcaggaaaagatgaaccttatacagaagtcagaaagttttgctaattacatcgatgagcgcgagaaatccatctcagagctctctgatcagtataagcaagaaaaactgatcctgctgcagcgatgtgaagagaccggaaacgcatatgaggatttgtctcagaagtataaagctgcacaagagaaaaattccaagctggagtgccttcttaacgaatgcactagtctgtgcgagaaccgtaagaatgaactggagcagctgaaggaggcatttgccaaggagcaccaggagttcctgacaaagcttgctttcgcagaggagaggaatcaaaatcttatgctggaacttgagacagtgcagcaagctctcagaagcgagatgacagacaatcagaacaacagcaaatcagaggcaggagggctcaagcaagagataatgacgctcaaagaagaacagaacaaaatgcaaaaggaagtaaacgacctgctgcaagagaacgaacaactaatgaaggtcatgaaaacgaaacacgagtgccagaatctggagtctgaaccaataaggaattcagtcaaagaaagggagtccgagcggaatcagtgcaacttcaagccccagatggacctcgaggtcaaggagatttcactcgactcgtataatgcacagttggtccagttggaggcaatgttgagaaacaaagaattaaagctacaggagagtgaaaaggaaaaagagtgtttgcagcacgaactccaaaccattcggggtgatttggaaacctcaaatctgcaggatatgcagtcacaggagatctctgggttaaaggactgcgagattgatgccgaggagaaatacatctcaggtccacacgagctgagtacgagtcaaaatgataatgcacacctgcagtgcagtctgcagactaccatgaacaaattgaatgaactcgagaagatttgcgagattctccaggccgagaaatacgaacttgtcaccgaattgaacgacagcagaagcgaatgtatcaccgccacgagaaagatggccgaggaagtcggcaaactcctgaacgaggttaagattttgaacgatgatagtggtctgctgcacggggagctggtcgaggatatccccggaggggagttcggagagcaacccaatgagcaacacccagttagtctcgctccactcgacgagtcaaactcctatgaacaccttaccctgagcgataaagaggtccagatgcactttgccgagcttcaggaaaagttcttatctctgcagtccgaacataagattcttcacgatcagcactgccagatgtcttcaaagatgtcagagctccagacctatgtcgatagcctgaaggctgagaatcttgtgctgtctaccaatctcaggaatttccagggtgatctggtcaaggaaatgcagctcggactggaggaagggttggtcccttcattgtcgtccagctgcgtccccgattccagcagcctcagcagtttaggcgatagctcattctaccgagctctacttgagcagaccggggacatgagcctgctgagcaatcttgagggggcagtgagcgccaaccaatgttcagttgatgaggtcttttgcagctctctccaggaggaaaacttgactcggaaggagactccttcggcgcccgctaaaggggtggaggagctggagagcctgtgcgaggtctaccgccagagtctcgagaagctcgaagagaagatggaatcacagggcatcatgaaaaacaaagagatccaggagctggaacaactgctttcttctgaacgccaagaactagactgccttcgcaagcagtacttgtcagagaatgaacagtggcagcagaaactcacgtcagtgaccctggaaatggagagtaaattggccgcagagaagaagcagacagaacagctgtcactggagctggaagtggctcgtctccagctgcagggtttggatctgtcatcaaggagcctacttgggatagatactgaggacgctatacaagggcgcaacgagagctgcgacatttctaaggagcatacttccgaaacgaccgagcgaacacccaaacatgatgttcaccagatctgcgataaagatgctcagcaagacctaaacctggacatcgagaagataactgagacaggagcagttaaacctaccggcgaatgcagcggcgagcagtcaccagacactaactacgaaccgcccggtgaggacaagacacagggcagctctgaatgtatcagtgaattgagcttttctggccccaacgctctcgtgcctatggacttcctcgggaaccaggaggatatccacaacttgcagctgcgagttaaagagacatcgaacgaaaatctccggctgcttcatgtaatcgaggatcgtgaccgcaaagtcgagagcctgctcaatgagatgaaagaactagattctaagctgcatcttcaggaggtgcagctgatgaccaagatagaggcttgcattgaacttgagaaaattgtcggagaactgaagaaagagaattccgacctgagcgaaaagctcgagtacttcagttgcgaccaccaggagttactgcagagagtggaaacctccgaagggctcaactctgaccttgagatgcacgctgacaaatcttcccgggaggacataggcgacaatgtggctaaggtaaatgacagttggaaggagagatttttagacgtggaaaatgagttgtctcggatccgcagcgagaaagcctcgatcgaacatgaggcactgtatcttgaagcagatctagaggtggtgcagactgaaaaactctgcctggagaaagataacgaaaacaagcaaaaggtgatagtgtgcctcgaagaagagctgagcgttgtaacatccgagaggaatcagttaaggggcgagctcgatacaatgtcaaagaagaccacggccttagatcagctgtctgagaagatgaaggagaagactcaagaactggagtctcaccagagtgaatgcctccattgcatacaggtggctgaggccgaggtaaaagagaaaactgaactactgcagactttgtcatcagacgtcagcgagctcttaaaggataagactcatctccaggagaagctacagtcccttgagaaagattcacaagctctgtccctgactaagtgcgagctggagaatcagatcgcacagttgaacaaagaaaaagaactcctggttaaggaaagcgagtctttacaggctcgactatctgaatctgactatgaaaaattgaatgtgtctaaagctctggaagccgccctggtcgaaaagggagaatttgctctgcgcctatcctcgacgcaggaggaggttcaccagctgcggcgcggcatcgaaaaactaagagtaaggatcgaggccgatgaaaagaagcagttacacattgccgaaaagctgaaggaacgggagcgcgagaatgactccctgaaagacaaggtagagaacttggagcgagagctccagatgagcgaagagaatcaagagctcgtgatactggatgccgagaactcaaaagcggaagtggaaacactcaagactcagatcgaagaaatggcccggtcactgaaagtgttcgagctcgatctcgtgacactccggtccgaaaaggagaacctgaccaaacagatccaggagaagcaaggacagctcagtgaattggacaagctcctttcctcctttaaatcgctcttggaagaaaaggagcaggcagagatccaaattaaagaagagtctaagaccgccgtggaaatgttgcagaaccagcttaaagagctgaatgaggcagttgccgcactttgcggcgatcaagagattatgaaggctaccgaacaatctttggacccaccgatcgaggaagagcatcagctcagaaactcaatcgaaaaactgagagccagactggaagccgacgaaaagaagcagctgtgtgttctccagcaattgaaggagtctgagcatcatgcagacctgctcaaaggccgggtggagaatctcgagagagaactcgagatcgccaggactaatcaggaacacgccgccctcgaagctgagaacagcaagggagaagtggagacactcaaagccaagattgaggggatgactcagtcccttcgtggtctcgaacttgatgtggtgacaattagatcagagaaggagaacctcactaatgagttgcagaaggagcaggagcggatcagcgaactagagatcataaattcaagtttcgagaacatccttcaggaaaaggaacaagaaaaggtgcagatgaaagaaaaatcctccaccgcaatggagatgctgcagacacaactgaaggagctgaatgagagggtcgcagccctgcataatgatcaggaggcttgcaaagcgaaggagcagaacttatcatcgcaggtagaatgtctggaattggagaaagcccaactgctgcaggggctcgacgaagcaaagaataactacatcgtcctccagtcatccgtgaatggcctcatccaagaggtagaagacggaaaacagaagttagaaaaaaaagacgaggagatctccagactgaagaaccagatccaggatcaagagcaactagttagcaaactgtctcaggtggaaggggagcaccagctatggaaagaacagaacctggaactccggaatctgacagtcgagctggaacaaaagatccaagtgttgcagtctaagaacgcttctctgcaggataccctggaggtgttgcaaagttcctataagaatttggaaaatgaactggaactcacgaagatggacaaaatgtcatttgtcgaaaaagtgaacaagatgaccgccaaagaaaccgaactccagagagaaatgcacgagatggcccaaaaaaccgccgaactgcaggaggaactgtccggagagaaaaaccgtctggccggggaactccagctgctcctggaagaaatcaaatcatctaaagaccagttgaaggaactgaccttggagaatagtgaacttaagaagtctctcgactgtatgcacaaagatcaggtggagaaggagggcaaagtgcgagaggagattgctgagtatcagctcaggcttcacgaagcggaaaaaaaacatcaggcccttttactggacaccaataaacagtacgaagttgaaatccagacatacagagaaaagctgacctctaaagaagagtgcctttctagccagaaactcgaaatcgatctccttaaaagctctaaggaggaattgaacaactcgctaaaggccacaacccaaattttggaggaactaaagaagactaaaatggataaccttaagtacgtcaatcagcttaaaaaggaaaacgagcgcgctcagggcaaaatgaagcttctcataaagagctgtaagcagttggaggaagaaaaagaaatcttgcagaaagagttgtcacaacttcaggcagcccaggaaaaacagaaaaccggaacagtgatggacactaaagtggacgaactgacaactgagatcaaagagctgaaagagactctggaggaaaagactaaagaagccgatgagtaccttgataaatattgcagccttctgattagccacgagaaactggaaaaagctaaggaaatgttggaaacccaggttgcccacctctgcagtcagcaaagcaagcaggatagcagagggagccctttgttaggacccgtggtgcccggtccgagccccatcccgagcgtcacagagaagcgcttgtccagcgggcaaaataaagcctccgggaaaagacaacgctcctccggcatttgggagaatggccgaggcccaacccctgcaactcctgagagtttctctaagaaatccaagaaagcggttatgtcaggcatccaccccgccgaggacaccgaaggaactgagttcgaaccggagggattacctgaggttgttaaaaaggggttcgcggatatcccaaccgggaaaacgtcaccttatatcctccgacgcacaactatggccacaagaacctcaccacgactggccgcacaaaaactcgccctcagccctctgagcttaggcaaggagaacctggccgaaagctctaagccaactgccggtgggagtcgatcacagaaagtgaaagttgctcagcggagtccggttgacagtggcaccattcttcgcgaaccaaccactaagtccgtcccagtgaataacctgcccgaacgttcccctacggatagtcctcgcgagggacttcgggttaaaagaggccgcttggtacctagccctaaggccgggcttgagagcaacggctctgagaactgcaaggtgcaatag

SEQ ID NO: 182423 - DNA, 528 bp, synthetic construct
  misc_feature 1..528: note = Description of Artificial Sequence: Synthetic coding sequence
  source 1..528: mol_type = other DNA
ctgatgatcaagggccggaagggcaaggtgaacaagatgaccgccaaagaaacagagcttcaaagggagatgcatgaaatggctcaaaaaacagccgagctccaggaagagctgtccggagaaaaaaaccgcttagccggggagctgcaactgttgttagaagagatcaaaagttccaaagaccaattaaaagaactcactcttgaaaactctgaactgaagaagtctctggattgtatgcacaaagaccaggtcgaaaaggaagggaaggtccgtgaagagatagcagaatatcagctgcgactgcacgaggctgagaagaagcaccaggcccttcttctcgacacgaacaaacagtacgaggtcgagatccagacatatagggagaaactgactagcaaagaagagtgtctgtcttcacagaaacttgagatcgacctgctcaagagttctaaggaggagttaaacaattctctcaaggctacaacgcagatactggaggagcttaaaaaaaccaaggaaaactag

SEQ ID NO: 182424 - DNA, 4017 bp, synthetic construct
  misc_feature 1..4017: note = Description of Artificial Sequence: Synthetic coding sequence
  source 1..4017: mol_type = other DNA
atgttcctgatgcccaccagcagcgagctgaacagcggccagaacttcctgacccagtggatgacaaaccctagccgagccggcgttatcttaaacaggggctttccaatcctggaggctgataaagagaaaagagcggcagttgatatatcaacctcctttccaattaagggtacccattttagtgatagtttttctttcatcaatgaggaagactcgctcctagaagaacagaagctagaatccaataacccctataagcctcagtccgataagtccgaaacgcacaccgccttcccctgcataaaaaagggtccacaggtagccgcttgccatagcgctcccggccaccaggaagaaaacaaaaacgacttcatcccggatctcgcctctgaatttaaggagggtgcttacaaggatcccttgttcaaaaaactcgagcagcttaaggaagtgcagcagaagaagcaggagcagctaaaacgccagcagttggaacagctccagaggcttatggaagaacaggagaaactgttaaccatggtgagcggccagtgcacccttcctggtttgtccctgctgcctgacgaccagagccaaaagcaccgatccccgggaaacactactacaggtgaacgtgccacctgttgtttcccatcatacgtgtaccctgatccaactcaggaagagacatacccttccaacatcctgtcacatgaacaatctaatttttgtcgcacagctcatggggacttcgtgctaacttctaagagagcgtcaccaaacctgttttcggaggcccagtaccaggaagccccagtggagaagaacaaccttaaggaggagaatcggaatcatcctacaggcgagagtatcctgtgttgggagaaagtcactgaacaaatccaggaagccaacgacaagaatctgcagaaacatgacgactcatcagaggtggccaatatagaggaacgtcctatcaaggccgctatcggtgagcgaaaacagacattcgaggattacctcgaggaacagatccaactcgaggaacaggagctgaagcagaaacagctgaaagaggctgaggggccccttccaatcaaggcaaagcctaagcaaccatttctgaagcggggggagggattggctaggttcactaatgctaagtccaaatttcaaaagggcaaggagagcaaactagtgactaatcagagcacttctgaagatcagcctttgttcaagatggaccgtcagcagcttcaacgtaaaacggctctaaaaaataaagaactgtgtgctgataatcctattctgaagaaggatagtaaggcgcgaacgaaatccggaagtgtgactctctctcaaaaaccgaaaatgcttaagtgctcaaatcggaaatctttatctccttcagggctcaagatccaaaccggcaaaaagtgcgatggacagttccgggaccagatcaaattcgagaacaaggtcacttccaataacaaggagaacgtgaccgaatgccccaaaccttgcgacaccggctgtacaggctggaataagactcagggaaaagataggctgcctctgagcacgggacctgcatctcgccttgccgctaagtcaccaattagagagactatgaaggaatctgaaagctcactggatgtctctctccagaagaagctcgaaacatgggagagagaaaaggagaaagaaaacctggagctcgacgagtttctgttcctggagcaagctgccgatgagatcagctttagttctaacagttcattcgttttgaagattctggagagggatcagcagatctgcaaaggccatcggatgtcctctacccccgtcaaggccgtgccgcagaaaactaatccagccgaccctataagccactgtaacagaagcgaggatttagaccacacggcgagagaaaaagagtccgaatgtgaggtggctcccaaacagttacattctctcagcagcgctgatgagctacgggagcaaccttgtaaaattaggaaggctgttcagaagtccacttccgaaaaccagacagaatggaatgctcgcgatgatgagggagtgccaaactccgactccagtacggattccgaggaacagcttgacgttaccataaagcctagcactgaagacagggaacggggcatatcatctagagaggattctccacaggtgtgcgacgataaaggcccttttaaggataccagaacccaggaagataagcgcagggacgttgaccttgatttgagtgataaggattactctagtgacgagtctattatggagagcatcaaacacaaggtctccgagcccagtaggagtagctcgctctccctcagcaagatggactttgacgatgagcgaacttggaccgacctggaggaaaacctgtgcaatcacgacgtggtcctggggaacgaatcgacttacggcactccccagacttgttaccccaataatgagattgggattctagataagacaatcaaaaggaagattgcgcctgtcaagagaggcgaggacctgtccaagagtcgccgctccagatccccacccacctcagaactgatgatgaagttttttccatctttgaaacctaaaccgaaaagtgacagtcatctggggaatgagcttaaactgaacatatcccaggaccagccccccggggacaacgctagatcccaggtgcttcgcgagaagatcatagaactcgaaacagagattgagaaatttaaggcagaaaacgcgtccctggccaaactgcgaattgagcgtgagagcgcccttgagaagctgagaaaggagatcgcagactttgagcagcaaaaggcaaaagagctggcgcggatcgaagaattcaagaaagaggagatgagaaaactacagaaagagaggaaggttttcgaaaagtacactacagctgctcggacattccctgataaaaaagagcgggaagagatccaaactctcaagcagcagatcgccgacttaagagaagacctgaaacgaaaagagacaaaatggtcctcgactcatagtcgactcaggagtcagatccagatgttagtgagagagaacacagaccttcgcgaagagattaaggtgatggagaggtttcgacttgatgcctggaaaagggctgaggccatcgaatcctctttggaagttgaaaaaaaggataaactcgccaacacttctgttaggtttcagaatagccagatctcaagcggtacccaagtggagaagtacaaaaagaattatctgccaatgcagggcaatcctcctagaagatcaaagagtgctccacccagagacctcgggaatctggacaaggggcaggctgcaagtccgcgggagcccctcgagccactcaacttcccagatcccgaatacaaagaggaggaggaggaccaggatatccagggtgaaatcagccacccagatggaaaggtggaaaaagtctataagaacgggtgcagagtgatcctgtttccgaatggaacccgaaaggaggtgtctgctgatggcaagaccatcactgtgacctttttcaatggggacgtgaagcaagtgatgcctgaccagcgcgtcatctattactacgctgcggcacagacaacgcatactacatatccagaagggctggaggtactgcatttctccagcgggcagattgagaagcattaccctgatggccgcaaggagattaccttcccggaccaaactgttaaaaacctcttccccgatggccaggaagagtcaatcttccccgatgggactatagtgagagttcagagggatggtaacaagttgattgaattcaacaacggccagcgcgaactccacaccgcccagttcaaacgtcgcgagtatccagacggcactgtgaaaaccgtgtatgccaatggccaccaggaaactaagtatcgctcagggcgaatccgcgtcaaggataaggaaggtaatgtactgatggatactgagctctag

SEQ ID NO: 182425 - DNA, 3411 bp, synthetic construct
  misc_feature 1..3411: note = Description of Artificial Sequence: Synthetic coding sequence
  source 1..3411: mol_type = other DNA
atgttcctgatgcccaccagcagcgagctgaacagcggccagaactttctgacccaatggatgacaaacccatctagagccggagtgatcctaaaccggggattcccaattctggaagccgataaggaaaaaagagcagcggttgatatcagcacctctttccctattaagggtacccattttagcgacagcttttcctttattaacgaagaagattcgctgctggaagagcagaagctggagagcaacaacccatataagcctcaatcagacaagtccgaaacccataccgccttcccttgtataaaaaaggggcctcaggttgctgcttgccactccgcgcccggccatcaggaggagaacaaaaacgattttatcccggatttggcaagcgagtttaaagaaggggcctacaaggatccgctgttcaagaagctggaacagctcaaagaagttcaacaaaagaagcaggagcagctgaaaagacagcagctcgaacaacttcagagactgatggaggaacaggaaaagcttctcactatggttagtggccagtgcaccctgccaggactgtctcttctgcccgatgatcagagccaaaaacacagatctccaggcaataccaccacaggcgagcgtgccacttgctgcttcccaagttatgtctatcctgaccccacacaggaagaaacctatccttcaaatatcctcagtcatgagcagagcaatttttgcagaaccgcacacggagactttgtattgacgtctaaaagagctagcccgaatttatttagcgaggcccagtaccaggaggcacccgtggagaagaataacttgaaagaggagaatcgcaatcatcccacgggggagagcattctgtgctgggagaaagttacagagcaaattcaggaggcaaacgataagaacttacaaaagcacgacgattccagcgaagtagccaacattgaggagaggcccataaaagcagcaattggcgagcgaaagcagactttcgaggattacctggaagaacagatccagcttgaagagcaggagctgaaacagaagcagctcaaggaggcagaggggccattgccgattaaagcgaagcctaaacaacccttcttaaagcgaggagaagggctggcgagatttaccaacgcgaagagtaagttccagaagggcaaagagagcaaactggtcacgaaccagagcaccagtgaggaccaaccgctttttaaaatggatagacagcagctgcagaggaagaccgcccttaaaaataaggagctgtgcgccgataatccaatccttaaaaaagattccaaggctcgcacaaaaagcggatccgtaaccctgtcccagaagcccaagatgctgaagtgcagcaaccgcaaaagtctgtctccaagcgggctcaaaattcagacagggaagaagtgtgacgggcagttccgcgaccagataaagttcgaaaacaaggtgacctcaaataataaggaaaacgtaactgagtgccctaaaccatgtgacactggatgcacagggtggaataagacccagggtaaagatcgactgcccctgagtaccggtcctgcgagtagactggcagcaaaaagcccaattagagagacaatgaaggagtctgaaagtagcctggacgtgtctctgcagaagaagctggagacttgggagcgagagaaggagaaggaaaatttagagctcgatgaattcctgtttctggaacaggccgcggacgaaatcagtttctcgagcaactctagcttcgtgctgaaaatcctggaacgggaccaacagatctgtaagggtcaccggatgtcaagcacacccgtcaaagccgtgccacaaaagaccaatccagcggacccaatcagtcattgcaatcgctccgaggacctcgaccatacagctagagaaaaagagagtgaatgcgaagtggctccaaaacagctccatagcctgtcttccgccgacgagcttagggagcagccttgcaagatccgtaaagccgtccagaaaagcacctcagagaatcagaccgagtggaacgcaagggatgatgaaggtgtcccaaactcagacagctctacagacagtgaagaacagctggatgtgaccataaagccgtccacggaggacagggaacgcggaatttctagtcgagaggacagccctcaggtgtgtgatgacaagggaccttttaaggacacgcgcacgcaagaggacaaacggagggatgtggatttggatctcagcgataaagactattcctcagatgagtccatcatggaatcgattaaacataaagtctccgaacccagtagatccagcagtttatccctgagtaaaatggacttcgatgatgagcggacatggacagacctcgaggagaatctctgtaatcacgatgtcgttctgggcaatgagtccacttacggcactccacagacctgttatcccaataacgagatcggcatcctggataagactataaagagaaaaattgctcccgttaaaaggggcgaagatctctccaagagtcgcaggtccaggagtccacccacctctgaactcatgatgaagttcttcccgagcctgaaacctaagcctaaatcggacagccacctgggcaatgaactcaaactgaatatttcacaggaccagcccccgggggataacgcccgctcacaggtcctgagagaaaagataatcgagctagagaccgagattgaaaaattcaaggctgagaacgcctcgcttgcaaagcttcggatcgagcgcgagagcgcgctagagaagctgcgcaaagagatagccgactttgagcagcagaaggcaaaggagttagcgaggattgaggaatttaagaaggaagagatgcggaagctgcagaaagagcgaaaagttttcgagaaatatacgactgcggcacgaacctttccagacaagaaagaaagagaagagatccagacgctcaagcaacagattgcagatttacgggaagatctcaagcggaaggaaacgaaatggtcctccacacattcccggctgcgatcccagattcagatgctagtgcgagaaaacacagatttgagagaggagatcaaagtgatggaacgttttagactggatgcttggaagagggccgaagccatcgaatcttcgcttgaggtcgaaaagaaggataaacttgcaaataccagcgtgaggtttcaaaacagccaaatctcttcggggacacaggtagagaagtacaaaaagaactacctgccgatgcaggggacagctcagcccccacatacccctagtagcctgctagccgatcacctccctccgttgagctcgtttcggccatttagcagaaatatacagctgtgttacaccttttag

SEQ ID NO: 182426 - DNA, 3261 bp, synthetic construct
  misc_feature 1..3261: note = Description of Artificial Sequence: Synthetic coding sequence
  source 1..3261: mol_type = other DNA
atgttcctgatgcccaccagcagcgagctgaacagcggccagaactttctgacccagtggatgaccaatccatcccgggccggcgttatcttaaatcgcgggtttccaatcctggaggctgacaaagagaaaagggcagcagtagatatcagcacttctttccccatcaagggaacacatttttcagattcattcagtttcatcaatgaagaggatagcttgctcgaagaacaaaaactggagagcaacaacccatataagcctcaatcagataagtcagaaacacacacggctttcccttgcatcaagaagggaccccaggtcgctgcttgtcacagcgcccctggacaccaggaggagaataagaatgactttatccctgatcttgcatcggagtttaaagaaggtgcttataaagacccactgtttaagaagctggagcagttaaaggaggttcagcagaaaaagcaggagcaattgaagaggcagcaacttgagcagctgcagaggcttatggaggaacaggaaaagctgcttaccatggtgagcggacagtgtacccttccagggctaagtctcctgcccgacgatcaaagccaaaaacaccgatccccaggcaatactacaacgggggaaagagcgacttgttgcttcccatcatacgtgtatcccgacccgactcaagaggaaacatacccctctaacattctatcacatgagcaaagtaacttttgccgaaccgcccatggagactttgtgttgacaagtaaaagagccagccccaatctcttctccgaggcccagtaccaggaagctccagtcgagaagaacaacttgaaggaagaaaaccggaaccaccctacaggcgagagcattttatgctgggagaaggtcaccgagcagatacaggaagccaacgataaaaacctgcaaaaacatgacgatagcagtgaggtagccaacattgaagaacggcccatcaaggcagccattggggaaaggaagcagaccttcgaggattacctggaggaacaaatccagttggaagagcaagagctcaagcagaaacaactgaaggaggctgaagggccacttccaattaaagcaaagcccaagcagcctttcctgaaacgcggcgaggggttggctcggttcaccaacgctaaaagcaagttccaaaaggggaaggaaagtaagctagtgaccaatcagtctacatccgaggatcagcctctgttcaaaatggatcgccaacagcttcagcgcaagacggcactgaagaacaaagagctgtgcgccgacaacccaatccttaagaaagactcaaaggcgagaacaaagagcgggagcgtgaccttgtcacagaaacccaaaatgcttaaatgtagcaatcggaaatctctctctcctagtgggttaaaaatacaaaccggaaagaagtgcgacgggcagtttcgagatcagataaagtttgaaaataaagtcacaagtaataataaggaaaacgtgacagagtgtcccaaaccttgtgatactggatgtactgggtggaacaaaactcagggaaaggacagacttcccttgagcaccggccccgccagtaggctagccgctaagtcacccatcagggagaccatgaaagagtcagaaagcagcctggatgtttctctgcagaagaaactggaaacctgggagcgcgagaaggagaaagagaacctcgagctggatgagttcctgtttctggagcaggcagctgatgagataagcttctcttctaattcttctttcgtgctaaaaatcttggagcgcgaccagcagatttgtaagggacaccgaatgtcgagcacccccgtcaaagcggtcccccaaaagacaaatcccgccgaccctattagtcattgtaatcgctctgaggatctggatcatacggcacgtgagaaagaatctgagtgcgaggtcgcccccaagcagttacacagtttatcttccgccgacgagttacgcgagcagccgtgcaagatacgcaaagctgtgcagaaatcaaccagcgaaaatcagaccgagtggaatgcaagggatgatgagggggtgcctaactcagactcctccactgacagcgaggagcagctggacgtgaccattaaaccctcaactgaggaccgtgaacgtggtatttcttcccgcgaagatagtccacaggtctgtgacgacaagggcccgttcaaggatacaaggacacaggaagacaaacgaagggatgtagacttagacctttctgacaaggattacagttccgacgaatctataatggagagtatcaagcataaagtttcagagcccagcaggtcaagcagtctgtctttgagcaagatggattttgacgacgagcggacgtggactgatcttgaggagaacctttgtaaccacgacgtcgtattagggaacgagtccacctacgggactccccagacatgttatccaaataatgaaataggtattctggataagactatcaagcgaaagattgcccctgttaaaagaggcgaggacctgtcaaagtcacggcgctctcggtctccacctacctcggagctaatgatgaagttttttccatcccttaagcctaaacctaaatcggatagccacctaggaaacgaattgaagcttaacatcagccaagaccagccccccggagataatgctcggagccaggtgttgcgagaaaagataattgaactggaaacggaaatcgagaagtttaaagcggaaaacgcaagcctcgccaaactccggatcgaacgtgaatctgctctcgagaaactgagaaaggaaatagcggattttgagcagcagaaagcaaaagagctggcacgtatagaggaatttaagaaagaggagatgcgtaagctgcaaaaagagcggaaagtttttgagaaatatacaaccgccgcgcgtacatttcctgataaaaaagagagagaagaaattcagaccctgaaacagcagatcgctgacttgcgggaagacctgaaacgcaaggaaacaaaatggtctagcacacatagccgtttaagaagtcagatccagatgctcgtccgcgaaaacacagacctaagagaggagatcaaggttatggagagattcagacttgatgcatggaagcgcgccgaggccattgagagcagccttgaagtggaaaaaaaggacaagttggcggcgatccaccttgaggatccatctctgcacttactggttatttag

SEQ ID NO: 182427 - DNA, 1035 bp, synthetic construct
  misc_feature 1..1035: note = Description of Artificial Sequence: Synthetic coding sequence
  source 1..1035: mol_type = other DNA
atggacagctacagcgcccccgagagcacccccagcgccagcagcagacccgaggactacttcatcggagcaactcctctccagaagcgccttgaatccgtccggaagcagagttctttcatcctcacccccccaagacgcaaaattcctcagtgtagtcagctccaagaggatgtcgatccacagaaggttgcctttcttctccataaacagtggacattatatagtttgacccctttgtataaattcagctatagcaatttgaaagaatattctcgtctgctgaatgcttttatagtggcagaaaaacagaaaggactggcagtcgaagtcggtgaagacttcaacataaaggtcattttcagcacactgctcggcatgaagggaacccagagggaccccgaagcctttttggtgcagatcgtgagcaaaagccagctcccgtccgaaaatcgggagggaaaggttttgtggacagggtggttctgttgtgtgtttggtgattccttattggaaaccgtgtcagaggattttacatgtttacctctgttcctggccaacggagcagaatctaatacagcaatcatcggcacgtggtttcagaagactttcgactgttacttttctcccctggctattaatgcctttaacttgagttggatggcagccatgtggactgcttgcaagatggatcattacgtggccacgacagagttcctgtggtcggtaccctgcagtccccaatctttggacatttcctttgccattcatccagaggatgcgaaggctctctgggacagcgttcataaaacccccggcgaggtgacccaagaagaggttgatttgtttatggactgtctttacagccatttccatcgacatttcaagattcacctgtccgctacaaggctggttcgagtgagtacttcagtcgcctcagcccacaccgacgggaaaatcaagattctgtgccataagtacctgatcggcgtgctggcatacttgactgagcttgccatcttccagattgaatag

SEQ ID NO: 182428 - DNA, 1173 bp, synthetic construct
  misc_feature 1..1173: note = Description of Artificial Sequence: Synthetic coding sequence
  source 1..1173: mol_type = other DNA
atggacagctacagcgcccccgagagcacccccagcgccagcagcagaccggaggattacttcataggcgctactcccctccagaaacggttggaatcggtgcgcaagcagagctccttcattctgaccccacctagaagaaaaatccctcagtgcagccagctgcaagaggatgtcgatcctcaaaaggtggcattcctactgcacaagcagtggaccttgtatagtctgacccctctgtataaattctcatattctaatttgaaagagtactcccgcctcctgaacgccttcatcgtggcggagaaacaaaaaggtctcgcagtggaagtcggcgaagacttcaacataaaagtgattttttcgacactgctcggaatgaaaggaacccagcgggacccggaggcatttctggtgcaaggactaatcctcagtccccgcctggaatacagcggtacaatcctcgtggattgcaacctgtgcctcttgggcagcagcgacccctcaactctcgctttccaggtcgcgggcactgctggcgcatgccaccacacaaggattgtgtctaagagtcagctgccaagtgaaaaccgagagggcaaggttctatggaccgggtggttttgttgtgttttcggcgactctctactggagaccgtgtccgaagacttcacctgccttcctttgtttcttgccaacggcgcagagtccaacaccgccatcatcgggacgtggtttcagaagaccttcgactgttacttcagtcccttagccattaatgcgtttaacctcagttggatggctgccatgtggacagcctgcaaaatggaccattatgttgccactactgagtttctgtggtccgtgccttgctccccgcagtctttggacatcagcttcgctatacaccctgaggatgcaaaagccctgtgggactcagtccacaaaactccaggagaagtgacccaggaggaagtagatctgttcatggactgtctctactcgcacttccaccgccattttaaaattcatctctccgccacccgactggtgcgcgtgtcgacctcggtcgccagcgcacatacagatggcaagataaaaatcctgtgtcataaatatctcattggcgtcctggcttatcttaccgagctcgctatcttccagatagagtag

SEQ ID NO: 182429 - DNA, 1035 bp, synthetic construct
  misc_feature 1..1035: note = Description of Artificial Sequence: Synthetic coding sequence
  source 1..1035: mol_type = other DNA
atggacagctacagcgcccccgagagcacccccagcgccagcagcagacctgaggactactttattggagctactcctcttcagaagagactcgaaagcgtgaggaagcagtcatctttcattcttactcctccacgaagaaagatccctcagtgcagccagcttcaggaagatgtggatcctcagaaggttgccttccttctacacaaacagtggaccctgtatagtctcacgcctctgtacaagttctcctattctaacctgaaagagtacagtcgcctactgaatgcctttatcgtggccgagaagcagaagggactggccgtggaggtaggcgaagattttaacattaaggtcatattcagcactctcctgggtatgaaaggaactcagcgagatcctgaagccttcttggtccagatcgtgtccaaaagccagctcccgagtgagaatagagagggaaaagttctgtggactggatggttttgctgtgtgttcggagacagcctgctggagacagtaagcgaggatttcacttgcttgccactcttcttagccaatggcgccgaaagtaacaccgccataatcggaacatggtttcagaagacctttgattgctacttctctcccctcgcgataaacgcattcaacttatcttggatggcagccatgtggacagcttgtaagatggaccattatgtcgcaactactgagttcctgtggagcgtgccttgttctccgcaatccctcgacatctccttcgccatccacccagaggatgccaaggccctttgggattcggtgcacaagacaccgggcgaggtgacccaggaggaggtggacctttttatggactgcctgtactctcatttccatcggcatttcaagatccacctgtccgctaccaggctggtgagagtttccacttctgtggcttctgcccatacagacggcaagatcaaaattctgtgtcacaagtacctaattggagtgctggcttacctgacggagctggccatcttccagattgaatag

SEQ ID NO: 182430 - DNA, 615 bp, synthetic construct
  misc_feature 1..615: note = Description of Artificial Sequence: Synthetic coding sequence
  source 1..615: mol_type = other DNA
atggacgagaccgtggccgagttcatcaagcggaccatcctgaagatacctatgaacgaattgacgaccatcctcaaggcatgggactttctctccgagaatcagttacagactgtcaattttaggcagagaaaagagtccgttgtgcagcacctgatacatctctgtgaagagaagagggcgtcaatttccgacgctgcattgttagacatcatttacatgcaattccaccaacatcaaaaagtctgggaggtgtttcagatgtcaaagggcccgggcgaggatgtggacctcttcgacatgaaacagttcaaaaactcatttaagaagattctgcaaagagcacttaaaaacgtgactgtgagctttagagagactgaagagaacgcagtctggatccgcattgcgtggggaacacaatatacaaaacccaatcagtataagccaacatatgtagtttactactcccaaactccctatgccttcacctctagtagcatgctgagacgaaacactccattgctgggccaggagttagaggctaccggcaagatctacctgaggcaggaagaaattatactcgatattaccgaaatgaaaaaggcctgcaactag

SEQ ID NO: 182431 - DNA, 1020 bp, synthetic construct
  misc_feature 1..1020: note = Description of Artificial Sequence: Synthetic coding sequence
  source 1..1020: mol_type = other DNA
atggacgagaccgtggccgagttcatcaagcggaccatcctgaagattcccatgaacgagctcacaaccatcctcaaggcttgggattttctctctgaaaatcaactgcagaccgtgaattttagacagcgaaaggagagcgtcgtgcagcatttaatccacctttgcgaggagaaacgggcgagcattagtgacgcagccttgctggatatcatatacatgcagttccaccagcaccagaaagtgtgggaggtgtttcagatgagtaagggtccaggcgaggatgtggacctgtttgatatgaagcaattcaaaaattcttttaagaagattctccagcgtgctcttaaaaatgtgaccgttagtttcagagagactgaggagaacgcagtctggatacgtatcgcctgggggactcaatacaccaaaccaaaccaatacaagcccacctatgtcgtgtattactcgcagaccccatacgccttcactagcagtagcatgttacgaaggaacactcccctcctcgggcaggcccttactatcgctagcaaacaccaccaaattgtgaaaatggacctgcgcagcaggtacctcgatagtctcaaggctattgtctttaagcagtacaaccagacatttgagactcataatagcacaaccccattgcaggagaggtccctggggctggacattaatatggatagccggattatccacgagaacattgtggaaaaagagagagtgcagcggatcacgcaggaaaccttcggggattacccacagccacagctagaatttgcccagtacaagctggagacgaaatttaaatctggcctgaacgggtccatcctggctgagagagaggagccattgcggtgtctgattaaattctcctctccccacttgttggaggcactgaaatcccttgcgccagctgggatcgcagatgcgccccttagccctctgctcacctgcattccgaataaacgcatgaactactttaagatccgcgacaagtag

SEQ ID NO: 182432 - DNA, 918 bp, synthetic construct
  misc_feature 1..918: note = Description of Artificial Sequence: Synthetic coding sequence
  source 1..918: mol_type = other DNA
atggacgagaccgtggccgagttcatcaagcggaccatcctgaagatccctatgaacgaactgacaaccatcctgaaggcctgggacttcctgagcgagaaccagttacagaccgtgaactttagacagaggaaggagtctgtcgtccagcacttgatccacctttgtgaggagaagcgcgccagcatctcggacgcagctctgctcgacatcatctacatgcagttccatcaacaccaaaaggtgtgggaggtgtttcagatgagcaaggggcctggagaagacgtggacttgttcgatatgaaacagttcaaaaacagctttaaaaaaatactccagcgagcgttgaaaaatgtgacggtaagtttccgggagaccgaagagaatgcagtctggatccggattgcctggggcacacagtacaccaagcctaaccaatataaacccacatacgtggtgtactatagccagacaccatatgcatttacctcatctagcatgctacgccgcaacactccactgcttggtcagacctttgagacccacaacagtactactccgctccaggagagaagcttgggactcgatatcaatatggacagcagaatcatccatgagaacatcgtcgagaaagaaagggtacagcggattacacaagagactttcggcgactatccacagccccagttggagttcgcccaatataaattggaaacaaaatttaaatctgggctgaatggttcgattctcgccgagcgtgaggagcctctacgctgcctgattaaattctcatcgccccatctgttggaagccctcaagagccttgcccctgccgggattgccgatgctccgctctctcctcttctcacttgcatcccaaacaagcggatgaattatttcaagatccgcgacaaatag

SEQ ID NO: 182433 - DNA, 960 bp, synthetic construct
  misc_feature 1..960: note = Description of Artificial Sequence: Synthetic coding sequence
  source 1..960: mol_type = other DNA
atggacgagaccgtggccgagttcatcaagcggaccatcctgaagatccccatgaacgagttgaccaccatcctgaaagcctgggattttctgtccgaaaaccagttgcagaccgtgaatttccgccagagaaaagagtccgtggtccagcacttaattcatttgtgcgaagagaaacgggcaagtatttctgatgcagccctgttggatattatctgtgaagacgttgatctgttcgacatgaaacaattcaaaaactcctttaagaagatcctgcagagggcactcaagaacgtgacagtatcttttagggaaacggaagagaatgctgtttggattcgtatagcgtggggcacacagtatacaaaacctaaccagtacaaacctacttatgtagtgtattactctcaaacaccctacgcgtttacatcctcctctatgctgcggcgcaatacccctctgttaggtcaggccctgactattgcttcaaagcatcaccaaatagtgaaaatggacctaagatctaggtacctggatagtttgaaagcaatcgtgttcaagcaatataatcaaacgtttgaaacccacaatagcacgaccccacttcaggagagatctctgggcctggatatcaatatggacagtagaattatccacgaaaatatagttgagaaagaacgtgtccaaagaatcacacaagaaactttcggagattacccacaaccacagcttgagtttgcccagtacaaattagagacaaagtttaagagcggtttgaacggatccattttagccgagagagaggagcctctgagatgcttgataaagttctcgtccccgcacctgctggaagcgctgaaaagccttgctccggccggaattgccgatgctcccctttcacccctgctaacgtgtattccaaataaacgtatgaattattttaagatcagggataaatag

SEQ ID NO: 182434 - DNA, 1062 bp, synthetic construct
  misc_feature 1..1062: note = Description of Artificial Sequence: Synthetic coding sequence
  source 1..1062: mol_type = other DNA
atggacgagaccgtggccgagttcatcaagcggaccatcctgaagatccctatgaacgaactaacgaccatcttgaaagcttgggacttcctctcagagaatcaactacagacagttaattttcggcaacgtaaggagtctgtggtacagcatctgatccatctctgcgaagagaaacgagcttctattagtgacgccgcgctgctggacatcatttatatgcagttccatcaacatcagaaagtctgggaggtgtttcagatgtctaaagggcctggcgaagacgtggatctgtttgatatgaagcagttcaaaaatagcttcaaaaagatcctccagcgtgccttaaagaatgtaactgtatcattcagagagaccgaagaaaacgccgtctggatcaggattgcgtgggggacccagtacaccaagcctaatcaatataagcccacatacgtcgtctactactcccagaccccgtatgcctttacaagctcatctatgctgcgtcgcaatacgcccttactcggacaggctctgactattgcatccaaacatcaccagattgtgaaaatggatttgcgatcgagatatctggattcactgaaagctatcgtcttcaaacagtacaatcaaacatttgagacacataatagtacgacgcctcttcaggagcggtcactgggactggacatcaacatggattcccggataattcatgaaaatatcgttgagaaggagcgtgttcagcgaattacccaagagacttttggggactacccccagccacagctggagttcgcccagtacaagctagaaacgaaattcaagtccgggctgaatggctctatattggcagaaagagaagagccactgaggtgcttaattaagttttccagtccacacctgctggaggcgctgaagagtctggctcccgccgctctggtgtgccggatccagaaacttctctgctattctggttcacattcccaagggactcaagatcctagctcttggcagaaggatctatatctgctgttcgttcctctatacccgcgttgttag

SEQ ID NO: 182435 - DNA, 903 bp, synthetic construct
  misc_feature 1..903: note = Description of Artificial Sequence: Synthetic coding sequence
  source 1..903: mol_type = other DNA
atggagcaggccaaccccctgcggcccgacggcgagagcaagggcggtgtgttggcccatttggagcgcctggagactcaggtgtcacggtctcggaagcagagtgaagagctacagtctgtccaagcgcaggagggagctctgggtacgaagatccacaagctccgcaggctgcgcgacgagcttcgtgccgtcgtgcgacatcggagagcaagcgtgaaggcctgcatcgcaaacgtagagcccaatcaaactgtggagattaacgagcaagaggccctcgaagaaaaattggagaatgttaaagccatccttcaggcttaccactttacaggcctttcaggcaagctgacgagcaggggcgtctgcgtttgcatatccactgcgtttgaaggcaacctcctggacagctactttgtcgacctggtaattcagaagccactacgaattcaccaccactcagttcccgtttttattccactcgaagagatcgctgccaagtatcttcagaccaacattcagcatttcttgttcagcctttgcgagtacctgaatgcgtactcaggacgtaagtaccaggctgatagactgcagagcgacttcgccgctctgctgacaggccctttgcagcgaaatcccctatgtaacctgttatcttttacctacaaactcgatccgggagggcagtcttttcccttctgcgctagactgctctataaggacctgactgcaacccttccaacagatgtgaccgtgacctgccagggcgtggaagtcctcagtacctcttgggaggaacagagagccagccatgaaaccctattctgcaccaaacctttgcaccaggtgtttgcctccttcactaggaaaggggaaaagcttgatatgtctttggtcagttag

SEQ ID NO: 182436 - DNA, 903 bp, synthetic construct
  misc_feature 1..903: note = Description of Artificial Sequence: Synthetic coding sequence
  source 1..903: mol_type = other DNA
atggagcaggccaaccccctgcggcccgacggcgagagcaagggcggcgttctcgcccatctggagcgcctggagacgcaggtctctcgtagtcgaaagcagagcgaagagctccagagcgtgcaagcccaggagggggccttggggacgaagatccataagctgcggagactgcgggacgaacttcgagcagttgttcgccacaggcgcgcctctgttaaggcatgtatagccaatgtggagcccaatcagacagttgagataaatgagcaagaggccctggaagagaagctggagaacgtaaaagccatacttcaagcctatcatttcactggcctgtctggcaagcttacctctagaggggtgtgcgtgtgcatctcgacagcttttgaagggaaccttcttgactcttatttcgtcgatttggtcatacaaaaaccacttcgtattcaccaccatagcgtgcctgtatttatcccccttgaggagatagctgcaaagtacctgcagaccaatattcagcatttccttttttcattgtgcgagtatctcaatgcttactccgggagaaaatatcaagcagatagactgcaaagcgattttgccgcactgctcaccggcccactccagagaaacccactgtgtaacctgctgagctttacctacaagctggacccgggaggccagtcctttccgttctgcgctcgcctgctgtacaaggatttaaccgccacattacccaccgacgtgactgtgacgtgccagggggtggaggtgctcagcacgtcctgggaggaacagcgagcatctcatgagacccttttttgcacaaaacccttacaccaagtcttcgcctcttttacccgtaagggtgagaagctggatatgtctcttgtgtcttag

SEQ ID NO: 182437 - DNA, 885 bp, synthetic construct
  misc_feature 1..885: note = Description of Artificial Sequence: Synthetic coding sequence
  source 1..885: mol_type = other DNA
atggccggcatcctggccagcggcctgggcgtgctggcccacctggagcgccttgaaacacaggtaagccgctcgagaaaacagagtgaagagctgcaaagtgttcaggctcaagaaggggccctgggaacaaagatccacaagctgaggcgtttgagggatgaactgagggctgtggtcagacatcggcgagcctcggtgaaggcgtgtattgccaatgtggaaccgaatcagacagtggagatcaacgagcaggaggccctcgaagagaagctcgagaatgtcaaggctatactgcaggcctaccattttacaggcctcagcggcaaactgacaagccgtggggtatgcgtgtgtatttcaaccgcctttgagggcaacctactggattcatacttcgtggatctcgtgatacagaaaccattaaggattcatcaccacagtgtgccggtttttatccctctagaagaaattgcagccaagtatctgcaaaccaacatccagcactttctcttttccttgtgcgagtacctcaacgcttacagcggacgcaaatatcaagcagaccgcctgcagtccgactttgcggccctgctaactgggccgctgcaaaggaacccactgtgcaacctcctaagtttcacttacaagctggaccctggggggcagagcttccccttctgtgctcggctcctgtataaagacctcaccgctactttgccaacggacgttaccgtgacctgccagggggtggaggttttgagtacgtcatgggaggaacaaagagctagtcatgaaacattgttctgcacgaagcccctgcatcaagtgtttgcaagctttacacggaaaggcgagaagctggacatgagcctggtgtcctag

SEQ ID NO: 182438 - DNA, 309 bp, synthetic construct
  misc_feature 1..309: note = Description of Artificial Sequence: Synthetic coding sequence
  source 1..309: mol_type = other DNA
atgcaggagaagtaccccgacgccgtgtacctgagcgagggccccagtagctgctcaatgggcataagatccgcaagccgcccaggctttgagctggtgattgtgtggcggatccagattgacgaagacgggaaggtgtttcccaagctggacctcctcaccaaggttccccagcgagccctggagctcgataagaaccgggccatcgaaactgctcccctgagctttcgcaccctggtcggactgcttgggattgaagctgcgctggaatctctgattaagagcctctgtgccgaggagaacaactag

SEQ ID NO: 182439 - DNA, 348 bp, synthetic construct
  misc_feature 1..348: note = Description of Artificial Sequence: Synthetic coding sequence
  source 1..348: mol_type = other DNA
atggaggcccccagctggagcgtgctgcagcggagcggcgacgaggagaagtaccccgatgccgtgtatctctctgaaggaccttcgtcatgcagcatgggaatacgctccgccagccgacctgggttcgagctggtgatcgtgtggaggatccagatagatgaggatggcaaagtgtttccgaagctggacttgctcaccaaagttccacagcgggctctggaattggacaagaatcgggcgatcgagacagctcctctgagtttccggactctggtgggtctcctgggcatagaggctgccctcgagtctctgattaagtccctgtgtgccgaggagaacaattag

SEQ ID NO: 182440 - DNA, 867 bp, synthetic construct
  misc_feature 1..867: note = Description of Artificial Sequence: Synthetic coding sequence
  source 1..867: mol_type = other DNA
atggacgccgagctggccgaggtgcgggccctgcaggccgagatcgccgcactcaggcgcgcttgtgaggaccctccagccccttgggaagagaagtccagagttcagaaatcatttcaggctattcaccagttcaacctggagggctggaagagctctaaagatctcaagaaccagctgggccaccttgagtcagaactgagcttcctgagcacattgactggaattaatatccgcaaccattctaagcaaacagaagacctgacgtcaacagagatgacagagaaatccatcaggaaagtactccagagacacaggctgtcaggtaactgtcatatggtaacgtttcagttggaatttcagattctggagatccagaataaggaacggctttcttcagcggtgactgatttaaatattatcatggagcctacagagtgttccgagttgtcagagtttgtcagccgcgccgaagaacgaaaggacctgttcatgttctttagatccctgcacttctttgtggaatggtttgaatacagaaaaagaacctttaaacaccttaaggaaaagtatcccgatgcagtctacctctcggagggaccttcctcctgttccatgggcatccgctctgcctcccgcccggggttcgaattggtgattgtatggagaatccaaattgacgaggacggtaaagtgtttccgaagctggacctgctgacaaaagttccacaaagggctctcgaactggacaagaacagggcaattgagactgccccattgtcattcaggactctggttggactgctgggaattgaggctgccctggaaagcttgatcaagagcctgtgcgctgaagaaaacaattag

SEQ ID NO: 182441 - DNA, 744 bp, synthetic construct
  misc_feature 1..744: note = Description of Artificial Sequence: Synthetic coding sequence
  source 1..744: mol_type = other DNA
aagcgggccggccggagcgacagctgcgccgccggccccgccgccgtaagcaatgcaccctggacccagagctggcagcgctgtgcgccatgcaagttacggagcaggccttgtggagagcgcgtgagaacgcatcgcaggcccggcaaacgaagtcctgaaagcagcatcaggaaagtgctccagcgccacaggctctcaggcaattgccatatggtgacattccagttggaatttcaaattttagaaattcagaacaaggagcgcctatcctcagctgtgaccgatctcaatatcatcatggagccaactgaatgctccgagctatcggaatttgtctcaagggccgaggaaagaaaggacctgttcatgtttttccggtctttgcattttttcgttgagtggtttgaataccggaaaaggacatttaagcacttaaaagagaaataccctgacgcagtgtatctgagtgaaggtccgtctagctgtagtatgggtattcgtagtgcatctaggcctggattcgaattagtgatagtctggagaatccagattgatgaggatggtaaggtgttcccaaagctagacctgctcacaaaggtgccgcaacgtgccctagagctcgacaaaaacagggccatagagaccgcccctctcagctttcgcaccctagtgggcttgttgggcatcgaagccgctctggaaagcctgataaaaagcttgtgtgcagaggaaaacaactag

SEQ ID NO: 182442 - DNA, 807 bp, synthetic construct
  misc_feature 1..807: note = Description of Artificial Sequence: Synthetic coding sequence
  source 1..807: mol_type = other DNA
atgagcggcaaggccaacgccagcaagaagaacgcccagcagctgaaacggaatcccaaaagaaagaaggacaacgaagaggtcgtgctctccgaaaacaaggttcgaaacacagttaaaaagaacaagaatcatttaaaggacttatcctcagaaggtcagacaaagcataccaacctgaagcatgggaagaccgctgccagcaagagaaaaacatggcagccattgagtaagagtacaagagaccatctccagacaatgatggagtccgtaataatgaccatcttgagcaacagtataaaagaaaaggaggagatacagtaccaccttaatttcttgaaaaagcggctgttacagcagtgtgagactttgaaggttccccccaagaaaatggaggatctgaccaatgtaagctctctgctgaatatggaaagagccagagataaggccaatgaggaaggcctggctctcttgcaggaggaaattgacaagatggttgaaactacagaactgatgactggtaacatccaatctctaaagaacaagatccagatccttgcttctgaggtcgaagaagaggaagagcgagtcaagcagatgcaccagattaactctagtggcgttctcagcctaccagaattatcacagaaaacactgaaagctccgactttgcagaaagaaatactggcgctcattcccaaccaaaatgcattactaaaagacctggacatcctgcataatagttctcagatgaagtcgatgtctacctttattgaagaagcctataaaaagttagatgcatcctag

SEQ ID NO: 182443 - DNA, 807 bp, synthetic construct
  misc_feature 1..807: note = Description of Artificial Sequence: Synthetic coding sequence
  source 1..807: mol_type = other DNA
atgagcggcaaggccaacgccagcaagaagaacgcccagcagctgaaaagaaacccgaagaggaagaaggataatgaggaggttgttctgagcgagaataaggtacggaacactgtgaagaaaaataagaatcacctcaaagaccttagttcggagggccagacaaaacacaccaacctaaagcacggaaaaactgccgcttcgaaaagaaagacatggcagcctttgtctaaaagtaccagagaccacctgcagaccatgatggaatctgtgattatgactatactcagcaactcgatcaaagagaaagaggaaatccagtatcatttaaacttcttaaaaaagcgcctgctccagcagtgcgagaccctcaaggtaccgcccaagaaaatggaagatctcactaacgtttcaagcttactaaacatggaacgggcccgcgacaaagcaaacgaggagggattagcactgctacaagaggagattgacaaaatggtggagacaaccgaattaatgaccggcaatattcagtccctaaagaataaaatccaaatattagcctcagaggtggaggaggaggaagagcgcgttaagcaaatgcaccagattaattcgtctggtgtgctgtctctcccggagcttagtcagaaaacactgaaggctccgaccctgcagaaggagattctagctttgatccctaaccaaaacgctctacttaaggatctggatatcctgcataatagttcacaaatgaaatccatgtctacctttatcgaggaggcttataagaagctagacgcgtcctag

SEQ ID NO: 182444 - DNA, 384 bp, synthetic construct
  misc_feature 1..384: note = Description of Artificial Sequence: Synthetic coding sequence
  source 1..384: mol_type = other DNA
atgggcgacaagcccatctgggagcagatcggcagcagcttcatccagcattattatcaacttttcgacaacgacaggactcagctcggagcgatctatatcgacgcttcctgcctgacgtgggagggccagcagttccagggaaaagctgctatcgtagaaaagctctcatcccttccgttccaaaaaatccagcattctattaccgcacaggatcatcagcccaccccagactcctgcataatcagtatggtggtggggcagcttaaggcagatgaggacccaatcatgggctttcatcaaatgttccttcttaaaaacatcaacgacgcctgggtttgcactaacgatatgttcaggttagccctgcataattttggatag

SEQ ID NO: 182445 - DNA, 786 bp, synthetic construct
  misc_feature 1..786: note = Description of Artificial Sequence: Synthetic coding sequence
  source 1..786: mol_type = other DNA
atgagctggtgctgcctgtggctgtgcctgagcagcgtgggccggaccggttctgccggaccctcactgcccttttccgaactgtgcagcctcggcctcctgagactccgccccgtcttctcaccgttgcacagtggccccggcaagcccgcacaattcctagccggcgaggcagaagaagttaacgcatttgccctcggcttcctgtccacctccagtggcgtaagtggggaagacgaagttgagcctttgcacgacggcgtcgaggaagctgagaagaaaatggaagaggagggcgtgagcgtgagcgaaatggaagctactggggcacaaggcccttcacgcgtagaggaagccgaaggccacaccgaagtgacagaggccgaaggctcccagggcaccgccgaggcggatggcccaggggctagctcaggcgacgaagacgcttcaggtagagcggcttcccctgagtcggctagttctacacctgagagtctgcaggcccgcagacatcaccaatttttggagccagctccagcacctggcgcagcagtgctgagttccgagccagccgagccacttctggttagacatccgcctaggccccgcaccacaggtcctaggccacggcaggaccctcacaaggccggactcagtcattacgtcaagctcttctccttctatgccaagatgccaatggagcgaaaagcccttgaaatggtagagaaatgcatttttgtcatgatttggcgatatcttctcttaatgctggccgcgagactgtag

SEQ ID NO: 182446 - DNA, 1686 bp, synthetic construct
  misc_feature 1..1686: note = Description of Artificial Sequence: Synthetic coding sequence
  source 1..1686: mol_type = other DNA
atggccgaccacaaccccgacagcgacagcaccccccggaccctgctgcggagagtgttagacacagccgacccccgcacaccgaggagacccaggagcgcccgagctggcgcaagaagagctctccttgaaacagctagtccacgcaagctcagcggacagactaggaccattgcgagaggccggtcccatggcgcgcgcagcgtgggtcgctcagctcatattcaggcttccggccacctagaggagcagaccccaaggacactgcttaagaatattctgctgaccgccccggaatcctccatcttgatgcccgaatctgtggttaagccagtgcctgctccacaggccgtccagcctagcagacaagaaagctcatgtgggtcactggagctgcagctgccggagctcgagccccctacgaccctggcccctggcttactggcccccgggagacgcaaacagcgtctgaggttgtccgtgttccagcagggggttgatcagggactgtctctaagccaggaaccccagggtaacgctgacgctagctccctgacgcggtcactaaaccttaccttcgcgactcctctgcagccccagagcgttcagagacctggattggcgagaaggcctcctgccagacgcgcagtcgacgtaggagctttccttcgtgatttgcgggacactagtcttgcccccccgaatatcgtgttagaggacacccaacccttttcccagcccatggtggggagccccaacgtatatcacagtttaccctgcacaccccacacaggagcagaagacgccgagcaggccgcagggcgtaaaacccagtcatcagggcctggcctccaaaaaaacagtcctggaaaacccgctcagttcctggccggggaggctgaggaagtaaatgccttcgctttggggtttttatcaacctccagcggcgtgtccggcgaggacgaggtggagccactacacgacggagtcgaggaagccgagaaaaaaatggaagaggagggtgtgtcagtgagcgaaatggaagcaacgggggcacagggacctagcagagtcgaagaagccgagggccacaccgaagtcaccgaggccgaaggttcccagggaaccgccgaagccgatggcccaggcgcgagtagcggggatgaggacgcctcgggcagggccgcctcacccgaatctgcctcaagcacccctgagtccctgcaagccagacggcaccaccagttcttagaacccgcgccagccccaggcgcggctgtgttgtcctcagaacctgcagagcccttgttggtgcgccaccccccacgccctcgcacgacgggcccacgccccaggcaggacccccacaaggcggggttgagccactacgtaaaactgttctcattttatgctaaaatgcctatggagaggaaggctttagagatggtcgaaaaatgccttgacaaatactttcagcacctgtgtgacgacctggaagtcttcgcggctcacgccgggcggaaaacagtgaaaccagaggatctggagttgttgatgaggcgacagggcttggtaaccgatcaggtgtccttgcacgtgctggtggagcggcaccttcctctggagtaccgccaattgctaatcccgtgtgcttattccgggaacagtgtcttccccgctcagtag

SEQ ID NO: 182447 - DNA, 447 bp, synthetic construct
  misc_feature 1..447: note = Description of Artificial Sequence: Synthetic coding sequence
  source 1..447: mol_type = other DNA
atgcccgagagcgtggtgaagcccgtgcccgccccccaggccgtgcagccctcacgtcaggaaagcagttgcgggtcgctggagctacagttacccgaactggagccgcctactactctggccccagggttactcgctcccgggaggaggaagcagcgactgcgcttgagtgtatttcagcaaggggttgaccagggcctgtctcttagtcaagaacctcagggtaacgctgacgcgagctcactaacaaggtccttgaacttgactttcgcgacacccctccaaccacagtcggtgcagcggcccggactcgccaggagacccccagcccggagagcggtcgatgtaggagccttcttaagagaccttcgtgatactagccttgcccccccctctaaagtgggctttagtcctgctggtctgtggggaaagcttagcccgctctag

SEQ ID NO: 182448 - DNA, 1686 bp, synthetic construct
  misc_feature 1..1686: note = Description of Artificial Sequence: Synthetic coding sequence
  source 1..1686: mol_type = other DNA
atggccgaccacaaccccgacagcgacagcaccccccggaccctgcttcgcagggtgctcgacactgcagacccaaggacacctcgccggccgcgatctgcccgcgccggcgcacgaagggcgctattagaaaccgcaagtccaagaaaattgtctggtcaaacccgcactattgcgagaggacgcagccacggcgcgagaagtgtgggccggtctgcacacattcaagcttccggtcacttggaagagcagacaccacgcaccctgttgaaaaacatactgttgacagctccagagtcgtccatcttaatgccagagagcgtggtaaagcctgttcccgccccccaagctgttcagcccagtcgacaggagtccagctgtggctcccttgagcttcagctgcctgagctagagcctcctactaccctcgctcctgggctactcgcaccaggaaggcgtaaacagagacttcggctcagtgtgtttcagcagggtgtggatcaaggacttagcctgtcccaggagccccaggggaacgcagatgcttcaagcctgacacggagtctgaacctaacttttgcgactcccctgcagcctcagtccgtgcagcgccctggcttggcgcgtcgcccccccgctcgtcgcgctgttgacgtgggagctttcctgcgagacctgagagacacttccctggccccacctaacattgttttggaagacactcagccatttagtcagcccatggtgggctctcctaatgtgtatcactcactaccctgcaccccacacactggagccgaggacgcagaacaggctgcaggcaggaagactcaatcgagtgggcctggtctgcaaaagaactcacctggaaagccagcgcaattcctggccggcgaagccgaggaggtgaatgcgtttgcactaggctttttgtctaccagctccggcgtgtcaggggaagatgaggttgaacccttgcacgatggggtcgaggaggcagagaaaaagatggaagaggagggtgtctctgtctcagagatggaagcaacaggcgctcaagggccttcacgcgtggaggaggctgagggtcacactgaggtgacagaggcagaaggctcacaggggacagccgaagccgacgggcctggagccagcagcggcgacgaggacgcatcaggtagagccgcttctcctgaaagcgccagtagcacccccgagtcactccaggcaaggaggcatcaccagtttcttgagcctgcacctgctccgggagccgcagtcttatcttctgaacctgctgaaccacttctcgtcaggcaccccccccgcccaaggactaccggccctaggcctcgccaggacccccataaggccggtctgtcacactacgttaagctgttttccttctacgccaagatgccaatggaacgcaaagcgctagagatggtggaaaagtgcctcgacaagtacttccagcacctatgcgatgatttggaggtgttcgcggcccatgctggccgcaaaaccgtgaaacctgaggacctcgaactcttgatgaggcgacagggcctggtgactgatcaggtgtccctgcacgtgctggttgagcggcacctcccactcgagtaccggcagctgctgatcccctgtgcatactccggcaatagtgttttccccgcccagtag

SEQ ID NO: 182449 - DNA, 819 bp, synthetic construct
  misc_feature 1..819: note = Description of Artificial Sequence: Synthetic coding sequence
  source 1..819: mol_type = other DNA
atgcggcggagccggagcagcgccgccgccaagctgcggggccagaagagatccggggcatctgccgcccccgccgcatcagccgcagccgccctggctccatcagccacccggaccaggaggagtgcaagtcaggctggatctaagtcccaagctgtggaaaaacctccatctgaaaagccacgcctgaggaggtcctctcctcgtgcgcaggaagagggtcccggcgaaccacccccccctgaactggctctacttccgccccctccccccccccccccaacgcccgcaacaccgacttcgagtgcatcgaatctcgatttaggcgagcagcgggaaaggtgggagactttccaaaaaaggcagaagttgactagcgagggagccgctaaactgctgctggacacttttgaatatcaaggactcgtaaaacatacaggcggatgtcattgtggagccgtgaggttcgaggtatgggcatcggccgatctccacattttcgactgtaattgtagcatttgcaaaaagaagcagaaccggcatttcatcgtgcccgcttcaaggttcaagcttctgaaaggcgctgagcatattacgacgtatacattcaacacgcacaaggctcaacatacattctgtaagcgatgcggcgtgcaatccttttatacccccaggtcgaaccccggcgggtttgggatcgctccccactgtttggacgaaggtacggtgcgatcaatggtaacagaggagtttaacggttccgactgggagaaagccatgaaagaacataagaccattaaaaatatgtcaaaggagtag

SEQ ID NO: 182450 - DNA, 2961 bp, synthetic construct
  misc_feature 1..2961: note = Description of Artificial Sequence: Synthetic coding sequence
  source 1..2961: mol_type = other DNA
atggtgagcaagagcgaccagctgctgatcgtggtgagcatcctggaaggcagacacttccctaagaggcctaaacacatgctggtcgtcgaggccaaattcgacggagagcagctggctaccgatcctgtggaccataccgaccagcctgagtttgcgacagaactggcatgggagattgatagaaaggccctgcaccagcacagactgcagagaacacctatcaagttgcagtgctttgccctggaccccgtcaccagtgcaaaagagaccattggctatatagtgctggatctccgcaccgctcaggaaactaagcaggccccaaaatggtaccagctcttgtctaacaaatacactaagttcaaatcggaaattcagatatctatagctctggagaccgataccaaacccccagttgactcttttaaggccaaaggagcaccaccgcgggatgggaaggtgcccgccattctcgccgggcttgacccgagggacatcgtagccgtgctgaacgaggagggcggataccatcaaattggccccgccgaatattgtacagactccttcattatgtccgtaaccatcgccttcgccactcagctagagcagttgatcccgtgcacgatgaagcttcccgagcgacaacctgaattttttttctattattcccttctcggcaacgacgtgaccaacgaaccttttaatgacctaataaaccccaacttcgagcctgaacgcgcatcagtgcgcatacggtcaagtgtggagattctgcgagtctaccttgcccttcagtcaaagctgcagattcacctgtgttgtggagaccagagtctaggatcaacagagatccctcttacggggctcctcaagaaaggcagcacagagatcaaccagcacccagtcaccgtcgagggggctttcaccctggacccgcccaaccgggccaagcaaaagctggcgcctattcctgtcgagctggcaccaaccgtgggcgtgtctgtggctcttcagagggagggaatcgactcacaatccctcatcgagttgaagacccagaatgaacacgagcctgaacattcgaagaagaaggtactaacccctattaaggagaagactctgacgggacccaagtctccaacggtttcccctgtgccaagccacaaccaatccccccccacaaaagatgacgctaccgaaagcgaggtggagagtctgcaatatgataaagacaccaaacccaatccaaaagcaagttcgtccgttcccgccagccttgcacagctggtgaccactagcaacgcttccgaggtggcaagcgggcaaaaaattgctgtgcccgctactagtcatcacttctgtttctccattgaccttcggagcattcatgccctggagattggattccccattaactgcatcctgcgatattcctatccctttttcggtagcgctgctccaatcatgaccaacccaccagtggaagtccgcaagaacatggaggtgtttctcccccagtcctactgtgcgtttgactttgcgactatgcctcaccaactgcaggacacttttctccgcataccgctcctcgtagaactgtggcacaaggataagatgagcaaggatctcttactgggtatagccaggattcagctgtcaaacatcctcagcagcgagaaaacaagattcttggggtccaacggcgagcagtgctggcgccagacctacagtgaaagtgtgcctgttatcgcggctcaggggagcaacaatcggatcgctgacctctcctacaccgtgaccctggaggattatggcctggtgaaaatgagggagatctttatatccgatagctcccagggagtgagcgctgttcagcagaagcctagtagtttgcctcccgctccttgtccatctgaaatccagactgaaccacgcgaaactctagaatataaagcagccttggaattagaaatgtggaaagaaatgcaggaggacatttttgagaatcaattaaagcagaaagagctggcgcacatgcaggccctggccgaggagtggaaaaaaagagaccgcgaaagggaatcacttgtgaagaaaaaggtggccgaatataccatcctggagggcaaactgcagaagacactaattgatctcgagaaacgagagcaacagctagccagcgttgagagcgagctgcagagagagaagaaggagttgcagagcgagcggcaaaggaatctacaggaactccaggactctatcaggcgggccaaggaggactgtatccatcaagtggaactggagcggctgaaaatcaaacaattagaagaagataaacatcgattgcagcagcaacttaacgacgctgagaataagtataaaatcttggagaaagagttccagcaattcaaggatcagcagaacaacaagcccgagattcgtctgcagagcgagatcaatctcctgaccctcgagaaggtagaactagaaagaaagcttgaaagcgccaccaaatctaaattgcactataaacaacaatggggaagagccctgaaagagctcgctaggctgaaacagagagagcaggagtctcagatggccaggctcaaaaaacaacaggaagagctggaacagatgcgcctccggtaccttgcagccgaggaaaaggacaccgtcaaaactgagcgacaggagctgctggatattagaaatgagctgaaccggctccgacaacaggaacagaagcagtaccaagacagtacagaaatcgcaagcggcaaaaaagatggccctcacggtagcgtgcttgaggagggcctggatgattatctgactagactgattgaagaacgcgatacactgatgcgcacaggtgtctacaatcacgaggataggatcatatccgagctcgatcggcagattcgggagatcttggcaaagagtaatgcaagcaactag

SEQ ID NO: 182451 - DNA, 2883 bp, synthetic construct
  misc_feature 1..2883: note = Description of Artificial Sequence: Synthetic coding sequence
  source 1..2883: mol_type = other DNA
atgctggtggtggaggccaagttcgacggcgagcagctggccaccgacccggttgaccataccgatcagccggagtttgccaccgagctggcttgggagatcgacaggaaggcattgcatcagcacaggctgcagcggactcctatcaaactacagtgttttgctctggacccagtgacttccgctaaagagactatcgggtacatagtgctcgacttacggacggctcaggaaacaaagcaagctcctaagtggtatcagctgttaagcaacaaatataccaagtttaagagtgagatccagattagtatcgctttagaaacagacacaaagccaccggtggactctttcaaggccaaaggagcccctcctagggacggcaaagtgccagcaattctggctgggcttgaccctcgcgatattgttgccgtactcaacgaggaaggggggtaccatcagatcgggcccgctgagtactgtacagattcgttcatcatgtccgtcactatcgcatttgccacacaactggagcaacttatcccttgtaccatgaaactgcccgagcgccaaccagaatttttcttctactactccctgttaggaaacgacgtgaccaacgagcccttcaacgacttgattaacccaaacttcgaaccagaacgggcaagcgtgcggattcgatcctccgtagaaattctgcgtgtgtatttggcgctgcaaagtaaattgcaaattcacctttgctgcggtgaccaatccttggggtcaactgagatccccctgactggactgctgaagaaagggtctacggagatcaaccagcaccctgtcactgtcgaaggggccttcacactggaccctcccaatagagccaagcaaaagctggctcccatccccgtcgaactggctcccaccgtgggtgtctcggtcgctctacagagggaggggatagatagccaaagcctcatcgaactgaagactcagaatgagcatgagcctgagcactctaagaagaaggtgcttacgccaatcaaggaaaaaactctcacaggccctaagtcacctacagtcagcccggtgccaagtcataaccagtctccacctacaaaggacgatgccaccgagtcagaagtagaaagcctacagtacgataaggacacgaagcctaatccgaaggcaagtagcagtgtgccggcctcactggctcagctggtgactaccagtaatgcctccgaagtcgccagtggccaaaaaatcgccgtcccagccaccagccatcatttctgtttcagcattgatctccgctccatccatgccctggagattggtttcccgatcaattgcatcctgagatacagttatcctttcttcgggtctgccgctccaattatgacaaatccaccagtggaggtgcggaagaatatggaagtgtttctgccacagtcatattgtgcatttgactttgccactatgccacaccaactccaagataccttcctccgtattcccctgctggtcgagctgtggcacaaggacaaaatgtctaaagacctcctgctcggaatcgcaaggatccagctttctaacattctctcaagcgagaagacacgcttcctcgggtcaaatggtgagcagtgctggcgacagacatatagtgaaagcgtccccgtgatagcagcccagggttctaacaatagaatcgccgatctgagctatacagtgacactggaggattacggcctggttaagatgcgcgaaatttttatctctgactcatcgcaaggcgtcagtgctgtgcaacagaagccaagtagcctgccgcctgccccctgtcccagcgaaattcaaacagaacctagagagaccctcgagtacaaggccgccctggaactcgagatgtggaaggagatgcaagaagatatttttgagaatcagctcaagcagaaggaattggcccacatgcaagctctcgcagaggaatggaagaagcgggaccgggagagagagtccctggtcaagaagaaggtggcggaatataccatcttagaaggtaagcttcagaaaacattgatcgatctggaaaagcgagagcagcaactggcctccgtcgaaagcgaactgcagagagagaagaaggaattgcagagcgagcgccagcgcaacctgcaagagctgcaagattccatcaggagagccaaggaggactgtattcaccaggtcgaactcgagagattgaaaattaaacagctggaagaggacaaacacagacttcagcagcagctcaatgacgcagagaataagtacaagatcctcgaaaaggagtttcagcaattcaaggatcagcagaacaataagcccgagatcagacttcagagtgagatcaacttgctgacgttggagaaggttgagctagaacgaaagctcgagtcagcgacaaaatccaaactacattacaagcagcaatgggggagagctttgaaggaactggcccggctcaagcagcgggaacaagaaagtcagatggcaaggttgaaaaaacagcaggaagaactggagcagatgaggctcagatacctcgccgcagaagagaaggatacagtcaagactgagagacaggagttgctggatattcgaaacgagttgaatcggcttcgccagcaagaacagaagcagtatcaagatagcacggagattgccagtgggaagaaagatgggccgcacggatcagtcctggaggaagggctcgatgattatttgacccgcctgatcgaagagcgggatacccttatgaggaccggagtttacaatcacgaggacagaatcatctctgagctggataggcagatcagggaaatcctcgcaaaatctaacgcctctaattag

SEQ ID NO: 182452 - DNA, 2961 bp, synthetic construct
  misc_feature 1..2961: note = Description of Artificial Sequence: Synthetic coding sequence
  source 1..2961: mol_type = other DNA
atggtgagcaagagcgaccagctgctgatcgtggtgagcatcctggaaggccgacattttcctaagcggcccaagcatatgctggtcgtggaagccaagtttgacggcgagcaacttgctacagatcctgtcgaccataccgaccagcctgagtttgcaactgagctcgcttgggagattgaccggaaagctctccaccagcatcgactgcagcgcacccccatcaagctgcagtgcttcgcattagatccagtgacctcggctaaggagactattggctatatcgtgctcgatttgcggaccgcacaggaaactaaacaggcccccaagtggtaccaactgctgtccaataagtatacaaagttcaaatcagagattcagatctcgatagcactggagaccgataccaaaccccccgtggactctttcaaagcgaaaggagctccaccacgggatggtaaagtgcctgccattctcgcagggctggatccacgggacatcgtagccgtgttaaacgaggagggaggataccaccagatcgggcctgccgaatactgtaccgactctttcatcatgagcgtgactattgccttcgctacccagttggagcagcttataccgtgcacgatgaaactcccagaaagacagcccgaattttttttctactatagcctcttaggcaacgacgttaccaacgagcctttcaatgatctgattaatccaaacttcgagccagaaagagcgagtgtgcggattcgctcttcagtagagattctgcgagtctacctagccctgcagtctaagctacagatccacttgtgttgtggtgaccaatctctggggtcaactgagatcccccttaccggactattgaagaagggcagcactgaaatcaaccagcacccagttactgtggaaggcgcctttacactcgatcctcccaaccgcgcaaagcagaaactcgctccaatccccgtcgagctggcacctactgtgggcgtttctgtggcactgcagcgtgagggaatagacagccagagcctgattgaactcaagacccaaaatgagcacgagccagaacattctaagaagaaggttctgacgcccattaaggaaaagactttgacgggaccaaagtctcccactgtttcacctgtacccagccacaaccagtctccccctacaaaagatgatgctacagagtcagaagtcgaatcccttcagtatgataaagacaccaagccaaaccctaaagcttctagttcagtgccagcgtctctcgcacagctggtgacgacctctaacgcctccgaggtagctagtggccagaagatagcggtccccgccacaagccaccacttttgcttctctattgatctccgttcaattcatgccctggagatcgggttccctatcaactgcattttgagatatagctatccattcttcgggagtgcagcccctatcatgactaatccacccgtcgaagtgaggaaaaatatggaagtgttcttaccccaatcttactgtgcattcgactttgccaccatgccacaccagctccaggacacttttttgcgtataccgctgctggtggagctgtggcataaggataaaatgtccaaagatctattgctgggaattgcccgaatccagctcagcaatattctgtcctccgaaaaaacccgatttctggggagcaatggagagcagtgttggagacaaacttattccgagtcagtcccagtaattgccgctcaaggctcaaacaaccgcattgccgatcttagctacactgttacactggaagactatgggctggtaaaaatgcgcgagatctttatctctgactcttctcagggcgtgagcgccgttcagcaaaagcccagctctctgccccccgccccgtgtccttccgaaattcagacagagccacgcgagacacttgagtataaagcagcactggaactggaaatgtggaaggagatgcaggaagacatctttgagaatcagctcaagcagaaagaattggcccacatgcaggcccttgccgaagagtggaagaagagagacagagagcgagagagtctagtgaagaagaaggtagccgaatacaccatactcgagggcaagctgcaaaagacgctgatcgatttggagaagagggagcaacagctcgccagcgttgaatccgagctccagagagagaaaaaagagctgcagagcgaaaggcagcgtaacctccaggagcttcaggactccatacggagggcaaaggaagactgcattcatcaagttgaactagaaagactgaaaattaagcaactggaggaagacaaacataggcttcagcagcaactgaacgacgctgagaataagtacaaaatactcgagaaggagtttcaacaattcaaagatcagcagaacaacaaacctgagatccgtctgcagtccgagatcaacctgttgaccctggaaaaagtcgagctcgagagaaaactggagtcagccacgaaatccaaactacactacaaacaacagtggggtagagctttaaaggagctggcaaggctgaaacagagggagcaagaatcacaaatggcgcgcctgaaaaaacagcaggaggagttagaacagatgcggttaaggtaccttgccgccgaagagaaagatactgtgaaaacagagaggcaggaattactcgacatccggaatgaactcaatcgcttgcgacagcaagaacagaagcagtatcaagatagcacagagatcgcctctggaaaaaaggacgggccacacggatcagtgctggaggaagggttggatgattatctgaccagacttatcgaagaaagagacactctcatgagaacaggtgtgtacaaccacgaggatagaatcattagcgagctagaccggcagatacgggagattttggcaaaaagtaacgcctctaactag

SEQ ID NO: 182453 - DNA, 1143 bp, synthetic construct
  misc_feature 1..1143: note = Description of Artificial Sequence: Synthetic coding sequence
  source 1..1143: mol_type = other DNA
atggtgagcaagagcgaccagctgctgatcgtggtgagcatcctggaggggcggcactttccgaagagaccgaagcacatgctggtggtggaggccaagtttgacggggaacagttagcgactgaccccgtggatcataccgaccaacctgaatttgcgaccgaattagcttgggagattgatagaaaagcactgcaccaacacagactgcagcgcacgccaattaagttgcagtgctttgcactggaccccgtcacatcggctaaggaaactatagggtatatagtgttagacctaaggactgcgcaggaaaccaaacaagcacctaagtggtatcagctgctgagcaacaagtatactaaattcaaatctgagattcaaattagcatcgccctagagaccgacaccaagcctcccgtggacagtttcaaggccaagggggctcctcctcgggacgggaaagttcctgctatacttgctggcttggatcctcgcgatatagttgctgttttgaacgaggaaggggggtatcatcaaatcgggcctgcagaatattgcaccgacagctttattatgtcagtgaccatcgcgttcgctactcaactggaacagctgatcccctgcacaatgaagttgcctgagaggcagccggagttcttcttttactacagtcttctcggcaatgacgttacaaacgaaccttttaacgacttgatcaatcccaactttgaaccggagcgtgcttccgtgcggatccgttcctcagtggagatactacgggtctatctggccctgcaatccaagctgcagatccatctctgctgcggcgaccaatctctggggtccaccgaaatccccctgacagggctgctcaagaagggaagtaccgagataaaccagcaccctgttacggtggagggcgcatttaccctggatcccccaaatcgagctaaacaaaaattagctccaattcctgtagaattggctccgactgtgggggtgtcggtggcactacagcgggaggggatagattctcaggacgccttctggtattccgcgctggatatcatcttcccactttttatctttctttttttggtactggacgcaattcgaaaattcgcgaattacgaggagaaatag

SEQ ID NO: 182454 - DNA, 3828 bp, synthetic construct
  misc_feature 1..3828: note = Description of Artificial Sequence: Synthetic coding sequence
  source 1..3828: mol_type = other DNA
atgagcctggacttcggcagcgtggccctgcccgtgcagaacgaggatgaagaatacgacgaggaggattatgagcgcgaaaaggagctacaacagctgctgacggacctcccccacgatatgctggatgatgacctgagtagccctgaactgcagtatagtgattgcagcgaggatgggaccgatgggcagccccatcatcccgaacagctggaaatgagctggaacgaacagatgctgccaaagagccagtcggtcaatggcccatcctgccagggtcttgaaccttacaataaagtcacctataagccataccagagcagtgcccaaaacaatgggagccccgcccaggaaataaccggcagcgacacctttgagggtctgcagcaacagtttctgggcgcaaatgagaacagtgcagagaatatgcaaataatccagcttcaggttctcaataaggccaaggaaaggcaactggaaaacttaatcgagaagctgaacgaatcagaacgccagatacggtacctgaatcatcagctggttattatcaaggatgagaaggatggactgaccctctctttgcgagagtcacagaaactatttcagaatggcaaagaaagagagattcagctggaggctcaaataaaagctctggagacacaaattcaggctctgaaagtcaatgaagagcagatgattaaaaaaagccgtaccactgagatggctcttgagtccttaaagcaacagttagtcgacctgcaccatagtgaaagtctgcagcgggcaagagagcagcacgagtctatcgtaatgggtctcaccaaaaagtacgaggaacaagtgttatcactccagaaaaacttagatgccaccgttacagccctgaaggagcaggaggacatttgcagtcggctgaaggaccacgtgaagcaactcgaacgaaaccaggaagcaattaaattagagaaaaccgaaatcattaataagcttacgagaagcctggaagaatctcagaaacagtgtgcacatctcctacagtccggcagcgtgcaggaggtcgcccagcttcagttccagctgcagcaggcgcagaaagcccacgccatgagtgctaacatgaacaaagccctacaggaagagctgacggagttaaaagatgagattagcctctatgaaagtgcagccaaactgggtatccacccctcagattctgagggcgagctgaatatcgagctcaccgaatcttacgtagacctcgggattaagaaggtgaattggaagaagtctaaagtgactagcatcgtgcaagaagaggacccaaacgaggagctgtcaaaagacgagtttatcctaaagctcaaggcggaagttcagcgcctgctgggtagcaatagtatgaagaggcacctggtgagccagttgcagaacgatctgaaagattgtcataagaaaatcgaggatcttcatcaagtcaaaaaggacgaaaagagcattgaagtggaaaccaaaactgacacttctgagaagcccaaaaatcagctctggcctgaatcatccacatcagacgtggttagggacgatatcctgctcctgaagaatgaaatacaggtactacaacagcagaatcaagagctgaaggaaacagagggcaagctccgaaacaccaaccaagatctgtgcaaccaaatgagacaaatggtccaggactttgatcacgacaaacaggaggcggttgataggtgtgagcggacatatcagcagcaccatgaggctatgaaaacacagataagagaaagcctgttggcaaaacacgctctagaaaaacagcaactgttcgaggcctacgagagaactcacctccagctgagatctgaattagacaagctgaacaaagaggtgactgctgtccaggaatgttatttagaagtgtgccgcgaaaaggacaacctggagttaacactgagaaaaaccacggagaaagaacagcagacacaggagaaaataaaggaaaagctgatacagcagctggagaaagagtggcagtccaagctggatcaaacgatcaaagcaatgaagaaaaagaccctggattgcggtagccaaaccgatcaagtgaccaccagcgacgtgatttcaaaaaaagaaatggccattatgatcgaagagcaaaagtgcactattcagcaaaacctagaacaggagaaggatatcgctatcaaaggcgcaatgaaaaagttggagatcgaactagagctgaaacactgcgaaaatataaccaagcaggtggaaatagccgtgcagaacgcccaccagaggtggctcggcgagctcccagagttggccgagtaccaagcgctggttaaagccgaacagaaaaaatgggaagagcagcacgaagttagcgtcaacaagagaatcagctttgcagtcagtgaggcaaaggaaaaatggaaatctgagcttgagaacatgagaaaaaacattctccccgggaaggagttggaagaaaagatccactcccttcagaaagagctagaattgaagaacgaagaagtaccagtggtgattagagctgaacttgccaaagcccgcagcgaatggaacaaagagaagcaagaagagatccacagaatacaggagcagaacgaacaagactaccgccagtttcttgacgaccaccgcaacaaaatcaatgaagtgcttgcggctgcaaaggaggatttcatgaagcagaagaccgagctgctcctccagaaggagaccgaactgcagacttgccttgatcaaagccgccgtgagtggacgatgcaggaggctaaacggattcaactggagatttatcagtatgaagaggacatactcaccgtgctgggcgtgctcctgtccgacactcaaaaggaacacatttctgacagcgaagataagcaactgctggagatcatgagcacatgctcatcgaaatggatgagcgtacaatatttcgaaaagctcaaaggatgtatccagaaagcttttcaagatacactccctctcctggtggagaacgcagatccggaatggaaaaagagaaacatggccgagctgtccaaggacagcgcatcgcagggaacaggccagggggatcctggccctgcagccggacatcacgcccagccactcgcattgcaagcgactgaagccgaagctgataagaagaaggtcctggagatcaaggacttgtgctgcggtcattgcttccaggagctggagaaagctaaacaggagtgtcaagatttgaagggcaagcttgagaaatgctgcagacacttacagcatcttgagagaaaacacaaggccgtcgtggaaaagataggggaagaaaacaacaaggtggtcgaggagctgattgaagagaacaacgatatgaagaacaagctcgaggagctgcagacactgtgcaagaccccaccccgcagtctttcagctggcgctatcgagaacgcttgcctgccttgttctggcggtgccctcgaagagctacgcgggcaatatattaaagccgtgaagaaaattaaatgtgacatgcttcgctatattcaggaaagcaaagaaagggctgccgagatggtcaaagccgaggtattgcgggagagacaggaaacggcgaggaaaatgcgaaagtactatctcatctgcttgcagcagattttacaggatgatggaaaggagggagccgaaaaaaagataatgaatgcagcctcgaaattggccactatggcgaaattactggaaacaccaataagtagcaagtcacagtcaaaaacaactcagtctggcatgtccaagtag

SEQ ID NO: 182455 - DNA, 5133 bp, synthetic construct
  misc_feature 1..5133: note = Description of Artificial Sequence: Synthetic coding sequence
  source 1..5133: mol_type = other DNA
atgagcctggacttcggcagcgtggccctgcccgtgcagaacgaggatgaggaatacgacgaagaggactacgaaagagaaaaagaactacaacaattactgacagatctgcctcatgatatgctcgacgacgacttgtcctctccagagctgcagtactcagattgctccgaggatggtactgatggacagccacatcatccggagcagctggaaatgagttggaacgaacagatgttacccaagagccaatctgtcaacggttataatgagatccagagtctctatgccggagagaagtgcggaaatgtttgggaagaaaatcggagcaaaaccgaggatagacatcctgtgtatcacccagaggaagggggtgatgaaggcggaagtggctactcaccaccatcgaagtgcgaacagacggacctttaccaccttccagaaaacttccgcccatatacaaatgggcagaaacaagagttcaataaccaggctactaacgtgatcaaatttagcgacccacagtggaatcattttcagggaccttcttgccagggtcttgaaccgtacaacaaagtaacctacaagccgtaccagagcagcgctcagaacaacggctccccagcccaagaaatcacggggtctgatacgtttgagggtctacagcagcagtttctgggcgccaacgagaatagtgcagaaaatatgcagatcattcagttgcaggtgcttaataaggccaaagaacgtcaactggaaaacctcatcgagaagttaaatgagagcgagcggcaaattcggtacctcaatcatcagctggtcatcattaaagatgaaaaagacggcctcacactcagcctgcgtgagtctcaaaagctcttccagaatggcaaggagcgagagatacagctggaagcacagataaaggccctggagacccagatccaggcactgaaagttaatgaggaacaaatgatcaagaagtcacgcacaactgagatggccttggagagccttaagcagcagctggtggacctgcatcactccgaatccctgcagagagcccgcgaacaacacgagagcatcgtgatgggattaactaaaaagtacgaggagcaagttctgagccttcagaagaacctggacgccaccgttacagctttgaaggagcaggaggatatttgttctagactaaaagaccatgtcaagcagctggagagaaatcaggaggctatcaagttggagaaaacagagattataaataaactcacaagatcactggaggagtctcaaaaacagtgtgcccacttgcttcaaagtgggtcggtgcaagaagtggctcagctccaattccagctgcagcaggcccaaaaagctcatgctatgtccgccaatatgaataaggccttgcaggaggagctgactgaactgaaggatgagatttcactatatgaatcggccgcgaagctgggcattcacccctccgattctgagggagaactcaacatcgagctcactgaatcctatgtagatctgggtattaaaaaagtgaattggaagaagtccaaagtgacaagcatagtacaggaagaagaccctaatgaagagctgagtaaagatgagttcatcctgaaactaaaagcagaagtacagcgtctgctgggtagcaacagcatgaagcgtcacctcgtatcccagctccaaaatgacctcaaagactgccacaagaagatagaagacttgcaccaagttaagaaggacgagaaatccattgaagtggagactaaaacagatacaagcgagaagcctaagaaccagctctggcctgagagtagcacctctgatgtggttcgtgacgatatcctcttgctgaagaatgaaattcaggttctgcagcagcagaatcaagagttgaaggaaacagagggcaagctgagaaatacgaaccaggatctctgtaatcaaatgagacagatggtacaagatttcgatcacgacaagcaggaggccgtcgatagatgcgagcggacctatcagcaacatcatgaggccatgaaaacgcaaattcgagagtcccttttagcgaagcacgccctggagaagcaacaactcttcgaagcctatgagaggacacatcttcagctgcgatctgaattggacaagctgaataaagaggtcacggcagttcaggaatgctacctggaagtgtgccgggagaaggataacttggaacttaccctgcggaagactaccgagaaagaacagcagactcaggagaaaattaaggagaagctgatacagcagcttgagaaagaatggcaaagcaagcttgatcagaccattaaagctatgaagaagaaaaccctagactgcggatcacagacagaccaggtcacaacctcggacgttatctctaagaaggagatggcaatcatgattgaagagcaaaagtgcaccattcagcagaacctcgagcaggagaaagatattgctatcaaaggggcaatgaagaagctggagattgaacttgaactcaagcactgtgagaatataacaaagcaggtcgagatcgcagtgcagaacgcgcaccagcggtggctaggggagctcccagagctggctgagtaccaagccttagtcaaagccgaacagaaaaaatgggaggaacaacacgaggtgtccgtgaataaaagaatatcgttcgctgtttctgaggctaaagagaaatggaagtccgagcttgagaatatgcgaaagaacatcttgcccggcaaagagctcgaagaaaaaattcattcattacagaaagagctggagctgaaaaatgaagaggtccccgtggtgatcagagcagagctggccaaagccagaagtgagtggaacaaagagaaacaggaggaaatccatcggattcaggaacaaaacgaacaggactatcggcagtttttggatgaccatcggaataaaatcaatgaggtgttggccgctgccaaagaagactttatgaaacagaagacagagcttctcctccagaaagagacagaattgcagacttgcctcgaccagagccgccgagagtggaccatgcaggaagcgaaaagaatccagctggagatatatcagtatgaggaggacatcctgaccgtgctcggagtgcttttgagcgatacccaaaaggaacatatctcggatagcgaggataagcagttactggagattatgagcacttgttcttccaagtggatgtccgtccagtatttcgaaaagctgaaaggttgcatccagaaggccttccaagatactttgcctttgctcgtcgagaatgctgaccctgagtggaaaaaaaggaatatggcggaactgtcgaaggattctgcatcccaaggcaccggtcagggagatcccgggcccgctgcgggccaccacgctcagcctttggcgcttcaggccactgaagctgaagccgataaaaagaaagttctggagattaaggatctgtgttgcggccactgttttcaggaactcgaaaaagccaagcaggagtgtcaggacctcaaaggcaagctggagaagtgctgccggcacttgcaacacctggagcgcaagcataaggccgtagtggagaagattggagaggagaacaacaaagtcgtggaagaactcatagaagaaaacaacgatatgaaaaacaaactggaagaattgcagactttgtgcaagacacccccacgctccctgagcgccggggcaatcgagaacgcgtgtctgccctgctccggcggtgctctggaagaactgagaggccagtacattaaagctgtgaagaaaataaagtgtgacatgttacggtacattcaggaatcgaaagagagagcagctgagatggtgaaggctgaagtgctgcgcgagaggcaagagacggctagaaagatgcggaagtattacttaatctgtctgcaacagatcctgcaggacgatgggaaggaaggggcggagaaaaaaatcatgaacgcagcatctaaacttgcaaccatggccaagctgttagagacccctatttcttcaaagagccagagcaagacaacccagagtgccctcccccttacctcggagatgctgatcgctgtgaaaaagagtaaacggaatgatgtgaaccaaaagataccctgctgcatcgagagcaagagtaatagcgttaataccatcactaggacactttgtgagcaagctcccaagcggcgcgccgcatgcaatctgcagagactgttggagaactcggagcaccagtctatcaaacatgttgggagtaaggaaactcatctcgaatttcagttcggtgacggatcctgtaaacacttaaatagcctgcctagaaacgtatcacctgaattcgttccatgtgagggagagggagggttcgggctacacaaaaagaaggatttgttgagcgataatggatctgagagtctccctcactccgcagcctatccctttctggggactcttggcaacaagccctcaccacggtgtacccccgggcccagtgagagcggatgcatgcacatcacattcagggattcaaatgaacgcctgggactgaaagtgtacaagtgcaacccgctgatggagtccgaaaacgcggcttccgagaaatctcaggggctggacgtccaggagcctccggtgaaagacggtggagacctttcagattgcctgggctggccaagctcctctgccacgctatctttcgatagtagggaagcgtcgtttgttcatggtcgcccccaaggcacgcttgagattcctagcgagagcgtgaagtcaaagcagttctcaccatctggctacctcagcgacactgaggaaagtaatatgatctgccagacaatgaagtgccagaggtaccagaccccctatttgtctgaggagacaacatacttggaacccgggaagatcagcgtgaactgcggccacccaagccggcacaaggccgacagacttaaatctgacttcaaaaagctgtcgagcaccctcccatcgtcagtatgtcagcagccatcgcggaagctcatcgtacccctgagttctcaacaagacagcggcttcgactcaccctttgttaatctggactag

SEQ ID NO: 182456 - DNA, 4965 bp, synthetic construct
  misc_feature 1..4965: note = Description of Artificial Sequence: Synthetic coding sequence
  source 1..4965: mol_type = other DNA
atgagcctggacttcggcagcgtggccctgcccgtgcagaacgaggacgaggagtacgacgaagaggattacgagagagagaaggaactccagcagttacttactgatttaccccatgatatgttggatgatgatctgtcaagccccgaactccagtactctgactgttccgaagacgggacggacggacagccacaccaccctgaacagctcgagatgtcctggaacgagcagatgctgcccaaaagccagtccgtgaatggctataacgagatccagtccctgtatgctggagaaaagtgtggaaacgtgtgggaagagaatcgctccaagaccgaggaccgccatccagtctatcacccggaggaggggggcgatgaggggggctccggttactctccgccaagtaagtgtgagcagactgatttataccatctccctgagaactttaggccatacacgaatggccaaaaacaggaattcaataaccaggcaacgaacgtgattaaattttccgatccacagtggaatcattttcagggcccaagctgccaggggctggagccttataacaaagtaacctataaaccgtaccaatcgtcagcccagaacaatggatcgcccgctcaggagatcactggttctgacaccttcgaaggtcttcaacagcagtttctcggggcgaacgagaattccgccgagaatatgcagatcatccagcttcaggtgctcaataaagcgaaagagcgacagcttgagaatctaatcgaaaaactcaatgagagcgagcgacagatccggtacctgaatcaccaactggtcatcataaaagacgaaaaagatggcttaaccctctcgctgcgcgaatctcagaagctcttccagaatggtaaagagagggagatccagttggaggcacagattaaagcgctagagacacagatccaagccttaaaggtgaatgaggagcagatgatcaaaaaaagtcgcaccactgagatggcgctggagtctctgaaacagcagttagtggacttgcaccatagtgagagccttcagcgggcaagagagcagcatgagtctattgtcatggggcttaccaagaagtacgaggagcaggttctgtcactgcaaaaaaacctggatgcaacagtgactgcactcaaggagcaggaagatatctgttctagacttaaggaccacgttaagcagcttgaaaggaatcaagaggccatcaaactggaaaagacagagattatcaataaactgaccagatccctggaggaatcacagaagcagtgcgcacacctcttacaaagcggttctgtccaggaggtagcccagctgcagttccaacttcaacaggctcagaaagcgcatgctatgtcggccaacatgaacaaagcactgcaggaggagttgactgagctgaaggacgaaattagcttatacgagtcagctgctaaactgggcatccatcctagcgactcagaaggagaacttaacatcgaactgacagaatcctatgtcgacttgggcatcaagaaggttaattggaagaagagcaaagtcacaagcatagtccaagaggaagacccaaacgaagaactgagcaaggacgaattcatattaaagctgaaagcagaagtgcaaagactcttggggtcaaatagtatgaaaagacatctcgtctctcagctccaaaatgatcttaaggactgccacaagaaaattgaagacctacatcaagtgaaaaaagatgagaagagtatcgaggttgaaacaaagaccgacacttcggagaaacctaagaatcagctgtggccagaaagtagtacttccgacgtcgttcgcgatgacatcctcctgctaaagaacgagatacaggtgctgcagcagcagaaccaggaactaaaggagaccgaaggcaagctcagaaacactaaccaggacctctgcaatcagatgaggcagatggtgcaagacttcgatcatgataagcaggaagctgtggataggtgtgagaggacgtatcagcagcatcatgaggccatgaagacacaaatccgggaatcattgttggctaagcacgctctggaaaagcaacagctgttcgaagcctacgagagaacccacctccagttgcgtagtgagctcgacaagctaaacaaagaggttacagctgtgcaggaatgctacctagaggtgtgcagggaaaaggataacttggagctcacgcttaggaagaccactgagaaggaacagcaaacccaggaaaaaatcaaggagaagctgattcagcagttggagaaggaatggcaatcaaagctcgatcaaacaattaaagcaatgaagaaaaaaacgctagactgtggaagccagactgatcaggtcactacctccgacgtcatcagcaagaaggagatggccattatgatcgaagaacagaaatgtaccatccagcaaaacttagagcaagaaaaagatatcgccattaaaggtgccatgaagaagctggaaatcgagttggagctgaaacattgcgagaacatcaccaaacaggtggagatcgctgttcagaacgctcaccagcgatggctgggagagttgcctgaactggctgagtatcaagccttggtgaaagcagagcagaaaaaatgggaggaacagcacgaagtgagtgtcaataaacgaatatccttcgcagtgtcagaagccaaggaaaagtggaaatccgagctagaaaatatgaggaagaatatcctgcccggtaaagagctggaggagaagatccactcacttcagaaagaattagagctgaaaaatgaggaagtgcccgtggtgatccgcgctgagctggctaaagcccgctccgagtggaataaggagaagcaagaagaaatccacagaatccaggagcagaatgaacaggactatcggcagttcttagacgatcaccgcaataaaatcaatgaagtcctcgccgccgcaaaagaagattttatgaaacagaagaccgagctgctactgcagaaagaaacggaactgcagacttgtctagaccagtctagacgggaatggaccatgcaggaagccaagagaattcagttagaaatttatcagtatgaggaggatatcctaaccgtcttaggagttcttctctccgacacccagaaggaacatattagcgactctgaagacaaacagttgctcgagatcatgagcacgtgtagttctaaatggatgagcgtgcagtacttcgaaaaacttaaagggtgtatccaaaaagcctttcaggatactcttcccctgttggttgagaatgctgaccctgaatggaagaagagaaatatggctgaactgtcaaaggattccgcctctcaggggacagggcaaggggatcctggccctgcggctggccatcacgcccagcctctggcgctccaggcaaccgaagccgaggccgaggaaaacaataaagtcgttgaggagttaattgaggagaataacgatatgaagaataaattggaggaactacaaaccttatgtaaaactcctccacgctccctttctgcgggcgccatcgaaaacgcctgtctcccgtgtagcgggggtgctctggaagaattgcggggtcaatacatcaaagccgtgaaaaaaatcaaatgcgacatgttgaggtatatccaggagagcaaggagagggctgctgaaatggtcaaagccgaggtccttagggaaaggcaggaaactgcacggaagatgaggaagtactaccttatctgccttcaacagattctgcaggatgacggtaaagagggggccgaaaagaaaattatgaacgccgcctcgaagctagccaccatggcaaagctgttagaaacgcccatctctagcaagtcgcagagcaaaacgacacagtcggcccttccactgacctcagagatgttgatcgcagtaaagaagtcaaagcgcaacgacgttaatcaaaagattccttgctgtatagagtcaaagtccaatagcgtcaatactatcacccgtaccctctgcgagcaggcgcccaagcggcgggctgcatgtaatctgcaacggctattagaaaactccgagcaccagtctattaagcacgttggtagcaaggagacccacctagagttccagttcggagacgggtcatgtaagcatctcaatagcttgcctagaaatgtgtcacccgaattcgttccttgcgaaggtgagggtggatttgggctgcataagaagaaggacctgctttctgataacggcagcgagagcctcccacatagcgcagcttacccattccttggtacactgggaaacaagccaagtccacgatgtaccccagggccgtccgaatccggttgcatgcacatcacgttcagggactccaatgagcgcctgggcctcaaagtttacaagtgcaaccctcttatggaatctgagaatgccgcaagcgaaaaatcccagggcctggacgtccaggagccaccggtaaaagatggaggcgacttgagtgattgcctaggatggccgtctagctccgctaccctttcgtttgactcaagagaagcctcatttgtgcacggacggcctcaagggacattggaaatcccttctgagagcgttaaaagtaaacagttctcaccgagcggttatctgtccgatacggaggagtcaaacatgatctgccaaaccatgaagtgtcagcgctatcagactccctacttgagcgaggaaaccacctatctcgagccaggcaagataagcgtaaactgtgggcacccttccagacacaaagctgatagacttaaatccgacttcaaaaaactgagctccacgttgccatcgagtgtctgccagcaacctagtcggaaactgattgtccccctgtcctcacaacaggactctggtttcgactccccattcgtgaacttggactag

SEQ ID NO: 182457 - DNA, 1779 bp, synthetic construct
  misc_feature 1..1779: note = Description of Artificial Sequence: Synthetic coding sequence
  source 1..1779: mol_type = other DNA
atgagcctggacttcggcagcgtggccctgcccgtgcagaacgaggatgaggaatatgacgaggaggactacgagagagagaaggagctgcagcaattgcttactgatttgccgcacgacatgctcgatgacgacctgtccagtccagagctccaatactcagactgttcagaggatggaaccgacggccagcctcatcacccagagcagcttgaaatgtcttggaatgagcagatgcttccaaagagccaatctgttaacggttataacgaaattcagtccctgtacgccggcgaaaagtgtggtaacgtgtgggaggaaaacaggtccaagaccgaggatcgacaccctgtttaccaccctgaggaggggggtgacgagggtggctcaggctatagccctccctctaaatgtgagcagacggacttgtatcatctgccagagaactttagaccgtatactaacggccagaaacaggagtttaacaatcaggcaacaaatgtcattaagttttcggatcctcagtggaatcactttcaaggaccgagttgtcaaggcctcgagccatacaataaggtgacatataagccttaccagtccagtgctcagaacaatggtagcccagcccaggagatcactggctccgatacgttcgagggtcttcaacagcagttcttaggcgccaacgagaattctgctgagaacatgcagattattcagttgcaggttctgaacaaggccaaagagagacagttggaaaatctgatcgagaaactgaacgaaagcgagcgccagattaggtatctcaaccatcagcttgtgattataaaagatgaaaaggatggccttacccttagcctgcgggagagccaaaaactgttccagaatgggaaggaaagagagatccagctcgaagctcaaataaaggcgttagagacccagatccaggctctgaaagttaacgaagaacaaatgataaaaaagagtagaacgacagagatggcattggagtcactcaaacagcagttggtcgatttacatcattcggaaagccttcagcgggccagggagcagcatgagtctattgtgatgggcttgacaaagaagtatgaggaacaagttctgagcttgcagaagaacctggatgctaccgtgaccgctctgaaggaacaggaggatatctgctctcggcttaaggaccatgtgaaacaactggagcgaaatcaggaggccatcaaactggaaaaaacagagattataaataaactcactagaagtttggaagagagtcagaaacagtgcgcacatctccttcaaagtggctcggtgcaggaagtggcacagttgcaatttcagcttcagcaggcccagaaggctcacgctatgtccgccaacatgaataaggcgctgcaggaggagctcactgagttgaaagatgagataagtttgtacgaatcagcggctaaactgggtatccacccctctgatagcgaaggcgagctgaacatagaactaactgagagctatgttgacctgggtatcaaaaaggtcaactggaagaaaagtaaggttacatcaatagtgcaggaagaggatcccaacgaagagctgagtaaggacgaatttatactgaagttgaaggcagaggtgcagaggctcttgggatccaactctatgaagcgtcacctggtttctcagctgcagaatgatctcaaagactgccataaaaagatcgaggatctgcaccaagtcaagaagaagaagaagaagaaaaaatag

SEQ ID NO: 182458 - DNA, 207 bp, synthetic construct
  misc_feature 1..207: note = Description of Artificial Sequence: Synthetic coding sequence
  source 1..207: mol_type = other DNA
atgagcctggacttcggcagcgtggccctgcccgtgcagaacgaggacgaggaatacgacgaggaggattatgagcgcgagaaggagcttcagcagcttctgaccgatctgccacacgacatgctggatgacgatctcagctcccctgaattacagtatagcgattgctccgaggacgggaccgacggacagccacaccatccatag

SEQ ID NO: 182459 - DNA, 4755 bp, synthetic construct
  misc_feature 1..4755: note = Description of Artificial Sequence: Synthetic coding sequence
  source 1..4755: mol_type = other DNA
atgagcctgaccagctggttcctggtgagcagcggcggcacccggcatcgccttccaagagagatgatcttcgtcggacgtgatgactgtgagcttatgttgcagtcgagaagtgttgacaagcagcatgccgtgataaattacgatgcaagtactgatgaacacctcgtgaaagatctgggatctctgaacggcacatttgtgaatgatgtgagaattccggagcagacctatataaccctgaagctcgaagacaaactgcgtttcggctacgatacaaatttattcactgtcgtgcagggcgagatgagagttccagaagaggcactcaagcatgaaaaatttacaatacagttgcagctcagtcagaaatccagcgagtccgagctgtcaaagtcagcgtccgccaagtccattgacagcaaagtggccgatgctgccaccgaggtgcagcataaaacaaccgaagcgctgaaatctgaggagaaggctatggacatctctgcaatgcctcgtgggaccccattatacgggcaacccagttggtggggcgatgatgaagtggatgaaaagagagctttcaaaactaatggcaaaccagaggagaaaaaccatgaagccgggactagcgggtgcggaatagacgccaaacaagttgaggagcagtccgccgccgcaaacgaagaagtgttgtttcccttttgtcgcgaaccctcatactttgagattcctactaaggaattccagcagccgtcacaaattactgaatcaactatccacgaaattcccaccaaggatactcccagctcccacataacgggagccggacacgcctcttttaccatcgagtttgacgatagtaccccggggaaagtgacaatccgcgaccatgttacaaagtttacctcggatcagcgccataaatccaagaaaagttcccccggaactcaggacctccttggcatccaaactgggatgatggctcccgaaaataaggtggctgattggctcgcccagaataaccctccccagatgctgtgggaacgaacggaggaagactctaaatcaattaaaagtgatgtgcccgtgtacctgaaaaggctgaaggggaacaaacatgacgacgggacccagagtgactctgagaacgccggggcacaccgcaggtgctctaagcgcgcgaccctcgaggagcatctgaggcggcatcattccgaacacaaaaagttacagaaggtccaagcaaccgagaaacaccaggatcaagctgtaacaagctctgcccaccacaggggggggcatggcgtgccccatggcaagttgctaaaacagaagtccgaagagcctagtgtgagtataccctttttacagacggccctgctgagatcaagcggaagcttaggacaccgaccatctcaagaaatggacaagatgctaaaaaatcaggctacttcagccacttccgagaaagacaacgatgacgatcagtctgataaggggacttacaccatagagttagagaaccccaactccgaggaggtcgaagctcgcaagatgatcgacaaggtgttcggcgtcgatgataaccaggactacaacagacctgtgatcaacgagaagcacaaggacctgataaaggattgggccctgtcctcagctgctgccgtgatggaagaacggaagcccttaacaacatctgggtttcatcactctgaggaagggacttcttcttccgggagtaagagatgggtgtcccagtgggccagtttggccgctaatcacactcggcatgatcaggaggaaagaataatggagttcagcgccccgctccccctggagaatgagaccgagattagcgagagcggaatgaccgtacgtagtaccggatccgccacatcgcttgcctcccaaggggagagaaggaggagaaccttgcctcagctcccaaacgaggaaaaaagcctggaatctcatcgagcaaaggtcgtgacacaacgatctgaaataggcgagaagcaggacaccgaactgcaggaaaaggagacaccaacccaggtgtatcagaaagacaaacaggatgcagatcgtcccctcagtaagatgaatagggcggtgaatggtgaaactctgaaaacggggggcgataataaaacattgctccatctgggttcatcggctcccggaaaagaaaagtctgagactgataaagagacctctctagtgaaacaaactctggcaaagctacagcagcaggaacagcgagaagaggctcagtggacaccaactaagctatcttcaaaaaacgtgtctggccaaaccgacaagtgccgtgaggaaaccttcaagcaggaatcacaaccacctgaaaagaattccggccactctacttctaagggcgacagggttgcccagagcgagtccaaacgtcgcaaggccgaggaaatcctgaagtcccagacccccaagggcggagataagaaggagtcttcaaagtctctcgtgcgacaggggagttttaccatagaaaagcccagccctaacatcccaatagagttgattccccacatcaacaaacagacatctagcactccgagttcactggctctgaccagcgcaagtaggattcgggagcgctctgagtccttggaccctgattcatccatggatacaactctcatcctgaaggacacggaagctgtgatggcttttctcgaggcaaagctgagggaagataataaaaccgatgagggtccagacacacctagctacaatcgcgacaactcaattagtcccgagtcagacgtcgatactgcaagcacgatctcacttgtgacgggcgagactgagaggaaatccacgcagaaacgcaagtcctttacgtctctctataaagatcgctgcagcaccggatctccttccaaggacgtcactaaatcatcttcgagcggcgctcgagagaaaatggaaaaaaaaaccaagagtaggtctaccgacgtgggcagcagggcggacgggcgaaaatttgtgcagagttcggggcgtatccgccagccgtctgtcgatctcactgacgatgatcagacgtcgtccgtgccacattcagctatctccgatataatgtccagcgaccaggagacgtatagctgtaagccgcacggaagaaccccgctcaccagtgccgacgagcacgtgcactctaagctggagggttccaaggtgacaaagtcgaagacatctcctgtggtctctggcagctcctccaagagcacaacattgccaagacccaggcctacgcgaactagtctgttacgtcgggcccggctgggggaagcgagcgatagcgaactggcagatgcggacaaggccagtgtggctagtgaggtgtctaccacgagctctacttccaaacctcctaccgggcgtagaaacatctctcgaatcgatttgctcgcccagcctaggagaactagactgggatctttatctgcaagatcagactctgaggctacaattagtagaagctctgcctctagccgcacagccgaagctattattaggagcggtgcccggcttgtaccaagcgacaagttttccccacgcatccgagctaattccatttcccgcctcagtgatagcaaagtcaaatctatgacgtctgctcatggttctgcatccgtcaatagcagatggagacgatttccgacagactacgcctccacttccgaggacgagtttggcagtaaccgaaattcccccaagcacacacggcttcgcactagtccagcactgaaaacaacccgcctccagtcagctggatctgctatgccaacatcttccagcttcaaacatcggatcaaagagcaggaagattatattcgagactggactgcccatagggaggaaatcgccagaatctcccaggacctggcactcattgctagagagataaatgatgttgcaggagaaatcgacagcgtcacaagctcaggcaccgccccgagcaccacagtctctacagctgccactacccctggcagcgccattgatactcgggaggagctagtggacagagtgttcgacgaaagtttgaattttcgcaagatccctcctctggttcatagcaagacaccagagggcaacaatggcaggagtggagaccccagaccacaggctgctgagcccccagaccacttaaccatcacacgaaggcgcacctggagccgcgacgaagtgatgggggataacctgttgctgtcgagcgttttccaattctcaaaaaaaattaggcagtcaatagataagacagcgggtaagatacgcatcctattcaaagataaggatcggaactgggacgacattgaatcaaagctccgcgcagaaagcgaggtgcctattgtaaagacttcaagcatggagatctcatccatcctgcaggagctcaaacgcgtagagaaacagctgcaggccattaatgctatgattgaccccgatgggacattggaagcccttaataatatggggtttccctcggctatgctcccctctcctcccaaacagaagtcgtcgcccgtgaacaatcaccacagccctggccagacgccaaccctgggtcagccggaagctcgggccctacaccccgccgctgtcagcgctgccgccgaattcgaaaatgcggaatccgaggcggacttctctatccatttcaataggttcaatcccgacggtgaggaagaagacgttacagtccaggagtag

SEQ ID NO: 182460 - DNA, 4383 bp, synthetic construct
  misc_feature 1..4383: note = Description of Artificial Sequence: Synthetic coding sequence
  source 1..4383: mol_type = other DNA
atgagcctgaccagctggttcctggtgagcagcggcggcacccggcaccggttaccacgagaaatgatcttcgtcggcagggacgattgtgaattaatgttacaatctcgcagtgtggacaagcaacatgccgtcattaactatgacgcctccacggatgagcacctggtgaaagaccttggcagcctgaacggcacctttgtcaatgatgtgcgtattcccgaacagacttacattaccctgaaactggaggataagcttagattcggttacgacacgaatctgttcacagttgtgcaaggagaaatgagggtgccggaggaagccttaaaacatgagaagtttacaattcagctgcagctttctcagaagagcagcgaatcagagctttccaaatctgcctcagccaagtcgattgactctaaggttgctgacgcggccactgaagttcagcacaagaccacagaggctttgaagagcgaggagaaagccatggacattagcgcaatgcctcgcggaacaccactttatggccagccctcttggtggggggacgatgaggtcgatgagaaaagagcttttaaaaccaacgggaaacctgaagaaaagaatcatgaagctggaaccagcgggtgcggcatcgacgcaaagcaggtcgaggagcagtccgccgccgcaaacgaggaggtacttttcccattctgccgagaaccttcgtatttcgagatccctacaaaggagttccagcaacccagtcagatcactgaatcaaccatccacgagatccctaccaaggacacaccatcatctcatatcacgggcgccggacacgccagttttacaatagagttcgatgactctacacccgggaaagttacaatacgcgatcatgtcaccaaattcaccagtgaccagaggcacaagagtaagaagagttccccaggcacccaggacctcctgggcattcaaaccggtatgatggccccggagaacaaggtcgccgactggttagcccagaataaccctccccagatgctttgggaaaggactgaagaggactctaaatccataaagagcgatgtccctgtctacctcaaacgcctgaagggaaacaagcacgacgacggaactcagagcgactctgagaacgctggggcgcacagacggtgcagtaagcgggccacactggaggagcatctccgcaggcatcacagtgaacacaaaaaacttcagaaagtccaggctacggagaagcaccaggatcaggctgtggtcttcggcgtggacgataatcaggactacaatagaccggtgatcaacgagaagcataaggatctcatcaaggattgggcattgagttctgcagcagccgttatggaagagcgcaagccactgacgactagtggctttcatcattcagaggagggcaccagtagttcaggttcgaaacgctgggtgagccagtgggcctccctcgccgctaaccacactcgccacgatcaggaggaaaggattatggagttcagtgccccactgccacttgaaaatgaaactgaaatatcagaaagtggtatgacagttcgctcgacgggatctgcaacatccctcgcttcgcaaggagagaggcgtaggcggacactgccacagttgcccaatgaagagaaatccttggaaagccatagagccaaggtggtcacccagcggtcagagatcggagagaagcaggataccgaattgcaggagaaggaaacacctactcaggtgtaccagaaagataagcaagacgctgaccggcctctgtccaagatgaatagagctgttaatggagaaactcttaaaactggtggtgacaataagacgctgctgcatttggggtcctccgctccaggaaaggaaaaaagcgagaccgataaggaaactagcctggtgaagcagactcttgctaagctgcagcagcaggagcagcgggaggaagcacagtggactcccaccaagctgagttcgaagaacgtgtccgggcagacagataagtgtcgggaggaaaccttcaagcaggagagccagccaccagagaaaaactcaggccacagcacatccaagggtgatcgagtggcccagagtgagagtaagaggcggaaggccgaggaaatcctgaagagccagactcccaaaggaggagacaaaaaagagtccagcaagagtcttgtccgacagggaagcttcactatcgagaagcccagcccaaacatccctattgaactcattccacacataaataagcagacttcatccacaccatcatctcttgctctgactagcgctagccgaattcgcgaacgctcagaatccttagaccctgacagtagtatggacactaccttaattctcaaagataccgaggcggtaatggccttcctagaagccaaattgcgtgaagataataagactgatgaagggcctgacaccccgtcttataaccgggataatagcataagccccgagtctgacgtggataccgccagtactataagtctggtgacaggcgaaacagagcgcaagtccacccagaagcgcaagtcttttacaagcttgtataaggatcgctgctcaaccggctcaccttccaaagatgtgacaaagtcctcatccagtggtgcacgagaaaaaatggaaaagaagacaaaatcccggtctacagatgtcggttcaagagccgatggacgcaaatttgttcagtccagcggacgtattcgccagccttccgtggatctgaccgacgacgatcaaacaagttctgtgccacattctgccattagcgatataatgtcctccgaccaggaaacttatagctgcaaacctcacggcagaactcctcttacttccgcggatgagcatgttcacagcaagctggaaggttccaaggtgaccaaaagtaagactagtccagtagtctcgggctcctcctctaaatccaccacactcccaagacccagacctactcggacatctcttttacgtagggcgcgtcttggggaagcaagcgactctgagcttgccgacgccgataaggctagcgttgccagcgaggtttccacaacctcaagcaccagcaagccgccaaccggccgacggaatatcagcaggatcgacctcttggctcagcccaggcgcactcggctgggctctctttccgctcggtccgattctgaggctaccataagccgctccagtgcttcctcaaggacggccgaggcaattatccgatccggcgccaggctggtgccgagcgataagttcagcccccgcatccgtgctaacagcattagcaggctgagtgattcaaaggttaagtccatgacgtctgcccacggctctgccagtgccttgaagacgacgcggttgcaatccgccgggtcagcgatgccaacaagctccagctttaagcaccggatcaaggagcaggaggactacattagagattggactgctcaccgtgaggaaattgcacgcatcagtcaggacctcgctctcattgcaagagaaatcaacgacgtagccggcgagatcgacagcgtcacatcaagcggcaccgctccctccactacagtgtcaaccgctgctactacaccggggagtgcgatcgatactagagaagaagtcggagacctccacggcgagatgcacaagctcgtggaccgtgtgtttgacgaaagcctgaacttccgcaaaatacctcctctggtgcatagtaagacaccagagggaaataatggacggtccggagaccccaggccccaggcagcagaacccccagatcaccttacaatcacacggaggcggacctggagtcgggatgaagtcatgggcgataacctgctcctctcctcggtttttcagttctctaagaaaatccgccagagcatcgataaaactgcaggaaaaattagaatccttttcaaggataaggaccggaactgggacgatattgaatcaaaactgcgggctgagagtgaagtgcccatcgtgaagaccagttccatggagatcagctccatccttcaggagctgaagagagtcgagaagcaactgcaggctatcaacgccatgatcgatcctgacggaaccctcgaggctttaaataatatgggtttcccttcagcaatgttgccaagtcctcccaagcagaagtctagtccggtcaacaatcaccacagtcccggacagacacctacactgggacagcctgaggccagggctctgcaccctgccgccgtctctgccgccgcagagttcgagaatgccgagtccgaagctgacttctccatacatttcaacaggttcaacccagacggtgaggaagaggacgtgaccgtccaggaatag

SEQ ID NO: 182461 - DNA, 4461 bp, synthetic construct
  misc_feature 1..4461: note = Description of Artificial Sequence: Synthetic coding sequence
  source 1..4461: mol_type = other DNA
atgagcctgaccagctggttcctggtgagcagcggcggcacccggcacaggttacccagggagatgatttttgtcgggagagatgactgcgaactgatgctccaatctagatcagttgacaagcaacacgccgtgattaattatgacgcctctactgatgaacaccttgtgaaagacctgggctcccttaacggcactttcgtcaatgacgtaagaataccggagcagacctacatcactctgaaactcgaagataagttgcgatttggatatgacacaaaccttttcacagtggtgcagggggagatgagggtccccgaagaggcgttgaaacatgaaaaatttactatacagctgcagctttcacagaagtcaagtgagagcgaactgtccaagtcagcctcagccaagagcatcgatagcaaagttgctgacgctgctaccgaagtgcaacacaagactacagaggcactgaagtcggaggaaaaagccatggatatttccgcgatgccacgcggtaccccactgtacggccagcccagctggtggggagatgatgaagtggatgagaagagggctttcaagacaaatggtaaacccgaagaaaaaaatcacgaggccggcacatccggctgcgggatcgacgccaagcaggtggaggagcagtcagccgctgcaaacgaggaggtgttgtttcccttctgccgggaacctagctactttgagatacctacaaaggaatttcagcagccgagtcagattaccgagtctaccatccacgagatcccgactaaggacacccccagttctcatattacgggagctggccatgcatcctttaccattgagttcgatgatagtacaccgggtaaagtcactatccgggaccatgtgaccaaattcactagcgaccagcgccacaagtccaagaagtcatcacccggtacccaggatctgttgggcattcaaaccggtatgatggcccctgagaataaagtagccgattggctggcacaaaataatccacctcagatgctctgggagcgaacggaggaggactccaagtcaatcaagtcagatgtgcctgtatacctcaaaaggttaaaggggaacaagcacgatgacggtacgcagtccgattcggagaatgccggtgcccatcgccgctgctcaaagagagccacattggaggagcacctgcgtagacaccactctgagcacaagaagctgcagaaggtccaggcaacagaaaagcaccaggaccaggctgtcgtgttcggcgtggatgataaccaggactataatcgacccgtgataaatgagaagcataaagacttgattaaggactgggctttatcaagtgccgctgctgtgatggaagaaaggaagccactgacaactagcggattccatcacagcgaagagggcaccagctcctcgggatcaaagagatgggtctcccagtgggcaagcttggccgccaaccatactaggcacgaccaggaagagcggatcatggaattctccgcacctctgcccttggagaatgaaacggaaatcagtgagagcgggatgactgtccgctccacaggctccgctacttcgttggcaagccaaggggagagacggagacgaacattgcctcagctccccaacgaggagaagagtctggagtcccatcgggccaaggtagtgacacaacgtagtgagattggcgagaaacaggacaccgaactccaagaaaaagaaacacccacacaggtgtaccagaaggataagcaggacgcagaccgaccgctgagcaagatgaaccgcgcagttaatggtgagaccctcaagacggggggagacaacaagaccttactgcacctgggatcttctgctccaggtaaggagaagagcgagaccgataaggaaaccagcctggtcaagcagaccctggccaagctgcaacagcaggaacagcgtgaggaagctcagtggacccccaccaagctcagctccaaaaacgtgagtgggcaaacagacaagtgccgggaggagacctttaaacaggagagccaaccaccagaaaagaactcggggcattcaacttccaaaggtgatagggtggcccagtccgagagcaaaaggaggaaggcggaggaaatcctgaagtcccaaacccctaaagggggcgataaaaaagagtcatccaagagtttggttagacagggaagcttcactatcgagaaaccctcaccaaatatccctatcgaactcattccacatatcaacaaacagacgtccagtacaccaagcagcctcgccttgaccagtgcgagtcgcatccgtgagcgaagcgagtcactggatccggattcctctatggatacaaccctcattcttaaggacactgaggcagttatggccttcctggaggcaaaactccgagaggacaataagaccgatgaaggtcccgacactccctcatacaaccgtgataattccattagtccagagtctgatgtggataccgcctcaactatctccctggtcaccggagagaccgaaagaaagtccacccagaagcggaagtcttttacctccctctataaagataggtgtagtactggaagcccctcaaaggacgtaactaagtcaagcagttccggagccagggaaaagatggaaaagaagaccaaatccaggtccactgatgtgggctcccgcgccgacggtcgcaaattcgtgcagtcctctggtcggattcgccaaccatctgtggatttaacagacgacgaccaaacaagcagcgttcctcattcagctatcagcgatattatgtccagcgaccaagaaacgtacagttgtaagccccacgggagaacccctcttacaagtgccgatgaacatgtgcactccaagttagagggaagtaaagtgactaagagtaagacttccccagtggtgtcaggaagttcatccaagagcacaacgcttccaaggccgagaccaacacgaaccagcctgctgcggagagcacgactcggcgaagcttcagactctgaactggcagacgccgacaaggcaagcgtggcaagtgaagtctccaccacaagcagcactagcaaaccacccacaggcaggcgcaacatttctcgcattgatctgttggcacagccccgtagaacacggctgggttccctgagcgcccgatctgacagcgaggcgaccataagtcgctcaagtgcatcaagccgcaccgctgaggccattatacgttcgggcgcccgtctcgtgccaagtgataaattctcgcctagaattagagccaacagcatttcacggctgtctgattctaaagtgaaatccatgacgtctgcacacggcagcgccagcgtgaatagccgatggcgaagatttcccaccgactatgcaagcacgtccgaggatgaattcggtagcaaccggaactctccaaaacacacccgccttcgtaccagccccgctcttaaaacaacccggctgcagtctgccggctccgctatgcccacctcatcttccttcaagcaccggatcaaggagcaggaagactacattcgagattggactgcccacagggaagaaattgcaaggatatcgcaggatctggcccttatcgcgcgtgaaattaacgatgtcgcaggagagatcgactccgtcacttcaagtggcacggcgccttcaaccactgtgtccacagcagctacaacgccaggttcagcaatagatactagagaagagctggtggatcgtgtgttcgatgagtctttgaatttccgtaaaatcccccctctggtccactcaaagacccccgaagggaacaatggaagaagtggcgatcccagaccccaggctgcagagccccccgaccatctcacaataacgcggcgcaggacctggtcaagagatgaggtgatgggagacaacttgctgctgagttcagtattccaattctccaaaaagatacgccaatcaattgataaaacggcgggcaagattaggattctttttaaggataaagatagaaattgggatgacattgaatctaagctgagagcagagtccgaggtgcctattgtcaagaccagttccatggaaatcagcagtatcctgcaggagctgaaacgcgtcgaaaagcagctccaggctattaacgccatgatcgatccagacggaacccttgaagcacttaacaacatggggttcccaagtgccatgctcccgtctccgccgaagcaaaaatcctccccagtgaacaaccaccatagccccgggcagactccgactcttggacagccggaagcccgggccctccaccctgccgcggtgagtgccgccgctgagtttgagaacgcagagagcgaagctgacttctcaattcattttaataggtttaatcccgatggcgaggaagaggatgtaaccgtacaagagtag

SEQ ID NO: 182462 - DNA, 1239 bp, synthetic construct
  misc_feature 1..1239: note = Description of Artificial Sequence: Synthetic coding sequence
  source 1..1239: mol_type = other DNA
atgcgggtgcccgaggaggccctgaagcacgagaagttcaccatccagctgcagcttagccagaaaagttcagaaagtgaattgtccaaaagtgcatccgcaaaatcgatcgactcaaaagtggcagacgctgctaccgaggtgcaacataaaacaacagaggccctcaaatctgaggagaaggccatggacatctccgccatgccccgagggactcctctctacggtcagccgagctggtggggagatgacgaagtcgacgaaaaaagagcattcaaaactaatggaaagcccgaagaaaaaaaccatgaggccggaactagcggctgcggcatcgatgctaaacaggttgaagagcagtccgccgcagctaacgaggaagtcttattccccttctgcagagaacccagctactttgagatcccaactaaagagtttcaacaaccgtctcagatcaccgagagtaccattcatgagatcccaaccaaagataccccctcatcccacataactggggctgggcacgcctcattcaccatcgaatttgacgattccactcccggcaaggtgactattagggatcacgtaaccaagtttacatcagaccagcgacacaagtctaagaaaagcagcccaggaacccaagacttactcggaatccagaccggcatgatggccccagagaataaggtggccgactggctggcccagaataatccaccccaaatgctgtgggaacgcactgaggaggactcaaagagtataaaaagcgacgtcccagtctacctcaaacgccttaagggtaataagcatgatgacgggacacagtctgactcggaaaatgctggtgctcatcgcaggtgcagtaaaagggctacactcgaggagcacctcagaagacatcacagtgaacataagaagctacagaaggtgcaggccaccgaaaagcaccaagaccaggcagtcacaagcagtgcccaccatcggggcggccatggggtcccccacgggaagctgcttaagcagaaaagcgaggaaccgagcgtgtcaataccattcctgcagacagctctcctccgctcatccggttctctgggacatcgaccctctcaagaaatggacaaaatgctgaaaaaccaagctgactgcgggagcgtggccttttgcggtttcatgatcttcaagcttaatctgatgatcacaccattcccattcatagacctgttcagcttcttttag

SEQ ID NO: 182463 - DNA, 402 bp, synthetic construct
  misc_feature 1..402: note = Description of Artificial Sequence: Synthetic coding sequence
  source 1..402: mol_type = other DNA
atgagcctgaccagctggttcctggtgagcagcggcggcacccggcaccgacttccaagggaaatgatcttcgtgggacgtgacgattgcgagctgatgctgcagagccgctccgttgataagcagcacgccgtcatcaactatgacgccagtaccgatgaacacttggtcaaggacctgggttctcttaacggtacatttgtgaacgatgtacgaattccggagcagacatatatcaccctgaagctggaagataagctgaggttcggatatgacaccaatctgtttacagttgtgcagggtgagatgcgcgttcctgaggaggccttaaagcacgagaaattcaccattcagctccaattatctcaaaagtccagcgaaagcgagctgtcaaaatcctag

SEQ ID NO: 182464 - DNA, 267 bp, synthetic construct
  misc_feature 1..267: note = Description of Artificial Sequence: Synthetic coding sequence
  source 1..267: mol_type = other DNA
atgagcctgaccagctggttcctggtgagcagcggcggcacccggcatcggctccctcgcgagatgattttcgtcggtcgcgatgactgtgagcttatgttgcagtcaaggtcagtggataagcagcatgcagtgatcaattacgatgcttccacagacgagcacctagtgaaggacctcggatctctgaatggtacattcgtgaatgacgttaggattcccgagcagacgtacatcacactgaagctggaggacaagctccgctag

SEQ ID NO: 182465 - DNA, 336 bp, synthetic construct
  misc_feature 1..336: note = Description of Artificial Sequence: Synthetic coding sequence
  source 1..336: mol_type = other DNA
atgagcctgaccagctggttcctggtgagcagcggcggcacccggcatcgcctgccgagggagatgatcttcgtaggccgcgacgattgtgagctgatgctgcaatctaggagcgttgacaagcagcacgctgtaatcaattatgatgcgtccaccgatgagcatctggtaaaagatttggggagccttaatggtacattcgtgaatgatgtgaggatcccagagcagacatacataactttaaaactcgaggacaaactccgatttgggtacgatacgaacctgtttaccgtggtgcagggcgaaatgagagtgcccgaggaggccctgaagtag

SEQ ID NO: 182466 - DNA, 1407 bp, synthetic construct
  misc_feature 1..1407: note = Description of Artificial Sequence: Synthetic coding sequence
  source 1..1407: mol_type = other DNA
atgagcagcgaccaggagacctacagctgcaagccccacggccggacaccactcacttcggcagatgaacatgttcacagcaaattagagggttccaaagttactaaatctaagacttcgccagtcgtgtccggtagtagtagcaagtcaacaaccttgccgaggccaagacccacaagaacctctttactccggagagctcgccttggcgaggcctctgactctgagttagcggatgcagacaaagcatccgtggcgtcagaggtgtctacaacctctagcacatctaagcccccaaccggacgacgcaacatcagtcggattgatctgttggctcagcctcgcaggacaaggctcggatccctgagcgccagatctgacagcgaggctactatctcccgaagcagtgcgagctctaggaccgctgaggccatcatccggagtggcgcccggttggtcccctctgataagttttcaccacgaattcgtgccaactcaatctccagacttagcgacagcaaggtgaaatcgatgaccagcgctcacggatccgcgagtgcactgaaaacaactaggctccagtctgccggatcagccatgcccacgtcaagttcattcaagcaccgcattaaggagcaggaagactacattcgcgattggacagcacaccgggaagaaatcgcaaggattagccaggatctcgccttgattgcacgggaaatcaacgacgtcgcaggcgaaatcgattccgtcacttcatccggtaccgccccttcaacgactgtgtccacagcagccacaactcctgggagcgcaattgatacacgcgaggaggtgggggatctccacggagaaatgcacaagctcgtcgatcgcgtgttcgatgagagtctgaacttccgcaagattccacctctggtgcatagcaagacgcctgaaggaaacaacgggagatctggcgaccctcgaccacaagcggccgagcctcctgatcacctgaccataactcggcgccgaacatggtcccgcgatgaggtgatgggggacaatctcctgttgagcagtgtctttcaatttagtaagaagatccgacagtccatcgacaagactgccggcaagatcagaatactttttaaggacaaagaccgcaactgggacgatattgagagcaagcttcgcgctgaaagcgaggtcccaattgttaagacatcatcaatggaaatcagctctatcctacaggagttgaagagagtggagaagcaactacaggccattaacgccatgatcgatcccgacggcacccttgaggccctcaataacatgggcttccccagcgctatgctgccaagtcctcctaaacagaagagctcccccgtcaataatcaccacagccctgccatgctttag

SEQ ID NO: 182467 - DNA, 7161 bp, synthetic construct
  misc_feature 1..7161: note = Description of Artificial Sequence: Synthetic coding sequence
  source 1..7161: mol_type = other DNA
atggagacccggagccccggcctgaacaacatgaagccccagagcttacagttagtactagaagaacaggttctggctctgcaacaacaaatggctgaaaatcaggcagctagttggcgcaaattgaagaacagccaggaggcgcagcagcgtcaggctaccttggtgcggaaattgcaagctaaggtgctgcaatatcgttcctggtgtcaggaattagaaaagcggttggaggcaaccggaggcccaatcccgcagcgctgggaaaatgtggaagagcctaatctcgacgagctcttggtaaggctggaggaggagcaacagaggtgcgaatcactggccgaagtcaacacacagctgagactgcacatggaaaaagccgatgttgtgaataaagcccttagggaggacgttgagaaactcactgtggactggagccgggctcgcgacgaactgatgcggaaggaatctcagtggcagatggagcaagagttcttcaaaggatatcttaagggagagcacggaagactactgtccttgtggcgggaagtagtgacctttcggagacattttctcgagatgaaaagtgctaccgatagggatctgatggagctgaaagctgaacacgtgcggctcagtggatctctgctcacttgttgcttgcgcctgaccgtcggcgcacagtcgcgggagcccaacggatccggtcgtatggatgggagggagccagcccagctcctcctgttgctggctaagacccaagagctcgagaaggaagcccatgagcgctcccaagagctgatccaactcaaatctcagggggacctggagaaagccgagctccaggaccgcgtcactgaactgtccgccctgctcacacaatctcagaagcaaaatgaggactacgaaaaaatgatcaaggctctgcgggaaactgtggaaatcctcgagacaaatcacaccgaactgatggagcacgaagcctcgctgtcacgaaacgcgcaagaggaaaagctaagcctccagcaggtcatcaaagatattacacaggtgatggtggaggagggggataacatagctcaagggagcggccacgagaattctctggagctggactccagcatattctcccaatttgattaccaggacgccgataaggcccttaccctagtgagaagcgtgctgacccggagaaggcaagcagttcaggatctccgacagcagctggcgggttgtcaggaagcagttaatttgcttcaacaacagcacgatcagtgggaggaggagggcaaggctctcagacagcggctgcagaagctgacaggagaaagagacactctggcaggacagacagtcgacttacagggagaggtggactctctgtccaaagagcgagagctcctgcagaaggccagggaggagctgcgacagcagttggaggtgttagagcaggaagcctggaggctgagaagagtaaatgtggagctgcagctgcagggagattcagcgcagggccagaaagaggaacagcaagaagagctgcacctggccgtcagggagagagagagattgcaggagatgctcatgggtctggaggccaagcagtctgagagtctaagcgaacttattacactgagagaggctcttgaaagtagtcacctcgagggcgagctgctccgacaggagcagactgaagtaaccgccgcgttagcaagagccgaacaatccatagccgaactgtcctcttccgagaacactctgaaaaccgaggttgctgaccttcgcgctgccgcagtgaagctgagtgcgcttaacgaggctctggccctggataaagtaggactcaaccagcagctgctgcagctcgaggaggagaaccagagcgtttgcagccgtatggaggcagctgagcaggctagaaacgcgctccaggtcgacttggctgaggccgaaaagagaagagaggccctatgggagaaaaacacacacctggaagctcagcttcagaaagctgaagaggccggcgctgagcttcaggcagacttgcgcgacatccaggaggagaaagaggagatacaaaagaaattatctgagtcaaggcatcaacaggaggcggctaccactcagctggaacaactgcaccaggaagccaagcgacaggaagaggtgcttgcccgggcagttcaggagaaggaggccctggtacgcgagaaggccgctttggaagttcgtctccaagccgtagagagggatagacaagacctggcggaacagttgcaaggactctcctcagccaaggaacttctagagagcagcctgtttgaggcacaacaacaaaactccgttatcgaggtgaccaaggggcagttggaagtgcagatccagacagtgacccaggccaaggaagtgattcagggagaagtgcgatgcctaaaactggagctagatacagagaggtctcaagccgagcaggagagggacgccgccgcgcggcagttggcccaggctgagcaggaggggaaaacagcactggaacagcagaaagccgctcatgaaaaagaggtcaaccaattacgggaaaaatggatgcaactggagaccgaaaaggagagggtcagcctactcgagaccttactgcagacgcagaaggaactggcagatgccagccaacagcttgaacgactgagacaagacatgaaggttcagaaactgaaggaacaggaaaccactgggattcttcagacgcagcttcaagaggcccagagggaattgaaagaggcagctagacagcaccgcgacgatctcgctgcactgcaggaggagtcatcttccctattacaggataaaatggatctacagaaacaggttgaggacctaaagtcacaattagtggctcaggatgattctcagagactcgttgaacaagaagtgcaggaaaaattacgggagacacaggaatacaacaggatacagaaagaactggagcgcgagaaagcttccctcacactgtcattgatggagaaggaacaaaggttgctcgtgctgcaggaggccgactccatccggcaacaggagctaagcgcgctgaggcaagatatgcaggaagcacaaggcgagcaaaaagagctcagcgcacaaatggaacttctgagacaggaagtaaaagaaaaggaggctgacttcctagcgcaggaggcccaactgctcgaggagctggaagctagccatattactgaacaacaactgcgggcttcattatgggcacaggaggcaaaagcggctcagttgcagctccgactgcggagtacagaatcacagcttgaagccctggccgccgaacagcaacccggcaatcaggcccaggctcaggctcaactcgccagtctgtatagtgccctccaacaggccttaggttctgtttgtgaaagcagaccagagctatcagggggaggggattctgctccttccgtgtggggacttgaaccagatcagaatggggctcgatcactctttaaaaggggccccctgcttaccgccctctcagcagaagccgtggccagcgcgctgcacaaactgcaccaggatttgtggaagacccagcagacccgggacgttctgcgggaccaggtgcagaagctcgaagaaaggctgacagatacagaggccgagaagtcccaggtacacactgaacttcaagatctccaaagacagctcagccagaatcaggaggagaaaagtaagtgggagggcaagcagaattctcttgaatccgagttgatggagctgcacgaaactatggcctcacttcagtctagacttaggagagccgagctccagaggatggaggcccagggtgaaagggaacttttgcaggctgctaaggaaaacctgaccgcacaagtggagcacctgcaggccgccgtagtggaagcaagagctcaggcctcagccgccgggattctggaggaagacctgcgcaccgctcggagcgccctgaagctcaaaaatgaagaggtagaaagcgaacgcgagagggctcaggcactccaggagcagggcgagctgaaagttgcacaaggcaaggctctgcaggaaaacctggccctgttaactcagaccctggcagagagagaagaggaggtagagactctacgcggccagatacaggaactcgagaagcagcgagagatgcagaaagcagccctggaattgctatccttagatctgaaaaaacggaaccaggaggtggacctccagcaagaacagatacaggaacttgagaaatgcagaagcgtccttgagcacctgccaatggccgtccaggagcgggagcaaaagctcactgtacaaagagagcagatccgggaactggagaaggaccgggagactcagcgaaatgtcttggaacatcaactcctggaactcgaaaaaaaggaccagatgatagaatctcaacgaggtcaggtgcaggatcttaaaaagcagttggtgacactcgagtgcctggccctcgagctggaggagaaccatcacaaaatggagtgccagcagaagttaattaaggaactagagggacagcgcgagacacaacgagtcgctctcacccaccttacgctggacttggaggagcgcagccaagaactgcaagctcagagcagtcagatacacgatctcgaaagtcacagcactgtgctggcaagagaactccaggagcgcgatcaagaggtgaaaagccagcgggagcagattgaggagctgcagcggcagaaggagcaccttacgcaggatctcgaaagacgtgaccaggaactgatgctccaaaaggaaaggatccaagtgctggaggaccaacgcaccaggcagaccaagattctcgaggaggatcttgaacagattaaactgtctttgcgggaaagaggaagggagcttaccacccagaggcaactgatgcaagagcgggctgaagagggtaagggtccatcaaaagcacagcgaggctctctggagcatatgaagttgatccttagagacaaggagaaagaagtggagtgtcagcaagagcacattcatgagctccaggaactgaaggaccagctcgaacagcaacttcagggactccatcggaaggttggtgaaaccagtcttctgctctcccagcgggagcaagaaatcgtcgtgctgcagcagcagctgcaagaagctagggaacaaggagagctgaaggagcagtccctgcaatcacagcttgatgaggcccagagggctctggcccagcgcgaccaggaactggaagccctgcagcaggaacagcaacaggcacagggtcaggaagaacgtgtcaaggagaaagccgacgctttgcagggagccctcgaacaggcacacatgaccctgaaagaaaggcacggcgaactacaagaccacaaagagcaggcccgccgcttggaggaagaactcgcggtggaggggcggcgggtgcaggccctcgaggaggtattgggcgatcttcgtgcggaaagtcgggagcaagaaaaggccttgctggctttgcaacagcagtgcgcagagcaggcccaggaacatgaggtggaaacccgagccctccaggatagctggctccaggcccaggccgtgttaaaagagagggaccaggaattagaggccttacgtgctgaaagtcaaagcagtaggcatcaggaagaagctgcccgcgccagagcagaagctttgcaggaggctctaggaaaagctcatgcagcattgcagggaaaggagcagcatttacttgagcaagctgagttgagccggtcactcgaggcatcaactgccaccctccaggcctccttggatgcctgccaggcccacagccgtcagttagaagaggccttaaggatccaggagggagaaatccaagatcaggaccttaggtaccaggaggatgtgcagcagctgcagcaggccctcgctcagagagatgaggaactgaggcatcagcaagaacgcgaacagttgctcgagaagtctttagcgcagagagtgcaggagaacatgattcaggaaaagcagaacttggggcaggagcgcgaggaggaagagatccggggcctacaccagtccgtacgggaactgcagttgacgttggcacagaaggagcaggagatcttggaactcagagagacccaacagagaaacaacctggaagcattgccgcacagtcacaagacatcgcctatggaggaacaatccttgaagctggactctcttgaacctcgcttgcagcgtgagctggagcgtctacaggccgcactccgtcagactgaggcacgggaaatcgagtggagagagaaagcccaggacctggccctaagtcttgcacagactaaggcgtctgtctcatctctgcaggaagtagctatgttccttcaggctagcgtcctcgaaagggattccgaacagcagcggctgcaggacgagctggagttaacgaggcgggccttggagaaggagcggctgcattccccaggtgctacctccacggctgaactgggaagtcggggtgagcagggagtgcaactcggagaggtgtcgggtgtggaagctgaacctagcccagatggaatggagaagcagagttggcgccaacgtctggaacatctacagcaggctgtggctcgcctcgaaatcgatcgctctcggctgcagcggcacaatgtccagctgaggagtaccttagaacaggtcgagcgagagcgacgcaaattgaagcgagaagccatgagagccgctcaagctggctcactggaaataagcaaggccactgcttcttccccgactcagcaggacggccgtgggcaaaagaacagtgacgctaaatgcgtggctgagctgcagaaggaagtggtcctacttcaggcacaactgacattagagcggaagcaaaagcaggactatatcacgagaagcgcccagacaagtagagagcttgccgggttgcatcacagcctgagccactcactcttggccgtggcccaggcccctgaggctacggttctggaggctgaaactcggcgccttgatgagagtcttacccagtctcttacctcacccggtccagtcctgttacacccttctccctctacaactcaggccgcaagtcgctag

SEQ ID NO: 182468 - DNA, 1020 bp, synthetic construct
  misc_feature 1..1020: note = Description of Artificial Sequence: Synthetic coding sequence
  source 1..1020: mol_type = other DNA
atggagacccggagccccggcctgaacaacatgaagccccagagcctccaactcgtactggaagagcaggttctagcactgcaacagcagatggcagaaaaccaggcggccagttggagaaagctgaagaacagccaggaggcccagcagagacaggccactctggtgcgcaagctccaagccaaagtactgcagtaccgctcatggtgtcaagagcttgagaagaggctggaagccaccgggggacctatccctcagcgctgggaaaatgttgaggagcctaatcttgacgagctgctcgttcgattggaggaggaacagcagcggtgtgaaagtctggcagaggtgaacacacagttacgtttacatatggaaaaagctgatgtcgtaaataaggcattaagggaagacgttgaaaagctcactgtggattggtctagagccagagacgagctcatgaggaaggagagtcagtggcagatggagcaagaattctttaagggctacctgaaaggggagcacggcagattgctgtccctgtggcgagaagtggtgacatttcggaggcatttccttgagatgaagtcagcaactgatagagatcttatggagctgaaagctgaacacgtccgcctatcaggttcactgttaacctgctgcctgcgtctgacggtgggagctcagagtcgggaacccaacggctctggcaggatggatggtagagagcccgcacagctgctcctgctgctggccaaaacccaggaactggaaaaagaggctcacgagaggtcacaagagcttattcaactcaagagccagggagacttagaaaaagccgagctgcaggaccgtgtcacagagctaagcgccctgttaacccaatctcaaaagcagaatgaagactacgagaaaatgattaaagccctacgtgagacggtggagatcctggtacatgaccctctgctttggaagggagtgggacgagggcttgtgggtagtttatgctttatggatagatag

SEQ ID NO: 182469 - DNA, 7329 bp, synthetic construct
  misc_feature 1..7329: note = Description of Artificial Sequence: Synthetic coding sequence
  source 1..7329: mol_type = other DNA
atggagacccggagccccggcctgaacaacatgaagccccagagcttgcagctcgtcctggaagagcaagttttggctcttcagcaacagatggctgaaaaccaggcagccagttggcgcaagctgaaaaactctcaagaagcccagcagagacaagccacccttgtcaggaaactgcaagcaaaagtactgcagtaccgctcctggtgtcaagagctggaaaagcgcctggaggctaccggcggcccgattccccagcggtgggaaaacgttgaggaacccaatctcgacgagttgctcgtaaggctagaggaggagcagcagcgctgtgaatccctcgctgaagtgaatacacagcttcgactccatatggaaaaagcggacgtggtcaataaagctctgcgggaagacgtcgaaaaactgactgttgattggtcccgagctagggacgagctgatgcgcaaagaatcccaatggcagatggagcaggaattctttaaaggctaccttaagggagaacacggaaggcttcttagcctgtggagagaggtggttaccttccggagacattttctggagatgaaaagcgccacagaccgcgacttgatggagctgaaggccgaacacgtccgactgtcagggtcactgctgacgtgctgtcttcggcttactgtgggggcccagtctcgagagcccaacgggagtggaagaatggatggtagagagcccgctcagctactgttactgctagctaaaacccaggagctggagaaagaagcccacgagaggagtcaggaactcatccagctcaaatcacaaggggacctcgagaaggctgagcttcaagacagggtgaccgagctgtcagccctgctcacccagtcacaaaaacagaatgaagattacgagaaaatgattaaggcactgagagaaacagtggagatcctggaaacaaatcatacagagctgatggagcacgaggcttctctcagccgtaacgcgcaggaagaaaagctatccctgcagcaggtgatcaaggatatcacacaggtgatggttgaagagggggataacattgcacagggcagcgggcatgagaactcccttgagttggacagctctatcttcagccagttcgactaccaggatgcagacaaagcgctgaccctggtgcgttccgtgctgaccagaagacgccaagctgtgcaggatctcagacagcagctcgctggctgccaggaggccgtgaacctccttcagcagcaacacgaccagtgggaggaagaaggaaaggcacttcgacagcgtctccagaagctgaccggtgagcgggacacactagccggccaaaccgtggatttgcaaggtgaagtggacagcctgagcaaggaaagagaactgctccagaaggcacgagaagagctgcgccaacagctcgaagttttggagcaggaggcttggcgactccgcagagtgaatgtcgagttacagctccagggcgacagtgcacagggacaaaaggaggaacagcaggaggaactgcacttagccgtgagggagcgggaacggttgcaggagatgctgatgggactcgaggcaaagcagtcagaatcacttagcgagttgatcaccctgcgggaagctctggaatccagtcacctcgagggagaactcctccggcaggagcagaccgaagtcaccgcagcactggcacgggccgagcagtctattgccgaacttagcagctccgagaatactttgaagaccgaggttgcagacttgcgtgctgccgctgtgaagctctccgcactgaatgaagcgttagctctggataaggtaggtttaaatcagcagctcctgcagctggaagaagagaatcagtccgtgtgcagtagaatggaggcagcagagcaggcccgtaacgccctgcaggttgatctagcagaagcggaaaaacggcgcgaggcactgtgggaaaaaaatacacatttggaggcacagctgcagaaggccgaggaagcgggagctgaactgcaggcagacctgcgtgacatccaagaggaaaaagaagagatacagaagaagttgtcggagagtagacaccagcaggaagctgcgacgactcagcttgagcaactccatcaagaagccaagcgacaagaggaggttctggcaagggccgtgcaagagaaggaggctctcgtgagagagaaagccgctctggaagttcgtctccaggccgtagaaagggatcggcaggatcttgcagagcaactgcaaggactcagtagtgctaaggagctgctggaatctagcctgttcgaagcgcagcaacagaattcagtcatcgaggtaacaaaagggcagctggaggtgcaaatccaaactgtcacacaggctaaggaggtcattcagggggaggtgcggtgcctgaagctcgagctggacactgaaagatcacaggcggaacaagagagggacgccgccgcccgtcagcttgctcaagccgagcaggaagggaaaactgccctcgaacagcagaaagccgcacacgagaaggaagtgaaccagctcagagagaaatgggaaaaggagcgtagctggcatcagcaggagctggcgaaagcactagagagcctggaacgtgagaagatggaactggaaatgagactcaaagaacagcaaactgaaatggaagctatccaggctcaaagagaggaggagagaactcaggctgaatccgctctgtgccagatgcagttggaaactgaaaaggaaagagtttctctactagagacactgctgcagacacagaaagagctggcagatgcttcccagcagctcgagcggttaaggcaggatatgaaggttcagaaactgaaggagcaggagaccaccggaattctccagactcagttgcaggaggcccaaagggagctgaaagaagcagcccgccaacaccgagatgacctagcagctttgcaggaggagagcagcagcctcctgcaggacaagatggacctccagaaacaggttgaggatctgaagagtcaactcgtcgctcaggacgactcccagcgcctcgttgagcaggaagtgcaggaaaaattgcgggaaacacaagagtataacagaattcagaaagaactggaaagagagaaggccagcttgactctttcgttgatggaaaaggagcaaaggttgctggtactccaagaggccgactcaataagacagcaggagctgagcgcgctgaggcaggatatgcaggaggcacagggtgagcagaaagaacttagtgcccagatggaattactccgacaggaggtcaaggagaaggaggctgatttcttagcccaggaagcccagttgctggaggagctcgaagcttctcatattacggagcagcagcttagagctagtctctgggctcaagaggccaaggcggcgcagcttcagcttcgcctccggtcaaccgagtctcagttggaagcactggctgcagagcagcaacctggcaaccaggcccaggcccaggcacagctcgcatcgctatactcagctctgcaacaagcactgggttccgtatgcgaaagcagaccagagctgagcggcggcggggatagcgctccaagcgtgtggggattggagccggatcagaacggggctaggagcctatttaagcgcgggccactgctgacagccctgagtgcagaagcagtggcttctgcgctgcacaagcttcaccaagacctctggaagactcagcagactagggatgtcctgcgggaccaagtccaaaaactcgaggaacgacttactgacaccgaggctgagaaatctcaggtgcacaccgagctgcaggatctccaacgtcaactttcccagaatcaggaggagaagtccaaatgggagggaaaacagaactcattagagtcagaacttatggagctgcatgaaaccatggcctcacttcagagcaggctacgacgcgcagagcttcagaggatggaggctcagggggagagagagttgctgcaggcggccaaggagaacctcacagctcaggtggaacaccttcaagccgccgtggtggaggcccgcgcccaggcctccgccgccggcatcctggaggaggacctaagaaccgcccgcagcgccctgaagctgaaaaacgaggaggtggaaagcgagcgcgagagagctcaggccctccaggagcaaggcgagctaaaagtagcccagggtaaggccctgcaagagaatttggctctgctgactcaaactctggcggagcgggaggaggaagtcgaaacacttagagggcagatccaggaactagagaaacagagggaaatgcagaaagcagctttagaactcctgtcccttgatctgaaaaaaaggaaccaggaagtcgacttgcagcaagagcagatccaggaactggaaaaatgtcgatccgtactggagcacttaccaatggcggttcaagaacgggagcagaagctgaccgtgcagcgggaacagatacgcgaactggagaaagaccgggaaactcagcggaatgtgttagaacaccagctcctcgaactggaaaagaaagaccagatgatcgagtcccagagaggccaagtgcaagatctcaaaaaacagctggtgacacttgagtgtctggccctcgagttggaggagaatcatcacaagatggagtgtcagcagaaactcattaaggagttggagggccagcgagagactcagagagtggcgctgacccacctgacattagatcttgaggaacgctcacaggagctccaggcccagagctcacagatccacgaccttgaaagtcattccaccgttttggcccgcgaactccaggaaagggatcaggaagtgaagtctcaacgagaacagatcgaagagctgcaacgccagaaagagcacctcacacaggacctcgaacgacgggatcaggagctcatgctgcaaaaagagaggattcaagtgctggaagatcagcgcactcgacagacaaagatccttgaagaagatctggaacaaattaagctgagtctgcgtgagcgcgggagagagctgaccactcagcggcagttaatgcaggagcgagctgaagaggggaaaggcccaagcaaggcccagcgggggtcactcgagcatatgaagctcattctcagggacaaggagaaagaagtagagtgccagcaggagcatattcatgagctgcaggagctgaaagatcagctcgaacagcaactgcaaggtctccaccgaaaggtgggggagacaagtctgctgctctcacagagggagcaggagatcgtcgtcctccaacaacaacttcaagaggcacgagagcagggtgagctcaaggaacaatctctgcagagtcagctggacgaggctcaacgtgctctggcacagcgtgatcaggagctcgaggccctgcagcaggagcagcagcaggctcaaggacaggaggagagggtgaaggagaaagctgacgctcttcagggcgctcttgagcaggcacatatgaccctgaaggagcgtcatggagagcttcaggaccataaagaacaggcacgccgactggaggaggagttggctgtggagggccggcgtgtgcaagctcttgaagaggttctcggtgacctacgagcagaatcaagggagcaggagaaggccctgttggctctgcagcagcagtgcgctgaacaagctcaggaacacgaggtggaaacccgggcattgcaggactcatggctgcaagcccaggcggtccttaaggagcgcgatcaagaactggaggctctgcgggctgagagtcaatcctcaagacatcaggaggaagccgctagggcacgcgccgaagccctgcaagaggccctgggaaaggcacatgcagccctacagggaaaggagcaacatctcctggagcaggccgagctttcccgctccctggaggcatccaccgccaccctgcaggcttccttggacgcctgccaggctcactcacggcaactcgaggaggccctgaggattcaggaaggcgagatacaggaccaggatctgcggtaccaagaggacgtgcagcagcttcagcaagctctagcgcagagggacgaggagctcagacatcagcaggagcgcgagcagttgttggagaaatcccttgctcagcgcgttcaggaaaacatgattcaagagaagcaaaatctaggccaggagcgcgaggaggaggagatccgggggctacatcagagcgtgagggaactccaattgacgcttgcccaaaaagagcaggaaatcctggaactgcgggaaacccagcagagaaacaatcttgaggcactaccacactcacataaaacttctcccatggaggagcagtcactcaagctggattctctggaaccccgcctgcagcgggagctggagcgactgcaggctgctctcaggcaaacagaagcacgggagatcgaatggcgtgagaaggctcaggatctcgcattgtcactggcccagacaaaagcctcagtctcatccctgcaggaagtcgccatgttcctccaggcatcggtgctagagcgcgatagtgagcagcaacgactacaagacgaactcgagctcaccaggagagctttggaaaaggaaaggctccacagccccggcgctacatcaaccgccgagctgggctcccggggcgagcagggagttcaactaggagaagtatccggggtggaagctgagcccagcccagatggaatggagaaacaatcatggcggcagagattggagcacctgcagcaggccgtggctaggctcgagattgacagatcaagactgcagcgtcataatgtgcagctgcgttctaccctggagcaggtggaacgagaaagaaggaagctgaaacgcgaagcaatgcgtgccgcccaggccgggagccttgagatctcaaaagcgaccgcttcgagccccacgcagcaagacgggagaggacagaagaatagtgatgctaaatgcgtggctgagctacagaaggaagtcgtgctattgcaggcccagctgaccctggaacgaaagcagaagcaagattatatcacacgtagtgcccaaacttcaagggaacttgcaggcttacaccattccttatctcattcactgctggctgttgctcaggctcccgaagccacagtgttagaggcagagacacgcaggctggatgagagcttaactcaaagtctgaccagccccggccctgttttgcttcacccatcacctagcaccacccaggctgcctctaggtag

SEQ ID NO: 182470 - DNA, 345 bp, synthetic construct
  misc_feature 1..345: note = Description of Artificial Sequence: Synthetic coding sequence
  source 1..345: mol_type = other DNA
atggagacccggagccccggcctgaacaacatgaagccccagagcctccaactggtgctagaagagcaagttctggcgctgcagcaacagatggcagaaaaccaggcagcatcttggaggaaactgaaaaactctcaagaagctcagcaaaggcaggcgactctggtgcgcaaactgcaggcaaaagtgctgcagtataggtcatggtgccaggaactggagaaaagactggaggccactgggggacctataccccagagatgggaaaacgtggaggaaccaaatctggatgaactgcttgttagactggaggaagagcagcagcgatgcgagtcacttgcgtag

SEQ ID NO: 182471 - DNA, 2055 bp, synthetic construct
  misc_feature 1..2055: note = Description of Artificial Sequence: Synthetic coding sequence
  source 1..2055: mol_type = other DNA
atggagacccggagccccggcctgaacaacatgaagccccagagcctgcagctcgtgctggaggaacaggtgcttgcactgcagcaacagatggctgaaaatcaggccgcttcttggcggaagttgaaaaattcccaagaggcccagcagcggcaggcgactcttgtgagaaagctccaggctaaagtcctgcagtatcgaagctggtgtcaggaactagaaaaaaggcttgaagcgactggaggaccaattcctcagaggtgggagaacgttgaggaaccgaacctggatgaactactggtgaggctggaagaggaacagcagaggtgcgagtcacttgcagaagtaaacactcagctgcggctgcacatggagaaagctgacgtcgtgaacaaggcccttcgggaagacgtagaaaagctgaccgtggattggtccagggctagagatgagctcatgcgtaaggagagtcagtggcagatggagcaggaattcttcaaggggtacctgaaaggggaacacggcaggcttctgtctttgtggcgcgaggtggtcacattcagaagacatttcttagaaatgaaaagtgctactgaccgggacctgatggagctgaaggccgagcacgtgagactgagtggtagtctcctgacttgttgtcttagattgaccgtgggcgcccaatcgcgtgagcctaatgggtccggccgcatggacggaagggagcccgctcaactgttacttctgctggccaagacacaggagctagagaaagaggcccacgaaagaagccaggagctgatccagctgaaatcccagggagatctagaaaaggcggagttgcaggaccgtgtgaccgaactgtccgcccttttgacccaatcacagaagcaaaacgaggactatgaaaagatgataaaggccctgcgcgagactgttgaaattttgactaatcataccgaactcatggaacacgaagcatcgctgtcccgtaacgcgcaggaggagaaactatcgctgcaacaggtgattaaagacattacccaagtgatggtggaggaaggtgacaatatcgctcagggttcaggacacgagaattctctggagctagattcgtcgattttcagccagttcgactaccaagatgccgataaggcactgaccctcgtgcggtctgttcttacccggcggcgccaggctgtgcaagacctccgccaacagctcgcaggctgtcaggaagcggtgaatttgctgcagcagcagcatgaccagtgggaggaggaaggtaaggccttgaggcagcggctgcagaaactaactggggagcgggatactttggctggacagactgtcgatcttcagggcgaggtcgacagcctttcaaaagagagagaattgctgcagaaggcaagggaagagttgcgccagcagctggaggtgctggaacaggaagcatggagactgcggcgagtgaacgtggagctgcaactgcagggagacagtgcccaaggtcagaaggaagagcagcaggaggaacttcacctcgccgtcagggaaagggaacgactccaggagatgctcatgggccttgaggctaaacagagtgagagtctatctgagcttatcaccctcagagaggcattggagtcctcacatctggagggggaactgctgaggcaagaacagacagaagtgaccgctgcactggcccgcgccgagcagagtattgctgagttgagcagttccgaaaataccctgaagactgaagtggctgacttgcgcgccgccgccgttaaactctcggccttaaacgaggccctggctctcgataaggttgggctgaaccagcagctgctgcagctggaggaggaaaatcaaagcgtctgcagtcgcatggaggcagccgagcaggcacgcaacgcacttcaagtcgatttggccgaggcagagaaacgtcgggaagccctctgggagaagaacacccacctcgaggcccagctgcaaaaggccgaagaggccggggctgaacttcaggccgatctccgagatatttag

SEQ ID NO: 182472 - DNA, 495 bp, synthetic construct
  misc_feature 1..495: note = Description of Artificial Sequence: Synthetic coding sequence
  source 1..495: mol_type = other DNA
atggagacccggagccccggcctgaacaacatgaagccccagagcctccaactcgtgttggaggagcaggtgctggcattacagcagcagatggcagagaaccaggccgctagctggcggaaactgaagaactctcaagaagcacagcagcggcaggccaccttagtgcgcaaattacaagcgaaagtgctgcaataccgatcttggtgccaggagctggagaagcgcctcgaagccactggcggccccatcccccaaaggtgggagaatgtggaagagccgaatctcgacgagttgctggtaaggctagaggaggagcaacagcgttgcgaatcactggccgaagtgaatacccaactccgactgcatatggagaaggctgatgtggtcaacaaagctctaagagaggacgtagagaaactaaccgtagattggtctcgggccagagacgagctcatgagaaaagaatcccaatggcagatggagcaggagtag

SEQ ID NO: 182473 - DNA, 1617 bp, synthetic construct
  misc_feature 1..1617: note = Description of Artificial Sequence: Synthetic coding sequence
  source 1..1617: mol_type = other DNA
atggagacccggagccccggcctgaacaacatgaagccccagagccttcagctggtgctagaggagcaggtgctggccctgcagcagcagatggctgagaatcaggctgcctcatggagaaagctgaagaactcacaggaagcccagcaaaggcaggcgacgctggtacgcaagcttcaagccaaggttctacagtacagatcctggtgccaagagctggagaagcgtttagaggccacagggggacctattccccaacggtgggaaaacgtggaagagcctaatctggacgaactactggtcagactggaagaggagcaacagaggtgtgagagcctcgctgaggtgaacacccagcttagattgcacatggagaaagctgacgtggtcaacaaagctctgcgcgaggacgtagaaaagctcacagtggattggagccgcgctagggatgagctgatgcggaaggaatcccagtggcagatggagcaagagttctttaaaggatatctgaaaggggaacatggtcggctgttgagcctttggagggaggtagtgacatttcgccgacacttccttgaaatgaaatccgccaccgaccgcgaccttatggaactcaaagctgagcatgtcaggctgtccgggtcactcttaacttgctgcctgcgcctaaccgtcggagcccagtcacgcgaaccaaatggaagcggcagaatggatgggcgtgagccggcgcagttgcttctccttttggctaaaacgcaggagctggaaaaagaagctcatgagcgctcccaggaactgatacaacttaagtctcaaggcgatcttgagaaggccgagctacaggaccgtgtgacggagttgagcgcgctgctgacccagtctcagaagcagaatgaggactacgagaaaatgattaaggctcttcgcgagacggtggaaattctggaaacaaaccacaccgaattaatggagcacgaggctagcctcagccgtaacgcccaggaggagaaactgagcctgcagcaagtaattaaagatattacacaggttatggtcgaggagggggacaacatcgctcagggcagcggccatgagaattctctggaactggattcctcgattttttcacagtttgactaccaggatgccgataaagcgctcaccctggtcagatcagtcctcaccaggcggaggcaggccgtgcaagaccttcggcagcagcttgctggctgccaggaagcagttaacttgctccagcaacagcatgaccagtgggaagaggagggaaaggctctgaggcaaagactgcagaaactcaccggggagcgcgataccctcgcgggccagaccgtcgacctgcaaggtgaagtggactctctttctaaggagagggaactgctccagaaagccagagaggaactaaggcagcagcttgaggtgctggaacaggaggcctggcgcctgaggcgagttaacgtggagttacaactccagggagacagtgcccaggggcagaaggaggagcaacaggaagaactgcacctggcggtccgtgagcgggagcgcctccaaagttcacagctacagtcctgccgcgttttgaaaacgccttag

SEQ ID NO: 182474 - DNA, 7446 bp, synthetic construct
  misc_feature 1..7446: note = Description of Artificial Sequence: Synthetic coding sequence
  source 1..7446: mol_type = other DNA
atgccccccaacatcaactggaaggagatcatgaaggtggaccccgacgatctgccgcgtcaggaggagctggccgataatttgttaattagcctttccaaggtggaggttaatgagctgaagagcgaaaagcaagagaatgtaatacatctatttcgcatcactcagagcctgatgaagatgaaggcccaggaagtggaactggctctggaagaagtggagaaggctggcgaggaacaagccaagtttgagaatcagctgaagaccaaggtgatgaaattagagaatgagctcgaaatggcccagcaatctgccggaggtcgtgacacccggtttttgcgcaatgagatttgccagctggaaaaacagctggaacaaaaggaccgcgagctggaagatatggagaaggaactcgagaaggagaaaaaagttaacgagcagttggcccttcgcaatgaagaggctgagaacgaaaactcaaaactacgccgggagaacaagcgtcttaagaaaaagaacgaacaactgtgccaggatataatcgattaccagaagcagatcgattcacagaaagaaaccctactctcccgcagaggcgaagactccgactaccgctctcagctgtcaaaaaaaaactacgaactcattcaatatcttgatgaaattcaaacactgacggaggcaaacgagaagatagaggtccaaaatcaagagatgagaaaaaatctggaagagtctgtgcaggaaatggaaaagatgacagatgagtacaatagaatgaaagccattgtgcaccagacagataacgtcatagaccagctgaagaaagagaacgaccattaccagctccaagtccaggaacttactgatcttctgaaatctaaaaacgaagaagatgaccctattatggtggccgttaacgccaaggtcgaagagtggaaactaatcttgagctccaaagacgatgagatcatagaataccagcagatgctccataacctccgagagaaactgaaaaacgctcagctcgatgccgacaagtctaacgttatggcattgcagcaaggcatccaagagcgcgacagccagattaagatgctgacggagcaggtggagcaatacaccaaggagatggaaaagaacacttgtataattgaagatctgaagaacgagctccaacgaaataagggggcttctacactaagccagcagacacatatgaagattcagtctacactggatatccttaaggagaaaaccaaggaggccgaacgaaccgcagagctggctgaggccgacgcacgcgaaaaagataaggaactagtggaagctttgaaaagattgaaggattatgagagtggggtgtacggactggaggacgccgtggtggagattaagaattgcaaaaaccagattaagatcagagaccgcgagatcgaaattcttaccaaggagatcaataagcttgagcttaagattagcgatttcctcgatgagaacgaggcactaagagaaagggtggggctcgaacctaaaaccatgatcgatctgaccgagttccgtaactcaaaacatttgaagcaacagcagtatcgggccgagaatcagatactactgaaggaggcctccatagaatccctggaggaggaacgattggacctcaagaaaaagattcggcagatggcacaggaacgcggcaagcgtagtgcaacgtcgggacttaccaccgaagatctcaacctaactgagaatataagtcagggggatcgaatcagcgagagaaagcttgatctgctgagtctcaagaacatgtcggaggctcagtcaaagaacgaattcttgagtagagagctcatcgagaaggagagggatcttgagcggagtaggactgtaattgctaaattccaaaacaagctgaaggagctagtcgaagaaaataagcaactcgaagagggaatgaaggagatcctgcaggctatcaaagaaatgcagaaggatccagatgtcaagggaggagaaacaagcttaatcatcccctccttggaacggctggttaacgcaatcgaaagtaaaaatgcagaaggaatttttgacgcatccctgcatctgaaagcgcaggttgaccagctgaccggacggaatgaggaacttagacaagaactgagggagtcaagaaaggaggccatcaactactctcaacagctggctaaggccaatctcaaaattgatcacctcgagaaggaaacctcactgttgagacagagtgagggaagtaatgtggtgtttaagggaatcgatctgcccgacggcattgcgccgagtagtgccagcataatcaattctcagaatgagtacctgatacacctgctccaagagctggagaacaaggagaagaagctgaaaaacctggaagactctctggaggactacaatcgcaaatttgcagttatcaggcaccagcagagtttactgtacaaggaatacctctcggagaaggagacgtggaagacagagtccaagactattaaggaagagaaaaggaagctggaggaccaggtccagcaggacgctattaaggtaaaagagtacaataacctcctcaatgccttacagatggatagcgatgaaatgaagaaaatattggcagaaaattcgagaaaaatcaccgttcttcaggtaaatgagaagtcgctgattcgccagtacaccaccctggtcgaactcgagcggcagctgagaaaagaaaacgagaagcaaaagaacgagctgctgtcaatggaagccgaggtgtgcgagaagatcggatgcctccagcgattcaaagagatggcgatatttaagatagctgcattgcaaaaggtggtcgataactctgtgtctttgagcgagctggagctcgccaacaagcagtacaatgagttaaccgctaagtacagagatatactgcagaaggataatatgcttgtgcagcgtacatccaatcttgaacacttggagtgtgagaacatttcgcttaaggagcaggtggaaagcatcaacaaggagctggagatcaccaaggaaaaactgcatacaattgagcaggcctgggagcaggaaacgaagctgggtaacgagtcttcaatggacaaagccaagaagagcattactaacagcgacatcgtgtcaatatcaaaaaaaatcactatgctcgaaatgaaagagctgaacgaacgtcagcgagccgagcattgtcagaaaatgtatgaacatctgcgaacatccctcaagcaaatggaagagcggaacttcgaactggaaacaaagttcgccgaactgaccaagatcaacttggatgcacagaaggtggaacagatgctgcgcgacgaacttgctgactccgtgtctaaagcagtgtcggacgctgaccggcagaggatcctcgagctggagaagaacgaaatggagctcaaagtcgaagtgtccaaactgagggagattagcgatatcgcacgacgacaggtggaaattctcaacgcacaacagcagagccgcgacaaggaagtggagtcactgaggatgcagctgctcgattaccaggcccagagtgacgaaaagtccctgatcgccaagctccaccagcataacgtgtccttacagctcagcgaggccaccgctctcggtaagctggaatctattacctccaagctgcagaaaatggaagcatataatctgagacttgagcagaagctggacgaaaaggagcaggccctgtactatgcaagattagagggtagaaaccgggccaaacacttaagacagacgatccagagcctcagaaggcaattttccggggccctgcccctggcacagcaggagaaattttcaaaaacaatgatccaactccagaatgataagcttaaaatcatgcaggagatgaagaacagccagcaggagcatcggaacatggagaataaaacactggagatggagctaaaattaaaaggactggaggagctcatcagtaccctgaaagatacaaaaggcgcacagaaagtcatcaattggcacatgaagatcgaagagttaaggctgcaggagctgaagctgaatcgggaactggtgaaagacaaagaggaaatcaaatatttaaacaacattataagcgagtacgaacggacgatcagttcgctcgaagaagagatcgtccagcagaataaatttcacgaagaaaggcaaatggcgtgggaccagcgtgaagtggatctcgagagacagctggacatattcgatagacagcaaaacgaaatcctcaacgcggcccagaaattcgaggaggctacaggctctatccccgacccatccctgccgctcccaaatcaactggagattgcactcagaaagattaaagagaacatcagaattatcctggagacacgtgccacatgtaaaagcctggaggaaaagcttaaggaaaaggaatccgccctgaggctggccgagcagaatatcctttctagggacaaggttatcaacgaattgagattacgcctacctgcgaccgcagaacgagagaagctgatcgcagagctggggaggaaagagatggagccgaaatcccatcacacattaaagatcgctcaccagacaatcgcaaatatgcaagccaggctgaaccaaaaagaggaggtcctgaagaaatatcagcgtcttctcgagaaggcaagagaggagcagagggaaatcgtaaagaaacacgaggaggacctgcatatcctccatcataggctcgagctgcaggcagattccagcttgaacaaattcaaacagacagcttgggatttgatgaaacagtcacccaccccggtcccaacaaataaacattttataaggctcgccgagatggagcagaccgtagcggagcaggatgattccctcagctccctgttggttaagctaaagaaagtgagccaggaccttgagaggcagcgcgagattacagaacttaaggtgaaggagtttgagaacataaaattgcaactgcaggagaaccatgaggatgaagtaaaaaaagtgaaggctgaagtcgaagatctgaagtacctgctcgaccagtcccagaaggagtcacagtgtctaaagagtgagcttcaggcccagaaagaagccaactcccgagctccgaccaccaccatgagaaatttggttgaacgcctgaagagccagttagccctaaaggagaaacaacagaaagctctgagtcgtgccctgctggaattgcgggccgagatgacagccgctgccgaagagcgcatcatcagtgcgacgtcacagaaggaagcccacctgaacgtgcagcaaatcgtggatcgccatacacgggagcttaagacacaggtcgaggacctgaatgagaacttgctgaagcttaaggaggccttgaagacctcgaaaaatcgagagaattctctaacagataatcttaacgatctgaataacgaactgcagaaaaaacagaaagcctataacaagatattgcgagagaaggaagaaatcgaccaggagaatgacgaactgaaaaggcaaattaaacgcttgacgtcgggccttcaggggaaacccctgaccgacaataagcagtcactcatcgaagaattgcagcgtaaggtgaagaagctcgagaaccagcttgaggggaaggtggaggaggtcgatcttaagccaatgaaggaaaagaatgccaaggaagaactgattcgctgggaagagggaaaaaaatggcaggcaaaaattgagggaattcggaataagctgaaagagaaggagggggaagtgtttacactcacgaagcagttgaataccctaaaagatttgttcgccaaggcagataaggagaagttgacactccagagaaagctgaagacaaccggaatgacagtggaccaggttctcggaattcgtgccttggaatctgagaaggagctcgaagaactcaagaagcgcaacctggacctagagaatgacatcttgtacatgcgcgcccatcaggccttgcctagagatagcgtagtggaagatctccacttacagaacagatatctgcaagagaaattgcacgccctcgaaaagcagttcagcaaggacacctacagcaaacctagcatctccgggatcgaaagcgacgaccattgccagcgagaacaggagctccagaaggaaaatctaaaactgtcctcggagaacattgagttgaagtttcaattagagcaggccaataaggacctgccacggctaaaaaaccaagtcagagacctgaaggaaatgtgcgaattccttaagaaggaaaaggctgaagttcagcgcaaattgggccacgtacggggttctggcagaagtggaaagacaatcccagaactggagaaaaccattggactgatgaagaaagtcgtggaaaaggtgcaacgtgagaatgagcagctaaagaaggcttccggaatcctgacatctgaaaagatggcgaatattgagcaggaaaacgagaagctaaaagccgaactggagaaactgaaggctcatctggggcaccagctaagcatgcattatgagagtaagactaaaggaactgaaaagatcatcgcagagaatgagcgccttagaaaagaacttaagaaggaaacagacgcggccgagaaattacgtatagccaaaaacaacctcgagattttgaacgagaaaatgaccgtacaactggaggaaacagggaaacgccttcagtttgccgagtccagaggccctcagctggagggagctgactctaaatcttggaagagtatcgtggtcacaagaatgtatgaaactaagctgaaggagttggaaactgacattgcgaagaagaaccagagcatcaccgacctaaaacagctggtgaaagaagctaccgagagggagcagaaggtaaataaatataacgaggaccttgagcaacagatcaaaattctgaagcacgtgcccgagggagcagagacggagcagggactcaaaagagagctgcaggtcctgagactagcaaatcaccagctggacaaggagaaggccgagttaatacaccaaatcgaagccaataaagaccaatccggagccgaatctactattcccgacgccgatcagttgaaggaaaagatcaaggacctggagacccagttaaaaatgtcagatctggagaagcagcatctgaaggaggagattaagaagttaaagaaggaacttgagaactttgacccttctttcttcgaggagattgaagatttgaagtataactataaagaagaggtgaaaaagaatattctgctggaggaaaaagtgaaaaagctctcagagcagctgggcgtggagctcacatccccagttgctgccagcgaggagtttgaagacgaagaagaatcccctgtaaattttcccatttattag

SEQ ID NO: 182475 - DNA, 4620 bp, synthetic construct
  misc_feature 1..4620: note = Description of Artificial Sequence: Synthetic coding sequence
  source 1..4620: mol_type = other DNA
atggccatcttcaagatcgccgccctgcagaaggtggtggacaactccgtgtccctctctgaactggagctggccaataagcagtacaatgagctcaccgcgaagtaccgcgacattctgcagaaagacaacatgctggtgcaaaggacaagcaacctcgaacatcttgagtgtgaaaacatttccttaaaagaacaggtagagagcatcaacaaggaactggagatcaccaaggagaagcttcatacaatcgagcaggcctgggagcaggagactaaactgggtaacgagagttcgatggataaagcaaagaagtcaattaccaattcagatattgtgagcataagcaaaaaaattacaatgcttgagatgaaagagctcaatgaaagacagagagcagagcactgccaaaaaatgtatgagcatctgcgcacctctctaaagcagatggaagagcgaaatttcgaactcgaaacaaaattcgcggagttgaccaagatcaacctggacgctcagaaagtggaacagatgttacgcgacgaactggcagactcggtcagcaaagccgtctcagatgctgaccgtcaacgcattctcgaactggaaaagaatgagatggaactgaaagtagaagtgtcgaagcttcgcgagataagcgatatagcccgcagacaagtagagatattgaatgcacagcagcagtcaagggataaggaggtggaaagcctgaggatgcaactgctagactaccaggcacagtcagacgaaaagtccctgatcgccaaactccaccagcacaacgtttctctccagctgtctgaggcgactgcccttggaaagctggaaagcataacaagtaagcttcaaaagatggaggcctacaacttgcgactcgagcaaaagttggacgaaaaagaacaggcactatattacgctagactcgagggccgaaacagagcaaagcatctgagacaaaccattcagtctctgcgtaggcaatttagtggggccctgccactggctcagcaagaaaagttttctaaaaccatgattcagctgcagaatgacaaactgaagataatgcaggagatgaaaaacagccagcaggagcacaggaatatggaaaataaaaccctggagatggaactgaaactaaagggattagaggaactgatctccacactgaaggacaccaagggcgcacagaaggtgattaattggcacatgaaaatcgaggagctccgccttcaggagctaaaactcaacagagagcttgtgaaggacaaggaagagatcaaatatctgaataacatcatttcagaatacgagcggaccatttcctcccttgaagaagaaatcgtgcagcagaacaaatttcatgaagagcggcagatggcttgggaccaaagggaggttgacttggagcgccagctcgatatctttgacagacaacagaatgagattctcaacgccgctcagaagttcgaggaggcgacggggagtatacccgacccttccctcccattacccaaccagctggagatcgcgttaagaaaaatcaaggagaatatcagaatcattctggagacaagagccacctgtaagagccttgaagaaaagctgaaggagaaggagagcgcgctgcgtctggcagagcagaacatcctgtcccgcgacaaggtcatcaacgagctgcgtctccgactcccagctactgccgagcgtgagaaactaatagctgagctgggacgcaaggaaatggaacccaagagtcatcataccctgaagatagctcatcaaacgatcgctaacatgcaggctcgtctcaatcagaaggaagaggtgctgaaaaagtatcaacgccttctggaaaaggcacgagaagagcaacgggagatagtgaaaaaacacgaagaagacttgcatattctgcatcacaggttggaactgcaagcagattcttctctgaataagtttaagcagactgcctgggacctgatgaagcagtcacccactcccgttcctaccaacaaacattttatcaggctggccgagatggagcagacagtggcggagcaggacgactctctctctagtttgctagtcaagctcaaaaaggtttcgcaggatcttgaacgccagcgggagattactgagttaaaagtgaaggagttcgagaatatcaagctgcagctgcaggagaaccacgaagacgaagttaaaaaagtgaaagcagaggttgaagacctcaaatatcttctcgaccagagccagaaagagagccagtgcctcaaaagcgagttgcaggcacagaaggaagccaactcgagagcgccaaccacgacaatgaggaaccttgtggagcggcttaagtcacaactggctttaaaagagaaacagcagaaagccctgtcaagagcactgctggaactgagagctgagatgacggccgctgctgaggaacggatcatctccgccacaagccagaaggaagctcatctgaacgtgcagcagatagtggatagacatacacgggaactgaaaacccaagtggaggacctcaacgagaacctcctgaaactcaaagaggcattgaaaacgtccaagaaccgggaaaacagcctgactgataacttaaacgacctaaacaatgagcttcagaaaaagcagaaagcctacaataaaatcctgcgcgaaaaggaagaaatcgaccaggaaaatgacgaactgaagagacagataaagcggctgacaagcggtctccagggaaagcctcttacagacaataaacaatcactgattgaggagctgcaacgcaaggtgaagaaattggaaaaccaactggaggggaaagttgaagaagtcgatcttaagcccatgaaggaaaagaacgcaaaagaggaacttatccgatgggaagaaggaaagaaatggcaggcgaaaatagagggaatccggaataagttaaaggagaaggaaggagaagtgtttacactgaccaagcagctcaataccttgaaggacctgtttgcaaaagcagacaaggaaaagctgacactccaaaggaagctcaagactacagggatgaccgtcgaccaggtcttgggaatacgggccctggaaagcgagaaagagctcgaggagctcaagaagcggaatctcgacctggaaaatgacatcctgtatatgagggcccatcaggcattgcctagagacagcgttgtcgaagatctccacctccagaatcgatatcttcaggagaagctgcacgctctggagaagcagttctcgaaggacacttattctaagcccagcatttccggcatagagagcgatgaccattgtcagcgtgagcaggaactgcagaaagaaaatctgaagttaagcagtgagaacatagagctcaagtttcagctggaacaggccaataaggacttgcctcggctaaaaaatcaggtaagagaccttaaagagatgtgtgagtttctcaagaaggaaaaggctgaggtgcaacggaagttagggcatgtgagagggtctggtaggagcggaaaaaccattcctgagttggagaaaaccatcggtctgatgaaaaaggtggtggagaaagttcagcgggagaacgaacaactgaaaaaggctagtggcatactgacatctgagaaaatggcaaatattgagcaggaaaacgagaaactgaaagcggaactcgagaaactcaaagctcacctagggcaccagctgtcgatgcactacgagagcaagaccaaagggaccgagaaaataatagccgagaatgagagactacgtaaagagctgaaaaaagaaaccgatgctgccgaaaaattgcgcattgcgaagaacaatcttgagattcttaacgaaaaaatgacagtccagctcgaagagaccggcaagcggttgcagtttgcagagagccgtggaccccagctcgagggcgcggactccaaatcatggaagagcattgtggtcactcgcatgtatgagactaaacttaaagagctggaaacagatattgcaaaaaagaaccagagtatcactgatctgaagcagctggtcaaagaggctacagaacgcgagcagaaagtgaacaagtacaacgaagacctggagcagcagatcaagatcctgaagcacgtacctgaaggcgctgagaccgaacaaggcttaaagcgcgaactgcaagtgctgagactcgctaatcatcagctggacaaagagaaggcagagctgatacatcagatcgaggcgaataaagaccagtccggcgccgagtcaaccatacctgatgctgaccagctaaaggagaaaatcaaagacctcgagacacaacttaagatgagtgacctggaaaagcaacacctcaaggaggagattaagaaactgaagaaggagctcgagaatttcgatccttccttcttcgaggagatcgaagatctgaaatacaactacaaagaggaagtgaaaaaaaatatcctgcttgaagagaaggtgaagaagctctccgaacagttaggggtagagctcacaagtccagtggccgcttctgaggagttcgaagacgaggaagaaagccctgtgaattttcccatatattag

SEQ ID NO: 182476 - DNA, 2415 bp, synthetic construct
  misc_feature 1..2415: note = Description of Artificial Sequence: Synthetic coding sequence
  source 1..2415: mol_type = other DNA
atgccccccaacatcaactggaaggagatcatgaaggtggaccccgacgacctcccgcgccaggaagagctggcagataatcttctcatctcgctttccaaagttgaggtgaacgagctcaaaagcgaaaagcaggaaaatgtgattcacctgtttcggataactcagagcctgatgaagatgaaagctcaggaggtggagctggccttggaggaagtggagaaagccggcgaggaacaggctaaatttgagaaccagttgaaaacgaaggtcatgaaactggagaatgaactagaaatggcccagcagagcgcgggtggtcgcgatacccgattcctccggaacgaaatttgtcaactggagaaacagcttgaacagaaagatcgggagctcgaggatatggaaaaagaactagagaaggaaaagaaagtgaatgaacaactggcacttcgcaatgaggaagctgagaatgagaactcaaaactgcgcagggaaaataaacgactgaaaaagaaaaacgagcagctctgtcaagacattattgactaccagaagcagatcgattctcagaaggagaccttgctgagccgccgaggagaggattctgactatcgtagtcagctgagcaagaaaaactacgaactgatccagtacctggacgaaattcagacactcacagaggccaacgaaaaaatcgaagttcagaaccaggagatgcggaagaacctggaagagtctgtgcaggagatggaaaaaatgaccgacgaatacaaccgcatgaaggctatagtgcatcagaccgacaacgtaatcgatcagctgaagaaggaaaatgaccattatcagctgcaggttcaggaactgacagacctactgaaatctaaaaacgaggaagatgatcctatcatggtggccgtgaatgctaaagtggaagaatggaaattgatactgtctagtaaagatgacgaaattattgaataccaacagatgctccataatctcagggagaagctcaaaaatgcacagctggacgcagataagagcaatgtgatggctttgcagcagggtatccaggaaagggactctcagatcaaaatgctgacggagcaagttgagcagtacaccaaggagatggagaagaatacatgcatcatagaagacctgaaaaacgagttgcagaggaacaaaggcgcctccacgctgtcccagcagactcatatgaaaatccagtccaccctagatatcctgaaggagaagacgaaagaggctgagcgcactgccgaactagctgaggctgatgcccgcgaaaaggacaaggaactggtggaagctctgaagaggctgaaggactacgagtccggagtgtacgggttagaagatgccgtcgtggagatcaagaactgtaagaaccagataaagattcgcgaccgagaaattgagatactgactaaggaaattaataagctggaactcaagatttcagactttctggacgagaatgaggccctgcgcgaaagagtaggccttgaaccaaagaccatgattgatctgaccgaatttcgcaatagtaagcaccttaaacagcagcaataccgggcggagaaccagatcctgttgaaagagattgaaagcctggaggaagaaaggctcgatctgaagaagaaaattcgacagatggcccaggagcgcggtaaaagatccgccacaagtgggttgaccacggaagatcttaacttgaccgagaacatcagccagggggaccgtatttcggagcggaaactggacctgctgtctctgaagaatatgagtgaagctcagtcaaagaacgagttcctttccagagagctcattgaaaaagaacgagacttggaaaggtccaggactgttattgcaaagtttcagaacaagctcaaggaattagtcgaggaaaataagcagctcgaagaggggatgaaagagattctgcaggccataaaagagatgcagaaggaccccgatgtcaagggtggcgagacttcgcttatcattccctccctcgaaagactggtgaacgccatcgaaagcaagaacgcagaggggatttttgatgcatccctgcacctgaaggctcaagtggaccagctcactggccgaaacgaggagttgcgtcaagaactaagggagagtcgcaaggaggccatcaattactcacagcagttagccaaggcaaacctcaaaatcgaccatctcgaaaaggagacttctttactcagacagagtgagggctccaatgtcgtattcaaagggatcgatttgcccgacggcatagctcccagctccgcgtctatcatcaatagccaaaatgagtacctgatccacctgctgcaggagctagaaaataaggaaaaagtgaaggagtttagaagatttagctag

SEQ ID NO: 182477 - DNA, 1650 bp, synthetic construct
  misc_feature 1..1650: note = Description of Artificial Sequence: Synthetic coding sequence
  source 1..1650: mol_type = other DNA
aagatggcccagcagagcgccggcggccgggacacccggttcctgagaaatgagatctgtcagcttgagaagcagctggagcagaaggacagagagctagaagatatggagaaagagttagagaaggagaagaaggtgaacgagcagcttgccctgcgcaatgaggaagcagaaaatgagaacagtaagttaagacgcgagaacaaacgcctgaagaagaagaacgaacaactgtgccaagacattattgattatcagaaacagattgactcacagaaagagactctgttgagccggcgcggggaggacagcgactatcgtagtcagctgagtaagaagaattacgaactgatccagtacctcgacgaaattcagactcttactgaggccaacgagaagattgaggtccagaatcaggagatgcggaaaaatttagaagaatcagtacaagagatggagaaaatgacagacgaatataatcgcatgaaggccatcgtacatcagacagataatgtgatcgaccagctgaaaaaggagaatgatcactatcaacttcaagtgcaggagcttacggatttactgaagagcaaaaatgaggaggacgaccccatcatggtggcggtgaatgccaaagtggaggaatggaagttaatactgtcttccaaggatgacgagataattgaatatcaacagatgctccacaatttgcgggagaaactaaaaaacgcccagttggacgctgacaaaagcaacgtgatggctttgcagcagggcatccaggaacgcgactctcagattaaaatgctcactgagcaggtcgaacagtacacaaaggagatggagaagaatacctgtattatagaggatctgaaaaacgaactgcagcgaaataagggtgcaagtacgctctcccagcagacacatatgaagatacaatccactcttgacatccttaaggagaagacaaaggaagcagaaaggacagccgagctagccgaagccgatgcgagggaaaaagacaaggagctagtggaagcattaaagagactgaaggactacgagtccggtgtttacggtctagaagacgctgttgtggagattaagaattgtaagaaccagatcaagattagagatcgcgaaatcgagatcctgactaaggagatcaacaaactcgagctcaaaataagcgacttcctcgacgaaaacgaggctctgagagagagggtcggcctggaacccaagaccatgatcgatctgaccgagttcaggaactcgaagcacttaaaacaacagcaatacagggccgagaatcagatactactaaaggagattgagtcccttgaagaggagagacttgatctgaaaaagaagatacgccagatggctcaggagagggggaagcggtctgcaaccagcggcctcaccacagaggatctgaatctgacagaaaatattagtcaaggagaccgtatcagcgaacggaagttggacctgctgtctcttaaaaatatgtcagaagctcaatctaagaacgaatttctatcgcgagaactgattgagaaagaacgagacctggaaaggtcccgtaccgtcattgccaagttccaaaataagtgttaccggattaaagaatgccgtcgcaacctgtag

SEQ ID NO: 182478 - DNA, 4620 bp, synthetic construct
  misc_feature 1..4620: note = Description of Artificial Sequence: Synthetic coding sequence
  source 1..4620: mol_type = other DNA
atggccatcttcaagatcgccgccctgcagaaggtggtggacaactcagtgagcctgagtgaactggagctggctaataagcagtacaacgagctgaccgccaagtatagggacatccttcaaaaggacaacatgctggtgcaaagaacaagcaatctcgaacacctggaatgtgagaacatttcgctgaaagaacaggttgaatcgattaataaagaattggagatcactaaggagaaactccacactatcgaacaggcctgggagcaggaaaccaagctgggcaatgagtcttctatggacaaggcaaaaaaatcaattactaatagtgacattgtttctatctccaagaaaatcaccatgctggagatgaaggagctgaatgagcggcagagggcagagcactgtcagaaaatgtacgagcacctgaggacctcactgaagcagatggaggaaaggaattttgaactcgagacgaagttcgccgagctgactaaaatcaatctagacgcgcagaaagttgagcaaatgctccgggacgagctggctgattcagtttcgaaagccgtgtctgacgccgatcgacagaggattcttgagttggaaaagaacgagatggaactcaaggtggaggtgtcgaaattgagagaaatttcggacattgcacggcgccaagttgaaatcctgaacgcgcaacagcagtctagggacaaagaagttgagagcctgcgcatgcaactactggattatcaggcccagtcagacgagaaatcccttattgctaagctccaccaacacaatgtgtctctgcagctcagcgaagccacagccttaggaaagctagagtctattacctcaaaactgcagaagatggaggcgtataatctgagactggaacaaaaacttgatgagaaagagcaggcgctttactacgcccgcctcgaaggcagaaatcgtgctaaacatttgagacaaacgatccagtccctcagacgccagttttcaggcgccttgccactggcacagcaagaaaagttcagcaaaactatgattcaactgcagaatgataaacttaagataatgcaagagatgaaaaattcacagcaggagcaccgaaacatggagaataagacactggagatggagctgaagcttaagggtctagaagaactcattagtacactgaaggacacaaaaggcgcccagaaagtgatcaactggcatatgaaaattgaggagctgagacttcaggagctaaagcttaacagagagctggtaaaagacaaagaggaaatcaaatatctgaataacatcatttccgaatacgagcgaacaatcagctctttggaggaagagatcgtgcaacaaaataagtttcacgaagagagacagatggcctgggaccagcgggaggtcgatctggagcggcaactggacatcttcgatcgacagcagaatgaaatcttgaatgccgcgcaaaagttcgaggaagcgactggcagcatcccggatccgagtctccctttaccaaatcagctggagatcgccctcagaaagatcaaagaaaacattagaattatactggaaacacgcgccacctgcaagagcttggaagaaaaactgaaggagaaagaatccgcactgcgactagctgaacagaatatcttgtctcgggacaaggtgattaacgagctccgattgagacttccagctacagccgaacgcgaaaagctgattgcggagctcggacgaaaggagatggagccaaaatcacaccataccttgaagattgcacaccaaacgatcgctaatatgcaggcgcgcttgaaccagaaggaagaggtccttaaaaagtaccagcggctgctggagaaggctagagaagaacaaagagagatcgtgaagaagcatgaggaggatctgcacatactgcaccaccggctggaactacaagccgactccagcctaaataaatttaagcagactgcatgggaccttatgaagcagagcccaacacctgtgccaactaacaagcatttcatccgactcgccgagatggagcagaccgtcgctgagcaagatgacagcctctcatcactgcttgtgaagctcaagaaggtttcacaggacctagagaggcagcgagagattacagagcttaaggtcaaggaattcgagaatataaaactgcaacttcaggagaatcatgaagatgaggtgaagaaagtcaaggccgaggtcgaagacctgaagtatcttcttgatcagagccagaaggagagtcagtgcctcaaatcagagctgcaagctcaaaaggaggcaaatagccgcgcacctacaacaacgatgcgtaacttagtcgagagacttaaaagtcagctggctctcaaggaaaagcagcaaaaggcattgagtagagcactgctcgagctgcgggctgagatgacggcagccgctgaagagaggatcatctccgccacctcccagaaggaggcacaccttaatgtccaacaaatagttgatcgtcacacccgcgaactcaagacacaagtggaagatctgaatgagaatttactgaagctgaaagaagcgctgaaaacaagtaaaaaccgggaaaattccctgacggacaacctgaatgatttgaacaatgagctgcagaaaaaacaaaaggcttacaacaagatccttcgagaaaaagaagaaatagatcaggagaatgacgagctgaaaaggcagatcaagcgcctcacctctggactgcaaggaaagcctctcactgataataaacagtcacttattgaagaactgcagaggaaggtgaaaaaactcgagaatcagcttgagggaaaagtggaggaggtcgacctaaagccaatgaaggaaaagaacgccaaagaagaacttattaggtgggaagagggcaagaagtggcaggcaaaaatagaaggcatcagaaacaaattaaaagaaaaggagggggaagtattcacactgacaaagcagctgaacaccctgaaggacctgttcgcgaaagctgataaggagaagcttacacttcagcggaagttaaagactaccggaatgacggttgatcaggtgctgggcatccgcgcactcgaatctgaaaaggaactagaagaacttaagaaacgaaacctcgatctggaaaacgacattctgtatatgcgagctcaccaggccttgccgcgcgactccgtcgtcgaggacctgcatctccaaaatcggtatctgcaggagaaattgcacgccctcgagaagcagttttccaaggacacttactctaagccttcgatctcaggcattgaatcagacgatcactgtcaaagagagcaagaactgcagaaggagaatcttaagctgtctagcgagaatattgagcttaaatttcagcttgaacaggcaaacaaagatctgccaaggttgaagaatcaggtgcgcgatttgaaagagatgtgtgagttccttaagaaggagaaagcggaggtgcagaggaagcttggacatgtcaggggaagtggtcgttcaggcaaaacaatccctgaactggagaagaccattggcctgatgaaaaaggtggtagagaaagtacaaagagagaatgaacagttgaagaaggcatccgggatcctcacatctgaaaaaatggccaatattgaacaggaaaatgagaagctcaaggcggaactcgaaaagctgaaggcgcaccttgggcatcagctctccatgcactacgagtcaaaaactaagggcacagaaaagattattgctgaaaacgagcgcctcagaaaagagctgaaaaaggagaccgatgctgccgaaaagttacgcatagcgaaaaacaacctggagatcttgaacgagaaaatgacggtgcaactagaggaaaccgggaagagactgcagttcgcagaatctaggggcccccagttagagggggctgacagcaagtcctggaaaagcattgtcgtcactagaatgtacgaaacaaagcttaaagaacttgaaaccgatatcgcaaaaaagaatcagtctattacagatttgaagcagctggtgaaggaggcgaccgaacgggagcagaaagtgaataagtacaacgaagacctcgagcagcagattaagattctcaagcacgtccccgagggcgcagaaacagagcagggcctgaagagagaactgcaggttctgaggttagccaaccaccagctcgacaaagagaaagctgagctgatccaccagattgaagcgaataaagatcagtccggcgcagaatctaccattccggacgctgaccagcttaaggaaaagatcaaggaccttgagacccaattgaagatgagcgacctggagaagcagcacctcaaagaggagataaagaagctcaaaaaagaactggaaaactttgaccctagtttttttgaagaaatcgaagacctcaagtacaactataaggaagaggttaaaaagaacatccttctggaggaaaaggtgaaaaagctgtcggaacagcttggtgtagaactgacatcacccgtggccgcttccgaggaattcgaggatgaggaagagagtccagtgaactttcctatatactag

SEQ ID NO: 182479 - DNA, 7440 bp, synthetic construct
  misc_feature 1..7440: note = Description of Artificial Sequence: Synthetic coding sequence
  source 1..7440: mol_type = other DNA
atgccccccaacatcaactggaaggagatcatgaaggtggaccccgacgacttgccacgtcaggaagagttggccgacaatctgctgatttctctgtccaaggtcgaggtgaatgagcttaagagcgagaagcaggaaaacgtgattcatttgttcagaatcacacaatctctgatgaagatgaaagctcaggaggtagagttggccctggaggaagtcgagaaggccggcgaggagcaagcaaagtttgaaaaccaactaaagaccaaagtgatgaaacttgagaacgagcttgagatggctcaacagtctgccgggggccgagacacccgcttccttaggaatgaaatctgtcagcttgagaaacagctcgagcagaaagatagggaattggaggacatggagaaagagctggagaaagagaaaaaggtgaacgaacaactggctttaagaaatgaagaggcagagaatgagaattctaagctccggagggaaaacaaaagactcaaaaaaaagaatgagcagctctgtcaagacattatagactatcaaaagcagatcgattcccagaaagaaactcttcttagcaggagaggcgaggatagcgactaccgcagccagctcagcaagaagaattatgagttaattcagtatctggatgagatccaaactctaactgaagctaatgagaagatagaggtgcaaaaccaagagatgagaaaaaacctggaggaaagcgtgcaggagatggagaagatgacagacgagtacaataggatgaaggcgatcgtccatcagaccgacaacgttatcgatcagctcaagaaagaaaacgaccactatcaactgcaggtgcaggaactaacggaccttttgaagagcaagaacgaggaggatgatcccatcatggtggcggtgaacgcgaaagtcgaggagtggaaactcattctgagctcgaaagatgacgagataatagaatatcagcagatgctccataatcttcgcgagaagctgaaaaacgcccagctagacgccgacaagagcaatgtgatggcccttcagcaaggtattcaggagcgagattcacagatcaagatgttaaccgaacaggtggaacagtacaccaaagagatggagaaaaacacttgcattattgaagacttgaagaacgaactgcagcgcaataaaggagctagtaccctctcacagcaaactcacatgaagatccagtctactttggatattctaaaagagaaaactaaagaggccgaacggacagcggagcttgcggaggccgatgcgcgggagaaagataaggaactggtggaagctctaaagaggttgaaggattatgagagcggcgtgtatggtctggaggacgccgtggtcgagattaagaactgtaagaaccagatcaagatccgggaccgggaaatcgagattctgacgaaggaaataaataagttagagcttaagattagcgactttctggacgaaaatgaagccctcagggaacgcgtgggtctcgaacctaagacaatgatcgacctgaccgaattcagaaactcaaaacacctgaagcagcagcaatatcgtgctgaaaaccagatactcttgaaggagatagagtcgctggaagaggagcggctggatctgaaaaagaaaattcggcaaatggcccaggaacgggggaaaaggagcgcaacaagcggccttactaccgaggatctcaacctcaccgaaaatatcagccagggagatcgcatctccgagcgtaaacttgacctcctgtcacttaagaacatgtctgaagcccagtctaagaatgaattcctgtctcgagaactgattgaaaaagaacgggacctggaacggtctaggacggtgattgccaaattccagaacaagcttaaagaattggtcgaggaaaataagcagctggaagaggggatgaaagagatactgcaggctatcaaggaaatgcaaaaagaccccgacgtgaagggaggggaaacaagcctcattatcccttcactggaaagactggttaatgctatcgagtctaaaaacgccgagggcatctttgatgctagcctgcatcttaaggcccaagttgaccaactcacaggccgcaatgaagagctccgccaagagctccgggaaagccggaaagaggctatcaattactcacagcagcttgcgaaggcaaacctgaaaattgatcacctagagaaggagaccagcctcttgcggcagtcagagggaagcaacgtggtcttcaagggtattgatctacccgacgggatcgcaccgtccagtgccagcattataaactctcagaacgaatatctgatccacctgctacaggagttggaaaataaagagaaaaagctcaaaaatctggaagactccctcgaagattacaacagaaagttcgcagtcattcggcatcagcaaagcttactgtacaaggagtacttgagtgagaaagagacgtggaaaacagaatcaaagaccataaaggaggaaaaaagaaagctcgaagatcaggtgcaacaagatgccattaaggtgaaagaatacaataacctgctcaacgccctgcagatggactccgatgaaatgaagaagattctggcggaaaactcccgaaagataaccgtgctgcaagtgaatgaaaaatcgctgatccgccagtacaccacactggtggagttggaacgccagctgcggaaggaaaacgaaaagcagaagaatgagctgttaagtatggaggcggaagtgtgtgaaaaaattgggtgcctccagagattcaaagagatggccatctttaagatcgcagctctccagaaggtcgtggacaacagcgtcagtctgagcgagcttgagctagccaacaagcaatataacgaattaacagcaaaatatcgcgacatactccagaaggataatatgctcgtgcaaaggacttccaacttggagcacctggaatgtgaaaatatcagtttgaaagagcaggtggaaagcattaataaagaactggagatcaccaaggagaaactgcacacaatcgagcaggcatgggagcaagagactaaactaggcaacgagtcttccatggacaaggccaaaaaatccatcaccaactcagacatcgtgagtatcagcaagaaaatcaccatgttggaaatgaaggagcttaatgagcgccaaagagctgaacactgccaaaagatgtacgaacacttacgcaccagtttgaaacagatggaagagagaaattttgagttagagacaaaatttgctgaactaactaaaataaacctggacgctcagaaggtggaacaaatgctccgcgacgagttggcggatagcgtgtccaaagcagtgtccgacgccgaccggcagagaatcttggaattggagaagaacgaaatggagctcaaggttgaggtcagcaaattaagagagataagcgatattgcccgtagacaggtagaaatactgaacgcccagcagcagtctcgggacaaggaggtggagtccctgcggatgcagttgctggactaccaggcacagtccgatgaaaaatccctgatcgcgaagctccaccagcacaatgtctctctgcagttgagcgaggcgactgcccttggtaagctcgagagcatcaccagtaagctgcagaagatggaagcctataacctgcgactcgagcagaagctcgacgaaaaggagcaggccttatactacgcccgcttggaggggagaaaccgcgcaaaacacttaaggcagacaatccagtccctgcgtcgtcagtttagtggtgctctgcctctcgcccagcaggaaaagtttagcaaaaccatgatccaactacagaacgataagcttaagattatgcaggagatgaaaaattcacaacaggaacatagaaatatggagaataagactttagagatggagctaaagctgaagggcctagaagaactaattagcactctaaaagatactaaaggggctcagaaagtcatcaactggcacatgaaaatagaagagttacgtttgcaggaattgaaattgaaccgcgagctggtgaaagacaaggaggagatcaaatacttgaataacatcattagcgaatatgaacgcacaatcagcagcctggaggaagaaatagtgcagcagaataaatttcatgaggagaggcagatggcctgggaccagcgcgaagtggacttggagcgtcagttggacatttttgatcggcagcaaaacgagatactcaacgccgcacaaaagttcgaggaagcaaccgggagcatcccagacccaagcctcccgcttccaaaccaactggagattgctctccgcaagatcaaagagaatattagaattattcttgagacccgggccacatgtaagtctctggaggagaagttaaaggaaaaagagtcagcgttacgtcttgccgagcagaatattctatcgagagacaaggttataaacgaactgaggctccggctgcctgcgaccgctgaacgggagaagctgattgccgagttaggtaggaaggaaatggagccgaaaagccatcatacactgaagattgcccaccagaccatcgccaacatgcaggctcgactgaaccagaaagaagaggtgctaaagaagtatcaaaggctgctcgagaaggccagagaggagcagagggagatcgtgaagaaacacgaggaggacctacacattctgcaccacaggctggagttacaggcagattcctcactgaataaatttaagcagacagcctgggatctgatgaaacagagtcctacccctgtccccactaacaaacattttataaggctcgccgagatggagcagacagtcgccgaacaggatgattcattaagttctctgctcgtgaaattaaagaaggtctcccaggatctagaaagacagcgagagatcacagaactcaaggtgaaagagttcgagaacattaaactccagctgcaggaaaatcacgaggatgaagtgaagaaagttaaggccgaagttgaggatttgaagtatctgctggaccaatcacagaaggagtcccagtgtttgaaatctgagttgcaggcccagaaggaagcaaacagcagagctccaaccaccacaatgaggaatttggttgaaaggcttaaatcccagctggccttgaaagaaaaacaacaaaaggccctcagcagggccctgctggagctgagggcagagatgactgctgccgcagaggaacgcatcatatccgccaccagccagaaggaggctcacctcaatgtgcagcagattgttgataggcatacacgggaacttaagacacaggttgaggacttaaatgagaacctgctgaagcttaaagaagccctgaagacctccaaaaatagggaaaacagcctgactgataacctaaatgaccttaacaacgaactccaaaagaagcagaaagcatacaataagatccttagagagaaagaagagatcgatcaggagaatgacgagcttaaaaggcagatcaagcgtttgacttcaggactccagggaaagccactgaccgataataagcagagcctgatcgaagaattgcagagaaaagtgaaaaagttagagaatcagctggaaggtaaggtggaagaggtggatctgaaaccaatgaaagaaaagaatgccaaggaagaattgatcagatgggaagaggggaagaaatggcaggctaaaattgaggggattcgcaataagctcaaggaaaaggagggggaagtcttcacgttgaccaagcagctgaacacccttaaagatctatttgctaaagcagacaaggagaagttgactctccagcgcaaactcaagactactggcatgactgtggaccaggtcttggggattagagccctggagagcgaaaaagaattagaagaactgaaaaagcgcaatcttgatctggagaatgacatcctgtacatgagagctcaccaagcgctgccacgtgattctgtcgtggaagacctccatctccagaatcgttatctccaggaaaaattgcacgctcttgagaaacagttctccaaggacacatattctaaaccttctatatctgggatcgagtctgatgatcactgtcagagggagcaggaattacagaaggaaaatctgaaattatcttcagaaaatatcgagctgaagtttcagcttgagcaggcaaataaggatctcccccggctcaagaatcaggtgcgcgacctcaaagagatgtgcgaatttttgaaaaaggagaaagctgaagtgcagaggaaactgggccacgtgagagggtctggcaggagcggcaagaccattccagaattagagaaaactattgggttgatgaagaaagttgtcgaaaaagtacaacgagagaatgaacagcttaagaaagctagtgggatcctaacatccgagaagatggccaacattgagcaggaaaacgagaagttaaaggctgaactagagaagctaaaagcccatctaggacaccagctctccatgcactacgagtctaagaccaaaggaacggaaaagattatcgcagagaatgagaggctaaggaaggaactaaagaaagagactgatgcagcagagaaactgcgaatcgctaaaaacaatcttgaaatattgaacgagaagatgacagtgcagctggaggaaacaggtaaacgcttgcagttcgccgagtctcggggccctcagttagagggagccgactctaagtcatggaaaagtatcgtagtcacacgaatgtacgagaccaagctcaaggagttggagacagatatcgccaagaagaatcagagcataactgatctcaagcaactggtgaaggaagcaaccgaaagagagcaaaaagtgaataagtataacgaggatctggagcagcaaataaagatattaaaacatgtgccggaaggggcagagacagagcaggggttgaaacgggagttgcaagtgctcagactcgctaaccatcagttagacaaggagaaagccgaactcattcatcagattgaggccaataaggatcagtctggagctgagtctaccatcccagatgctgatcagctcaaagaaaagatcaaagatttggagacacagctaaaaatgtccgacctggaaaagcagcacttaaaagaggagatcaagaagctaaagaaggagctggagaatttcgacccttcatttttcgaagagatcgaggatctcaaatacaattacaaggaggaagtgaagaagaacatccttctggaagagaaggtgaaaaaactctctgagcaactgggcgtggagctgacgtcacccgtggccgcctccgaggaattcgaggacgaagaagagtctccagtcaacttccccatctattag

SEQ ID NO: 182480 - DNA, 1512 bp, synthetic construct
  misc_feature 1..1512: note = Description of Artificial Sequence: Synthetic coding sequence
  source 1..1512: mol_type = other DNA
atggaggagcacggcgtgacccagaccgagcacatggccaccatcgaagcccacgcggttgcccagcaggtacaacaggtgcacgtggctacttacactgaacacagtatgcttagcgccgacgaggactcgccaagcagccctgaggacacgtcatatgacgacagcgatatcctaaattctacagccgccgacgaagtgacagcacatctggccgccgccggccccgttggcatggcagcggctgccgctgttgcaacaggcaagaagcgcaagcggccgcacgtgttcgagtctaatccatctatccggaagagacagcaaactagactgctgcgcaaacttagggctacgctcgacgagtacactacacgagtagggcagcaggcaatagtgctatgcatttcgccttctaagccaaaccctgtgtttaaggtcttcggggcagcccccttggagaacgttgttagaaaatataagagtatgatactcgaagacctagaaagcgccctggccgagcatgccccagcaccacaggaagtgaacagcgagctccccccacttaccatcgatggtatacccgtgtcagtggacaagatgactcaggcgcagctgagagcctttattccagagatgctcaagtactctacaggtaggggcaagcccggatggggtaaagagtcctgcaaacccatatggtggccggaggatattccatgggcaaatgtacgctctgacgttagaaccgaggagcagaaacagagggtgtcatggacccaggcgctgcgcaccatagtgaagaactgctacaaacagcatgggagagaggaccttttatatgcatttgaagaccagcagacgcaaactcaggccactgcaacacacagcattgctcacctcgtaccttctcaaactgtcgtgcagaccttttcgaaccctgacggtacagtatccttgatacaagtcgggaccggggccactgtggcaactctcgcagatgcttcagaattgcccaccacagtaaccgtggctcaggtgaattactccgccgtcgccgacggggaggtagagcagaactgggcgacactgcaggggggcgagatgacaattcagaccactcaggccagtgaagccacgcaggccgtggcctcgttggccgaggcagcggtggccgcatcccaggagatgcaacagggtgctactgtgacaatggccctgaactccgaggccgctgcgcatgccgtggcaacactcgcggaggccacactgcaaggaggcggtcaaatcgtgttgtctggggagaccgctgcagctgttggcgctcttacaggggtgcaggacgccaatgggctggtgcagattcctgtgtcaatgtaccagactgtagtaacatcacttgcccaggggaacgggcccgtgcaggtggctatggcaccagtaaccacaagaataagcgactcagctgtgacgatggatggacaagcagtcgaggtggtcacgctagagcagtag

SEQ ID NO: 182481 - DNA, 906 bp, synthetic construct
  misc_feature 1..906: note = Description of Artificial Sequence: Synthetic coding sequence
  source 1..906: mol_type = other DNA
atgagcctgcggcggcacatcggcaaccccgagtacctgatgaagcgcatcccccagaaccctagataccagcacatcaaatccaggctggatacaggaaacagcatgacaaaatataccgaaaagctggaggaaataaaaaagaactataggtataaaaaagacgaactttttaaacgattgaaggtgaccacttttgcgcaattaataatccaggttgcatccctgtccgaccagacgcttgaagtgactgctgaagaaatccagcggttagaagacaacgactccgccgcgagtgatccggacgcagagaccaccgctcggacgaacggaaagggcaatcctggagagcagtccccctcgcctgagcagtttattaataatgcaggggccggtgatagctctcgctctacattacaaagcgttatctcaggtgtgggagaactagatctggacaaaggacctgtcaaaaaagcagaaccccacaccaaagataaaccttaccccgattgtccatttctgttgctggacgtgcgtgatcgagattcataccaacagtgtcatattgttggggcctactcgtatcctatagctaccctatccaggactatgaacccttatagcaacgacatcctggaatacaaaaacgctcatggcaagatcatcatcctgtacgacgacgatgagagactcgcctcacaggccgcaacaacgatgtgcgagaggggtttcgaaaatctcttcatgctcagcgggggaagacttaatcaagccaacagttctggacgtgagtcaaaggtgcccggcgctcgaagcgctcagaacctcccaggcggggggcccgcgagccatagcaacccaagatctctcagtagtggccatctccaaggcaagccctggaagtag

SEQ ID NO: 182482 - DNA, 165 bp, synthetic construct
  misc_feature 1..165: note = Description of Artificial Sequence: Synthetic coding sequence
  source 1..165: mol_type = other DNA
atgagcctgcggcggcacatcggcaaccccgagtacctgatgaagagaataccgcaaaatccgcgataccaacacattaagtcccgcctggacacaggggcctgtgtgtatctgactagctcacccgccctgcccgactgcgcgatgaatggactgtgcttttag

SEQ ID NO: 182483 - DNA, 858 bp, synthetic construct
  misc_feature 1..858: note = Description of Artificial Sequence: Synthetic coding sequence
  source 1..858: mol_type = other DNA
atgagcctgcggcggcacatcggcaaccccgagtacctgatgaagagaatccctcagaaccctaggtaccagcatattaagagcagactggacactgattaccgctacaagaaagatgaactgttcaagaggctcaaggtgacaacatttgcccagctaattatccaggtggcgagtctgtcagatcagaccctagaggtcaccgctgaagagatccagcgattagaagataacgattctgccgcatccgatccagacgccgagacaaccgctcgcacaaatggcaagggtaatcctggcgaacagtctccctcacctgagcagtttattaacaatgcaggagctggagattcctcacgttcgacattacagtctgtgatcagcggcgtgggagaactggatctcgacaaaggacctgtaaagaaagcagagccacatactaaggacaagccataccctgactgcccattcctcctcctggacgtcagagatagagacagctaccaacagtgtcacattgttggggcatattcctatcctatcgctaccctgtcgcgtaccatgaacccctattccaacgacatcttagaatacaaaaatgcccatggaaaaattatcatcctgtatgatgatgatgaacgcctggcgtcacaggccgctacaacaatgtgtgagcgcggattcgaaaaccttttcatgctaagtggcggtaggctgaaccaggcaaacagttccgggagggaaagcaaggtgcccggggcccgatctgcccagaacctgcctggcggcgggcccgcatcacattctaacccccgtagtctgagctcaggccacttgcagggaaagccctggaaatag

SEQ ID NO: 182484 - DNA, 1200 bp, synthetic construct
  misc_feature 1..1200: note = Description of Artificial Sequence: Synthetic coding sequence
  source 1..1200: mol_type = other DNA
atgagcagccggagcaccaaggacctgatcaagagcaagtggggctcaaaaccctcaaactccaagagtgagacaaccctggaaaaattaaaaggtgaaattgctcaccttaaaactagtgtggacgagatcacctctggcaaaggcaaattaaccgataaggaaagacataggctgctagagaaaatccgggtgttggaagcagagaaggaaaagaatgcctatcagctgacagaaaaggataaagagatccagaggctgcgcgatcagttgaaggctcgctattcaactacgacgcttttggaacagctggaggaaacaactagagagggtgagcgacgcgaacaagttctgaaagccctgtctgaggagaaagacgtgctgaagcagcaactgagcgccgctacaagtcggatagctgagctggaaagcaaaactaatacattgagactttcccagacagtggccccaaactgcttcaactcttcaattaataatatacatgagatggaaatccagctcaaagatgcacttgagaaaaaccagcaatggctggtttatgatcagcagcgtgaggtttacgtcaagggactactggccaaaattttcgaattggagaaaaagactgaaactgctgcccattctctaccccagcagactaagaagcccgaaagcgagggctacctgcaggaggaaaagcagaagtgctataacgatctgttggcttccgcaaaaaaggatttagaagtcgagaggcagaccattacccagctgagcttcgaacttagcgagttcagacggaagtatgaagagacccagaaagaagtgcacaaccttaaccagctgctatattcccagagacgggcggatgtccaacacctcgaggatgacaggcacaagaccgagaagattcaaaaattaagggaggagaacgacatcgcccgcggtaagctcgaggaagaaaaaaagcgttccgaggagctgttgagtcaggtacagtttctctatacctcccttttgaagcagcaggaggagcaaacacgtgtggcgctccttgaacagcagatgcaagcttgcactttagattttgagaatgagaaactggacagacagcacgtgcagcaccagctccatgtcattttaaaggagctgcgcaaggcccggaacaatacagtaggcattttggacaccaaatcttag

SEQ ID NO: 182485 - DNA, 1395 bp, synthetic construct
  misc_feature 1..1395: note = Description of Artificial Sequence: Synthetic coding sequence
  source 1..1395: mol_type = other DNA
atgagcagccggagcaccaaggacctgatcaagagcaagtggggctctaagcccagcaactccaaatccgaaaccactctggagaagctaaagggagagatagcacatttgaaaactagtgtggacgaaatcacgagtggaaaggggaagttaaccgataaggagcgccacagattgctggagaagatcagggtccttgaggctgagaaagagaaaaacgcctatcagctgacagaaaaggacaaggagattcagcggctgagagaccagctgaaagccagatattcaacgactacactgctggagcagttggaggaaaccaccagagagggcgaaaggagagaacaggtcctcaaagccctgtctgaggagaaggatgtactcaagcagcagctcagcgcggccacctcacgaatcgccgagcttgagagcaagacaaatacactgcgcctgagtcaaacagtggcacctaattgcttcaattcatccataaacaatatacatgagatggagattcagttaaaggacgcactggagaagaaccagcaatggcttgtgtatgatcaacagcgcgaagtctacgttaagggactgctcgccaagatattcgagctagaaaaaaaaaccgagaccgctgcccattccctccctcaacagactaagaagccggagagtgagggctacctgcaggaagagaagcagaaatgttataatgatctccttgcgtctgccaaaaaggatcttgaagtggaaaggcagaccataacccagctctctttcgaattgtctgaatttcgaagaaaatacgaggagacccagaaagaagtccacaacctgaaccagctcttatattcccaaaggagagcagatgtgcagcatctcgaggatgatcggcataagacagaaaagattcagaagctgcgcgaggagaacgacatagcgagaggcaaactggaggaagagaagaagcggagcgaggagctgcttagccaggtgcagtttctgtacacatcactcctaaagcaacaagaggaacagacaagggtcgcgctcctagagcagcagatgcaagcatgcacactggacttcgagaacgaaaaacttgatcgccaacatgttcagcatcagctgcacgtcattctgaaagagttgcgaaaagcccggaaccagatcacacagctcgagagtctgaaacaattacacgagttcgctattactgaaccgttggtgacctttcagggagagacagagaacagggagaaagtcgctgcctcccctaagtcccccaccgccgcactgaacgaatcactggtggagtgccccaagtgcaacattcagtatcccgcaacagaacatagagatctactggtccacgtcgaatattgcagtaagtag

SEQ ID NO: 182486 - DNA, 627 bp, synthetic construct
  misc_feature 1..627: note = Description of Artificial Sequence: Synthetic coding sequence
  source 1..627: mol_type = other DNA
tgaagcagcatcaacaacatccacgagatggagatccagctgaaggacgcccttgaaaagaatcagcagtggctggtgtatgatcagcagcgggaggtctatgtgaaggggctcttagccaaaatatttgaattggaaaagaaaactgaaacagccgcccattcactaccacaacagactaagaaacccgaaagcgaaggttatttgcaggaggagaagcagaagtgctataatgacctcctggcctctgccaagaaagatttggaggtggagcgccagactatcacgcagctgtcatttgaactgtctgaatttaggagaaaatacgaggagacacaaaaggaagttcacaatctgaaccagttattgtactcacagcgtagggctgacgtacagcacctcgaggatgatcgtcacaaaacagagaagattcaaaaattgagagaggagaatgatatcgctcgcggaaaactggaggaagaaaagaagaggagtgaggagttactgtcccaggtccagttcctctacacaagtctcctgaaacagcaggaagagcagacacgtgtagccctgctggagcagcaggtattaatccgagtagcctctaagttcaatagcgcctgttag

SEQ ID NO: 182487 - DNA, 1425 bp, synthetic construct
  misc_feature 1..1425: note = Description of Artificial Sequence: Synthetic coding sequence
  source 1..1425: mol_type = other DNA
atggccgccgccagcgtgagcgccgccagcggcagccacctgagcaactcatttgccgaaccatccagaagcaatggctccatggtgaggcattcttcctcaccttacgtggtgtacccatctgataaaccttttctaaacagcgacttgcgccggagtccgtccaagcccaccctggcttaccctgagagcaatagcagggccatattttcggccctgaagaaccttcaagataaaataagaagactggaactggaaagaatccaagctgaggaatctgtgaaaactctgagcagagagacaatagaatacaagaaagtgcttgacgagcagatccaggagagagagaactcaaagaatgaagagagcaagcataaccaggaacttacatcccagctactggccgcagaaaacaaatgcaaccttctagagaaacaactggagtacatgagaaacatgatcaagcacgccgagatggagcgcacctcagtccttgagaaacaggtgagcctggagagagaacgacagcacgaccagacgcatgtacagtcacagcttgagaaactggaccttttagagcaggagtataataaactcaccactatgcaggcccttgccgaaaaaaagatgcaggaactggaggccaagctccacgaagaggaacaagagaggaagagaatgcaggcgaaggccgccgaactgcaaaccggcctcgaaaccaacaggctcatttttgaggataaagcgacaccttgtgtgcctaatgcccgacgcatcaaaaaaaagaagtcaaagcctccagaaaagtccacatcaccgtctcatgctgtggtggcgaacgtgcaacttgtcttacacctgatgaaacagcattctaaggccttatgcaatgatcgcgtgattaactcaatccccttagcaaagcaggtcagctctaggggtgggaagtcaaaaaagctgagtgtgactcccccttcttccaatggaattaacgaggagcttagtgaggtcttacagacgcttcaggacgagttcgggcaaatgtcatttgatcaccagcagctggccaagctgattcaagagagtcctaccgtcgagctcaaagacaagctggagtgcgagttggaagcccttgtaggacggatggaagccaaagccaaccagatcactaaagtcagaaaatatcaggcccagttagaaaagcagaagttagagaagcagaaaaaagagctgaaggccactaagaagacattggacgaggagaggaactcgtcctctcggagcggaatcacgggcaccactaataagaaggattttatgaaactacgtccaggggaaaaacgccgcaagaacctgcagctcctgaaggatatgcagtctatccagaattccctccaatcttcaagtctctgctgggactattag

SEQ ID NO: 182488 - DNA, 1503 bp, synthetic construct
  misc_feature 1..1503: note = Description of Artificial Sequence: Synthetic coding sequence
  source 1..1503: mol_type = other DNA
atggccgccgccagcgtgagcgccgccagcggcagccacctgagcaacagcttcgctgagccatcaagatctaatggatccatggtcaggcacagtagttccccgtacgtagtgtacccttcagacaagccgttcctgaattcagacctaaggcgttctccctctaagcccactctggcttaccccgagtctaattccagagccattttcagcgccctaaagaacttacaggacaaaatacggcggctggagctagagaggatccaagcagaggagtcagtgaaaactcttagtagagaaaccatagaatataagaaagtgctagacgagcagatccaggaacgggagaattcaaagaatgaggaaagtaagcacaaccaggaactgacgtcgcagctgttggccgccgaaaacaagtgcaatctgctggaaaaacagctcgagtatatgcgaaacatgataaagcatgcagagatggaacgcacctccgtccttgagaagcaggtgagcctggaacgagaacggcaacacgaccaaacacacgtgcagtcccagcttgaaaagttggatctcctggaacaggagtacaacaaactcacaaccatgcaggccttagccgaaaagaagatgcaggagttggaggcaaaactgcatgaggaagaacaggagcggaagcgaatgcaggcaaaagctgccgagttgcagactggtctggagactaacagactgatcttcgaggacaaagccactccttgcgttcccaatgcccggaggatcaaaaagaaaaaaagcaaaccacccgagaagaagtcttctcgtaactatttcggagcccagccacattaccgactatgcctaggagacatgccctttgttgctggaaaatctacaagcccgagccatgccgtggtcgcaaacgtccagcttgttctccatctgatgaaacagcactctaaggcgctgtgcaacgacagggttatcaactctataccactagcaaagcaagtgtcatccaggggcggtaaatctaaaaagctatccgtgactccccctagctctaacgggattaacgaagaactaagcgaggttttacagacactgcaggacgagttcggccaaatgagcttcgaccaccagcaactggcgaagctcatacaggagagtcctacagtggaactcaaggacaagctcgagtgtgaactagaagccctggttgggcggatggaggccaaggccaatcaaattacgaaagtcagaaaatatcaagcccagttggaaaagcagaagctggaaaaacaaaaaaaagaacttaaggccactaagaagaccttagatgaggagcgcaatagcagctcaagatcaggaatcacagggactacaaacaagaaggactttatgaagctgcgtccaggggaaaaacgcaggaagaatttacagcttctgaaagacatgcagtccatccaaaacagtctccaaagttcctcactgtgttgggactattag

SEQ ID NO: 182489 - DNA, 813 bp, synthetic construct
  misc_feature 1..813: note = Description of Artificial Sequence: Synthetic coding sequence
  source 1..813: mol_type = other DNA
atggccgccgccagcgtgagcgccgccagcggcagccacctgagcaattcgttcgctgagccaagtcggtctaacggctcgatggtcaggcacagctccagcccttacgtggtctatccaagcgacaaaccctttcttaatagcgatctgcggcggtccccaagcaaaccaacactggcataccccgagtcaaactctcgggcaatatttagcgctcttaaaaatctccaggataaaattagacggctcgagcttgaaaggattcaggctgaggaaagtgtcaaaactctttccagagaaaccatcgaatacaagaaggtcttggatgagcaaattcaggaacgtgagaattccaaaaatgaagagagcaagcacaatcaggaactcacatcccagctgctggccgctgaaaataagtgcaatctgctggagaagcaactggaatacatgcgcaacatgattaagcacgcggagatggagaggacgagcgttttagagaagcaggtctctttggaaagggaacgccagcacgatcaaacccacgtgcaatcgcagctcgaaaagctagacctacttgagcaggagtacaataagctgacaactatgcaggcgctcgctgaaaaaaagatgcaggaactcgaggctaagcttcatgaagaggaacaggagaggaaaagaatgcaggccaaggcagcagaattacagaccgggcttgagaccaatagactgattttcgaagacaaagcaactccttgcgtacctaatgcacgcagaatcaaaaagaaaaagtccaaaccccctgaaaaagtatag

SEQ ID NO: 182490 - DNA, 1476 bp, synthetic construct
  misc_feature 1..1476: note = Description of Artificial Sequence: Synthetic coding sequence
  source 1..1476: mol_type = other DNA
atgctgacccggatcgacaacagcttcgccgagcccagccggagcaacggatctatggtgaggcactccagctccccgtacgtcgtatacccatccgataaaccatttttgaacagcgacctcaggaggagtccatctaaaccaactctggcatatccggaaagtaattcccgtgccatcttctcagcactgaaaaacctgcaggacaagatcaggagactggagctcgaaaggatccaggctgaagagagcgtgaagacactgtctagagagactatcgaatataagaaggtgctggatgagcagatccaggagcgggaaaacagcaaaaatgaggaatcaaaacataatcaggagctgacgagtcagctgctcgcggcagagaacaagtgtaatttactggaaaagcaactggaatacatgcggaacatgatcaagcacgctgaaatggagaggaccagcgttctggagaagcaagtttccctcgagcgcgagcgccagcatgaccagacacatgttcaatctcagctcgagaagcttgacttgcttgagcaggaatataataaactgactactatgcaggcacttgctgagaaaaagatgcaggaactggaggcaaagttgcacgaggaggaacaggaacgcaaacgaatgcaggccaaagcagccgagctccaaaccggactggaaactaacagactcatctttgaggacaaagccacaccgtgtgttcccaatgcccgtagaatcaagaaaaaaaaatcaaagcccccagagaaaaaaagctcccgcaactacttcggggcccagccacattatcggctttgcctcggcgacatgcccttcgtggctggaaagtccacttctccatctcacgccgtcgtagccaatgtgcagttggtgctgcacctgatgaagcaacattctaaggccctctgtaacgatcgggtaataaactctatccccttagctaaacaggtgtccagcaggggtggcaaatctaagaaactgagcgttacgcccccatcatccaacggaatcaatgaggagctttcagaagtcctccagacattgcaggacgagtttgggcaaatgtcgttcgatcaccagcagctcgctaagctcattcaggagtctccaacagtggagctgaaggataaactggagtgcgagctggaggcccttgtgggaaggatggaggccaaagcaaaccagatcactaaagtcagaaagtaccaggcgcagttggagaagcagaaactggagaaacaaaagaaagagctgaaggccaccaaaaagaccttggacgaggaacgaaattcaagctcacgcagtgggattaccggaacgacgaacaagaaagactttatgaaacttaggcctggcgaaaaacgtcggaaaaacctacaactattaaaagatatgcaaagtatccaaaactccttgcagtccagctctctgtgctgggattactag

SEQ ID NO: 182491 - DNA, 1794 bp, synthetic construct
  misc_feature 1..1794: note = Description of Artificial Sequence: Synthetic coding sequence
  source 1..1794: mol_type = other DNA
atgttccccgtggcccccaagccccaggacagcagccagcccagcgatcggcttatgacggaaaagcagcaagaggaagcggaatgggagtccatcaatgtgctgctgatgatgcacggactaaaaccactgtctctggttaaaaggacagatcttaaggaccttattatctttgataagcagtcttcacagcggatgagacagaatctgaaactgctagttgaagagacctcgtgccaacagaatatgattcaggaactgattgaaactaaccagcagctgcggaacgaactgcaactcgagcagagtcgtgccgccaaccaggaacagagggctaacgatctcgaacagatcatggaaagcgtgaaatcaaagattggggagctggaggacgaaagcttgagtcgggcctgccatcagcaaaataagattaaagacctacaaaaggagcagaaaaccctacaggttaagtgccagcactacaaaaagaagcgaaccgaacaggaagagacaatcgcatctttacagatggaggtgtgcaggctcaaaaaggaagaggaggatcggattgtgactcagaatagagtgttcgcatatctgtgtaagcgggtgccccacaccgttctcgaccggcagctgttatgccttatcgattactacgaatcaaagatacgtaagatacacacccaaaggcaatataaggaggatgaatcccagagcgaggaggagaatgattacagaaatctggatgcaagccccacatacaaaggtctgctgatgtctttgcaaaatcagctgaaagagtccaaatccaagatcgacgccctgagcagtgaaaagttgaacctccaaaaagatctggaaacaagacctacccagcacgaactccgactgtataagcagcaggttaaaaagctggaaaaagctctcaagaagaacgtgaaactccaagaactgattaatcacaaaaaagctgaggacaccgaaaaaaaagacgaaccatcaaagtacaatcagcagcaagcattaatcgatcagcgctactttcaggtgctgtgttctattaactctataatccataatccgagggcgcctgtgattatatacaaacagacaaaaggcggggtgcagaatttcaataaagacttagttcaggactgcggcttcgaacatttggtacctgtgatcgagatgtgggcagaccaactcacaagtctcaaagacttgtacaagtctctgaagacacttagcgcggagctggtaccctggctgaacctgaaaaagcaagatgagaacgaagggataaaggtggaagacctactgttcatcgtcgacaccatgctggaggaagtcgaaaacaaggagaaggattctaacatgccccactttcagactctgcaggcaatagtttctcacttccagaagctgttcgacgtgccctcccttaacggggtatatcctaggatgaacgaggtgtacactcggttaggtgagatgaataatgccgtgagaaatctgcaggaactgctggaactagacagctcttctagcttatgcgtacttgtttcaacagtgggcaagctgtgccgactcatcaacgaggacgttaatgagcaggtgatgcaggtactgggtcctgaggacctacagagcatcatctacaagctggaagaacacgaggagtttttccccgctttccaggctttcactaacgacctgctggagatcctggaaattgatgatctcgacgcgatcgtgccagcagtcaagaaactaaaagtactgtcttactag

SEQ ID NO: 182492 - DNA, 639 bp, synthetic construct
  misc_feature 1..639: note = Description of Artificial Sequence: Synthetic coding sequence
  source 1..639: mol_type = other DNA
atgttccccgtggcccccaagccccaggacagcagccagcccagcgatcgactgatgaccgagaagcaacaggaagaggccgagtgggagtctataaacgtactcctgatgatgcacggacttaaacccctatctctcgttaaaaggaccgacttaaaggatctgatcatttttgacaagcagagtagtcaaaggatgaggcagaatttgaaactgttagtggaggagacatcatgccagcagaacatgattcaggaacttatcgaaactaatcaacagttgaggaacgagttgcagctggagcagtcacgcgccgctaaccaggagcagcgggctaatgacctggaacagatcatggagtcagtcaagtccaaaatcggcgaactggaggatgagtctctttcacgggcctgccaccagcagaacaagattaaggacctgcagaaggagcagaagactctgcaggtcaagtgtcagcattacaagaaaaagaggaccgagcaggaagagacaatcgcttctctgcagatggaggtctgcagactaaagaaggaggaagaggatagaatcgtgacccagaaccgagtattcgcatatttgtgtaagcgtgtgccccacaccgtgcttgaccgccagtag

SEQ ID NO: 182493 - DNA, 351 bp, synthetic construct
  misc_feature 1..351: note = Description of Artificial Sequence: Synthetic coding sequence
  source 1..351: mol_type = other DNA
atgttccccgtggcccccaagccccaggacagcagccagcccagcgaccgactgatgaccgaaaagcaacaggaggaggctgaatgggaatcaatcaacgtgttgctcatgatgcacggcttgaagcctttgagtctggtaaagcgcaccgaccttaaggatctgattatatttgacaaacagtcttcccagaggatgagacaaaacctgaaactgctggtcgaggaaacttcttgtcagcagaacatgatccaggaactcatcgagactaatcagcaattgcgaaacgagcttcagctggaacagagccgcgcggcgaatcaagagcaaagagcaaacgatctcgaatag

SEQ ID NO: 182494 - DNA, 1665 bp, synthetic construct
  misc_feature 1..1665: note = Description of Artificial Sequence: Synthetic coding sequence
  source 1..1665: mol_type = other DNA
atgttccccgtggcccccaagccccaggacagcagccagcccagcgacagactaatgacagaaaaacagcaggaggaggcggaatgggagtctattaatgttttgctgatgatgcacggacttaaacccctttcattggtcaaacgaacggacttaaaggatcttatcatcttcgataagcagtccagtcaacgcatgcggcaaaatctaaagttactggtcgaggaaacatcatgccagcagaatatgatccaggaattaatagagacaaaccaacaattgcggaacgagctgcagctggaacagtcccgggctgccaaccaggaacagcgcgccaatgatctggagcagatcatggagtccgtaaagagtaagattggtgaactcgaggacgagagtttaagccgggcctgtcatcagcagaacaagattaaagacttacagaaggagcaaaagacactgcaggtcaaatgccagcactacaagaaaaaaaggacagagcaggaggagacaatagcctcactacagatggaggtttgccgactgaaaaaagaggaagaagatagaatcgtaacccagaatagagtgttcgcctacctgtgcaaaagggtgcctcacacagtgctggacaggcagcttctttgtctgattgattactatgagtcaaagatccgcaagattcacacccagcgtcagtacaaggaagacgagtctcagtctgaggaggaaaatgactaccggaacctggacgccagccccacctacaaaggccttctgatgagcctccagaatcaattgaaagagagtaagtctaagatcgatgcactgtctagcgagaaacttaatctccagaaagatctggaaacgcgcccaacgcagcacgagttgagactgtacaaacagcaggtgaaaaaactggaaaaagctctcaagaaaaacgtgaagctgcaagagcttatcaaccacaaaaaggccgaggacaccgaaaagaaggatgaaccaagtaaatataatcagcagcaggctctcatcgatcaaaggtatttccaggtcttgtgtagcatcaacagcatcatacataacccgcgcgcccctgtgataatatacaaacagacaaagggaggggtgcaaaacttcaataaggacctcgtccaggattgcgggtttgaacacttggttccagtcattgagatgtgggctgaccagttgacttcactcaaggacctgtacaagtctctgaaaactctgtcagccgagctcgttccctggctcaatctgaagaaacaggacgagaatgagggcatcaaggtcgaggatctgctgtttattgttgatacaatgctggaggaagttgagaacaaggagaaggactccaatatgcctcactttcaaacgctgcaggcgattgtatcccactttcaaaagctctttgacgtaccaagtctgaatggagtctacccccgaatgaatgaggtgtacactagactaggagagatgaacaacgcagtcagaaacctgcaggaactgttagagctggactcaagttcaagcctctgtgtacttgtgagcaccgtcggcaagttgtgtagactgattaacgaggatgtgaacgaacaagtcatgcaagtcttaggaccagaggacctccagcgttatctgttctag

SEQ ID NO: 182495 - DNA, 1794 bp, synthetic construct
  misc_feature 1..1794: note = Description of Artificial Sequence: Synthetic coding sequence
  source 1..1794: mol_type = other DNA
atgttccccgtggcccccaagccccaggacagcagccagcccagcgataggttgatgaccgagaagcaacaagaagaagctgaatgggaaagtatcaatgtgctcctcatgatgcatggtttgaagcctctttcccttgtcaagcgaaccgatttaaaagacctcatcatcttcgacaagcagtcatcccagagaatgcgccagaatcttaaactcctggtggaagaaactagctgccagcaaaatatgatccaggaactgatagaaactaaccagcaactgcgcaatgaacttcagttagaacagtccagagccgcaaaccaggagcagcgcgcaaacgacctggaacagatcatggagtccgtcaagtctaagatcggcgaactagaggacgagtccctgagccgcgcctgtcaccagcagaacaagatcaaagacctacagaaggagcagaaaactctccaggtgaaatgccagcactacaagaagaagcgcacggagcaggaggaaacaatcgccagcttgcagatggaagtatgccggctaaagaaagaggaggaagacagaattgtgacccagaacagagtgttcgcttatctgtgtaaaagggtgccccacacggtactagacaggcaactcttatgtcttattgactattatgaaagtaagatccgcaaaatacatactcaacggcaatataaggaagacgagagccagtctgaggaggagaatgattatcgcaatctggacgcctctcccacctacaagggacttctgatgtctctgcagaatcagcttaaggagtctaagagtaagatcgatgccctttcgagtgagaagttgaacctgcagaaagacttggagactagacctacccagcacgagcttaggctatacaaacagcaggtgaagaagttagaaaaagccctgaaaaagaacgtcaagctccaggagctaataaatcacaagaaagcagaagatacggaaaagaaggatgagcctagtaagtataaccagcagcaggcactcattgatcaaaggtattttcaggttctgtgttcaattaatagcatcatccataatcctcgcgctcctgtcattatttacaagcagaccaaagggggagtgcagaattttaacaaagatctggttcaagactgcgggtttgagcatctcgtgcccgtgatcgaaatgtgggcggatcagcttaccagcctgaaggatctctacaaaagtttgaaaacactctcagccgagctggttccatggctgaatctaaagaaacaggacgagaatgaggggattaaggtcgaagatctactgtttattgtcgatactatgttggaggaagtggagaacaaggagaaagattccaatatgccccatttccagaccctgcaagctattgtgagccattttcagaagctttttgatgtaccatcattaaatggagtatatcctcggatgaatgaggtgtacacaagactcggtgaaatgaataacgcagtccgcaatttgcaggagcttctggagctggattccagctcctccctctgtgttttagtttctaccgtgggtaagctgtgcagactcattaacgaggacgtaaatgagcaagtgatgcaggtcctcggccccgaagacctccaaagcattatctataaactcgaagaacatgaagaatttttcccggcctttcaggctttcaccaatgatttgttggaaatcttagagatcgacgacctggacgctattgtgcctgccgtaaagaaactaaaggttctaagctactag

SEQ ID NO: 182496 - DNA, 72 bp, synthetic construct
  misc_feature 1..72: note = Description of Artificial Sequence: Synthetic coding sequence
  source 1..72: mol_type = other DNA
atgttccccgtggcccccaagccccaggacagcagccagcccagcgaccgtctgatgacagaaaagcaatag

SEQ ID NO: 182497 - DNA, 1734 bp, synthetic construct
  misc_feature 1..1734: note = Description of Artificial Sequence: Synthetic coding sequence
  source 1..1734: mol_type = other DNA
atgaccgagcaggaggaggccgagtgggagagcatcaacgtgctgctgatgatgcatggcttaaagcccctgagcttagttaagcggaccgacctaaaagacctcataattttcgataaacagagcagtcagagaatgcgacagaatctaaagctgttggttgaggaaacttcatgtcagcaaaacatgatccaagaactcatcgagacaaaccagcagcttcgaaacgaactgcagctggagcagtccagggcagctaaccaggaacagcgcgccaatgatttagagcagattatggagagcgttaagtccaaaatcggggagctcgaagatgagagcttgtcgcgggcttgccatcagcagaataagatcaaagacctgcagaaggaacagaagaccttacaggtgaaatgccaacattacaagaagaaacgtactgagcaggaggagacgatcgcctccttacagatggaggtgtgcagactgaaaaaggaggaagaagaccggatagtgacacagaaccgcgtgttcgcatacctgtgtaagcgcgtgcctcacacagtgctggaccgacagctcttatgtctgattgattactatgaatctaaaatcaggaaaattcatactcaacgccagtataaagaagatgagagccaatcggaggaggaaaatgactaccgcaatcttgatgcttcgccgacctacaaaggccttttgatgtcgctacagaatcagctgaaggaatcaaaaagtaagatagacgctctgtcttcagaaaagctgaacctccagaaagacctcgaaactaggccaactcaacacgagttgaggctgtacaagcaacaggtaaagaaactggaaaaggctctgaagaaaaacgtcaaattgcaggaactgatcaaccacaaaaaagcagaagataccgaaaaaaaggacgagccatccaagtataaccaacagcaggcactgatcgaccaacgatacttccaggtgctctgtagcattaacagcattatccataatcctagggcccctgttataatatataagcagacgaaaggcggtgttcaaaacttcaacaaggacctggtacaggactgcggtttcgagcatctggtgcccgttattgagatgtgggccgatcagcttacctctttgaaagatctctacaaaagcctcaaaacactgtcagccgagctggtgccctggcttaatctcaagaagcaggacgagaacgaaggaatcaaagtcgaggatctgctctttattgtcgatacgatgcttgaggaagtggagaataaagaaaaggactcaaatatgcctcattttcagaccctgcaggcaatcgtttctcactttcagaaactgtttgacgtcccctcacttaacggggtctaccccagaatgaacgaagtgtacacccggttgggggagatgaataatgcagtgcgtaatctgcaggaactgcttgaactggactcttccagcagtctgtgtgtcttggtcagtacggtcggaaaactttgcagactcatcaacgaggacgtgaacgaacaagtgatgcaggtgctgggcccagaagatttacaatccattatatataaattggaagagcacgaagagtttttcccagcttttcaggcgtttactaatgatctgctggaaatcttagagattgatgatctggatgctattgtcccggccgtcaaaaaacttaaggtcctgagctactag

SEQ ID NO: 182498 - DNA, 3666 bp, synthetic construct
  misc_feature 1..3666: note = Description of Artificial Sequence: Synthetic coding sequence
  source 1..3666: mol_type = other DNA
atgctgttccccctgcaggtggccgccgtgaccagcagcgtgcgggatgatccccttgaacattgcgtgagtccaaggacacgggcccgctctccagagatatgtaagatggctgacaacctcgatgagtttattgaggagcagaaagcccgcctggctgaggataaagctgaactcgaaagcgacccaccgtacatggagatgaagggcaaactctctgcaaagctgagtgaaaactctaagattcttattagtatggctaaggagaatatcccaccgaatagtcagcagacgcgagggtctcttggcattgactacggactatccctacccctcggagaagattatgaacgaaagaagcacaagctcaaggaagaactaaggcaggattatcgacgctatttgacacaggaaagactcaagttagagagaaataaagagtacaatcaattcttgcgggggaaggaggagagcagtgagaagttccggcaagtagaaaagtccacagagccaaaatcccagagaaataagaagccaatcggtcaagttaagcctgatctcacctcgcagattcagacctcctgtgagaactctgagggaccgcgcaaggatgtgttgaccccgtctgaggcctatgaagagcttctcaatcagagacgccttgaggaagatcggtatcggcagctagacgatgaaatagagctgcgtaaccgcagaattatcaaaaaagctaatgaggaggtcgggatatcaaaccttaagcaccagaggttcgcatctaaagctggcatcccagaccgaaggttccataggttcaatgaggacagggttttcgacagacgttatcaccgccctgaccaggatcccgaggtctcagaggagatggacgagcgtttcagatatgagagtgatttcgacagaaggctttcccgggtatacacgaatgaccggatgcaccgcaataagcgaggtaatatgcctccgatggagcacgacggagacgtaatagagcagtctaatattaggatcagttctgccgaaaacaaaagtgcccccgacaacgagactagcaaatcagccaatcaggacacatgttcacccttcgcggggatgctcttcggaggcgaagatcgggaactgattcagagacgcaaggaaaagtatcggctcgagctgctcgaacagatggctgagcagcagcgcaataaacgtagggaaaaagatctggagctgagggtggccgcatctggtgcgcaggaccccgaaaagagtcccgataggctaaagcaattctctgtcgctccccggcattttgaagagatgattccaccagaacgacccagaatagccttccagacaccgcttccccccctgtctgctccaagcgttccccccatcccgtctgtccacccggtgccctcccagaacgaagatctgcgctcgggcctatcttctgctcttggagaaatggtaagccctaggatcgcccctctccccccaccccctttactgcctccccttgcgaccaattacagaaccccgtacgacgacgcgtactacttttacggctcccgcaataccttcgatccgagcctagcttactatggctcaggcatgatgggtgtccaaccagccgcatacgtgtctgctcccgtcacacaccagctggctcagcctgtagtgaacaccgtagggcagaacgagctgaaaatcacaagtgaccaggtgattaacagcggcctgatcttcgaggataagccgaagcccagtaagcaatctctccagagctatcaggaggccctgcaacaacagatacgggagcgagaggagaggaggaagaaggagagagaagagaaagaggagtatgaggccaagttggaggctgagatgcggacctataacccgtggggcaaagggggaggtggcgcgcctcttagagacgcgaaaggaaaccttataacagatctgaatcgaatgcacaggcagaacatcgacgcctatcacaacccagacgccaggacatacgaagacaagcgggcagtcgttagtctggaccctaacctcgcaaccagcaatgctgagaacctcgaagacgctgctaataaatcatctgggcatatgcaaacacaaagtagcccattcgcacgcgggaatgtgttcggggaaccgccaactgaactccagatcaaacagcaagagctgtataaaaattttctgcgttttcagattgaagagaaaaaacaacgtgaggaggcggagagggagagactacgaatcgcagaagagaaggaggaacggcggctggcagagcagagggctagaatccagcaggagtacgaggaagaacaggaaaaaaagcgtgagaaggaagaagaacagcgcctgaagaatgaggagcacataaggttggctgaagaacgtcagaaggaggccgagaggaaaaagaaggaagaggaggagaagtacaacctccaactgcaacactactgtgaaagggataatttgatcggggaggagacaaagcacatgcggcagccaagccctattgtccccgcactgcagaataagatcgctagcaagttgcagcgtcctccgtccgtggatagcatcattaggagcttcatccatgaatcttccatgagccgggcacagagtccccctgtgcccgctcgtaaaaaccaactgcgggccgaagaggaaaaaaagaacgtaatcatggaattgtccgagatgcgcaagcagctgagatctgaagaaaggaggctccaagagaggctgctgcacatggattcggacgatgagatccctattcgcaagaaagaacgcaacccaatggacattttcgacatggcaaggcacaggcttcaggcgccagtcagacgacaatccccaaaggggctggacgctgcaacctttcaaaacgtccacgatttcaatgagctcaaagacagagacagcgaaacacgggtggatctgaaatttatgtatctggacccacctagggatcatcacacgttggagatacagcagcaagccctgcttcgcgaacagcaaaagaggctgaaccgtatcaaaatgcaggaaggggccaaggtggacctcgacgccatcccatccgctaaagtgcgcgagcagcgcatgccccgcgacgacacgagcgattttcttaagaacagcctgctggagagcgatagcgcctttatcggtgcctatggagaaacttaccccgccatcgaagatgacgtgctgcccccccctagtcaacttccctccgccagagaacgccgacgtaacaaatggaagggcttggacattgatagctctcgtccgaatgtggcgccagacgggctgtccctgaagtctatatccagcgttaacgtagatgagctgcgcgtgcggaacgaagaaagaatgcggcggttaaatgagtttcacaacaaacccataaacactgatgacgaaagttccctcgtcgatcctgacgatatcatgaaacacatcggcgatgacggaagcaactctgttgccaccgaaccctggttgaggcccggaacgtcagagacactcaaaagatttatggccgagcagctgaatcaggagcagcaacaaattcctggcaagcctgggacatttacatggcagggcctctcgaccgcgcacggttag

SEQ ID NO: 182499 - DNA, 3771 bp, synthetic construct
  misc_feature 1..3771: note = Description of Artificial Sequence: Synthetic coding sequence
  source 1..3771: mol_type = other DNA
atgctgttccccctgcaggtggccgccgtgaccagcagcgtgcgggatgaccctctcgagcattgcgtgagtcccaggacaagggcccgtagtcctgaaatttgcaagatggcagacaatcttgatgagttcattgaggagcagaaggctcgactggccgaggacaaagcagagctcgagtcagaccccccttacatggagatgaaggggaagttatccgctaagctcagcgagaattcaaaaatcttaatttcaatggcaaaagagaatatcccacccaatagtcagcagacgcgcggatctcttgggatcgattatggcctatctttgccactgggcgaagattatgagagaaagaaacacaagctgaaagaagagctgaggcaggactatcggcggtacctaactcagaaagttttctccggtacatccaagaagaactttcttagcacatcagaaacggaccctagcaccttgggtgtcagtttaccaattggcgagcggctgtccgcaaaggagcgccttaagcttgagcgcaacaaggaatataatcaatttctccgaggtaaggaagaaagcagcgagaagttccgccaggtggagaagagcactgaacctaaatcacaacggaacaagaagccaatcggccaggtcaagccagacctgacctctcaaattcagacatcctgtgagaatagcgaaggccccaggaaggatgtactgaccccaagtgaggcatacgaagaacttctaaaccagaggagattggaggaagaccggtatcgccagctagatgacgagatcgaactacgcaatagacgcataatcaagaaggccaacgaggaggtcgggatttccaacctgaaacaccaacgatttgcatcgaaagctggcatacctgataggcgattccaccggttcaatgaagatagagtctttgatcgaaggtaccatcggccggatcaggacccagaggtgtccgaagagatggatgagcgcttccggtatgagtcggactttgaccggcggctgagccgagtgtacacaaacgatcgcatgcatcggaacaaacgaggaaatatgccaccaatggaacacgatggtgacgtgatagaacagagtaacattcggatctctagtgctgaaaacaagtctgcgccggacaatgagacctctaagtccgccaaccaggatacatgctctccatttgcaggcatgcttttcggaggcgaggatcgcgagctaattcagcgccgcaaggagaagtacaggttggagctgctcgagcagatggccgagcagcagagaaacaaaaggcgcgagaaagacctggagctgagggtggccgccagtggagcccaggacccagaaaaaagtcccgaccgtctgaaacagttcagcgttgctccacggcatttcgaagaaatgattccaccggagaggccgcggatcgctttccagaccccgctgccccctctctcagcgccatccgtgccaccaataccttctgtgcatcccgtgcctagtcagaacgaggacctccggtccggtctgtctagtgctctgggggagatggtctctccacggatcgcacccttacccccccccccacttctacccccactcgcaactaattacagaacaccttacgatgacgcttattatttctatggtagccgcaacacattcgatccctccctggcttactacggaagcggaatgatgggagtccaaccggcagcttacgtatcagctcctgtgacacatcagcttgcccagcctgtggtcaacaccgtcggccagaatgagttaaagataacatccgaccaggtgatcaattctggcctgatattcgaagataagccaaagccgtctaagcaaagcctgcagtcctatcaagaggcactccaacagcaaattagagaacgcgaggaacggcggaaaaaagaaagggaggaaaaagaggagtacgaggccaagctcgaggcagagatgaggacatacaacccttggggcaaagggggggggggtgccccgctgcgtgacgcaaaggggaatttgattaccgacctgaaccgcatgcaccggcagaacatagacgcatatcataacccggatgcacggacgtatgaggacaagcgtgcagtggtcagcctcgatcccaaccttgccacctctaatgcggaaaaccttgaggacgccgctaacaagtcatcgggtcacatgcagacacagtctagcccttttgcacgaggcaatgttttcggcgagccgcctacagagctacaaatcaaacagcaggaactgtacaagaacttcttgcggttccagatagaggaaaagaagcagcgcgaggaggcagagagggagagattgcggattgcggaggagaaggaggaacggcgcttggcagaacagagggcccgtatccagcaggagtacgaagaggaacaagaaaaaaaacgcgagaaagaagaggaacagcggctcaaaaacgaagagcacatcagactggctgaggagaggcaaaaagaagctgagcgtaagaagaaagaagaagaggagaagtacaatcttcaactgcaacactattgtgaaagagacaatctcattggcgaagagacaaaacacatgaggcaacccagcccaatcgtgcccgccctgcagaacaagattgctagtaaactacagaggccaccatctgttgattctataatcaggtcctttatccacgagagcagcatgtcacgagcccagagcccccctgtccctgcgagaaagaatcagctcagagctgaggaggagaagaagaacgttattatggaattaagcgaaatgcgaaaacagctgaggtcggaggagagaaggttgcaagaacggctgctccatatggactcagatgatgagatcccaatacggaaaaaggagcggaatcctatggacatctttgacatggcccggcaccgattgcaggcccccgtgagaagacaaagtcctaaaggtcttgatgccgcaaccttccagaacgtccatgatttcaatgaactgaaagaccgggactctgaaactcgcgtcgatcttaagtttatgtacctcgacccccccagagatcaccacaccctggagatacaacagcaggccctcctgcgcgagcaacagaaaaggctgaacagaatcaaaatgcaggagggcgctaaggtagacctcgatgctattccatccgccaaagtgagagaacaacgcatgcctcgtgatgacacctccgactttcttaagaacagcctccttgagtctgattccgcattcataggcgcttatggagaaacgtaccctgcaatagaggatgacgtgctcccacctccgagccagcttccaagcgccagagaaaggcgccgtaacaaatggaaaggcctggatattgattcttcacgcccgaatgtggcccccgatggactctccttgaaaagcatctcgtccgtcaacgtggatgaactaagagtgagaaacgaagaaaggatgcgtaggctgaacgaattccataataagcccattaataccgacgatgagtcttcactagtcgatcctgacgacatcatgaaacacatcggggacgacggttccaattctgtcgccaccgagccgtggctgcgtcccgggacgagcgagacacttaaacgatttatggcagaacagttgaaccaagagcagcaacagatccccgggaagcctgggacttttacctggcagggactctcaaccgctcacggctag

SEQ ID NO: 182500 - DNA, 2631 bp, synthetic construct
  misc_feature 1..2631: note = Description of Artificial Sequence: Synthetic coding sequence
  source 1..2631: mol_type = other DNA
atggacgagcggttccggtacgagagcgacttcgaccggcggctgtccagggtctacaccaacgatagaatgcataggaataaaaggggtaatatgccgcccatggagcatgatggtgatgtgattgaacaatcaaatatacgaatttccagcgcagaaaataaatcggcccccgataacgagacaagcaagtccgctaatcaggatacctgtagccccttcgctgggatgctctttggtggcgaggatagggagttgatccagcgcaggaaggagaaatatagattagaactgctcgaacagatggctgagcagcagagaaataaacggagagaaaaagatctggagttacgcgtcgcggcaagtggcgcccaggacccagagaagtcaccggatagactcaaacagttttccgtcgccccacggcatttcgaggagatgataccccccgaacgaccccggatcgcttttcaaacacccctgcccccactcagtgcacctagcgtcccacccattccctccgtccaccccgttccttcccagaacgaggacttaaggagcggtctgtcgagcgcgctgggggaaatggtgtccccccgtattgcccccctccctcctcctccactgttgcctcccctggccaccaattacaggaccccctacgacgacgcttactacttttacgggtccagaaacacattcgacccgagcctggcgtattacgggtccggaatgatgggcgtgcaacctgctgcatacgtgtcagctccagttacccatcagctggcacaacctgtggtcaacactgtaggacagaacgagcttaagattacctctgatcaggttataaactcggggttaatcttcgaggacaaacccaagccaagcaaacagagtctccagtcttatcaagaagccctgcagcagcaaattcgggagcgcgaagaacggagaaagaaagaacgggaggagaaggaagaatacgaagcgaagttagaggcagagatgaggacttacaatccctggggcaagggcggaggcggggccccgctccgggatgccaaagggaatctcatttctcatatgcagacccagagcagcccattcgcccgtgggaatgttttcggcgagcctccaacggaacttcaaatcaagcagcaggaactgtataagaactttctgcgcttccagatcgaagaaaagaagcagcgcgaggaagcagagcgcgagcgcctaagaatcgctgaggaaaaagaggagaggcgcctcgccgaacagcgggcccggattcaacaagagtatgaggaggagcaggaaaagaagagagagaaagaagaggagcagaggctcaaaaacgaggagcacatccgtctcgcagaggagagacagaaggaagctgaacggaagaagaaggaggaggaagagaaatacaacttacagctccagcactactgcgaaagagataatcttattggcgaggaaaccaagcacatgagacagccaagccctatcgttccagctctccagaacaaaatagcttccaaattacaacgcccaccctccgtggacagcattattcgttcctttatccacgaatcctctatgtcgcgcgcccaatcccctcctgtgcctgctcgcaaaaatcagctcagagccgaagaagaaaagaagaacgtgatcatggagctctctgaaatgcggaaacagctacgctccgaggagaggcgactgcaggagaggctgctgcatatggatagcgacgatgagattcccatacgaaaaaaggagcgcaacccaatggacatctttgatatggcgcgccataggctccaggcccctgtgaggcgccagagccctaaaggtcttgacgcggccacatttcagaacgtgcacgatttcaacgaactgaaagaccgtgacagcgagacacgggtagacttgaagttcatgtacctcgatcctccaagggatcatcatacccttgagattcagcagcaagccctcctccgcgagcagcagaagcgactcaacaggatcaagatgcaagagggcgcgaaagttgacctggacgccattccctcagcaaaggtcagagaacagagaatgccgcgggacgatactagcgacttcctgaagaatagcctgctcgagtccgacagtgctttcattggagcctatggagagacctaccctgccatagaggacgacgttttgccaccaccctcacagctcccatcggctagagaaaggcgtcgaaacaagtggaaggggctcgatattgatagcagtaggccaaacgtggccccggatggactctctcttaagtccattagctcggtaaacgtggatgagctgcgcgtgagaaatgaggagagaatgcggcgcctgaacgaattccacaacaaacccatcaacaccgacgacgagagctccctggtggatcccgatgatatcatgaagcatatcggagatgatgggtcaaatagtgtggctacagagccatggttacgtcccggcacctccgagaccctgaagcgctttatggccgaacaactcaaccaggaacagcagcaaatccccggcaaacccggaacatttacttggcaaggcctcagcacagcacacggatag

SEQ ID NO: 182501 - DNA, 2631 bp, synthetic construct
  misc_feature 1..2631: note = Description of Artificial Sequence: Synthetic coding sequence
  source 1..2631: mol_type = other DNA
atggacgagcggttccggtacgagagcgacttcgaccggcggctgtctagagtgtataccaacgaccgcatgcataggaacaagaggggcaatatgcctccgatggagcacgatggggacgtgatcgagcagagcaacataaggatctcctctgctgagaacaaatccgcccctgacaacgagacaagtaaaagcgccaaccaggacacctgttcccccttcgctggtatgctctttggaggcgaggatcgtgagcttattcagcgccgaaaggagaagtataggctcgagctgttagagcagatggccgaacagcagagaaataagcggcgggagaaagacctcgagctgcgagtggcggccagcggtgctcaagaccccgagaagagtcccgataggcttaaacagttctcagtggccccacggcacttcgaagagatgatcccccctgaaagacctcggatagcctttcagacacccttacctcccctgtccgcaccctccgtgccacctattccctccgtgcatcctgtgccatcccagaatgaggatctgcggtcgggtttgagtagtgcgcttggcgaaatggtgagcccccgaatcgccccactgccgccaccaccattactgccccccctggccactaactatcgaactccctacgatgatgcctactacttttatggatcacgaaacacgttcgatcctagtcttgcctactacggctccggaatgatgggagtgcagcccgccgcctacgtatcagccccggtgacccaccaacttgcacaacctgttgtgaacacggtgggtcaaaacgagcttaagatcactagcgatcaagttataaattcgggcttaatctttgaagataagccgaaaccctccaaacagtccctccaatcttatcaagaagctctccagcaacagatccgggagcgggaggagaggcggaaaaaggagagagaggagaaggaagaatacgaggccaaactggaggccgaaatgcggacctacaatccttggggaaagggcggtggcggcgcacctttgcgcgacgcaaaaggaaacctaatttcccacatgcagacccagtcatctcccttcgcacggggaaatgtgttcggtgagccaccaaccgaactgcagattaagcagcaggaactgtataagaacttcttaagattccagatcgaggaaaaaaaacaacgggaggaggccgaaagagagcggttgcggatcgccgaggagaaagaagagagaaggttagctgagcagcgggcccggatccaacaagagtatgaggaggaacaggaaaaaaagcgggagaaggaagaagaacagaggctgaaaaatgaggagcacatcagactggcagaagagcggcagaaggaagcggaaagaaagaaaaaggaagaggaggagaaatataatttgcagttgcagcattactgcgagcgcgacaatctgatcggcgaggaaaccaaacatatgaggcagcccagtccgatcgtaccagccctgcagaataaaatagcctccaagttgcagcgacctccttcagtggatagcatcattcgctcctttattcacgagagctccatgagccgtgcacaatcaccaccggttcccgcccggaaaaaccagctgagggctgaagaggagaagaagaacgtgatcatggaactgagcgaaatgcggaagcagctgagaagcgaggagaggagactgcaggaaaggctactgcacatggactccgatgacgagatcccaatacggaagaaggagcgcaatcctatggatatttttgacatggctagacaccgcttacaggccccggtaagacggcagagccctaagggcctcgacgctgctacgtttcagaatgttcacgacttcaacgagctgaaggatcgagattccgaaacgagggtggatctgaagtttatgtacctggaccccccaagggatcatcacacactggagattcagcagcaagctttgctacgggagcaacaaaagcgtctgaatagaataaagatgcaggagggtgcgaaggtggatctggacgctatcccctcagccaaggttcgcgagcaaagaatgccaagagacgatactagcgatttcctcaaaaactccttactggaatccgactcagccttcatcggggcctacggcgagacctaccccgccatcgaagatgatgtgctacctcccccctcccagctaccgagcgccagagagaggcgtagaaacaaatggaaggggcttgatatcgacagtagcaggcccaacgtggcccccgacggcctgagcctcaagagcatcagtagcgtgaacgtggacgagctgcgagtcaggaacgaggaacgaatgcgcaggctgaatgagtttcacaataaaccaatcaacacggacgacgaaagcagtctggtggatcctgacgatataatgaaacatatcggagacgatgggtcgaatagcgtggcaaccgaaccctggttgaggcctgggacttcggagacgctgaaaagattcatggccgagcagctgaaccaggagcagcagcagattccaggaaaacctggcacctttacatggcagggattgtcaaccgcacatgggtag

SEQ ID NO: 182502 - DNA, 1677 bp, synthetic construct
  misc_feature 1..1677: note = Description of Artificial Sequence: Synthetic coding sequence
  source 1..1677: mol_type = other DNA
atgccctggcggcggcggcggaaccgggtgagcgccctggagggcgggagagaagaggaggccccaccagaggcagccgctgttccccccgcactgttgacatcccctcagcagacagaagccgctgccgaaaggatcctgctacgtggtatatttgaaatcggtcgggactcctgtgacgtggtcctgagcgagagagcgctgagatggaggcctatacagcctgagcggcctgctggggatagtaagtacgatcttctctgcaaggaggagtttatcgaactgaaagacattttctccgtcaaactcaagagaagatgcagcgtcaaacagcagcgatcaggaaccttactgggtattacactcttcatttgcctgaagaaggagcagaacaaactcaaaaacagcaccctcgatctgattaatctttcggaagatcattgcgacatttggttccggcaatttaagaagatcctcgctggcttcccgaacagacccaagtctctaaagattcttctcaaccctcaatcacacaaaaaagaggctacccaggtgtactatgaaaaagtcgagccgctcctaaaactggccggaattaaaacagatgtgacgattatggagtatgagggacatgcactttccctcctcaaagagtgtgagctgcaggggtttgacggcggccacaggaagccactcttcgctatccattggtctgtgcagcgtttgtttacaggaatgcaaaccctcgagccatctgttgtctgcgtgggcggtgatggatccgcaagcgaggtggcccacgccctgctactgcgcgcccaaaagaatgccggcatggagacagatcggatcttgactcctgtcagggctcaattgccgctgggcctcattcctgccggctccacgaacgtacttgcccattccctccatggtgtgccacacgtaattaccgccacgctccacataattatgggccacgtgcagctggttgacgtgtgtaccttttctaccgcgggaaagcttctgaggttcggtttttcagctatgttcggatttgggggtaggacactcgcactggcagagaaataccgctggatgtcgccaaatcaacgccgagatttcgcagttgttaaggccttagcaaaattgaaggcagaagactgtgagatctccttcctccctttcaatagcagtgacgacgtccaggagagaagggcgcagggttctcccaaatccgattgcaacgaccagtggcaaatgattcagggacagttcctgaacgtaagtatcatggcaatcccctgcctatgttcagttgctccacgagggctggctcctaacactcggcttaataacggttctatggcgctgattatagctcggaatacgtctcgccccgaattcatcaagcacttaaagcgctatgcgtccgtgaaaaaccagtttaatttcccctttgtggagacttacactgtggaagaggtgaaagtgcatccacgcaacaacacggggggatacaaccccgaagaagaggaagatgagaccgcttccgaaaattgctttccttggaatgtggacggggacctaatggaagtcgcgtcagaggtccatataaggctgcatccgaggttgatctctttgtatggaggatcaatggaggaaatgatcccaaagtag

SEQ ID NO: 182503 - DNA, 1260 bp, synthetic construct
  misc_feature 1..1260: note = Description of Artificial Sequence: Synthetic coding sequence
  source 1..1260: mol_type = other DNA
atgccctggcggcggcggcggaaccgggtgagcgccctggagggcgggagggaggaggaggcaccgcccgaagcggccgcagtcccaccagcccttctgacatctccccagcagacagaggcagctgccgagcgtattctgttacgcggcatcttcgagattggacgagacagctgtgacgtggtgctgtccgagagggctttgaggtggcggcctatacaacctgagaggccagcaggggacagtaagtacgatctcttatgcaaggaagagttcattgaactcaaggacatctttagtgtgaaattgaaacgcaggtgctcagtgaaacagcaacgatccggcactttgctaggaataactctctttatctgtctgaagaaagaacaaaataaactaaagaactcaacgctggacttaatcaacctgagtgaggatcactgcgacatttggttcagacagttcaaaaagatactggccggttctacgaatgtgttggcgcacagtctgcatggggtgcctcatgtgatcactgcgaccctccacatcattatgggacacgtgcagttggtggacgtgtgtactttttctaccgcaggtaaacttctgaggtttggcttctctgctatgttcgggtttggaggccgaacccttgctctggctgaaaaatataggtggatgtcgccaaaccaaagacgggattttgctgtcgtgaaggccctcgcaaagctgaaggcagaggactgcgaaataagcttcttgccgttcaacagtagtgacgacgttcaagaacggcgagctcagggctctccgaagagcgattgtaacgatcaatggcagatgatacagggtcaattcttgaatgtcagtatcatggctatcccttgcctttgcagtgtcgcccccagagggctggcaccaaacacacggttgaacaatggatctatggccctcatcatcgcaaggaatacaagtcgacccgagtttataaagcacctgaaacgttacgcctcagtgaaaaaccaattcaatttccctttcgtggagacttatacggtcgaagaagtgaaagtgcacccaagaaacaacaccggagggtataaccccgaagaagaagaagacgagaccgcctcagagaattgctttccttggaatgtggatggggacttaatggaggtagcgagtgaggttcacatacgtctgcaccctagactgatttccttgtacggaggctcgatggaggaaatgatcccaaagtag

SEQ ID NO: 182504 - DNA, 1392 bp, synthetic construct
  misc_feature 1..1392: note = Description of Artificial Sequence: Synthetic coding sequence
  source 1..1392: mol_type = other DNA
atgccctggcggcggcggcggaaccgggtgagcgccctggagggcgggcgggaggaagaagccccacccgaggctgcggcagttccacccgcccttctgacctctcctcagcagacggaggcggctgcagagcgtatcctgctgcgtggcattttcgaaatcggaagagattcttgcgacgtcgtgttatcggaacgcgcgttacgatggaggcctatccagccagagagaccggccggcgactccaagtacgatctcctgtgcaaggaggagttcatcgagctcaaggatatcttttctgtaaagttgaaaaggagatgctcggtcaaacagcagcgctctggcactctgctgggtattacactctttatctgcctcaaaaaagagcagaataagctaaaaaactctactctggatctgattaacttgtccgaagaccactgcgacatctggttccgccagttcaagaagatcctggccgggtttcccaatcggcccaagagcctgaagatactgctcaatcctcaaagtcataagaaggaagcaacccaagtttattatgagaaggtggagcccctgcttaagttagctggaataaagaccgatgtcacccgatcaacaaatgtcttagctcattccttgcacggagtgccgcatgtcatcacggccacgctgcacataataatgggccacgttcagctggtggatgtctgcaccttcagcacagccggcaaactgcttaggttcggcttcagcgctatgtttggctttgggggtcgaacactggcactcgctgagaagtacaggtggatgtctccaaaccaaagacgcgacttcgcagtggtgaaagccctggcgaagctcaaggccgaggattgtgagatatccttcctcccgttcaattcatccgacgacgtgcaggaacgacgcgcccagggatctcctaaaagcgactgtaatgaccagtggcagatgatacaaggccagttcctcaatgtgtcaattatggccataccatgcctctgttcggtggctcccagaggactcgcccctaacaccaggttgaataatggatccatggcactgattattgcgcggaatactagtcgcccagaatttatcaaacaccttaaacgatatgcttctgtgaaaaaccagtttaacttcccattcgtggaaacctatacagttgaggaggtgaaagtgcaccccaggaacaacaccggggggtataatcccgaggaggaggaagacgagacagcttccgagaactgcttcccctggaatgtcgacggcgatctgatggaggtggctagcgaggtgcatatcagactgcaccctagacttatctcactgtatggcggttcgatggaagagatgatccccaagtag

SEQ ID NO: 182505 - DNA, 1599 bp, synthetic construct
  misc_feature 1..1599: note = Description of Artificial Sequence: Synthetic coding sequence
  source 1..1599: mol_type = other DNA
atgccctggcggcggcggcggaaccgggtgagcgccctggagggcggccgagaggaagaggctcctcccgaggcagcggcagttcctcccgccttgttgacatctcctcagcagaccgaggccgccgctgaacggatcctactgaggggaatcttcgaaatcggccgcgactcctgcgacgtcgtgctgtctgagcgtgcactgcggtggcgtccaatacagccagaacgcccagcgggtgatagcaagtatgacctgctgtgtaaagaggaatttatcgaattaaaggatatattctcagttaagcttaaacgtagatgttctgttaagcagcaaagatcaggcacattgctgggaatcactctctttatctgcctaaaaaaggaacagaacaagctgaaaaattcaactctggacctgataaatctaagcgaagaccactgtgatatctggtttcgacagttcaaaaaaatcctggcagggttcccgaatagacccaaatccctcaaaatcttattgaatccacagagccataagaaggaggccacccaggtgtattacgagaaggtggagccattactgaagctcgcaggaattaagacagatgtgacaattatggagtatgaagggcacgctcttagcctgctgaaggagtgtgagctccaaggattcgatggcgtggtgtgtgtgggtggagacggaagtgcaagcgaggtcgcgcatgctctgttgttgcgcgcacaaaagaacgctggcatggaaaccgacagaatcctcacacctgttcgtgcccagttaccactggggctgatccctgccgggagcacaaacgttcttgcccattctctgcatggtgtcccacatgtgatcaccgctaccctgcacattatcatggggcatgtgcagctcgttgacgtctgcacattctcaactgcgggaaaactcctaaggttcggattctccgcaatgtttggcttcggggggcgcactttagcactggcagagaagtatcggtggatgtcgcctaatcagcgacgggactttgccgtagtaaaagctctcgccaaattgaaagcagaagactgcgagatttcatttctcccctttaattcatccgatgatgtgcaggaacggagggcccagggcagccctaaaagtgattgtaatgaccagtggcagatgattcaaggccagtttcttaacgtgtccattatggcgatcccctgcctttgctccgttgctcccagaggcctcgcgcccaatacccggttaaacaacgggtcgatggcactaattattgcacgaaacacttctcgccccgaattcataaaacaccttaagcggtatgcatccgtgaaaaatcagtttaatttcccattcgtagagacatacacggtggaggaggttaaagtccatccgcgaaacaacaccggaggatacaatcctgaagaagaagaagatgaaactgccagcgagaattgtttcccatggaacgtcgacggggatctgatggaggtggctagtgaggttcatatccggctccacccaagactgatttctctctatgggggaagtatggaagagatgatccctaagtag

SEQ ID NO: 182506 - DNA, 1545 bp, synthetic construct
  misc_feature 1..1545: note = Description of Artificial Sequence: Synthetic coding sequence
  source 1..1545: mol_type = other DNA
atgccctggcggcggcggcggaaccgggtgagcgccctggagggcggacgagaggaagaggcccccccagaagccgccgccgtcccaccggccttgctcacctctccgcagcagaccgaggcggctgccgagaggatcttacttcgagggattttcgagattggtcgcgacagctgtgatgtggtccttagtgaacgagcactgagatggcgcccaatccagcccgaacgcccagcaggcgacagtaaatatgatctcctgtgcaaagaagagtttattgaactgaaggacattttttccgtgaaattgaagcggaggtgttctgtaaagcagcagagatctggcaccctgctcggtattacattatttatctgtctcaagaaggagcaaaacaaattaaagaactccaccctggatctgattaatctcagtgaggatcattgcgacatttggtttaggcagttcaaaaaaatactcgccgtcatggaatacgaaggccacgctctgtctctgctgaaggagtgcgagcttcaaggtttcgacggcggacatcgcaagcctttgtttgcaatccattggagcgtgcagaggctgtttacgggtatgcaaaccctggagccatctgtggtctgcgtcggcggagacgggtccgccagtgaggtagctcacgccctcctgctgcgagctcagaagaatgcaggtatggaaacggaccggattctcaccccagtcagggcacaactccccctaggcctcattccagctggcagcaccaacgtcctggctcactcactccacggggttcctcacgtgataactgcaactctgcacatcattatggggcatgtgcagctggttgatgtttgtacgtttagtactgccgggaagctcctgcgtttcggtttttctgccatgttcggctttggaggacgaactctggccctggccgagaagtatcggtggatgtcccctaatcagaggagagattttgccgtcgtgaaagccctggctaagttgaaagccgaagattgtgaaatttctttcctcccattcaatagctctgatgatgtacaggagcgccgagcccaaggcagtcccaaatccgattgcaacgaccagtggcaaatgatccaggggcagttcttgaatgtgagtattatggcaatcccatgtctgtgttcggtggcccctcgcggcctggctcccaacacaagattgaacaatggcagcatggccctcatcatcgcccgcaacacctcacggcccgaatttatcaagcacctaaaacggtacgcctccgtcaagaaccagtttaatttcccatttgtcgagacatatacggttgaggaagtgaaggtgcatcctagaaataatacaggcggatacaatcctgaggaggaggaagatgagacagcgtccgagaactgttttccttggaacgtagacggcgacctaatggaagtcgcatctgaagtccatattagacttcaccccaggctgatctccctgtatggaggctccatggaggagatgatccccaaatag

SEQ ID NO: 182507 - DNA, 804 bp, synthetic construct
  misc_feature 1..804: note = Description of Artificial Sequence: Synthetic coding sequence
  source 1..804: mol_type = other DNA
atgcacctgctgctgttccagctgctggtgctgctgcccctgggcaaaaccacacgccaccaggacgggaggcagaatcagtccagcctatcccctgtcttgctccctcgcaaccagagagaattgcctaccggcaaccacgaggaggcagaggagaagccagatctgttcgtcgctgttcctcatctggtggcgacaagtccggctggcgagggtcagcgccagagggagaagatgctgtcccggtttggtaggttctggaagaagcctgagcgcgagatgcacccaagcagagactccgatagcgagcccttcccccctggtacacagtctctgatccagccaatcgacggcatgaaaatggagaaaagtccgcttcgggaggaggcaaaaaagttctggcatcattttatgttccggaagaccccagcctctcagggcgttatcttgcctatcaagtcacacgaggtacactgggaaacctgccgaactgtgccattttcccagactataacacacgaaggctgtgaaaaggtcgtggtccagaacaacctgtgcttcgggaagtgcgggtctgttcacttcccaggcgctgctcagcattctcacacaagctgctctcactgcctgcctgcgaagtttacaaccatgcatctgcctttgaactgcacagagctgtcttcagtgatcaaagtagtgatgttggttgaggaatgtcagtgcaaagtcaagacagaacacgaagacggacacatcctgcatgcgggctctcaggattcatttattccgggcgtcagcgcctag

SEQ ID NO: 182508 - DNA, 789 bp, synthetic construct
  misc_feature 1..789: note = Description of Artificial Sequence: Synthetic coding sequence
  source 1..789: mol_type = other DNA
atggcctggctggaggacgtggacttcctggaggacgtgcccctgcttgaggatataccattactagaggacgtcccacttcttgaggacgttcctttgctagaggatacctctagattagaagatattaatttgatggaagacatggcgctacttgaggatgtcgatctcttggaggacacggacttcctcgaagatctggacttttcagaagcgatggacttgcgtgaagacaaagactttcttgaagacatggacagcctcgaagatatggcccttctggaagatgtagacttattagaagataccgatttcctggaggatccagattttttggaagccatcgaccttagggaggacaaagattttctcgaggatatggattctctggaagacttggaggccattggtcgatgtggattttcgggcaggcatggctttttcgggcgtcgccggtttagcggccgacccaaactgtcaggccggctcggactccttggcagaaggggattttctggacgcctcggcggatattggaagacctggatattctggaaaacatggatcttctggaaaacgtggatcttccgcaagacttacataggatggaagacgtggatcttttccggtcgttgtggacttaccgggagaccaggctttggcggacggagacgcttcttctggaagaccttgaccgattggaagacatggatctctttctggaaaaccctgattgattggaagacctggataagcttttggaagactctcattgattggaagatctag

SEQ ID NO: 182509 - DNA, 1365 bp, synthetic construct
  misc_feature 1..1365: note = Description of Artificial Sequence: Synthetic coding sequence
  source 1..1365: mol_type = other DNA
atgctggccgagaacctggtggaggagttcgagatgaaggaggacgaaccttggtatgatcatcaggatttacagcaagacctccagcttgcagccgaattgggtaaaaccctgttagaccggaacaccgaactcgaagattctgtgcaacagatgtatactacaaatcaggagcagttacaggagattgaataccttactaaacaagtggaattgttgcgtcagatgaacgagcagcatgccaaagtgtacgaacagctcgacgtgactgcgcgagagctcgaagaaacaaatcagaagctggtcgctgatagcaaggccagccagcagaaaatactgtcactgaccgagacgattgagtgcttgcagaccaatatagaccatctgcagagccaggtggaggagctaaagagtagcggtcagggacggcgttctccaggaaaatgcgatcaagagaaaccagctccttcattcgcctgcctgaaagagctttacgatcttcgacaacattttgtgtatgaccacgtttttgctgagaaaattacgagcctgcagggacagcccagtcccgacgaggaggaaaacgaacatttaaaaaagacggtaactatgcttcaggctcagctgtcacttgaaagacaaaaacgggttaccatggaagaagaatatggtcttgtcctcaaagagaactctgaactggaacagcaactgggcgcaacaggcgcctatcgggcaagggccctggagttggaggccgaggtggcggaaatgagacaaatgcttcagtcagagcatcccttcgtaaatggcgttgaaaaactcgtgcctgattctctgtatgtcccattcaaggagcccagccaatcccttttagaagaaatgttcctgactgtgcccgagtctcacaggaagccactcaagcgcagttcctctgagacgattctgagtagccttgccgggtcagatattgtcaagggacatgaggagacctgtatcaggagagccaaggccgtaaaacagagggggatctccctgctgcacgaggtggatacacaatacagtgccttgaaggtgaagtacgaggaactgctgaagaaatgccaggaagagcaggactcactgtctcacaaggcggtgcaaacctctcgggccgctgccaaagacctcaccggtgtgaacgctcagagcgagcctgtagccagcggttgggaactggcatcggtgaatcctgaacctgtgagcagccccaccacacctcctgagtataaagccctcttcaaagaaatcttctcctgcatcaagaagaccaagcaggagattgatgagcagagaaccaagtaccgaagcctgtcctcccacagctag

SEQ ID NO: 182510 - DNA, 618 bp, synthetic construct
  misc_feature 1..618: note = Description of Artificial Sequence: Synthetic coding sequence
  source 1..618: mol_type = other DNA
atgctgggcgccaagccccactggctgcccggccccctgcacagccccggactgccgctggttttagtgctgctggccctcggggccggatgggctcaggaaggctccgagcccgtcctcttggagggcgaatgcttggtagtctgtgagcctggtcgggctgctgccggagggccggggggcgccgccctgggagaggccccccccggtagagttgctttcgcagcggttcggagccaccaccacgaacccgctggcgagactggcaatgggacctcgggcgcgatctactttgaccaggtattggtaaatgaaggcgggggattcgatcgagcaagtggttctttcgtggcacctgtgcggggtgtgtacagctttagatttcatgttgtcaaagtgtacaaccgtcagactgtgcaggtgagcctcatgttaaatacgtggcccgttatttcagcattcgccaacgacccggatgtgacccgggaggccgccaccagctccgtgttgcttcctctcgaccccggggaccgcgtatccctgcggttgagaagagggaaccttctggggggttggaaatactcgtcgttttcagggtttttaatcttcccactctag

SEQ ID NO: 182511 - DNA, 990 bp, synthetic construct
  misc_feature 1..990: note = Description of Artificial Sequence: Synthetic coding sequence
  source 1..990: mol_type = other DNA
atgatcctgatgaagatgggcttcagcggcatcgtggtgcaccaggagtctgtatgtgccacttacggaagtgggctgagcagcacttgcatcgtcgatgtaggcgatcaaaagacatctgtgtgctgcgttgaagacggggtctctcatagaaataccaggatcttttcgtggaatcaagacatcagcggcctgcaggatcatgagttccagattcggcatcccgactctccggcacttctttatcagttccggctcggcgatgagaaactccaggcccccatggctctgttttaccccgcgaccttcgggatcgtggggcagaagatgacgacactgcaacaccgatctcagggtgatccggaagacccacacgacgaacattacctcctggccactcagtctaagcaggagcaatccgccaaagcaacagccgatcgtaaaagtgcaagtaagcccataggctttgagggagaccttcgagggcagtcgtctgatctgcctgagcggcttcattcccaggaggttgacctcgggagtgcccagggagatgggcttatggccggaaatgattcagaagaggccctgacagctctgatgtctcgaaagacagctatcagtctctttgagggaaaggcattaggactggataaagcaatcctgcactccatagactgttgctcaagtgatgacaccaaaaaaaagatgtactccagcatactggtggttggcggagggctgatgtttcataaagcacaggagttcctgcagcaccgtatactgaacaagatgcccccctccttccggaggatcatcgaaaacgttgatgtgattactcgccccaaagatatggatcccaggctgatcgcttggaagggaggggccgtgcttgcctgtttagacaccacgcaggaactctggatttaccaacgcgaatggcagcgcttcggagtccggatgctcagggaaagagctgctttcgtgtggtag

SEQ ID NO: 182512 - DNA, 1131 bp, synthetic construct
  misc_feature 1..1131: note = Description of Artificial Sequence: Synthetic coding sequence
  source 1..1131: mol_type = other DNA
atggaggagttccacggccggaccctgcacgacgacgacagctgccaggtgatccccgtgttgcctcaggttatgatgatcctgattcccgggcagactctgccattgcaactatttcacccacaggaagtgagcatggtgcggaatctgattcagaaagacaggacatttgccgtccttgcgtattcgaatgtgcaagagagggaggcccagtttggaacaaccgccgaaatctacgcctaccgcgaagagcaggattttggaatagagatcgttaaggtcaaagctattggccgccagaggttcaaggtgctggagctgagaacacaaagcgatggtatccaacaggcaaaggtccaaatactcccggaatgcgttctgccatctaccatgagtgcagtacaattagagtcgctaaataagtgtcagatcttccctagtaagcctgtttcaagagaggatcagtgcagttacaagtggtggcagaagtaccaaaaacgaaaattccattgcgccaacctgacaagttggccaagatggctgtactcactttacgacgccgagactttgatggacagaatcaaaaagcagctgagagagtgggacgagaacctgaaggacgattcccttccttccaattttagctacagagtcgctgcctgcctccccattgacgatgtgttgaggatccaactcctcaaaattgggtcagccattcagcgccttcgttgtgaattggatattatgaataagtgcacctccctctgctgtaaacagtgccaggagactgagatcactaccaagaacgagattttctcactcagcctgtgcggcccaatggcagcctatgtcaacccccacgggtacgtccacgaaacgctgaccgtttacaaagcttgcaatttaaacctcattggcagaccgtctaccgaacattcttggtttcctggatatgcctggactgtcgctcagtgcaaaatctgtgcgtcccatatcgggtggaagtttactgcaactaaaaaagacatgtctccacaaaagttttggggactgaccagatcggcccttctccccactatccctgataccgaagacgagatttcaccggataaggtcatcctgtgtctctag

SEQ ID NO: 182513 - DNA, 1326 bp, synthetic construct
  misc_feature 1..1326: note = Description of Artificial Sequence: Synthetic coding sequence
  source 1..1326: mol_type = other DNA
atggccggcgagggcgaccagcaggacgccgcccacaacatgggcaaccatctgcccctcttgcccgagtcggaggaagaggacgagatggaggttgaggaccaagactccaaggaggctaagaaacccaatatcattaatttcgatacctccctccctacctctcatacctatctgggggccgacatggaagagttccatggcaggaccttacatgacgacgactcatgtcaggtcattcctgtgcttccacaagttatgatgatattgattcctggccagacactcccactacaactgttccatccccaagaggttagcatggtccgtaatctgatccagaaagaccgtacctttgctgtcctggcatactcaaatgtacaagaaagagaagcgcaatttggtacgacagcagaaatatatgcctaccgggaagagcaggatttcggcatcgagatcgtgaaagtgaaagccatcggacgccaacggttcaaggtactcgagctcaggacacaaagtgatggaattcagcaggccaaagtgcagattttgcctgaatgtgtcctcccatcaaccatgtctgccgtacagctcgagtccttaaacaagtgccaaatcttcccctctaaacctgtatcacgggaagaccagtgtagctataagtggtggcagaagtaccagaagcgtaaatttcactgtgcgaacttgactagctggccacgttggctttactctctctacgatgctgagactcttatggaccgcataaaaaaacaactaagggagtgggatgagaacctgaaagatgattctctgccaagcaatccgatcgatttcagttacagagtggctgcgtgcctgccaattgatgacgtattgagaatacagttacttaagattgggagtgccattcagcgcctgcgatgcgagctggacattatgaataagtgcacctcactgtgctgtaagcaatgccaggagacagagatcacaaccaagaacgagatattttccctgtctctgtgtggccccatggccgcctacgtgaacccgcatgggtatgtgcacgagactctgactgtttacaaagcttgtaacttaaacctcattggacggccttcaaccgagcacagctggtttccagggtacgcctggactgtagcccagtgcaaaatatgcgcttcccatatcggctggaagttcacagctaccaaaaaagatatgagtccgcaaaagttttggggccttacccggtccgcccttttgccaactatcccagatactgaagacgagatttcccccgacaaggtgatactgtgtctctag

SEQ ID NO: 182514 - DNA, 1335 bp, synthetic construct
  misc_feature 1..1335: note = Description of Artificial Sequence: Synthetic coding sequence
  source 1..1335: mol_type = other DNA
atggaggaggagggcaagaagggcaagaagcccggcatcgtgagcccattcaaacgcgtgttcctgaaaggtgagaagtctagggataaaaaagcccatgaaaaggtcaccgaaaggaggcccctgcacactgtcgttttgagtctgcccgaacgcgttgagccagataggctgttatcagactatatcgagaaggaggttaaatatcttggacagttgaccagtatacccgggtacctgaaccctagcagtcgcacagaaatattgcattttatagataatgctaaaagagcccaccagctccctgggcacttgacccaggaacacgacgccgttctttccctatccgcgtataacgttaagctagcctggcgcgacggggaggacatcatcctgagagtgcccatccacgatattgccgctgtcagctacgttcgagacgacgccgcccacctagtggtacttaaaactgcacaggatccaggaatcagcccttcccagtcgctttgtgctgaatccagtcgcgggctctctgctggatccctgagcgagtccgctgtcggacctgttgaggcttgttgcctggtcatccttgccgctgaatccaaagtggccgcggaagagttatgctgcctgcttggacaggtctttcaggtggtctacacagaatccactattgattttctggatagagctattttcgacggcgcttccacaccaacccatcatcttagccttcatagcgacgactccagtactaaggtggacatcaaggagacctacgaggtggaagcttctactttttgctttcctgagagcgtcgacgtgggtggcgccagccctcacagcaaaactataagtgagtctgagcttagtgcgtccgcaactgaactcttgcaagactacatgttgaccctgcgcacaaagctatcatcgcaggagatacagcagttcgccgctctgttacacgagtacaggaatggcgctagcatccacgaattttgcatcaatctcagacagctttacggggatagccggaagttcttactacttggtcttcgcccattcatccccgagaaagatagccaacactttgaaaacttcctggagacaattggtgtgaaggacggcagaggaatcattaccgattcctttggtaggcacaggcgcgcactctcaactacatcgtcgtctacaaccaacggcaaccgagccacaggcagttctgacgatagatcagccccatccgagggagacgaatgggacagaatgatatccgatattagttctgacattgaggctttaggttgctcgatggatcaggactctgcctag

SEQ ID NO: 182515 - DNA, 1398 bp, synthetic construct
  misc_feature 1..1398: note = Description of Artificial Sequence: Synthetic coding sequence
  source 1..1398: mol_type = other DNA
atgcacagcagctgccggcagcggcggaaccagaacctgagcaaggagattccacagaccgaattccacacagggtattcaatggaaaacgagcctggcatagtaagccctttcaagagggtttttctcaagggagaaaaatcacgggacaagaaggctcatgagaaagtgacggagaggcgacctctgcacacagtggtgctgagcctgcccgagcgggttgaacccgacagactgctgagcgactacattgagaaagaggtgaagtaccttggtcaactgacttccatccccggctatttgaatccctcctcacgcacggagattctgcactttattgacaacgctaaacgtgcccaccagcttcccggacatctgacacaggagcatgacgctgtgttgtccctctcagcctacaatgtgaagcttgcctggcgggatggcgaggatatcatactgcgcgtacctattcatgatattgccgctgtgagctatgtgcgtgacgatgctgctcatttggtcgtgcttaagactgcgcaggacccaggaatctcacccagccagtccttatgcgccgaaagctcacgggggctctctgccggctccctcagtgaatctgcagtggggccagtcgaagcatgctgcctggtcattttagccgcagagtccaaagtggctgccgaagagctatgctgtctgttaggccaagtgtttcaggtggtgtacactgagagtaccatcgatttcctcgaccgcgccatatttgacggtgcatcaacccctacgcatcatctttctctccattccgatgacagctcaacgaaagtagacattaaggagacctacgaagtcgaagcgtctaccttctgtttcccagaaagtgtggacgtcggtggggcttccccacactcaaagacgatctctgagtctgaactgagtgcatcagctaccgagctcctgcaggactatatgctcacacttagaactaagctgagtagccaggaaatccaacagtttgcggcgctgctgcacgagtatcgtaacggcgcttccatccatgaattctgcattaatctccgtcagctgtacggagacagtaggaaattcctcctgctagggctgcgcccatttattccggagaaggactcccaacatttcgagaacttcctggaaaccatcggcgtgaaggacggccgaggaattatcaccgactccttcgggcggcacagaagggctctgtcaacgacatcgtcctccaccactaatggaaaccgcgctacgggatcttccgacgatcggtcggctcctagcgagggcgacgaatgggatcgaatgatatctgacattagctcggacatcgaggctttgggctgctcgatggaccaggattctgcctag

SEQ ID NO: 182516 - DNA, 1317 bp, synthetic construct
  misc_feature 1..1317: note = Description of Artificial Sequence: Synthetic coding sequence
  source 1..1317: mol_type = other DNA
atggagaacgagcccggcatcgtgagccccttcaagcgggtgttcctaaaaggagagaaatcaagagataaaaaagcgcacgaaaaggtgactgagagacggcctctgcataccgtggtgctgagcctgccggagagggtcgaacccgatagactgttgagtgactacatcgagaaggaggttaaatatctggggcagctgaccagcattcccggatacctgaacccatcaagtaggaccgagatactccacttcattgataatgccaagagagctcaccagcttccggggcacctcacacaggagcacgatgccgtcctgagcctgtctgcctataatgtgaaactggcctggagagacggagaggatatcattctcagggttcctatccatgacattgcggcagttagttatgtcagggatgatgccgcacatctggtggtgctgaagacggcccaggatcccggaatatcccctagccagtcactctgcgcagaaagttcgcggggcttgtccgccggcagcctgtccgaaagcgctgtggggccggttgaggcctgctgtctagtcatcctggcagccgaatcgaaggtcgctgcggaggagctgtgctgcctgttagggcaggtgtttcaggttgtttatactgaaagcaccatcgattttctggacagagcgatctttgatggtgcttctacaccgacgcatcacctgagccttcactcggacgatagttctactaaggtggacatcaaggagacatatgaggtggaggcttcaactttttgcttcccagagtccgtcgatgtggggggggcctccccccactctaagacaattagcgagagtgaactgtcggccagcgcaacagagctcctacaggattacatgcttacactgaggacaaagctaagctcccaggaaatacagcagtttgcagccctactccacgagtatcggaatggggccagtatccatgagttctgcatcaacctgagacagctgtacggagattcccgcaagttcctgctgctgggactgagaccctttataccagagaaggatagtcaacatttcgaaaattttctggagaccatcggggtaaaagatggtagggggattattaccgactcttttggcaggcatcgaagagctcttagcacgacatcatcctcgaccacaaacggaaaccgcgccactgggtctagtgacgatagatccgcccccagtgagggggatgaatgggatcgtatgatctctgatatttcttccgatatcgaggcactcggttgttcaatggatcaggatagtgcctag

SEQ ID NO: 182517 - DNA, 1161 bp, synthetic construct
  misc_feature 1..1161: note = Description of Artificial Sequence: Synthetic coding sequence
  source 1..1161: mol_type = other DNA
atggaggaggagggcaagaagggcaagaagtacctgggccagctgacctctattcctggctaccttaacccatctagccgcactgaaattctgcacttcatcgacaacgccaaacgggcccaccaactgccgggccacctcacacaggagcacgatgctgtgctgtctctgtctgcatacaacgtcaaattggcctggcgggatggcgaggatattatcctgcgcgtgcctatccatgatatcgctgcggtatcgtacgtgagggacgatgctgctcatttagttgtcctcaaaactgcccaggaccctggcattagcccaagccagtccctctgtgccgagagctcaaggggcctgtctgcaggtagcctgagcgagagtgccgtggggcctgtagaggcctgctgtctggtgatcctggccgctgagtcaaaagtggccgccgaagaactgtgttgcctgctcggacaggtcttccaggttgtctacactgagagtacaatcgacttcctcgaccgcgcgatatttgacggcgccagcactcccacgcaccacctttcactgcactccgatgacagctccaccaaagttgatatcaaagaaacgtacgaggtggaggcaagcactttttgcttccctgagtccgttgacgtcggtggcgcgtcgcctcactcaaagacaatcagcgagtcagagctttcagctagcgccactgaacttctgcaagattatatgctgacgctcaggacaaagttaagtagtcaggaaatccaacagtttgctgctttacttcacgagtaccgtaacggcgcgtctatccacgaattttgtatcaatctgagacagctgtatggagactcccgaaaatttctgctgctgggccttagacccttcataccagaaaaggacagtcagcacttcgagaatttccttgagactatcggcgtgaaagatgggcgcggcatcatcactgacagcttcggcagacatcgtagagccctgtccactacatcttccagcactactaacggcaaccgagccacagggagctcagacgataggtccgcgccatcggaaggtgacgaatgggaccgaatgatctcggacatcagcagcgacatcgaagctctggggtgcagcatggatcaggattccgcgtag

SEQ ID NO: 182518 - DNA, 216 bp, synthetic construct
  misc_feature 1..216: note = Description of Artificial Sequence: Synthetic coding sequence
  source 1..216: mol_type = other DNA
atggaggaggagggcaagaagggcaagaagcccggcatcgtgagccccttcaaaagagtgtttctaaaaggtgagaaatcacgcgacaagaaagctcacgaaaaggtcactgagaggaggccacttcacacagtagtgttgtctctgcctgagagagtagagcctgatcgtctgttgtcggactacatagagaaagaggtgaaggggtctcattag

SEQ ID NO: 182519 - DNA, 1062 bp, synthetic construct
  misc_feature 1..1062: note = Description of Artificial Sequence: Synthetic coding sequence
  source 1..1062: mol_type = other DNA
atggaggaggagggcaagaagggcaagaagcccggcatcgtgagcccatttaagcgcgtttttctgaaaggggaaaaatctagagacaaaaaggcgcatgaaaaggttaccgaaagaagaccactgcacactgtggtgctgtctctcccagagcgggtggagccagacaggctgctcagtgactatatagagaaagaagtgaagtacctgggccagcttacttcgattccgggctacctaaatccgagctcaaggactgagatactgcactttattgacaacgcaaagcgcgcacaccagctgcccgggcatctgacgcaggagcatgatgccgtcctgagccttagtgcttacaacgtcaagttggcatggcgtgatggcgaagatataatcctgagggtgccaattcatgacatcgctgctgtaagctacgtccgcgatgatgcagcccacttagtggtactaaaaaccgacgactcatccactaaggttgatataaaagagacatatgaggtcgaggcctccacattttgtttccctgagagtgtggatgtgggcggcgcgagtccgcatagtaagaccatctccgaaagcgaattgagtgcaagcgccacggagctgctgcaggactacatgctcacgcttaggactaagctcagctcacaggaaattcagcaatttgccgctttactacacgagtataggaatggtgcgtcgatccatgaattctgcattaacctccgacagctatacggggattctaggaaatttctcttactcggactcagaccattcattccagaaaaggacagccagcatttcgaaaactttctcgagaccattggggttaaagacgggagaggtattataaccgattcatttgggcgacatcgccgggccctgagcactacttcgagtagcactacgaacggcaacagggccactggcagcagtgacgaccggtccgcaccctccgaaggggatgagtgggacagaatgatctcggatatctcctcagacatcgaggcgcttgggtgctcaatggaccaagacagtgcctag

SEQ ID NO: 182520 - DNA, 1224 bp, synthetic construct
  misc_feature 1..1224: note = Description of Artificial Sequence: Synthetic coding sequence
  source 1..1224: mol_type = other DNA
atgcggcggaacctgcggctgggccccagcagcggcgccgacgcccagggccaaggggcgccaagaccagggctggcagcccctcggatgttactgccgccagcttcgcaggctagccggggatcaggcagtacgggctgctccttgatggcccaggaggtggatacagcccagggcgccgagatgcgccgtggcgcaggggctgctagaggaagggcctcctggtgttgggcactggctctgctatggctggctgtcgtccccggatggtctcgggtgtcggggattccctcacgtcgtcactggccggtaccctataaacgtttcgattttagacctaagccagatccatactgccaagctaagtataccttttgtccaacgggatctcctatccccgtgatggagggggacgatgatattgaggtgtttagactgcaggcccccgtatgggaattcaagtacggggacctcctgggtcatcttaaaattatgcacgatgccattgggtttcgctcgaccttaacaggcaaaaattacaccatggagtggtacgagctgtttcagctggggaattgcacgtttccccacctgcggcccgaaatggatgcacctttttggtgtaaccagggtgctgcctgctttttcgaaggcattgatgatgtgcactggaaggagaacggcactctggttcaagttgcaacgatctctggtaacatgtttaatcagatggctaaatgggtaaagcaggataatgagacaggcatttactacgagacctggaacgtgaaggccagccctgagaaaggggccgaaacttggtttgattcttacgactgttctaagttcgtgctcaggacctttaacaagttggcggaattcggcgccgaatttaagaacatcgaaacaaattacacccggatattcctgtactctggggagcccacttacctgggcaacgagaccagcgtgttcgggcctacagggaataagactctgggtctggctatcaaaaggttctactatccatttaaaccacacctgcctacaaaggagttcttactgtctttgctgcagatattcgatgcagtgatcgtgcacaaacagttctacctattttacaatttcgaatattggtttctgcctatgaaatttcccttcattaagattacctacgaagaaattcctttgcccatccggaacaagaccctgtcagggctctag

SEQ ID NO: 182521 - DNA, 822 bp, synthetic construct
  misc_feature 1..822: note = Description of Artificial Sequence: Synthetic coding sequence
  source 1..822: mol_type = other DNA
atggagggcgacgacgacatcgaggtgttccggctgcaggcccccgtgtgggagtttaaatacggtgacctcttgggccaccttaagatcatgcacgatgccattggatttagatctactctgaccgggaagaattatactatggagtggtacgagttgtttcagctcggcaactgcacgttcccccacctgaggcccgaaatggatgccccgttttggtgcaatcaaggcgctgcatgcttttttgaggggatcgacgatgtgcactggaaagagaacggaactcttgttcaggttgccacaatatctggcaacatgttcaatcaaatggctaaatgggtgaagcaagacaatgagaccggaatatactatgagacctggaacgtgaaggccagtccggagaagggtgcggagacttggttcgactcctacgactgttctaagttcgtcctgaggaccttcaataagctggccgaatttggggccgagttcaagaatattgaaaccaattacacccgaatttttctctactctggcgaacccacctacttggggaatgagacttctgttttcggccctactgggaataagaccctaggcctggccatcaagcgtttctactacccatttaagccacaccttcccacgaaggagttcttgctgagcctgttacaaattttcgatgccgtgatcgtacacaagcaattttacttgttctacaactttgagtactggttccttccaatgaagttccccttcatcaaaatcacatacgaagaaatcccactcccaattcgaaataaaaccctgtccggcctgtag

SEQ ID NO: 182522 - DNA, 1077 bp, synthetic construct
  misc_feature 1..1077: note = Description of Artificial Sequence: Synthetic coding sequence
  source 1..1077: mol_type = other DNA
atggcccaggaggtggacaccgcccagggcgccgagatgcggcggggagctggagccgcgcgcggacgcgctagttggtgctgggcattggcactgttgtggctcgccgtggttcccgggtggtcacgcgtgtcaggaatccccagtcgaagacactggcccgtgccctataagcggttcgactttagacccaagcccgatccgtactgccaggccaagtatacattctgccctactgggtctcccatcccagtgatggagggggatgatgatattgaagtgttccgccttcaggcacctgtgtgggagtttaagtacggcgacctcctgggacatctcaaaatcatgcatgacgccatcggattcaggagtaccctgacaggtaaaaattacacaatggagtggtacgagctgttccagcttgggaactgcacattccctcatctgcgcccggagatggacgcccccttttggtgtaatcagggcgccgcttgtttctttgaaggtatcgatgatgtacactggaaagaaaacggaacgctcgttcaggtcgccaccatctcaggcaatatgttcaatcagatggctaaatgggtcaagcaggataacgaaactggcatctattacgaaacatggaatgtgaaggcttcacccgagaagggggcggagacctggttcgacagctatgattgttcgaaatttgtgctcaggacctttaacaaactggccgagttcggcgcggaatttaaaaacattgaaaccaattacactcgcatattcctctactccggcgaaccgacctatctgggaaacgagacgagcgtgttcgggcccacaggtaataaaactttaggcctagccatcaagcgtttctactaccctttcaagccccatctccccaccaaggaattcctgctatccctcctccaaattttcgacgctgtaattgtccacaagcagttctatcttttttacaattttgaatattggtttctgcctatgaagttcccatttatcaagatcacttatgaagaaattcctctcccaattcgcaacaagacactttccggcctatag

SEQ ID NO: 182523 - DNA, 936 bp, synthetic construct
  misc_feature 1..936: note = Description of Artificial Sequence: Synthetic coding sequence
  source 1..936: mol_type = other DNA
atggaggccacccggcggcggcagcacctgggcgccaccggcggcccgggggctcagctgggtgcttcttttttacaggcccggcatggatccgtgtctgctgacgaagctgcgcggacagctccctttcacttggacctgtggttctacttcaccctgcagaactgggttctcgattttggcaggcccattgccatgctggtgtttccactggagtggttcccactgaataaaccaagcgtgggtgactacttccacatggcttacaacgtcatcacaccctttctgctgctgaaactgatcgagcgttctccccgtaccctgccaaggagtatcacatatgtgtccatcataatttttatcatgggggctagtatacatcttgtgggcgactcggtgaatcacaggctgctctttagtggttaccagcatcacctctcagtcagagaaaacccaatcatcaaaaaccttaaacccgaaactctcatagacagcttcgaactgctttattattatgatgagtacttggggcattgcatgtggtacatcccattctttctgattctctttatgtacttcagcgggtgctttaccgcctctaaggccgagagtcttatcccagggcccgcactgctcctcgtggcgccatccggcctgtactattggtatctcgtcacagagggccagatctttatcctgtttatcttcacgttttttgcgatgttagcgctagtcctgcatcagaaacggaagcggttgtttctcgattccaacggactgttcttgttcagctccttcgcccttaccttgctcctcgtggctctctgggtggcttggctgtggaatgatcccgttctacggaagaagtatcccggagtcatttacgttcctgagccttgggcattctacaccttacatgtgagttctcggcactag

SEQ ID NO: 182524 - DNA, 549 bp, synthetic construct
  misc_feature 1..549: note = Description of Artificial Sequence: Synthetic coding sequence
  source 1..549: mol_type = other DNA
atgcggctgcccgcccggctgcccagcaccagcaccagcggcagcacttctcattgtcgaacgggcttctggacattaggtgtgccactaccatgttggtatagcctttccagcgggtttcactccacaagtccggtgttaggcactacttcgacctggcccacaaccagctcaaggccatttagctgtagttcagggtgctttaccgctagcaaagctgagtctctgatccctggacccgcactgctgctggtggcaccttcgggactttattactggtatcttgtcacagaggggcagatttttattctcttcatctttacattttttgccatgctggcacttgtgcttcaccagaaaaggaagcgcttgtttctggattcaaacgggctattcttattcagcagttttgcactcacgctgctgctggtagccttgtgggtagcatggctatggaatgaccctgtactgcgtaaaaaataccccggtgtaatctatgtcccagagccatgggcgttctatactctgcatgtatccagccggcactag

SEQ ID NO: 182525 - DNA, 1032 bp, synthetic construct
  misc_feature 1..1032: note = Description of Artificial Sequence: Synthetic coding sequence
  source 1..1032: mol_type = other DNA
atggccgccgtggccggcaaggagcggcgggcccggggccggccccggcccgagacgcttggagcgattccgaggcgggagggtggcgaggccgggctttcgagagcttttaaacccctcgcccaggcacccctcagctgcgagacctccctgcgcaagttaaagttcaaagggaagaagcacggcagcgtgagcgccgatgaggctgcgcgcactgctccattccacctggacttgtggttttattttactctgcaaaactgggtgctggactttggacgaccaatcgcaatgctggtatttcctttggaatggttcccactcaataaaccttctgtgggagactacttccacatggcctacaacgtcatcacacctttcctgctgctgaaactgatcgaacgaagccccaggaccctcccccggagcatcacctacgtgagcataataatcttcatcatgggagccagtatccacttggtaggggacagcgtgaatcatagactgctgttctcaggatatcagcatcacctcagtgttcgtgagaaccctatcatcaagaatctgaaaccagagactctgattgattcgtttgaactgttatactactatgatgaatatctagggcattgcatgtggtacatccctttctttctgatcctgttcatgtatttcagcggatgctttactgcctccaaagccgagtccttaattcctggccccgcccttctcttggtggcaccatcaggcctgtactattggtacctggtgaccgagggccaaatctttatactgttcatcttcaccttctttgccatgctggcactcgtgctccatcagaagagaaaaaggctatttctcgatagcaatggactttttctgttcagctcctttgcactgaccctcctactggtggccctgtgggtagcctggttgtggaatgacccagtgttgagaaaaaagtatccgggtgtgatctacgttccagagccctgggcgttctatacgctccacgtttcaagtcgccattag

SEQ ID NO: 182526 - DNA, 861 bp, synthetic construct
  misc_feature 1..861: note = Description of Artificial Sequence: Synthetic coding sequence
  source 1..861: mol_type = other DNA
atgaaccccgccagcgacggcggcaccagcgagagcatcttcgacctggactatgcatcctggggaattcggtctacactaatggtggcaggatttgtgttctatctgggagtgtttgttgtgtgtcaccaactctcatccagtctcaatgccacatacaggagcctggtcgcccgtgagaaagtcttctgggacctggcagctacaagggcagtcttcggcgtccaatctactgcggccgggctgtgggccctgcttggagatcccgtgttgcacgcggacaaggctcggggacagcagaattggtgctggttccatatcacaaccgcaaccggcttcttttgcttcgaaaacgtggcggtgcacctctcaaaccttattttccggacctttgacctcttcctcgtgatccatcaccttttcgctttcttggggttcttaggatgcctggtgaatctacaggccggtcactatctggccatgaccacgctattactcgagatgagcacgcccttcacttgtgtatcctggatgctgctgaaagccggatggtccgagtccctgttctggaagttgaaccagtggttaatgatacacatgttccactgtcggatggtgctcacctaccacatgtggtgggtgtgcttctggcactgggatgggcttgtaagcagcctctacctgccccacctgactctctttctggtcggcttagccctgttaaccctcattataaacccatattggacgcataaaaagacacagcagctactaaatcctgtggattggaattttgcccagccggaggcaaaaagcagacccgagggcaacggacagctgctgcgtaaaaagaggccatag

SEQ ID NO: 182527 - DNA, 1065 bp, synthetic construct
  misc_feature 1..1065: note = Description of Artificial Sequence: Synthetic coding sequence
  source 1..1065: mol_type = other DNA
atgtaccgggagtgggtggtggtgaacgtgttcatgatgctgtacgtccagcttgtgcaggggtcatctaacgagcacgggccagtgaaacgctctagtcagtccaccctcgagagatctgaacagcagatccgcgccgctagcagcctggaagagctattacgcatcacccattccgaagattggaagctctggcgctgccggttgcgactgaaaagcttcaccagcatggacagccgatctgccagtcataggtcaactaggtttgccgccacgttctatgatatcgaaaccctgaaagtgattgatgaggaatggcaaaggactcagtgcagccctcgagaaacatgcgtggaggtggcctccgagctaggcaagtctacgaacaccttcttcaagccaccctgcgtcaacgtttttcgatgcggaggatgttgcaacgaggagtcactaatatgcatgaacacgtcaacatcctatataagcaaacagctattcgaaatcagcgtacccctcacgtctgtgccagaactcgttcccgtcaaagtggccaatcacaccgggtgtaaatgtctgccaacagcacctcggcacccttactccatcatccggaggtccatccagatccccgaagaggacaggtgttcccattctaagaagttatgtcccatcgacatgctgtgggactccaacaagtgcaagtgcgtgcttcaggaggaaaatcctctagccggcacagaagaccattcccatctccaggaacctgctctctgcgggccacacatgatgtttgacgaggacaggtgcgagtgtgtgtgtaagacaccctgtcctaaagatttaatccaacatccaaaaaattgttcctgctttgagtgtaaagagagcctggagacctgttgccagaagcacaagcttttccaccccgacacctgtagctgcgaggatcgttgtccttttcacaccaggccttgtgcctctggcaagacagcctgcgccaagcattgccgctttccgaaagaaaagagggccgcgcaggggccacacagtcggaagaacccttag

SEQ ID NO: 182528 - DNA, 504 bp, synthetic construct
  misc_feature 1..504: note = Description of Artificial Sequence: Synthetic coding sequence
  source 1..504: mol_type = other DNA
atggagcggttcgtggtgaccgccccccccgcccggaaccggagcaagactgccttgtatgtaactccactggatcgggttaccgaattcggcggcgagctgcatgaagatggcggaaaattgttctgcacatcttgcaacgtggtgttgaatcatgtcagaaagtccgcaattagcgatcacctcaagtctaagactcacacaaaaagaaaggccgaattcgaagaacaaaacgtacgaaagaagcaacgacccctcactgcctccttgcagtgcaatagtaccgcccagaccgaaaaagtttcagtgatccaggattttgtgaagatgtgtctggaggctaatattccgttggagaaggctgaccatcctgctgtacgggccttcctaagccggcacgtgaaaaacggaggaagtattcccaagtcagatcagttacggagagcctacctgcccgatggctacgagaatgaaaaccagctccttaactcccaggattgttag

SEQ ID NO: 182529 - DNA, 504 bp, synthetic construct
  misc_feature 1..504: note = Description of Artificial Sequence: Synthetic coding sequence
  source 1..504: mol_type = other DNA
atggagcggttcgtggtgaccgccccccccgcccggaaccggagcaagactgccctgtacgttacacctctcgatcgcgtcacagagtttggcggcgaattgcacgaagacggtggcaagctcttctgtacctcgtgcaacgtcgtactgaaccacgtgaggaagtctgcaatttcggaccatttgaaaagcaagacccatactaagcggaaagctgagtttgaggagcagaacgtgagaaaaaagcagcggcccctcaccgccagcctgcagtgtaactcaaccgcacagacagaaaaagtttctgtaattcaggattttgtcaaaatgtgccttgaggccaacattcctctcgaaaaggcagatcatccggctgttagggcctttctgagccgacacgtgaaaaatgggggtagcatcccaaagtccgaccaactaaggcgagcttatctgcctgacgggtacgaaaacgagaatcagctgctcaattctcaggattgttag

SEQ ID NO: 182530 - DNA, 504 bp, synthetic construct
  misc_feature 1..504: note = Description of Artificial Sequence: Synthetic coding sequence
  source 1..504: mol_type = other DNA
atggagcggttcgtggtgaccgccccccccgcccggaaccggagcaagactgctctctacgtgacccctttggaccgcgtgaccgaattcggcggtgagctgcatgaggatggtgggaagctgttctgtacgtcctgcaatgtcgtgttaaaccacgtaaggaaatctgcaattagtgaccatctcaagagcaaaacccacacaaaacgcaaggcagaatttgaggagcagaatgtaaggaagaaacagcgacccctgactgccagtctgcagtgcaattccaccgcacagactgaaaaggtaagtgtgattcaggatttcgtgaaaatgtgcttggaagcaaacattccattggagaaagccgatcacccggcagtacgagctttcctttcccgacacgtcaagaacggcggatccatccccaaaagcgatcagctgcgacgcgcctatctgcccgacggctacgaaaacgagaatcagctcctcaacagtcaagactgttag

SEQ ID NO: 182531 - DNA, 321 bp, synthetic construct
  misc_feature 1..321: note = Description of Artificial Sequence: Synthetic coding sequence
  source 1..321: mol_type = other DNA
atggagcggttcgtggtgaccgccccccccgcccggaaccggagcaagactgcgctgtacgtgacaccccttgatagagttacggaattcgggggcgagctgcacgaagacggcgggaaattgttctgtacctcatgcaatgtcgtacttaaccacgtccgtaagtctgcaatctccgaccatttgaagtccaaaacccacaccaaacggaaagcagagtttgaggagcaaaatgtcaggaagaagcaacgacctttaaccgccagtctgcagtgtaactccacagcacagacagagaaggtgagtgtgatccaagactag

SEQ ID NO: 182532 - DNA, 504 bp, synthetic construct
  misc_feature 1..504: note = Description of Artificial Sequence: Synthetic coding sequence
  source 1..504: mol_type = other DNA
atggagcggttcgtggtgaccgccccccccgcccggaaccggagcaaaacggctctttatgtgacccccctagaccgtgtgacagaatttggaggagaactacatgaggacgggggaaaattgttctgtacatcatgtaatgtggtgctcaaccacgtaagaaaatccgcaatttctgaccatctgaaatctaaaacccacaccaagcggaaggccgagttcgaagaacagaatgtgaggaagaagcaaaggcccctgaccgcatcattgcaatgtaacagcactgctcagaccgaaaaagtttccgtgatccaggattttgtaaagatgtgtctggaagcgaatatccccttggagaaggcagaccatccagcagtgcgagcatttctctctcgccacgtgaagaatggcggaagcatcccgaagtctgaccagctgcgacgtgcctacctgcccgacggctacgaaaacgaaaaccagctgttaaactcccaagattgttag

SEQ ID NO: 182533 - DNA, 1608 bp, synthetic construct
  misc_feature 1..1608: note = Description of Artificial Sequence: Synthetic coding sequence
  source 1..1608: mol_type = other DNA
atggccagcctgagcctggcccccgtgaacatcttcaaggccggcgctgatgaggagagagccgagactgcccgtttaacctccttcatcggtgctatcgcaatcggggacctcgtgaagagtactctggggccgaaggggatggacaaaatcttactttcatctggccgagatgcatcgctgatggtaactaacgatggcgctactattctcaaaaacatcggtgtcgacaatccagccgccaaggtcctcgtggatatgagcagagtccaggatgacgaggtaggtgatggcaccactagcgttaccgttcttgctgctgagctgcttcgcgaggcggaaagcctgattgctaaaaaaattcatccccaaacgataatagccgggtggagagaagcaactaaggccgctcgggaagccctacttagcagcgccgtggaccacggctcggatgaagtgaagtttcgtcaggaccttatgaacatagctggcacaaccctttcttccaaactactcacccatcacaaagatcactttacgaaactggccgtggaggccgtgctgcgcttaaaaggcagtgggaacctggaagctattcatattattaaaaaactaggcggctctctggctgatagctaccttgatgagggctttctgctggacaagaaaataggcgtcaaccagccaaaaaggatcgaaaatgcaaagatactgattgccaatacgggcatggacacagacaaaataaagatatttggctctcgtgttagagtcgattccaccgccaaggtggccgagattgagcatgccgaaaaagagaaaatgaaagaaaaggtggagcgtattctcaagcatggcatcaattgtttcattaatcggcagctcatttacaactatcccgagcagttgttcggggcggctggtgtcatggcaattgaacacgccgatttcgcaggagtggagcgactggctctagtcactggaggggagatcgcttctacgtttgatcacccagagttggtgaagctcggcagctgtaagcttattgaggaagttatgattggtgaagataaactgattcatttctcaggagtcgctctgggcgaggcctgcacgatcgtgttgcgaggagccacccagcagatcctggatgaagcggagagatccctccatgacgccctttgcgtgctcgcgcagaccgtcaaagactcccggacagtatatggcggaggatgcagtgaaatgctcatggcccatgccgtgactcaactcgcaaatcgcacaccaggtaaagaggccgtggctatggagtcttacgccaaggccctgagaatgctcccaacaataatcgccgacaacgccggttacgatagcgcggatctggtagctcagctgcgggctgcccacagcgaaggcaacacaaccgcgggactggatatgcgagaggggactatcggggacatggccattctgggaatcactgaaagctttcaagtgaaacgacaggtgttgctgagcgctgcggaggccgccgaagtcattcttcgggtggataatataatcaaggccgcccctcggaaacgggtacctgaccaccatccctgttag

SEQ ID NO: 182534 - DNA, 1467 bp, synthetic construct
  misc_feature 1..1467: note = Description of Artificial Sequence: Synthetic coding sequence
  source 1..1467: mol_type = other DNA
atggacaagatcctgctgagcagcggccgggacgccagcctgatggtgacgaacgacggcgccacgatcctgaagaatattggcgtggacaacccagcagccaaagtgttggttgacatgtcaagagtgcaggacgatgaggtgggcgacggcacaacatccgttacggtattggcagcagagctgttgcgtgaggcagaaagcctaatcgctaagaaaatccatcctcagaccattatagctggctggagggaggctacgaaggcagcccgggaggccctcctctcatccgccgtggaccacggatccgacgaggtgaaatttagacaagatttgatgaatatagctggcactaccctctcgtccaagttgctgacacaccacaaggatcattttacaaaactcgccgtggaggccgtcctcaggttgaaaggctctggcaatctagaggctatccatattatcaagaagctcggaggctcccttgctgattcctatttggacgaaggattcctgttggacaaaaagataggggtcaatcagcccaaacgcattgaaaatgctaagattctgattgcaaacacgggcatggatacagataaaataaaaatcttcgggtctcgcgttcgcgtggactctaccgccaaggttgcagaaatcgagcacgccgagaaagaaaagatgaaggagaaggttgaaaggattctcaagcacggaatcaactgctttattaaccgccaactcatatacaattaccccgagcagctcttcggggcagccggggtgatggccatagagcatgccgatttcgccggggttgagaggttggcactggtgacgggcggtgagattgcctccacttttgatcacccggaattggtaaaactggggtcgtgcaaactcatcgaggaggtgatgatcggggaggataaattgatccatttctcaggcgtcgccctgggagaagcatgtactatcgtgttgagaggggccacgcaacagatcctcgatgaagccgaaaggtctctgcacgatgcactatgtgtcctagcacaaacagtcaaggattccaggaccgtttatggtggcggatgcagcgaaatgctgatggcccatgccgtcacgcaactcgccaacagaacccctgggaaagaagcagtcgccatggagtcctatgcaaaagccctgaggatgctgccgactattatcgcagataatgccggttacgacagtgccgatctcgtggctcaattgagagctgcccactccgaaggcaacacaaccgctggactggacatgagggagggcacgatcggcgatatggccatcttgggtataaccgagagttttcaggtgaagcggcaggttctcctgtcagccgcagaggccgctgaagtgattcttcgagtagacaatatcattaaagccgcgcctcggaaaagggtcccagaccatcacccatgctag

SEQ ID NO: 182535 - DNA, 1638 bp, synthetic construct
  misc_feature 1..1638: note = Description of Artificial Sequence: Synthetic coding sequence
  source 1..1638: mol_type = other DNA
atgatgggccaccggcccgtgctggtgctgagccagaacaccaagcgtgagtccgggagaaaggtgcagagcgggaatataaacgctgccaaaaccattgccgacataatacggacctgcctaggacccaagtctatgatgaagatgctgctggaccctatgggaggtatcgtgatgacaaacgatgggaacgccatactccgagaaattcaggttcagcatcctgccgcgaaaagcatgatcgagatatctcggacacaggatgaggaagtaggcgacgggactaccagcgtaattatcctcgctggcgagatgttgagcgtggcagagcacttcttggagcagcagatgcaccctacagttgtcatctctgcctacagaaaagctctcgacgatatgatttcaacacttaagaagatttctatccccgtcgatatcagcgacagcgatatgatgttaaacatcatcaatagttccattaccactaaagcaatcagcagatggtcttctctcgcatgtaacatagccctcgacgccgtgaagatggtgcaattcgaagaaaatggaagaaaggagatcgacattaaaaaatatgctcgggttgagaagatccccggcgggatcatcgaggacagctgcgtgttgcggggtgttatgattaataaggacgtgactcatcccagaatgcggaggtatattaaaaacccacgaatagtcctgttagactcatcccttgaatataagaagggtgagtctcagacagacatcgaaatcacacgggaggaggatttcactagaattctgcagatggaagaagaatatatacaacaattgtgcgaggacatcatccagttaaaaccagacgtagtgatcactgaaaaaggtatctcggatctcgcacagcactacctgatgagagctaacatcacagctatccgccgtgttcgcaagacggataacaaccggatcgcccgtgcttgcggcgccagaatcgtgagtagacccgaagaactacgggaggacgacgtggggaccggggccggactcctggagattaaaaagattggcgatgaatattttacattcataacagattgcaaggatccaaaggcctgcactatccttctgcgtggagcaagcaaggaaattttgtccgaggttgagaggaatctgcaggatgctatgcaggtctgtcgtaatgtcctcttagatcctcagcttgtccctggtgggggtgccagtgagatggccgtggcacacgctctcactgagaaatcaaaggcaatgactggcgtggagcaatggccctaccgagctgttgcacaagctctggaagtaattcccaggaccctcattcagaattgtggcgcatcaactattcggctgctgacgagcctgcgggcaaagcacacacaggaaaactgtgaaacttggggggtaaacggggagacaggtacactggtagacatgaaggaactaggtatttgggagcccttagctgtgaagctgcaaacgtacaagactgccgtggagactgccgtgctgctcctaagaattgatgatattgtgtccggccataaaaaaaagggagacgaccaaagccgacaggggggagcccctgacgcaggccaggagtag

SEQ ID NO: 182536 - DNA, 1524 bp, synthetic construct
  misc_feature 1..1524: note = Description of Artificial Sequence: Synthetic coding sequence
  source 1..1524: mol_type = other DNA
atgatgggccaccggcccgtgctggtgctgagccagaacaccaagagagagtccggcagaaaagtccagtccggcaacattaacgcggccaaaatccaagtgcaacacccggccgctaagtccatgattgaaatatctcgcacccaggacgaagaagtgggagacggcactaccagcgtgatcattctggccggagagatgctgtccgtggcggaacactttttagagcagcagatgcatcctaccgtagtgatcagtgcctatcgtaaagctttggacgacatgatctccaccctcaagaagatctccattcccgtcgatatcagtgattcggatatgatgcttaatatcatcaactcctctatcaccaccaaggcaatcagccgatggagcagcttagcatgtaacatcgctttagatgccgtcaagatggtccagttcgaggagaacggcaggaaggagatcgacattaaaaagtatgcccgtgtcgaaaagattccaggcggcataatagaagacagttgtgtcctgaggggcgtgatgatcaataaggatgttacacatccccgcatgcggcggtacataaaaaatccacggattgtcctactcgacagttcattggaatacaaaaaaggagaatcccagaccgatattgaaatcacgagggaagaggacttcaccagaattcttcagatggaggaggaatacattcaacagttatgcgaagacattatccagctgaagcccgacgtggtgattacagagaagggaatcagcgacctggcgcaacactacttgatgagagctaacatcaccgccatcaggcgggtgagaaaaacagacaacaatcgtattgccagggcttgtggggctcgcatcgttagccgccccgaagagctgcgggaggacgatgttggcactggtgctggcctgctggagatcaaaaagatcggagacgaatacttcacgttcattacagactgtaaggatcccaaggcctgcaccattttgcttcggggagcctctaaggaaatcttgtccgaggtagaacgtaaccttcaggatgctatgcaggtgtgtagaaatgtgttgcttgatccacagttggtgccaggcggaggggcaagcgaaatggctgtagctcacgctctcactgaaaagagcaaggcaatgaccggggtcgagcagtggccatatcgggccgttgcacaggcccttgaggtgatccctcgcaccctaatccaaaattgcggcgccagcaccataagactgctcacatctttgcgggcaaaacatacacaggaaaactgcgaaacatggggggtgaatggcgaaactggaactttggtagatatgaaggaactcggaatctgggaacctcttgctgttaaacttcagacgtataaaactgcggtcgaaaccgcggtgcttctgctgagaattgacgatattgtttctgggcataaaaagaaaggagacgatcagtcaagacaggggggcgctcccgatgctggccaggagtag

SEQ ID NO: 182537 - DNA, 1503 bp, synthetic construct
  misc_feature 1..1503: note = Description of Artificial Sequence: Synthetic coding sequence
  source 1..1503: mol_type = other DNA
atgatgaagatgctgctggaccccatgggcggcatcgtgatgaccaacgacggtaacgctatcctgcgcgagatccaagtgcagcaccctgcagccaaatcaatgatagaaatcagcaggacccaggatgaagaagtcggcgatggtactacttctgtcatcatcttggctggagagatgctaagtgttgccgagcattttctagagcagcagatgcacccgaccgtggtaattagcgcgtaccgcaaggctctggatgacatgattagtactctcaaaaagatttcaattcccgttgacataagtgatagcgatatgatgcttaatatcataaatagtagtatcaccacaaaggccatctcaaggtggagctccttggcctgtaacattgcactggatgccgtgaagatggtccagttcgaagaaaatggacggaaggaaattgacattaagaaatatgcccgggtggaaaagatccccgggggaattatcgaggactcctgtgtgcttcgcggcgtcatgattaataaagacgtcacacatccccgtatgaggcggtacattaagaaccccagaatagtccttctcgactcgtcgttggaatataaaaagggagagtcacagacagatattgaaatcacacgggaagaggactttaccagaattctccaaatggaagaagagtacatccagcaactctgtgaggatataattcaactcaagcctgacgttgtcatcactgaaaaaggaattagcgacctggctcagcattatctcatgcgggccaacattactgccattcggcgggtcaggaaaaccgataataatcggatcgcgagagcctgtggggcccgcattgttagccgccctgaggaactgcgggaagacgacgtggggaccggtgctgggctgctggagatcaaaaagattggggacgaatattttacgtttataactgattgtaaagatcctaaagcatgtacaatcctgttacgtggggcttctaaagaaatcctcagcgaggtcgaacggaacctgcaggacgccatgcaagtttgtcgaaacgtgctgctagatccacagctggtgcccggaggtggcgcttcagaaatggctgtagcgcacgctctgaccgaaaagtctaaagctatgacaggagtagaacagtggccctaccgagccgttgcacaggctttggaggtgatccccaggaccctgattcaaaattgcggtgcctctacaatccgtctgctcacttcattgagggcgaaacatacacaagagaactgcgaaacctggggggtaaatggggaaacagggaccctggtggatatgaaagaactcggcatctgggagcctttggcagtgaagctgcagacatataagactgcagtcgaaaccgccgttttgctcctgagaattgacgatatcgtctctggccataagaagaaaggggacgatcagagtcggcagggaggcgcccctgacgccggccaggagtag

SEQ ID NO: 182538 - DNA, 831 bp, synthetic construct
  misc_feature 1..831: note = Description of Artificial Sequence: Synthetic coding sequence
  source 1..831: mol_type = other DNA
atgtacgagggcgacctggagggccagagcatgaactggaccagcgaggaggggagaggcgacatcatccgttcgggaaccaacatcgatagagcttggcagtgccagaacacaaaaagagagagcgggagaaaggtgcagtccgggaacatcaacgcggcgaaaaccattgcagacatcatccggacatgtttgggtcccaaatcaatgatgaagatgcttcttgatccgatgggaggaattgtaatgacgaacgatggcaacgcgatcttaagggaaatccaggtacagcaccccgccgctaaaagtatgattgagatcagccgcacacaggacgaggaggtgggggatgggacaacttcggtcataattctggccggcgagatgctttcagtggctgagcacttcctggagcagcagatgcatcctaccgtagttatctccgcctacaggaaagccctcgacgacatgatttccacactgaagaaaatcagcatcccagtggatatcagtgactctgatatgatgctgaatattatcaattcttctattacaaccaaagcgatttctaggtggtcctccctggcctgtaatattgcgctcgatgctgtaaagatggtacagtttgaagaaaacgggcgcaaagagattgacattaagaaatacgctcgagttgaaaaaatcccgggcggcatcatagaagatagctgtgttttacggggcgtgatgatcaataaggacgttactcaccccagaatgcggagatacattaagaaccctcgtatcgtgttactggattcatccttagagtacaaaaagggtgaatcatag

SEQ ID NO: 182539 - DNA, 486 bp, synthetic construct
  misc_feature 1..486: note = Description of Artificial Sequence: Synthetic coding sequence
  source 1..486: mol_type = other DNA
atgatgggccaccggcccgtgctggtgctgagccagaacaccaagagggaatcaggtcggaaagtacaatctgggaacatcaatgcggcaaagacgatcgcagatattatcaggacctgtctggggccgaaaagcatgatgaagatgctcctggatcctatgggagggatagtcatgacaaatgacggtaatgccatcctgagggaaatccaggtgcagcaccctgccgccaagagtatgattgaaatctcccggacgcaggacgaggaggtgggtgatggcactacttccgtcattatcctggagtcccacagcgttacgatgttggagtgcggcggtgctatactcgctcattgcaacttgtgtttaccagccggcgaaatgttatctgttgcagaacattttctcgagcagcagatgcacccgactgtagtaatcagcgcataccggaaggctttagatgacatgatctccacactgaagtag

SEQ ID NO: 182540 - DNA, 567 bp, synthetic construct
  misc_feature 1..567: note = Description of Artificial Sequence: Synthetic coding sequence
  source 1..567: mol_type = other DNA
atgtacgagggcgacctggagggccagagcatgaactggaccagcgaggaaggtcgcggggatatcattcgctccggcaccaacattgacagagcctggcaatgccagaatacaaagagagagagcggaaggaaggtccagagtggcaatattaatgcagccaagatccaggtgcaacatccggctgcaaaatccatgatcgaaatatccagaacccaggacgaagaggttggagatggcaccacatcagtgatcatccttgctggagagatgttatccgtggcagagcattttctcgagcaacaaatgcaccccacggtagtaatctcagcctacagaaaggccctagatgatatgattagcacattaaagaagatctctattcctgtcgacatcagtgattccgatatgatgctgaacatcattaatagttccatcacaaccaaagccatttcacgatggagctctctagcttgtaacatcgccctggatgcagtgaagatggtccagttcgaggaaaatggaagaaaggaaatcgatattaaaaaatatgcgcgggtggaatag

SEQ ID NO: 182541 - DNA, 1503 bp, synthetic construct
  misc_feature 1..1503: note = Description of Artificial Sequence: Synthetic coding sequence
  source 1..1503: mol_type = other DNA
atgatgaagatgctgctggaccccatgggcggcatcgtgatgaccaatgacgggaacgccattcttagggaaatccaagtgcagcaccctgctgcaaagagcatgatcgaaatttctagaactcaggatgaagaggttggggatggcaccacctccgttatcatactggccggggaaatgctgtctgtcgctgagcattttctggaacagcaaatgcatcccaccgtggtcatcagcgcttaccgaaaggcactggatgatatgatctctaccctcaagaagatttctattcctgtggacatttctgactcagatatgatgctgaatattattaactcttcgattacaactaaagccatcagccggtggagcagtctggcatgtaatatcgccttggacgccgtgaaaatggtgcagttcgaagaaaatggcaggaaggaaattgacattaaaaagtatgcacgcgttgaaaagatccccggaggaattatcgaggatagttgtgtactcagaggggtcatgattaacaaagatgtgacccatccaaggatgagacgctatatcaagaatcctcgtattgtgcttctcgatagctcccttgagtataaaaaaggagagtcacagacagacattgagataacgagagaggaggactttacaaggatcctacagatggaagaggaatacatccaacagctatgtgaggacattatccagttgaaacccgacgtcgtgatcactgagaaagggatcagcgacctcgcacagcactacttaatgcgggccaatataacagcgattcgccgagtgcgcaaaaccgataataaccgaattgcccgggcctgtggtgcccgcatcgtgtccagacctgaggagctgagagaggatgacgtgggaactggcgctggtcttctggaaataaaaaagattggcgatgagtactttacattcatcaccgactgcaaggaccccaaagcctgtactatcctacttagaggagctagcaaggaaattctgagcgaggtcgaacgaaatctgcaggacgctatgcaagtgtgcagaaacgtgctgctggacccgcagctggtgccaggcggcggtgcaagcgaaatggcagtcgcccacgctttgacagagaaaagtaaggcaatgactggcgttgagcagtggccttatcgcgcagtggcccaagccctggaggtgattccccggaccctcatccaaaattgtggcgcctcaaccatcaggcttttgacgtctctcagagccaaacatacacaggaaaattgtgaaacatggggagtcaacggagaaactgggactttagtcgatatgaaggaactgggcatctgggagcctctcgctgtaaagctccagacctataaaaccgcggtggaaaccgcagttttgctgttacgaattgacgatatagtgtcagggcataaaaaaaaaggagacgatcaatcgcgccagggcggcgctccagacgcgggccaggagtag

SEQ ID NO: 182542 - DNA, 1620 bp, synthetic construct
  misc_feature 1..1620: note = Description of Artificial Sequence: Synthetic coding sequence
  source 1..1620: mol_type = other DNA
atgcccgagaacgtggccccccggagcggcgccaccgccggcgccgccggcggcaggggcaagggcgcgtatcaggaccgagacaaacccgcacagattcgattctccaacatttcagccgccaaggccgtggctgacgctatccgaacttccttggggcccaagggaatggataaaatgattcaggatggcaagggcgacgtgacaattaccaatgacggcgcgaccatcctgaagcaaatgcaggtattgcaccctgccgcacgaatgctcgtggaactatcaaaggcacaagacattgaggcgggagatggcactacctctgtggtgattatcgcagggtccttgctggactcttgtaccaagctgttgcagaagggcatccatcccactatcatctcggagtcctttcaaaaagcactcgagaaaggtatcgagatactcaccgacatgtcccgtcctgtggaactcagcgatagagagaccctgctaaatagtgcaacaacgagcctcaattccaaggtggtgtctcagtacagctccttgctgagcccaatgagcgtaaatgcagtgatgaaggtgatcgaccccgccactgcgacttcagtagacctgcgggacatcaaaattgtaaagaaactcggcggcaccatagacgattgcgagttggtggaaggcctcgttctgacacagaaggtttccaactccggcattaccagggtcgagaaagcgaagatcgggctcatccagttttgcctgtccgcgcccaagaccgacatggacaatcaaatagttgtgagcgattatgcacaaatggatcgtgtacttagggaagagagagcatacatacttaatctggtgaagcagattaaaaaaacaggatgtaacgttctgcttatccaaaagtcaatactccgagacgcgctttctgacctggccctccacttcttgaataagatgaagatcatggtcatcaaggatattgagcgcgaggacatcgaattcatctgtaagaccatcggcacaaagccggtcgctcatatagaccagttcaccgcggatatgctggggagcgccgagctggccgaagaggtcaatcttaacggtagtggcaagctgctgaagataactggttgcgctagcccaggaaaaacggtgactatcgtggtgaggggcagcaataagctggtgattgaggaggcggagaggtccattcatgatgcactctgtgtgattcgatgtctggttaagaagagggccttaatcgcgggggggggcgcgcctgaaatcgagctcgcccttcgcctgactgagtactctagaacattgtccgggatggagagctactgcgtccgcgcctttgccgatgcaatggaagttattccttcgaccttggcagagaacgcggggctgaacccgatttctaccgtcactgaattacgcaatcgccatgcccaaggagaaaagactgcagggatcaacgttcgcaaggggggcattagtaatattctggaagagctggtggttcagccactgctggtgagcgtaagcgccctgacactcgccactgagacagtgaggagcatcctgaagattgatgatgtggtgaacactaggtag

SEQ ID NO: 182543 - DNA, 1452 bp, synthetic construct
  misc_feature 1..1452: note = Description of Artificial Sequence: Synthetic coding sequence
  source 1..1452: mol_type = other DNA
atggacaagatgatccaggacggcaagggcgacgtgaccatcaccaatgatggcgcaacaattctgaaacagatgcaggttctccacccagcagcacgcatgctagtagaactgtccaaggctcaggatattgaggctggggacggcaccacctctgttgtgattatcgctggatctttgcttgacagctgcaccaaactgttgcaaaagggaattcaccctactatcatcagcgaaagctttcagaaggcattggaaaaagggattgagatcctcacggacatgagcaggcctgtcgaactgagtgatagagaaaccctcctgaactccgcgacgacatccctcaattctaaggtcgtgagccaatacagcagcctcctgtcccctatgtcggttaacgcagtgatgaaagtcatcgaccccgctaccgcgacatcggtagaccttagggatatcaagatcgttaagaaactgggggggacaatcgatgactgcgagctcgtggaggggcttgtcctgacccagaaagtgagcaattctggcatcacacgggtggagaaggcaaagataggattgattcagttctgcctatccgccccaaagacggacatggacaaccagattgtggtaagtgactatgcccagatggaccgggtactgcgggaagagagagcctatatcttgaacctggtcaagcagatcaagaaaaccgggtgtaacgtgctcctgatccagaagtctattcttagggatgccttgtcagatttagctctccatttcttgaataaaatgaaaattatggtgataaaggatattgagagagaagacatcgaatttatctgcaagacaattgggactaagcccgtagcccacatcgaccaatttactgccgatatgcttggctcggctgaacttgcagaagaggtcaacctgaatggctccgggaaactgcttaagataaccgggtgtgcatccccagggaagacggtgaccattgtggtgcgcggatctaataagctcgtaattgaagaggccgaacggagtatccacgacgcactctgtgtgatcagatgcctggtgaagaagagagctctcatcgccgggggcggagcacctgaaatcgaactggctctgcgtctcacagagtacagtcgtaccttgtccgggatggaatcctattgcgtccgggcttttgcggatgccatggaagtgatccccagcacattggcggagaacgcagggctgaatcctatttccacagtcaccgaactgagaaatcgccacgcccaaggcgagaaaaccgccggcataaacgtgagaaagggaggcatctcaaacatcctggaagaattggtggtgcagcccttacttgttagtgtgtcagccctcaccctcgcgacagagaccgtgcggtctattcttaagattgacgacgttgtgaacaccagatag

SEQ ID NO: 182544 - DNA, 1530 bp, synthetic construct
  misc_feature 1..1530: note = Description of Artificial Sequence: Synthetic coding sequence
  source 1..1530: mol_type = other DNA
atgcccgagaacgtggccccccggagcggcgccaccgccggcgccgctggcgggaggggtaagggcgcctatcaggatagggacaaaccagcccagattcgatttagcaatatctccgccgcaaaggcagtcgcggatgccattcggacctctctcggcccgaagggcatggacaaaatgttagtcgagctgagcaaggcccaggatattgaagctggggacgggacaacttccgtagtaataatagccgggtctctcttggacagttgtacaaagttattgcagaagggtatccacccaacaattatctctgagagctttcaaaaagctctggagaaaggtatcgagatactgacggatatgtcgaggcctgtggagttgtccgatcgtgaaaccctcctcaattctgctaccacctcactgaatagcaaggtggtcagccaatactcgtctctgctcagtccaatgagcgttaacgccgtgatgaaggtgatcgaccccgccaccgccacaagcgtagatttgagggatatcaagattgtcaagaagctgggcggaacaatcgacgactgcgaactggttgaaggcttggtgctgacacagaaggttagtaattcaggaatcacccgagtggaaaaagctaagattgggctgatccagttctgcttaagcgcacccaaaaccgacatggacaaccagattgtggtgtctgattatgcacagatggatcgggtgctcagggaggagcgtgcgtacattctgaatctggtcaagcaaataaagaagaccgggtgtaatgtgctactcatccaaaaatccattctgcgggatgccctatctgacctggccctgcattttttgaacaagatgaaaattatggtgataaaggatatcgaaagagaggacatagagtttatatgtaaaaccatcgggactaagcctgttgctcacatagatcagtttactgccgatatgctcggctcagctgaactggccgaggaagtgaacttaaacgggagcggaaaattgctcaagataacagggtgcgcttcacctggaaagacggtgaccatcgtagtgaggggatctaataaactagtaatcgaagaggccgagcggagtatacacgacgcactgtgcgtgattcggtgcttggtgaagaaacgggcgttgattgccgggggaggcgcacccgaaatcgagctggctctgagactgaccgagtattctcgcactctttctggcatggaatcttattgcgtgcgggcttttgcagatgccatggaggtcatcccttcaacattggcagagaacgccggcttgaaccctatctccactgtgactgaattacgtaatcgccatgcacagggcgagaaaactgccggcataaatgttcgtaaaggtggaatcagtaatatactggaggagcttgtggtccagccgctgctggtgtcagtatccgcgctgacactcgctaccgaaaccgttcgttccatcctgaagatcgacgacgtcgtgaacacgagatag

SEQ ID NO: 182545 - DNA, 1170 bp, synthetic construct
  misc_feature 1..1170: note = Description of Artificial Sequence: Synthetic coding sequence
  source 1..1170: mol_type = other DNA
atgagccggcccgtggagctgagcgaccgggagaccctgctgaacagtgctaccacaagtcttaatagcaaagtggtgagccagtattcaagcctgctctcccccatgtctgtcaatgccgtaatgaaagtgatagaccccgccacggcaacgtcggtggatcttcgggatatcaagatcgtaaagaagctaggaggaacaatcgatgactgcgagctggtcgagggtcttgtgttgacccaaaaagtgtctaactcaggtataacacgcgtggaaaaagcaaagataggactgatccagttctgtctttcagcacccaagactgatatggacaaccagatcgtggtctctgattatgcacagatggaccgggtgcttagagaggaaagagcatatatactgaatttggtgaaacagataaaaaagactggatgcaacgtcctgctcatccaaaagtccattttacgagacgcattatctgacttggccctgcattttctcaataagatgaaaataatggtgatcaaggatatcgagagggaggacattgagttcatctgtaagacaatagggacaaagcctgttgcccatatcgatcagtttaccgcagatatgttgggctctgcagagctggctgaagaagttaacttgaatggctcagggaagcttctgaagattaccgggtgcgcctccccagggaaaaccgtgacgatcgttgtgaggggatcaaacaaactggtgatcgaggaagccgagcggtcaattcatgatgctttgtgtgttattcgatgcttagtcaaaaaacgcgcacttatagccggaggcggggcgccagaaatagaacttgctttgcgactgacagaatacagccgaactcttagtggcatggagtcgtattgcgtgcgagcattcgcagatgcaatggaggtgatacctagcactctcgccgagaatgccggcctgaacccaatcagtacggtgaccgaactgcgcaaccgccacgcccagggcgagaagacagctgggatcaatgtcaggaaaggcggcatatctaacattttggaagagttggtggtccagcccctgctcgtgtcagtctcagcacttactctggcgactgaaaccgtcaggtcaatccttaagattgatgacgtagtgaacactcgttag

SEQ ID NO: 182546 - DNA, 1626 bp, synthetic construct
  misc_feature 1..1626: note = Description of Artificial Sequence: Synthetic coding sequence
  source 1..1626: mol_type = other DNA
atggccagcatgggcaccctggccttcgacgagtacggccggccctttctcattattaaggatcaggacagaaagtccaggctaatgggactagaggcccttaagtctcacatcatggccgcgaaagctgtggctaacacaatgcgaactagcctcggaccaaatggtcttgacaaaatgatggtcgacaaggatggagacgtcactgtgactaatgatggggcgaccatattgagcatgatggacgttgatcaccagatcgctaaacttatggtcgaactgtccaaaagccaggacgacgaaatcggggacgggaccacaggagtagtggttttggctggcgctctgctggaagaggcagaacagttactcgaccgggggattcatccgatacgcatcgcggacgggtacgaacaggccgctagggtcgccattgagcacctcgacaaaatcagcgattctgttctggtggatattaaggacaccgagcctctcatccagaccgcaaaaactacactgggctccaaggttgtgaactcttgccaccgtcagatggcagagattgccgttaacgctgtgttaaccgtggctgacatggaaaggcgagacgttgattttgaactgatcaaggttgaagggaaggtgggcggtagactggaggacaccaagctcattaagggagtgatcgtggataaagatttcagtcatccccagatgccaaagaaagtagaggacgcaaagatcgccattctaacttgccccttcgaaccccctaagccgaagacaaaacataagttagatgtcacgtccgtcgaagactacaaagctttgcagaaatatgagaaggaaaagttcgaagaaatgatccagcaaataaaggaaactggcgctaatttggcaatttgccagtggggttttgatgacgaagcaaaccatctgctcctacaaaacaatctaccagccgtcagatgggtaggcggtccagagatcgaacttattgccatcgccacaggagggaggatcgtgcccagatttagcgagctgaccgccgaaaaattgggctttgccggcctggtgcaagaaatcagctttggaaccacaaaggacaaaatgctcgttattgagcagtgtaagaactcacgcgcagtcaccatctttattcgaggaggcaacaagatgattattgaagaggccaaacggtcgctccatgacgctttatgcgtgataagaaatctcatacgtgataatcgcgtggtttatggcggaggagcagcagaaattagctgcgccctggcggtcagccaggaggcggacaaatgtcccactttagagcagtatgcgatgcgtgctttcgctgatgccctcgaggtgatccctatggccctcagcgagaatagtgggatgaatcccattcagactatgaccgaggtgcgggcccgtcaggtgaaggagatgaacccagctctgggcattgattgtctccacaagggaaccaacgatatgaagcagcagcatgtcattgagactttaatcggtaagaagcaacagatctcccttgccacacagatggtccggatgatcttgaagatagatgacatccggaagccaggtgagagcgaagagtag

SEQ ID NO: 182547 - DNA, 1545 bp, synthetic construct
  misc_feature 1..1545: note = Description of Artificial Sequence: Synthetic coding sequence
  source 1..1545: mol_type = other DNA
atggccagcatgggcaccctggccttcgacgagtacggccggccctttcttataattaaggaccaggaccgtaaatctcgcctgatggggctcgaggctttaaaaagccacattatggcggcaaaagctgtagctaacactatgagaacctccctgggaccaaatggcctggataagatgatggtagataaagacggcgacgtaaccgttaccaatgacgagatcggtgacggaacgactggtgtggtggtgttagcaggggccctacttgaagaggccgaacagttgctggatcgcggtatccacccaattcgaatcgcagatggctatgagcaggcagcaagagtggctatagaacacttagataagattagtgatagtgtcctcgtggatatcaaggatactgagccgctgatacagacagccaaaacaacgctcggctccaaagtagtcaattcatgccacagacagatggccgaaatcgccgtcaatgcagttttgacagtcgcagatatggaaagacgagacgtcgacttcgaactgattaaggtagagggtaaggtcggaggccgcctggaggatactaagttaataaagggggttatcgttgataaagatttctctcaccctcaaatgcctaaaaaggttgaggacgctaaaattgcgatattgacttgccccttcgaaccccccaaaccgaagaccaaacacaagctggatgttacaagcgtggaggactacaaagccctgcagaagtacgaaaaagagaaattcgaggagatgattcagcagattaaggagacaggggcaaacttagccatttgtcagtggggcttcgacgacgaggcaaaccatctgctcttacagaacaatcttccagccgtgcgttgggttggtggacccgagattgagctgatcgccatcgccaccggtggcaggattgtgcctagatttagcgagctcaccgccgagaaactggggttcgccgggctcgttcaggaaattagctttggtactacaaaagacaagatgctggttatagaacagtgcaagaattcccgcgccgtcaccatttttatccgggggggaaacaagatgattatcgaggaggcaaagagatcccttcatgatgccctctgcgtaatacgtaacttgatacgagataatagagtggtttatggggggggggccgcagaaatcagttgtgcgctcgctgtgagccaggaagctgacaaatgcccaacccttgaacagtatgccatgagagctttcgctgatgcactcgaggtaatcccaatggctctgtcagagaattccggcatgaatcccatacagacaatgacggaggttagagctcggcaagtgaaagagatgaatccggccctgggaatagattgcctgcataaaggcaccaacgatatgaaacagcagcacgtcatagagactctgattggcaagaagcagcagatctctctggctacacagatggtgcgcatgatacttaagatcgatgacatccggaagcctggagagtctgaggaatag

SEQ ID NO: 182548 - DNA, 1563 bp, synthetic construct
  misc_feature 1..1563: note = Description of Artificial Sequence: Synthetic coding sequence
  source 1..1563: mol_type = other DNA
atgaacagcagcctgggccccaccatcgagaagctgagcgtgagccacatcatggcagccaaagccgtggcaaataccatgcgtacaagcctgggcccaaacggcctggacaagatgatggtggacaaagatggggacgtgacagtaaccaatgacggcgccacaattctgtcgatgatggatgtcgatcaccaaatcgcaaagcttatggtggagctttcaaagtcccaagatgatgagattggagacggtacaacaggggtggttgtactggccggcgccctgctagaggaggccgagcagctcttggacagaggtatccaccctatcaggatagctgacgggtacgaacaggccgcccgagtggcaatcgagcatttagacaagatctctgactctgtgttagtcgatatcaaggacaccgaacccctaattcagactgccaaaactacgctaggcagcaaggtcgtaaacagttgccacaggcaaatggccgagattgccgtgaatgctgtcctgacggtggctgacatggagagaagggacgttgactttgaactcatcaaagttgaaggcaaggtcggcggccgcctggaggacactaagcttattaaaggcgtaattgtcgataaagatttcagccacccacagatgccgaagaaggtggaggacgccaagatcgcaatcctaacgtgcccctttgagccaccaaaaccaaaaactaagcacaaactggacgtgacctcagtggaagactacaaagcattacagaaatacgagaaggagaaattcgaggagatgatacagcaaattaaagaaaccggcgctaatttagcaatctgtcagtggggttttgacgacgaagctaaccacctacttctccagaataatctgccagctgtcaggtgggttggcggccccgagatcgaacttattgccatcgccacaggaggccggatcgttcccagattcagtgagcttactgctgaaaaactgggatttgcgggtctggttcaagagatttcctttggtacgactaaggataaaatgcttgtcatcgaacagtgcaaaaactcccgggccgtaacgatctttattcgaggagggaacaagatgatcatcgaggaagcaaagcgatccctccatgatgccctctgcgtgatccggaacctcatcagggacaatagggtggtgtacggtggaggcgcagccgagatttcgtgcgccctagctgtgagtcaggaggctgacaagtgccccaccctcgagcagtatgcaatgcgcgcctttgccgatgcactcgaagtcatccccatggccctcagcgagaactccggcatgaatccaatccaaacaatgactgaagtgcgggccagacaagtgaaggagatgaatcctgccctcggaatcgactgcctccacaaaggtactaatgacatgaaacagcagcacgtcatcgaaactctgatcggaaaaaagcagcagattagtttggctacacagatggttaggatgattctaaaaatcgatgacattcgcaagcctggagaaagcgaggagtag

SEQ ID NO: 182549 - DNA, 1347 bp, synthetic construct
  misc_feature 1..1347: note = Description of Artificial Sequence: Synthetic coding sequence
  source 1..1347: mol_type = other DNA
atggccgccaaggccgtggccaacaccatgcggaccagcctgggccccaatgtgcttgccggagccctccttgaagaggccgaacagcttctagaccgggggattcaccccattcgcatcgccgacggatacgagcaggcggcccgagtggctattgagcacctcgacaagatttccgacagcgtcctggttgatatcaaggacacggagcctctgatccagacggccaaaacgaccctaggaagtaaagtcgttaactcttgccaccgccaaatggcagagattgccgtgaatgctgtcctgactgttgctgacatggagcgtagggacgtcgattttgagctgattaaggtcgagggcaaggtgggcggccgcctggaggacactaaacttatcaaaggagtcattgtggacaaagatttctcacaccctcaaatgccaaaaaaggtggaggacgccaagatcgccattctcacgtgtccgttcgaacccccaaaaccgaaaacaaagcacaaactggatgtgaccagcgtggaagactataaggccctccagaagtatgagaaagagaagttcgaggagatgatacagcaaattaaagaaacaggcgcgaacctggccatttgtcaatggggcttcgacgatgaagccaatcacctgctcctgcagaataatctccctgcagtgcgctgggtgggaggcccagagatcgaactaatcgcgattgccactggcggccgaattgtcccaagattttccgagcttacagctgagaaactgggctttgccgggttggtccaggagatctccttcggtacgacgaaggataagatgctggtgatcgaacagtgtaagaacagcagggccgtgacgatctttatcagaggaggtaacaagatgatcatcgaagaagcgaaaagatcactgcacgacgctctgtgcgtgattcggaatttaattcgagacaatcgggttgtctacggcggcggggctgcggagattagctgtgccctggcagtttcacaagaggcggacaagtgtcctaccctggaacagtacgcgatgagggcttttgctgatgcgctggaggttattcccatggccctttcagaaaacagcgggatgaacccaatacagacaatgacagaggttcgagcaagacaggtgaaggagatgaatccggccctgggcatcgattgcttgcacaagggaacaaatgacatgaagcagcaacacgtgatcgaaaccttgatcgggaagaagcagcagatcagcttagcaactcagatggttcggatgatactgaaaatagacgacattcgaaagccaggggagtcggaggaatag

SEQ ID NO: 182550 - DNA, 1461 bp, synthetic construct
  misc_feature 1..1461: note = Description of Artificial Sequence: Synthetic coding sequence
  source 1..1461: mol_type = other DNA
atggccagcatgggcaccctggccttcgacgagtacggccggcccttccttattataaaggatcaggaccgtaaaagtcgcctgatgggcctagaggctcttaagtcccacataatggcagctaaggcagtagctaacacgatgagaacgtcactcgggcctaacgttcttgccggggcactcctcgaggaggcagagcagctgctcgacagggggatacaccctatcaggatagccgacggctatgagcaggcagccagagtggccattgaacaccttgacaagatctccgactcagtgctggtggacataaaagacacagagccattgatccagacggcgaaaacaaccttgggaagcaaggtagttaactcttgtcaccggcagatggccgaaattgcagtgaacgccgtactgacagtggccgatatggagcgtagagatgtcgacttcgagctcattaaagtggaaggcaaggtgggcggcaggctcgaagacaccaaactgatcaagggggtgattgttgataaggatttttcccatccacagatgccaaagaaggtcgaagacgctaagatagcaattctgacctgtccttttgagcctccgaagccaaaaaccaagcataagcttgatgtgaccagtgtggaagattacaaggcactgcagaagtatgaaaaggaaaaattcgaggaaatgatccagcaaattaaggagactggagctaatctggcgatatgtcagtgggggttcgatgacgaggccaaccacttgctgttacagaataatctccctgccgtcaggtgggtgggcgggcctgagatcgaattgatcgccatcgccaccgggggcaggattgtgccaaggttctcagaattgactgccgagaagcttggtttcgcaggcctcgtgcaggagatcagtttcggcacaacgaaggataagatgctcgtaattgagcagtgcaaaaactcaagggctgtaacgatttttatccgcggaggaaataagatgatcatcgaggaggctaaaagatctctgcacgatgcactctgtgttatccgcaatctcattcgcgacaacagggtggtttacgggggcggcgcagccgagatttcctgcgcattagccgtatcacaggaggccgacaaatgcccaacgctggagcagtatgccatgcgggcatttgccgatgcactcgaggttattcccatggccctgagcgagaactctggcatgaatccaattcagacgatgaccgaggtccgggccaggcaagtgaaagaaatgaatcccgcacttggaattgattgcctgcacaagggcacgaacgacatgaagcaacagcatgttattgagacgctcatagggaaaaagcagcagatttcgttggccacccagatggttcgcatgatcctgaagatcgatgatattagaaagcccggagagtcggaggaatag

SEQ ID NO: 182551 - DNA, 1512 bp, synthetic construct
  misc_feature 1..1512: note = Description of Artificial Sequence: Synthetic coding sequence
  source 1..1512: mol_type = other DNA
atggccgccaaggccgtggccaacaccatgcggaccagcctgggcccgaatggtttggataaaatgatggtagataaggacggcgatgtcaccgtgactaatgacggcgcgacgatactgagcatgatggacgttgatcaccagatagccaagcttatggtggaacttagtaaaagtcaggatgacgagattggagacggcaccactggcgttgtggtattggctggtgcactgttggaagaagccgaacagctcctagatcgggggatccatccgatcaggatcgcggacggatacgagcaggccgcgcgagtcgccattgaacaccttgataaaatatccgactccgtactcgtggatataaaggataccgaacccctgattcagaccgccaaaaccaccctaggcagcaaggtcgtcaattcctgccaccgtcagatggcagagatcgccgtgaacgccgtgctcacagtggctgatatggagaggcgggacgtcgattttgaactcattaaagtcgagggtaaggtgggtggcagactagaggacactaaactcataaaaggagtaatcgtagataaagattttagccacccccagatgcccaaaaaagtcgaggatgccaaaattgccatactcacttgtccattcgagccccctaagcccaagacaaagcataaactggacgtgactagcgtggaagattataaagcattgcagaaatacgagaaagaaaagttcgaagaaatgattcaacagatcaaggagacaggggctaatctggccatctgccagtggggtttcgacgatgaggccaaccatctgctcctccaaaacaacctgcccgccgttagatgggtcggaggcccagaaatcgaattaatcgcaatagctaccggaggaaggattgtgccccggtttagtgagctgacagccgagaaactaggattcgcaggcctcgtgcaagagatcagcttcgggaccacaaaggataagatgttggtgatagaacagtgcaaaaatagtcgcgcagtaacaattttcatacgcggaggaaacaaaatgatcattgaagaagccaaaaggtctcttcacgatgctctgtgcgtgattcgcaatctgatccgcgataacagggtcgtatacggcggaggtgctgcagaaatcagctgtgctttagctgtgtcacaggaggcagataaatgccctacactcgaacagtacgccatgagggcctttgctgatgccttggaggtaatccccatggccctctctgagaactctggcatgaatccaatccagacgatgaccgaggttcgtgccaggcaagttaaggagatgaatcctgcactggggatcgactgcttacacaaagggacaaatgacatgaagcagcagcacgtaatagaaaccttaataggaaaaaaacagcagatctcgctcgcgacgcagatggtccgaatgatattgaaaatagatgatatcagaaagccaggggagagcgaagaatag

SEQ ID NO: 182552 - DNA, 1593 bp, synthetic construct
  misc_feature 1..1593: note = Description of Artificial Sequence: Synthetic coding sequence
  source 1..1593: mol_type = other DNA
atggccgccatcaaggccgtgaacagcaaggccgaggtggcccgggcacgggctgctctggcggtgaacatctgcgccgcgcggggactgcaggatgttctgagaaccaatctaggtccaaaaggaaccatgaagatgctggtcagcggcgctggagacatcaagctcacaaaagacggcaacgttctgctggatgagatgcagattcaacatccgacggcatcccttattgccaaagtggcaactgcccaagatgacgtcaccggcgacgggacgaccagtaatgtgctgattataggagaattactgaagcaggccgacctgtatatttcagaaggcctacaccctagaattatcgcagagggcttcgaggccgccaagataaaggcccttgaggtccttgaggaagttaaagtgacaaaggagatgaaaagaaagatccttctcgacgtagcaaggacctccctgcagaccaaagtgcatgctgagttggctgatgtcctgaccgaggtcgtggtggatagcgttctcgccgtgagacgccctgggtaccctattgacttattcatggttgaaattatggaaatgaaacacaagctcggtaccgataccaagctgatccaagggcttgtactggatcatggcgcccggcacccagacatgaagaaaagggtggaagacgcatttatactgatttgtaacgtctctctggaatacgagaagaccgaggtgaattcaggcttcttctacaagactgccgaagaaaaggaaaaacttgtgaaggccgaacggaagtttatcgaggacagagtccagaaaattatcgatctgaaggacaaggtatgcgcgcagagtaataagggtttcgttgtgatcaatcagaaaggcatcgacccctttagcctggactctcttgcaaaacacggcatcgtcgcactcagacgagccaagcgacgtaacatggagcggttatccctggcatgcggcgggatggccgtaaacagctttgaagatcttaccgtcgactgcctgggccacgctgggctggtctacgaatacaccctcggcgaggagaagttcaccttcatcgaagagtgcgtgaacccttgctccgtgactctgcttgtgaagggacccaacaagcacacgctcacgcaggtgaaagacgccatccgggacggtctgcgagcaataaaaaatgcaatcgaggacggctgcatggtacccggcgccggtgctattgaagtggcaatggccgaggcactggtcacatataagaattcaataaagggacgcgcacggctcggcgtgcaggccttcgctgacgccctgctgataattcccaaggttctggcccaaaacgcagggtatgacccacaggaaaccttggtgaaggtacaagcagagcacgtcgaatcaaagcagctagtgggagtggacctgaatacaggagagcctatggtggcggctgacgctggcgtgtgggacaactattgcgtgaaaaaacagttactccactcctgtacagtgatagcgaccaatattctgctggtggacgaaatcatgagggctggaatgtcctccctgaagtag

SEQ ID NO: 182553 - DNA, 1482 bp, synthetic construct
  misc_feature 1..1482: note = Description of Artificial Sequence: Synthetic coding sequence
  source 1..1482: mol_type = other DNA
atggccgccatcaaggccgtgaacagcaaggccgaggtggcccgggcacgagccgctctggccgtgaacatttgcgcggctcggggtttgcaagacgtgttacgaacaaatctcggaccaaaaggcaccatgaagatgctcgtctccggcgcaggcgatatcaagctgaccaaggacggtaacgtgcttctcgatgaaatgcagattcagcatcccacggcctcactgattgcgaaggtggctacggcacaggacgacgttaccggcgatggcaccactagcaacgttcttataattggagagctccttaagcaggccgatctgtacatttccgagggactgcatcctagaatcatagccgagggcttcgaggcagccaaaatcaaggcattagaggttttggaggaagtgaaggtcaccaaagagatgaagcgcaaaatcctgctggatgtggcccgaacaagcctccagactaaagtgcacgccgagctggccgacgtcttgaccgaggtggtggtggattctgtactagcagtccgtaggcccggatacccaatagatctcttcatggtagagatcatggagatgaaacacaagctggggacagatactaaagaggtgaatagcggctttttctacaagaccgccgaggaaaaggagaagctggtcaaggcagagagaaaattcatcgaggatcgagtgcagaagattatcgatctgaaagacaaggtgtgtgcccagtcaaacaaaggctttgtggtaattaatcagaagggtatcgatccctttagtctcgactccctggcaaagcacggaatcgtcgccctgcggcgggcaaagcgccgcaacatggagcggctcagccttgcctgtggaggaatggccgttaactcatttgaagacctgacagtggactgcctggggcatgctggtcttgtgtatgagtataccctgggggaagagaaatttaccttcatcgaggaatgtgtgaacccctgtagcgtgactctgttagtcaaaggtccaaataagcacacactaactcaagtaaaggacgctattcgagacggactccgagccataaaaaatgccattgaggatggttgcatggtgcccggcgccggtgctattgaggtggctatggctgaggcccttgtgacctataagaactcaattaagggcagagcacgcctgggtgtgcaagcattcgctgatgctctccttatcattcccaaagtactggcgcagaacgccggatatgatccacaggaaacactcgtaaaagtccaggctgaacacgtcgagtccaagcaattggtaggcgtcgacctgaacaccggggagccgatggtggctgccgatgccggagtatgggataactattgtgtgaaaaaacaactactccactcttgtaccgtgatcgccacaaacatcctcctggtggatgagataatgcgggccggaatgagctctctgaagtag

SEQ ID NO: 182554 - DNA, 1458 bp, synthetic construct
  misc_feature 1..1458: note = Description of Artificial Sequence: Synthetic coding sequence
  source 1..1458: mol_type = other DNA
atggccgccatcaaggccgtgaacagcaaggccgaggtggcccgggcaagggcggcactggccgtgaacatttgcgcggctcggggcctccaggatgttctgcgcacaaatctgggaccgaagggcactatgaaaatgctggtctctggtgcaggcgatattaaactaacaaaggacggaaatgtgctgctggacgagatgggcttacacccaagaatcatcgctgagggatttgaggctgctaaaatcaaagcgctggaggtcctagaagaggtgaaagtgacaaaagagatgaaacgcaaaattctactggacgtcgcccgcacatctcttcagaccaaggtacacgccgagttggccgatgtgctgaccgaggtggtggtggatagtgtcctggcagtgagacgccctggatatcccatcgaccttttcatggttgagattatggagatgaagcacaagctcggaactgacaccaaacttattcaaggactggttctggaccacggcgctcgccacccagatatgaaaaagcgcgttgaagatgcctttatactgatctgcaatgtgagcttggagtacgagaaaaccgaagtcaacagcggatttttctataagacggcagaagagaaggaaaaactcgtcaaggccgagagaaaatttatcgaagatagagtgcagaagatcatcgatctgaaggataaagtctgcgcccagtccaacaagggattcgtagtaataaaccagaagggcatcgatcctttcagcctagattcacttgcaaaacatggcattgtggcactgcggagggcaaagcgacgcaatatggagcgtctcagtctggcatgtggcgggatggccgtcaattcctttgaggacttaaccgtggattgcctgggccacgccggattagtgtatgaatatacacttggggaggaaaaattcacctttattgaggagtgtgtaaacccctgttccgtgacccttctggtgaaaggtccgaacaaacatacactgacacaggtgaaagatgccattcgcgatggcctaagggctataaaaaacgcgatcgaggatgggtgtatggtgcccggtgcaggtgccatcgaagtagccatggccgaggccctcgtgacgtacaagaactccatcaaaggccgcgctaggctcggcgtccaggcatttgccgatgctcttctcatcataccaaaggtactggcccagaatgccgggtacgacccccaagagacactagtcaaagtccaggctgagcatgttgaatctaagcaactcgtcggcgtcgatcttaacacaggtgaacccatggtggcagccgacgctggagtatgggataactactgcgtcaagaaacagctgctgcactcatgtaccgtgatagccacaaatatcctgcttgtagacgagatcatgcgagcaggaatgagctcgttgaagtag

SEQ ID NO: 182555 - DNA, 966 bp, synthetic construct
  misc_feature 1..966: note = Description of Artificial Sequence: Synthetic coding sequence
  source 1..966: mol_type = other DNA
atgaagcccggcttcagcccccggggcggcggcttcggcggccggggaggctttggcgaccggggagggagagggggccggggggggtttggaggggggcgcggcagaggcggcggtttccgtgggcggggcagaggtggcggaggaggcgggggcggcggtggaggcggaggccgaggcggcggtgggttccacagcggcgggaatcgcggccgcggccgtggcgggaaaagggggaatcagagcggcaagaacgtaatggtggaaccccaccggcacgagggagtgtttatctgtcgcggaaaggaggatgccctggtgaccaagaatcttgtcccaggcgagagcgtgtatggagaaaaaagggtgtccatctcggagggcgacgacaaaatcgaatatagagcatggaacccctttcgcagtaaacttgccgcagcaatcctcggtggggttgatcagatccacatcaaacctggcgccaaggtgttgtatctgggtgcagcatctgggacaacagtgtcgcacgtgtctgatatcgtagggcccgacggactggtgtacgccgtggagttttctcaccgatcaggccgggacctgattaacctggccaaaaagcggacaaatatcattcccgtcatcgaggatgcccgccatcctcacaagtacagaatgctcatcgccatggtggacgtgatattcgccgatgtcgcccagccagatcagaccaggattgtagctctgaatgcgcacacatttctgagaaatggcgggcacttcgtgatcagtatcaaggccaactgcattgactcgactgcctccgccgaagcggtgtttgccagcgaggtcaagaaaatgcagcaagaaaatatgaaaccacaagaacaattaacccttgagccttacgaacgggaccacgctgttgtggtgggcgtgtataggcccccacccaaggtcaagaattag

SEQ ID NO: 182556 - DNA, 723 bp, synthetic construct
  misc_feature 1..723: note = Description of Artificial Sequence: Synthetic coding sequence
  source 1..723: mol_type = other DNA
atggacgtgcacggcgaggccgccggcgaggccggccaggagggcggtgaaggactgcagggcggcgcggggcagtcggaggagggtccgagtgcggagaagtgcagagtctgcccctgcgtgtgccgggagaggcacccgcaggaggagcgccgatgtgagcttgcttcagacggggtgccgcgcagaagatccggcctgcaaggggcagactcctgtgattacgagggaggtgaccaagaatatggacccggcgatcagtccccgggacaggggcctgaacatcacggccccgcagaaggattactgagcgacggccaagtaagggcagccggagccgagccgggacgaccgtatatcggcgatgggggccttcatgagctcgggcatcaccctgaccatgccgccggcgccggggggcagcctcatcacgccgacaggcgcggcgagtggccaggtggtgccggccccgctcagcccgccgcgagggggcggctgtgcagaggacgcgagctctgtgcacagcctggaggccccgctgtgactgaagtggggcggttggaggagctggccgtccctaggcgatgtgccccgccactaccgcgggatgttctggaggggagctgccccctccctactgcatcctgcttgtgcgctgatccagccgggttacggccagcggccaccctgagattaagccctgcgcgcccagcctggccctag

SEQ ID NO: 182557 - DNA, 591 bp, synthetic construct
  misc_feature 1..591: note = Description of Artificial Sequence: Synthetic coding sequence
  source 1..591: mol_type = other DNA
atggacgacaccctgttccagctgaagttcaccgccaagcagctggagaaactggccaagaaagctgagaaggatagtaaagccgaacaggctaaggtgaaaaaagcacttctccagaagaatgttgagtgcgctcgcgtctacgcagagaatgcaataagaaagaagaatgaaggagtgaattggcttcgcatggcctctcgggtagatgccgtggccagcaaggtgcagacagctgtcaccatgaagggagtgacgaaaaacatggctcaggtgaccaaggctctggataaagctctgagcactatggatttgcagaaggtgtcctcagttatggatcggttcgaacagcaggttcagaatctcgacgtgcacacatctgttatggaggactccatgagcagcgcaacaacactcacaacaccacaggaacaggtcgattcactgataatgcaaattgccgaggagaacgggctggaggtgctcgatcaactcagtcaattacctgaaggcgcatctgccgtgggagagtctagtgtgcggtctcaggaagaccagctctctcggaggctggcagccctaagaaactag

SEQ ID NO: 182558 - DNA, 600 bp, synthetic construct
  misc_feature 1..600: note = Description of Artificial Sequence: Synthetic coding sequence
  source 1..600: mol_type = other DNA
atgagcaacatggagaagcacctgttcaacctgaagttcgccgccaaggagttgtctcgttctgcaaagaagtgcgacaaagaagagaaggctgagaaagcaaaaatcaaaaaagccatccagaaggggaacatggaggtggctcgcatccacgcagagaacgcgatcaggcaaaagaaccaagcggtgaactttcttcgtatgtctgcccgggtggacgccgtggcggccagagtccagactgctgtaacaatgggcaaagtgacaaaatccatggctggggtcgtaaaatcaatggatgctaccctgaagaccatgaacctagagaagatctctgccctgatggataagttcgaacaccagtttgaaactctcgacgtgcagactcagcagatggaggacaccatgtcatccactacaacactgactaccccacagaaccaggtcgatatgctgctccaggagatggccgatgaagccggcttagaccttaacatggaactcccgcagggccagacgggctccgtggggacctcagtggcaagcgctgaacaggatgagctgagtcaaaggctcgctcggctgcgggatcaggtttag

SEQ ID NO: 182559 - DNA, 669 bp, synthetic construct
  misc_feature 1..669: note = Description of Artificial Sequence: Synthetic coding sequence
  source 1..669: mol_type = other DNA
atggacctgctgttcggccggcggaagacccccgaggagctgctgcgtcagaatcaaagggccttgaatagggccatgagagaactagaccgagagagacaaaaactggagacccaagaaaaaaagattattgctgacatcaaaaagatggccaagcagggccagatggatgccgttcgaatcatggcgaaagatttggtcagaaccaggagatacgtcagaaagttcgtgctgatgcgcgcgaatatacaggctgtgtctctgaagatccaaacgctgaaatcaaataattccatggctcaggccatgaagggggtgaccaaggccatggggacaatgaatcgacagctcaaattgcctcagatccagaaaattatgatggaattcgagagacaggctgagatcatggacatgaaggaggaaatgatgaatgatgcgattgacgatgctatgggtgacgaagaagatgaagaggagtcagatgccgtggtttctcaggtactggatgagcttggtctgtcgttgaccgacgagttgtctaacctgcctagcaccggaggctcactctccgtcgctgctgggggcaagaaggccgaagctgcagctagtgctctggctgatgctgacgccgatctggaagaacggctgaaaaatctgaggagggactag

SEQ ID NO: 182560 - DNA, 669 bp, synthetic construct
  misc_feature 1..669: note = Description of Artificial Sequence: Synthetic coding sequence
  source 1..669: mol_type = other DNA
atggacctgctgttcggccggcggaagacccccgaggagctgctgagacaaaaccaacgcgcactgaatagggcaatgcgcgaactcgatagagaaagacagaaattggaaacccaggaaaagaagataattgcagatatcaagaaaatggctaagcagggacagatggatgccgtacgtattatggctaaggacctcgtgaggacaaggagatatgtgaggaagttcgtgctgatgcgcgccaacatccaggccgtgtccctgaagatccagacacttaagtcaaacaatagtatggcgcaggccatgaagggggtcaccaaagccatgggtaccatgaataggcaactcaagcttcctcagatccagaagatcatgatggagttcgagcgtcaggccgagataatggatatgaaggaggagatgatgaatgatgcaatcgacgatgctatgggtgacgaggaagacgaagaggagtcagacgctgtagtgtctcaggtattggatgaacttggactgtccctaaccgacgagctgtcaaatttgcccagtacaggggggagcctctcagtggctgcgggtgggaaaaaggcagaggctgctgcgagtgcattggccgatgctgatgccgacttggaagagcggcttaagaatctaaggagggactag

SEQ ID NO: 182561 - DNA, 642 bp, synthetic construct
  misc_feature 1..642: note = Description of Artificial Sequence: Synthetic coding sequence
  source 1..642: mol_type = other DNA
atggccagcctgttcaagaagaagaccgtggacgacgtgatcaaggagcaaaaccgcgaactacgcggcacacagcgcgccatcattcgagatagggctgctctcgagaagcaggagaaacagctagaactcgagataaaaaaaatggccaagatcgggaataaagaagcatgtaaagtgcttgccaaacaacttgtccacttgagaaagcagaaaactagaaccttcgccgtttctagtaaggtgacctccatgagcacacagactaaagtgatgaattcccaaatgaagatggccggcgcaatgtccactaccgccaaaactatgcaggctgtaaacaagaaaatggacccgcaaaagaccctgcagactatgcagaattttcagaaggagaatatgaaaatggagatgacagaggaaatgataaacgacacattggacgacatctttgacggctccgatgacgaggaggaaagtcaggacatagttaaccaggtgctcgacgagataggcatcgagatctctggaaagatggccaaggcaccaagcgcagctaggagcctgccctcagcatcgacctccaaagctaccatcagcgacgaggagattgagagacaactgaaggctctgggtgtggattag

SEQ ID NO: 182562 - DNA, 519 bp, synthetic construct
  misc_feature 1..519: note = Description of Artificial Sequence: Synthetic coding sequence
  source 1..519: mol_type = other DNA
atggagctggagatcaagaagatggccaagatcggcaacaaggaggcttgcaaagttctggctaaacagctcgtgcaccttaggaagcagaaaacaaggacttttgccgtctctagcaaagtcacgagcatgtctacacagactaaggtgatgaactctcaaatgaagatggccggcgcaatgtctaccaccgctaaaaccatgcaggccgtgaacaaaaagatggatcctcagaagacgcttcagaccatgcaaaactttcagaaagaaaatatgaagatggagatgaccgaggagatgatcaacgacaccctggacgacatttttgacggctccgacgacgaggaagagtctcaggatattgtgaatcaggtgctggacgagattggcatcgagatctctggtaaaatggctaaggcgcctagcgcagcccgcagcctgccttctgcaagcacatcaaaagctactatatcagacgaggagattgaaagacagctcaaggctttaggcgtggactag

SEQ ID NO: 182563 - DNA, 669 bp, synthetic construct
  misc_feature 1..669: note = Description of Artificial Sequence: Synthetic coding sequence
  source 1..669: mol_type = other DNA
atgggcctgttcggcaagacccaggagaagccccccaaggagctggtgaacgaatggagcttaaaaattcgcaaagagatgcgcgtcgtcgatcggcagataagggatatccagagagaagaggaaaaggtaaagcgcagcgtgaaagatgccgcaaaaaaggggcaaaaggacgtttgtattgtgttggcaaaagagatgatccgcagtcgaaaggcagtctccaagctgtatgcttctaaagcccatatgaactccgttctgatggggatgaaaaaccaactggccgtgttaagagtggccggttctctgcagaaatcaaccgaagtcatgaaggcgatgcaaagcctggtgaagattccggaaattcaggcaaccatgcgggaactctctaaagagatgatgaaggccgggatcattgaggaaatgctggaggatacctttgagagcatggatgatcaggaggaaatggaagaagaggccgagatggagatcgaccgcatcctgtttgaaatcacagccggcgcactgggaaaggccccgtccaaggtaaccgacgctttgccagagccagagcctccaggggctatggctgcctctgaagatgaggaggaggaagaggaagccctggaggcaatgcagtccaggctggcgactctacgatcttag

SEQ ID NO: 182564 - DNA, 471 bp, synthetic construct
  misc_feature 1..471: note = Description of Artificial Sequence: Synthetic coding sequence
  source 1..471: mol_type = other DNA
atgatccggagccggaaggccgtgagcaagctgtacgccagcaaggctcacatgaattctgtactgatgggcatgaagaaccagctggcggtgctgagggtggcaggctccctgcagaaaagtaccgaagtgatgaaggcaatgcagtcacttgtgaaaattccagaaatccaagccaccatgagggagctttccaaagagatgatgaaagcaggcatcattgaggagatgctggaggatacattcgaatctatggacgatcaggaagagatggaggaggaggccgaaatggagattgaccgtatcctcttcgaaattacagccggcgcattaggtaaggcaccatcgaaggtgacggacgccctgccagaacctgagcctcctggagccatggccgccagcgaggacgaggaagaggaggaagaggcccttgaagctatgcagtctcggttagccactctgaggagctag

SEQ ID NO: 182565 - DNA, 756 bp, synthetic construct
  misc_feature 1..756: note = Description of Artificial Sequence: Synthetic coding sequence
  source 1..756: mol_type = other DNA
atggagggcgagctgtacagcgccctgaaggaggaggaggccagcgaaagcgtgagctccactaacttctccggggagatgcacttctacgagctggttgaggacaccaaagacggtatctggctcgtacaggtgaacgagtggagtctaaaaattcgaaaagagatgcgtgtagttgaccgacagattagggatatacagcgagaagaggaaaaagtcaaaaggagcgtgaaggatgcggccaaaaagggacagaaggacgtgtgtattgtccttgccaaggagatgattaggtccaggaaagccgtaagcaaattatatgcctcaaaagctcatatgaactcggtgctgatgggcatgaaaaaccaattagccgttctgcgggtggctggttctctacagaaatcaactgaagtaatgaaggcgatgcagtcgctcgtaaaaattcctgagattcaggctactatgcgggagctgtcaaaggagatgatgaaggctggaataatcgaggagatgttggaggatactttcgagtctatggatgaccaggaggagatggaggaggaggccgaaatggagatcgatcggatccttttcgaaatcacagctggggcactgggcaaagcgcctagcaaagttacggatgcattgcctgagcccgaacctccaggagctatggccgcttcggaagatgaggaggaagaggaagaagcactggaagccatgcagtctcggctggcgactctgcgcagttag

SEQ ID NO: 182566 - DNA, 549 bp, synthetic construct
  misc_feature 1..549: note = Description of Artificial Sequence: Synthetic coding sequence
  source 1..549: mol_type = other DNA
atgggcctgttcggcaagacccaggagaagccccccaaggagctggttaacgaatggagtctgaagatccgaaaggagatgcgcgttgtggaccgacagattagagatattcaaagagaggaggaaaaagtcaagagatctgtgaaagatgccgcaaagaaaggccaaaaggatgtttgcatcgtgctggccaaagagatgatccggagcagaaaggcaatgcagtcactggtgaagattcccgagatccaggctactatgcgggagcttagcaaagagatgatgaaggcagggattatcgaagagatgctggaggacaccttcgagtctatggatgaccaggaggagatggaagaggaagccgagatggaaatcgataggatccttttcgagattacagctggtgctttagggaaggcgccctctaaagtcactgacgccctgcccgaaccagagcctccgggggccatggctgcgtcggaagacgaggaagaggaagaagaggctttggaagcgatgcaatcacggttggcaacccttcggtcttag

SEQ ID NO: 182567 - DNA, 798 bp, synthetic construct
  misc_feature 1..798: note = Description of Artificial Sequence: Synthetic coding sequence
  source 1..798: mol_type = other DNA
atgagccggcggcggcccgaggacggcctgggcaaggccggcccctgtgtcatgcgtcaccatcccccaaggagcaaggcagaggtctggcgtaccctgagagggggaggtgggagaggtgagttagctatgagcggacttggtcggcttttcggaaagggaaagaaggaaaagggaccgacccccgaggaagccatccagaaactgaaggagaccgaaaagattctaataaagaagcaggaatttctcgagcagaagatccagcaagagcttcagacagcgaaaaaatatgggactaagaacaagcgggcagccctgcaagccttgagacgcaagaaacggtttgagcagcagctcgcacagacggatgggactctgagcactctcgaattccaacgagaagctattgagaatgcgaccactaacgctgaagtgctccgcactatggaacttgccgcccaatccatgaagaaagcctaccaggatatggacattgataaggtggatgagctgatgacagacatcaccgagcagcaagaggtagcccagcagattagcgatgcgatctcccgacccatgggattcggggatgacgtggacgaggatgaactccttgaggagctggaagagctcgaacaggaagaactggcccaggagctgctgaacgtcggcgacaaggaagaggagccctccgtgaagctgccatctgtgccatccacccatctcccagccggcccagcccccaaagtcgacgaagacgaagaggctctgaagcagcttgccgagtgggtgtcgtag

SEQ ID NO: 182568 - DNA, 378 bp, synthetic construct
  misc_feature 1..378: note = Description of Artificial Sequence: Synthetic coding sequence
  source 1..378: mol_type = other DNA
atggccggccccagcctggcctgctgcctgctgggcctgctggccctcacttccgcttgctacatccaaaattgccctttaggtggcaaaagggccgcccctgacctggatgtcaggaaatgtttaccatgtgggccaggcggcaagggccggtgctttggtccaaatatctgctgcgccgaagagctgggatgcttcgtggggaccgcagaagcacttcggtgccaagaggagaactatctgccgtcaccttgccaaagcggacagaaagcctgtggaagcggtggtcgatgtgctgttctaggtctctgttgctccccagatggatgccatgccgaccctgcgtgcgatgcggaggccactttctctcagcggtag

SEQ ID NO: 182569 - DNA, 831 bp, synthetic construct
  misc_feature 1..831: note = Description of Artificial Sequence: Synthetic coding sequence
  source 1..831: mol_type = other DNA
atggcccccccccccgcccccctgctggccccccggcccggcgagacaaggccagggtgtcggaagcctggtaccgttagttttgcagacgtagctgtatacttcagcccagaagaatggggctgcttgcggcccgctcagcgggccctgtaccgcgatgtgatgcaggagacttacggacatcttggtgctttggggtttcccggccctaaacccgcactgatttcatggatggagcaggagagcgaagcatggtctcccgctgcacaggaccccgagaaaggcgaaagacttggtggcgccagaaggggggacgttcccaataggaaggaggaggaaccggaggaagttcctagagctaagggtccccgcaaggcaccggtgaaagaatcacccgaagtccttgtggagagaaatcccgacccagccatttctgtggcccctgcccgcgcccagcctccaaagaatgctgcctgggatccgaccactggtgctcagccacccgccccaatcccttcgatggacgcacaagctgggcagcggaggcacgtctgtactgattgcggtcggagattcacctacccaagcctgcttgtgagccatcggcgaatgcattcaggagaacggccttttccatgcccggagtgcgggatgagattcaagagaaagtttgccgtggaagcacaccaatggatacaccgctcatgcagcggcggccgaagagggcggcggccagggatccgcgcggtgcctcgggccccagtccgaggagaccgggaccctccagtgctattccgacactatcccgacattttcgaagagtgtggatag

SEQ ID NO: 182570 - DNA, 516 bp, synthetic construct
  misc_feature 1..516: note = Description of Artificial Sequence: Synthetic coding sequence
  source 1..516: mol_type = other DNA
atgaaccggctgttcggcaaggccaagcccaaggccccccccccctctttgacagactgtatcggaactgtggattctcgcgctgaaagcattgataagaaaatctctaggttagacgcagagcttgtcaaatacaaagaccagataaagaagatgagagagggcccagccaaaaatatggttaagcagaaggccctcagggtgctaaagcagaagcggatgtatgaacaacagcgcgataatcttgcgcaacaatccttcaacatggagcaggctaactacaccatccagagcctgaaagatacaaagactaccgtggacgccatgaaactcggtgtaaaagagatgaaaaaggcctataaacaagtgaagatagatcagattgaggatttgcaagatcagttggaagatatgatggaggacgctaacgaaatacaggaagcactctctagatcttacgggacccccgagcttgacgaagacgacctcgaagcaggatggtcctcgggaggctag

SEQ ID NO: 182571 - DNA, 606 bp, synthetic construct
  misc_feature 1..606: note = Description of Artificial Sequence: Synthetic coding sequence
  source 1..606: mol_type = other DNA
atgggcaacctgttcggccggaagaagcagagccgggtgaccgagcaggataaggccattctgcaattaaagcaacaacgcgataagctgagacagtaccagaaaagaatagctcaacagctggagcgggaacgggcactggctagacaacttctccgggacggaagaaaggagcgggctaaactattgttaaagaaaaagcgctaccaagagcagctcctggaccgtaccgaaaatcagatttcgagtttagaagctatggttcagtccatagagttcacccagatcgagatgaaggtcatggagggactccaatttgggaatgaatgcctgaataagatgcatcaggttatgagcatcgaggaggtcgagcgtatcttagacgagacccaggaggccgtagagtaccagagacagatagacgagcttttggccgggtctttcactcaggaggatgaggacgctatcctcgaggagctgtcagctattacccaggaacaaattgaacttccggaggtccccagcgagccactcccagagaagattcctgagaacgtacctgtcaaggcccgcccacgccaggctgagctggtggcggcttcctag

SEQ ID NO: 182572 - DNA, 1362 bp, synthetic construct
  misc_feature 1..1362: note = Description of Artificial Sequence: Synthetic coding sequence
  source 1..1362: mol_type = other DNA
atgtggagccccgagcgggaggccgaggcccccgccggcggcgacccggccggtttgttgccccccgagtgggaagaggacgaggagcgtatgtccttcctgttctcagctttcaaacggtcaagggaggtcaattctacggactgggactccaaaatggggttttgggcacctctcgtcttgtcgcactccagacgccaaggcgtggtgaggctgcgcctgagggacttacaggaagcattccagaggaagggttcagtgcctctgggacttgccaccgtgctgcaggaccttctccgacgcggggaactgcaaagagaatcagacttcatggccagcgtggactccagttggatttcctggggagtgggcgtgtttctgctgaagcccctgaaatggacactgagtaacatgctcggcgataacaaagtgccggccgaggaagtgctggtcgccgtggaactgctcaaggaaaaggctgaggaggtgtacaggctgtaccaaaacagcccgcttagctcccatccagtggttgctcttagtgaactgagtaccctgtgtgccaattcctgccctgacgagcggacgttctacctggtcttattgcaactgcagaaggaaaagcgggtgaccgtcttagaacaaaatggggagaagatcgttaaatttgccagagggcctagagccaaggtgagtccggtcaacgatgtggacgtgggcgtgtaccagctgatgcaaagtgagcaacttttgtcaaggaaagtggagtccctctctcaggaggccgaacgctgcaaagaggaagccagacgagcctgtcgggccggtaagaaacagctggccctgagaagtttgaaagccaagcagagaacagaaaagagaatcgaagctctccacgccaaattggataccgtacagggcattctggacaggatatacgcaagtcagactgatcagatggtctttaacgcatatcaagcaggtgttggcgctctgaaactgtctatgaaagatgtgacagttgaaaaagctgaaagtctggtagaccagattcaggagctgtgtgatactcaggacgaagtcagtcagaccctggccgggggagtgacaaatggcttagacttcgacagcgaggaactcgagaaggaactcgacatcctactccaggacaccacaaaggagccccttgatttaccggacaatccgcgtaaccgtcatttcactaactcggtgcccaacccccggatatctgacgccgagctggaggccgagctagaaaaattgtccttgagcgagggaggcttggtcccatccagcaaaagccccaagcggcagctcgaacctactctcaagcccttgtag

SEQ ID NO: 182573 - DNA, 1362 bp, synthetic construct
  misc_feature 1..1362: note = Description of Artificial Sequence: Synthetic coding sequence
  source 1..1362: mol_type = other DNA
atgtggagccccgagcgggaggccgaggcccccgccggcggcgaccctgctggacttctaccgcccgaatgggaggaggacgaggagcggatgagctttttattttcagcgttcaagcgatccagagaagttaattctacagattgggattctaagatggggttctgggccccgctggtgctaagtcactccaggcggcagggcgtagtgagactgaggctaagagatctgcaggaagccttccagcgtaaaggaagcgtgcctctcggcctcgctacagtgctccaggatctactgaggcggggcgagttgcagagggagtcggacttcatggcctccgtggactcctcatggatctcttggggagtgggagtattcctcctgaagcctctgaagtggaccctgtctaatatgttgggcgacaataaggtgcccgcagaggaagtactggtcgctgtagagcttttgaaggaaaaggccgaagaagtctatcgcctgtatcaaaactcacctcttagctctcaccccgtcgtggccctctctgagttatctactctgtgtgccaatagctgcccagatgagcgcacattctacctggttctgctgcagctgcagaaggagaaacgcgtgactgtcctggaacagaacggcgagaaaattgtcaagttcgctagaggccctagagctaaggtgagcccagtgaacgatgtggatgtgggcgtgtaccagctgatgcagtccgagcaactactctctagaaaggtggagtctctgtcccaggaggcagaaagatgtaaagaggaggcaaggagagcgtgtcgcgctggtaagaagcaattagccttgcggtctttgaaagcaaagcagagaacagagaagcgcatcgaggcactacacgcaaaactggacactgtgcagggtatcctcgaccggatatacgcctcacaaacagatcagatggttttcaatgcataccaggcaggagtcggggccctaaaactgtcaatgaaggatgtgaccgtggagaaagccgagtccctggtagatcagattcaggagctgtgtgacacacaagacgaagtcagccagacattggccggtggcgttactaacggccttgactttgacagcgaggagctggagaaggagctcgacattttgctacaggatacgacaaaagaacctctggacttgccggacaatccgaggaacagacactttaccaactcggtccctaacccacgcatcagtgacgccgagcttgaggccgagctcgaaaaattgtcactttcagaaggcgggctggttccgtcgtccaagagtccaaagcgccagttggaacccactctcaagcccctgtag

SEQ ID NO: 182574 - DNA, 1992 bp, synthetic construct
  misc_feature 1..1992: note = Description of Artificial Sequence: Synthetic coding sequence
  source 1..1992: mol_type = other DNA
atggagcggcccgaggagggcaagcagagcccccccccccagccctgggggaggctactgcgcctgggagcggaggagggcgaaccacacgtgctgttgcgaaaacgagaatggactattggtcgtcggagaggctgtgacctgagctttccatccaataaactcgtctccggcgatcattgtcgcatcgttgttgatgagaagagcggccaggtgactctggaagataccagcacatccggaaccgtcattaataaactgaaagtggtgaaaaaacagacatgcccacttcagaccggcgacgtgatctatttagtgtacaggaagaacgagccagagcacaatgtggcttatctgtacgaatccctttccgagaaacagggcatgactcaggagtcatttgaggcaaacaaggaaaatgtgttccatgggaccaaggatacgagcggcgctggggctggaaggggggccgacccccgcgtgcctccctcaagtcccgccacccaggtgtgcttcgaagaaccccagccctctacctcgacctccgacctgttcccgactgcgtccgcaagttccactgagccctcacccgccgggcgcgagcggtcctctagctgcgggtctggaggggggggaatatcccctaaaggctctggcccaagcgtggcctccgacgaagtgtccagctttgcatctgccttaccagaccggaagaccgcctctttctccagtttagagccccaggatcaggaggatctcgagccagtcaagaagaaaatgaggggagatggcgatctggatctgaacgggcagcttctggtagcgcaaccacgacgcaacgctcaaactgtgcacgaggacgtgcgagctgcggcgggcaagcctgacaagatggaagaaacattgacgtgcataatttgccaggacttgttgcatgactgtgtgtctctacaaccctgcatgcacaccttttgcgcagcctgctacagcggttggatggagcgctcatctctgtgccctacatgtaggtgcccagtcgagcgaatttgcaaaaaccatatcctgaacaaccttgttgaggcatacctgattcagcatcccggaaacagccggtccgaggaggacgtgcagtctatggatgcccgtaataaaatcacacaggatatgcttcagcctaaggtaagaaggtccttttctgacgaagagggaagcagtgaggacctcttggaactgtccgacgtggatagcgaaagctccgatatctctcagccatacgttgtctgcagacagtgtcccgaataccgtaggcaggccgcccagccaccccactgccccgcgccagagggcgaacctggcgcgcctcaggcactgggagatgctccctctacaagtgtgagtttgacaacggtacaggactatgtgtgccctctgcagggtagccacgcactgtgtacatgttgttttcagcctatgcctgaccggcgggccgaacgggagcaagacccccgagtggctccgcagcagtgcgcggtatgtcttcagccattctgtcatctctactggggctgtactaggactgggtgttatgggtgcctagccccattctgtgaattaaacctgggtgacaagtgcctggatggtgtgctgaacaacaacagctacgagtctgatattttgaagaattatcttgctaccaggggtctgacctggaaaaacatgctcacagagtctctcgtggcacttcagcggggagtcttccttctctcagattaccgagtaactggcgacactgttttatgttattgctgtggcctgcgcagtttcagggagctgacgtatcagtacagacaaaacattcctgccagtgaacttcccgtcgccgtgacaagtcggcctgattgctactgggggaggaattgccggacacaggtgaaggcccatcacgcaatgaagttcaaccacatctgcgagcaaaccaggtttaagaactag

SEQ ID NO: 182575 - DNA, 1872 bp, synthetic construct
  misc_feature 1..1872: note = Description of Artificial Sequence: Synthetic coding sequence
  source 1..1872: mol_type = other DNA
atggagcggcccgaggagggcaagcagagcccccccccccagccctgggggcgcttgttgcggttaggggctgaagagggagaaccgcacgtcctcctcaggaagagggagtggaccattggccgtaggagaggctgcgatttatcctttccttccaataaactcgtgtctggcgaccattgcaggatcgttgtcgacgagaaatctggtcaggttacactggaagacaccagcacgtcaggtaccgttattaataaactgaaagtggtgaagaagcagacctgccctttgcagactggtgatgtcatctacctcgtgtatcgcaaaaacgagcccgagcacaatgtggcttatttatacgaatcactgtccgagaagcagggtatgacacaggaatcctttgaaatggtcccttgttgtgtcgcccaggcaggcctcaaactgctcggaagtagcgacccacctaccttagcatcacagagtatcgttatcactggctccgggggcggtggaatatccccaaaggggagtgggccctccgtcgcctctgatgaagtctccagcttcgcatcggctcttccggatcgcaaaaccgcatcattttcgagcctggagcctcaggatcaagaggacctagagccagtaaagaaaaaaatgagaggggacggagatcttgatctgaacggccagctgctggtggctcagcctcgacggaacgcacaaaccgttcacgaggacgtaagggctgctgctggcaaaccggacaagatggaggaaacccttacatgcataatttgccaagatctgctgcatgactgtgttagccttcagccctgcatgcacaccttttgcgccgcctgttatagcgggtggatggaacgtagtagtctgtgcccaacatgtcgctgccctgtggagcgtatttgcaagaatcacatcttaaacaaccttgttgaagcctatctcatacagcatccagacaaatcacgctctgaggaagatgttcagagtatggacgctcggaataagatcacacaggatatgctgcagcctaaggtgaggcgaagcttttccgatgaagagggctcttctgaagatctgctggagctgtccgacgtcgactccgaatcatctgatatttcacagccctatgtggtgtgccggcagtgtccagaatatagacgtcaggctgcccaacctccccattgcccagctcccgagggagaaccaggcgccccgcaggctttaggggacgccccaagtactagtgtctccttaaccactgctgttcaagattatgtttgtccactgcaaggaagtcacgccttatgtacttgttgtttccaacctatgccagacaggcgtgcagaaagggaacaggatcctcgcgttgcacctcagcagtgtgccgtgtgcctccagcccttctgtcatctgtactggggctgcaccagaaccggttgctacggctgcctcgcaccgttctgtgaattgaacctgggtgacaagtgcttagatggagtgctgaataataactcttacgagtctgatatcctcaagaactatcttgcaaccagaggtctgacatggaaaaacatgctaactgagtcactggttgccctgcagcgcggcgtctttcttctgagcgattatagggtcacgggcgataccgttttgtgctactgttgtggattaagaagtttccgcgaactgacttaccagtaccgccagaacattcctgcttctgagctccccgtggccgtgacaagtagacccgattgttattggggccggaattgccggacccaggtgaaagcacatcacgctatgaaattcaatcacatctgtgagcagacgcgcttcaaaaactag

SEQ ID NO: 182576 - DNA, 1995 bp, synthetic construct
  misc_feature 1..1995: note = Description of Artificial Sequence: Synthetic coding sequence
  source 1..1995: mol_type = other DNA
atggagcggcccgaggagggcaagcagagcccccccccccagccctggggaagattgctccggctcggagcagaagaaggagagccgcacgtgcttctcagaaagagggagtggacgattggccggcgtcgcggctgcgacttaagttttccgtcaaataagctggtgtcaggcgaccactgccgcatcgtcgtcgacgagaaatccggccaggtgaccttagaagatacgagcacatcgggcacggtgattaacaaattaaaggtggtgaaaaagcagacctgccctctccagacaggagatgtgatctatctggtctatagaaagaacgagccagagcacaacgtagcctacctgtatgaatctctttcggagaagcagggcatgacgcaggagtcgtttgaggctaacaaggaaaacgtgttccacggcactaaggacacctctggagctggcgccggaaggggggcggatccccgagtgcccccttcgagcccagcaacacaagtgtgcttcgaggagccccagccaagtacatccacatctgatttgtttcccaccgcctccgcatcaagcacagaacccagtccggctggtagagaaaggagcagcagctgcggatctggcggcgggggtataagcccgaaaggaagcggccctagtgtggcctcagatgaagtctcatcctttgcctctgccctgccagatagaaagaccgcgtctttctccagtctggagccgcaggatcaggaggacctggagcctgttaaaaaaaagatgcgtggcgacggagatctagacctgaatggccaactcctggtggcccagcctcggcgaaacgctcagacggtccacgaggacgtgcgcgcggccgcgggaaaacctgataagatggaggagactttaacatgcatcatatgccaagacctcctgcacgattgtgtgtccctacaaccctgcatgcataccttttgcgctgcatgttactcaggctggatggagcgttcctcgctttgccccacctgccgctgcccagtggaaaggatctgcaagaaccacatcctaaataacttagtggaggcctatctgattcagcatcccgataaatcgcgctccgaggaggacgtccagagcatggatgccagaaacaaaatcacacaggacatgttgcagcctaaggtcagaaggagcttctctgacgaagagggatcaagtgaagacctgttggagttatccgacgtggattccgaaagctccgacatctctcagccatatgttgtgtgccgtcagtgtcctgaatacaggcgacaggcggctcagccgccccactgtcctgcaccagaaggggagcctggggctccccaggccttgggcgacgcaccctcgacctccgtgagcctgaccaccgcagtgcaggattatgtctgcccccttcaaggtagccacgccctatgtacgtgctgctttcagcccatgcctgacagacgagcagaaagggaacaggacccacgtgtcgcacctcaacagtgtgccgtgtgcctgcagcccttttgtcatctttactggggttgcacgcgtacgggctgctatggctgtctcgcacccttctgtgagctgaacctaggtgacaagtgcttggacggggtcctgaataacaattcttacgaaagtgacatcctgaaaaactacctcgccacccgtggactcacttggaaaaatatgctgactgagagcctggtggccctgcaacgtggggtgtttctactttctgattacagggtgaccggtgacactgtgctctgttattgttgcggcctccggagctttagggagctgacataccagtaccggcagaacattcctgcttctgagcttcccgtggccgtgactagccgtccagactgctactggggtagaaattgcagaactcaagtcaaggcccatcatgcaatgaaattcaaccacatttgcgagcaaacgagattcaaaaactag

SEQ ID NO: 182577 - DNA, 1959 bp, synthetic construct
  misc_feature 1..1959: note = Description of Artificial Sequence: Synthetic coding sequence
  source 1..1959: mol_type = other DNA
atggagcggcccgaggagggcaagcagagcccccccccccagccctggggacgcctgttgcgcctgggtgctgaagagggagaaccacacgtattactgcgcaagcgagagtggactattggcagacgaaggggctgcgatctgagcttcccatcaaacaagctggtctctggggatcactgtcgcatcgtggttgacgaaaagtccggtcaggtcacgttggaggatacgtctacgtcagggaccgttatcaataagttgaaggtcgtgaagaaacagacatgccccctgcagaccggcgacgtgatttatctcgtttataggaagaatgagcccgaacacaatgtggcttacctgtacgaaagcttatctgaaaagcaaggaatgactcaggaaagtttcgacaccagcggggccggagccggcaggggtgctgaccctcgagtacctcccagcagtcccgcaacccaggtttgtttcgaggagccacagccatccacctcaaccagtgacctcttccctaccgccagcgcctcctctaccgagccttcccctgccgggcgcgagcggtcgtcgagctgtggctccggcggcggtggaatatcacccaagggttccggtccttcggtcgcaagcgacgaggtcagcagtttcgccagcgcgctgccagacagaaagacagccagtttctcctcactcgaacctcaggaccaagaggatctcgagccggttaaaaaaaagatgcggggagacggagatctcgacctgaacggacaactactcgtagcccaaccacgccggaatgcccagaccgtgcatgaggatgtacgcgctgcagcaggaaaacccgataagatggaggaaactttgacgtgtattatctgccaggatcttctgcacgactgtgtgtccctccagccctgcatgcatactttctgcgccgcctgttacagcgggtggatggaacggagctcactctgtccgacctgtaggtgcccggtggaacgaatatgtaaaaaccatatcctgaacaacttagtcgaagcttatctgatccagcaccccgacaagtcacgctctgaggaggacgtgcaatctatggacgcacgcaataaaattacccaagacatgttacagcctaaagtacggcgatctttttctgatgaggagggttcttccgaagaccttctcgagctcagtgatgtcgattccgagtcttccgacatttcccagccctatgtggtttgtaggcagtgtcccgagtatagacgtcaggctgcacaacccccccactgcccagccccagaaggagaacctggagccccacaggccctgggggacgctccatcaacctcagtttcgctcactaccgccgtccaggattatgtctgtccccttcagggctcccatgcgctgtgcacctgttgctttcaaccaatgccggacaggagggccgagagagagcaagacccacgggtcgctccacagcagtgtgccgtgtgtctccaacctttctgccatttgtactgggggtgtacgcggacgggatgttacggatgcctcgcccccttctgcgaactcaatcttggggacaaatgcctcgacggagtcctcaataataacagctacgagagtgacatcctgaaaaactacctggcaactagaggcctcacctggaagaatatgcttaccgagtccctagtggccctgcagaggggcgtcttcctactctctgactaccgggttaccggcgatactgtgctctgctactgctgtggactgaggagcttcagagagcttacataccagtaccggcagaacatccccgcctccgaactgccagtcgctgtgacttccagaccagactgctattgggggcgaaattgtaggacccaggtgaaggcccaccacgccatgaagtttaatcacatatgcgagcagactaggtttaagaactag

SEQ ID NO: 182578 - DNA, 672 bp, synthetic construct
  misc_feature 1..672: note = Description of Artificial Sequence: Synthetic coding sequence
  source 1..672: mol_type = other DNA
atggagcggcccgaggagggcaagcagagcccccccccccagccctggggccgcctgcttcggctgggtgctgaggaaggagaaccgcatgtcctgctgcggaaacgtgagtggactatcggccgccggagaggttgcgacctgagttttcccagcaataagcttgtaagcggagatcattgcaggattgtggtggatgagaagtccggccaggtgaccctggaggacacctctacctccggtacagtgataaacaaactcaaagtcgtcaaaaagcaaacttgtccgctgcagaccggagatgtgatttacctggtttaccggaaaaatgaacccgagcataatgtagcctatctctacgagagcctgtcagagaagcaaggcatgacacaagaatccttcgatacaagtggagccggcgccggtcgtggcgctgatccccgggtgccaccgtccagtcccgcaacccaagtgtgcttcgaggagccacagcccagcacaagcacatctgatctgttccctaccgcaagcgcatcctccacagaacccagccccgcaggccgcgaacgcagctcctcatgcggatccgggggcggaggaatcagtccaaagggatcaggaccaagcgtggcttcagacgaggtgtcgtcctttgcctcagccttaccatag

SEQ ID NO: 182579 - DNA, 1050 bp, synthetic construct
  misc_feature 1..1050: note = Description of Artificial Sequence: Synthetic coding sequence
  source 1..1050: mol_type = other DNA
atgacccaggagagcttcggcagcggcggcggcggcatcagccccaaagggtcagggccttcagtcgccagtgacgaggtctccagtttcgcgtctgctctgccagaccggaaaacggcttctttctcttccctcgagcctcaggaccaggaagaccttgagcccgtaaagaagaagatgagaggtgatggagacctggaccttaacggccagctgctggtggcacagccacgcaggaatgctcagacagtacatgaggatgtgcgagcagccgccggtaagcctgataagatggaggaaacactgacgtgtatcatctgccaggacttgcttcatgattgtgtgtcgctgcagccctgcatgcacaccttctgtgcagcatgttatagcggctggatggagagaagcagcttgtgtccaacctgtagatgtccagttgagcgcatatgcaagaaccacatcctgaataacctagtggaagcctatctgatacaacatcctgacaaatcccgcagcgaagaagacgtgcagagcatggatgctcgcaacaagattactcaggatatgctccagcccaaggtgcgtaggtccttcagcgacgaagaaggctcctctgaggacctgctggaattatctgacgtcgatagtgagtccagtgatatttcacaaccttatgtggtctgtcggcagtgtcccgagtacagaaggcaggccgcccagccaccccactgtcccgcaccagagggagaacccggagccccgcaggcgctgggagacgctcccagcacatccgtgagtttaacaacagctgtccaggattatgtgtgccccctccagggctctcacgcactttgcacatgctgcttccaaccaatgccggaccgacgggcagagcgggaacaggacccaagagtggctcctcagcagtgtgcagtgtgcctgcaaccgttctgccatctgtactggggttgtaccaggactggatgctatgggtgtcttgcccctttctgtgtgtccgggcgacagtgcttcccggcaacatccctgtag

SEQ ID NO: 182580 - DNA, 1719 bp, synthetic construct
  misc_feature 1..1719: note = Description of Artificial Sequence: Synthetic coding sequence
  source 1..1719: mol_type = other DNA
atggagcggcccgaggagggcaagcagagcccccccccccagccctggggtcggctactgagactgggggccgaagagggggaaccacatgtactgctaaggaagagggaatggactattggacgacgccggggatgcgatctgagctttccatctaacaaactcgtgtcaggcgaccattgccggatcgtggttgatgagaagagtgggcaggtcacactggaagatacctcgacatctggaaccgttataaataagctcaaagtcgtcaaaaaacagacatgccccctgcagaccggtgatgtcatctatctggtttataggaagaacgagcctgagcacagatccggcgggggagggattagccccaagggtagcgggccttcggtggccagcgatgaagtctcatcatttgcttcggcgctacccgaccggaaaacagctagcttctccagccttgagcctcaggaccaagaagatctggagccagtcaagaagaagatgcgcggagacggagacctcgacctgaatggccaactgctggtggcccaaccgagaagaaacgctcagaccgtgcatgaagacgtaagagccgcagcagggaaacctgataaaatggaggaaacattgacatgcattatctgccaggacctacttcacgactgtgtctccctgcagccctgcatgcacactttctgtgctgcctgctacagtgggtggatggagcggagtagtctttgtcctacctgtcgatgcccagttgagcggatttgtaaaaaccacatcctgaacaatcttgttgaggcctacttgattcagcacccagacaagagccgttcagaggaggacgtgcagtccatggacgcccgcaacaagatcactcaggatatgctgcagcctaaggtgcggagaagtttttctgacgaagaaggatcatccgaagatcttttggaactttcggacgttgactcagagtcatcagatatcagccaaccatacgtggtgtgtaggcagtgtcccgagtacagacgacaggcagcccaacctccccactgtccagctcctgagggcgagcccggcgcccctcaggctctgggagacgctccaagtactagtgtgtccctaacgactgccgttcaggattatgtctgtcctcttcagggctctcatgcactttgcacctgttgtttccagccaatgccagatagacgcgctgagcgagagcaggaccctcgcgtggccccacagcagtgcgccgtgtgcttacagcccttctgccacctgtactggggatgtacccggacagggtgctacggttgcctggcccctttttgcgaactcaacctgggtgacaaatgtctggatggggtactgaataataatagctacgagagtgacatcctcaaaaactacctggctactcgaggcttgacctggaagaatatgctgactgagtcattggtagctctgcagcgcggagtgttcctgctgtccgattaccgcgtaacgggagatacggtgctttgttattgctgcggcctgcgtagctttagagaactgacttatcagtaccgtcagaacataccagcctccgagctgcccgttgcagtgacaagtcggccagactgttactgggggaggaattgccgcacacaggttaaggcacaccacgccatgaagtttaaccacatatgtgagcagacgcgctttaaaaactag

SEQ ID NO: 182581 - DNA, 345 bp, synthetic construct
  misc_feature 1..345: note = Description of Artificial Sequence: Synthetic coding sequence
  source 1..345: mol_type = other DNA
atgcggctgctgatcctggccctgctgggcatctgcagcctgaccgcttatattgtcgaaggagtcgggagcgaggtttcagacaaaagaacttgcgtgagcctgacgacacagaggttaccggtgtcccggatcaaaacctataccatcacggaagggagtctgagagccgtgattttcatcactaagagaggcctcaaagtttgcgcagatccgcaggcaacttgggtccgcgacgtagtgcgctcaatggatcgtaagagcaacactcggaataacatgattcagaccaagcccacggggactcaacagtctactaacaccgctgtcacactcactggatag

SEQ ID NO: 182582 - DNA, 345 bp, synthetic construct
  misc_feature 1..345: note = Description of Artificial Sequence: Synthetic coding sequence
  source 1..345: mol_type = other DNA
atgcggctgctgatcctggccctgctgggcatctgcagcctgaccgcctacattgtggagggtgtcggatccgaagtgtcccaccgacgtacgtgcgtgagcctgactacgcagagactgcctgtgagccgaatcaagacgtacaccatcacagagggatctctgcgagcagtgatattcatcactaaacgtggattgaaagtgtgtgcagatccgcaggccacgtgggtgcgggacgtggtgagatcaatggaccgcaaatccaatactaggaataatatgattcagacgaaaccaacgggcacccagcagagcacgaacacagccgtgacactcacaggttag

SEQ ID NO: 182583 - DNA, 1002 bp, synthetic construct
  misc_feature 1..1002: note = Description of Artificial Sequence: Synthetic coding sequence
  source 1..1002: mol_type = other DNA
atggagagcagcggcaaccccgagagcaccaccttcttctactacgacttacagagtcagccttgcgagaaccaggcctgggtgttcgctacactggctacgaccgtgctatactgtctcgtttttctactgtcattagtcggtaattctctagtcctgtgggttcttgtaaaatacgagtccctggagtctctcactaatatctttattctgaacctttgtctttcggaccttgtgttcgcctgcttactgccagtctggataagcccctatcattggggatgggtactgggggatttcctgtgcaagctgcttaatatgatctttagcattagcctttactccagcattttcttcctgacgattatgacaattcaccgatacctgagtgtggtcagcccgctgtctactctgagagtaccaacactcagatgccgagttcttgtgactatggcagtatgggtggcctctattttgtcttcaatcctggatacaatctttcacaaggtcttgagctccgggtgcgattactctgaactcacctggtacctcacttcagtatatcagcacaatctcttctttctgctgagtttaggaattattctgttctgctacgttgaaatcctgagaacccttttccggtcccgcagcaagcgaaggcataggacggtcaaacttatttttgccattgttgtcgcctatttcctgtcctggggaccgtacaattttacactgtttctgcagactctcttccggacacaaatcattcgaagttgtgaggcgaaacagcagctggaatatgccctactcatctgtcggaacctcgcattttctcactgttgttttaatccagtgctgtatgtgtttgttggggtgaaatttcgtacccacctgaagcatgtattgagacaattctggttctgcagactgcaggctccgtcccccgcgagtattcctcattctcccggtgcctttgcatacgaaggagccagcttctactag

SEQ ID NO: 182584 - DNA, 111 bp, synthetic construct
  misc_feature 1..111: note = Description of Artificial Sequence: Synthetic coding sequence
  source 1..111: mol_type = other DNA
atggagagcagcggcaaccccgagagcaccaccttcttctactacgacctgcaatcgcagccctgcgaaaaccaagcctgggttttcgccacactcgccacgacagtgtag

SEQ ID NO: 182585 - DNA, 1002 bp, synthetic construct
  misc_feature 1..1002: note = Description of Artificial Sequence: Synthetic coding sequence
  source 1..1002: mol_type = other DNA
atggagagcagcggcaaccccgagagcaccaccttcttctactacgatttacagagtcagccttgcgagaaccaagcttgggtgttcgccaccctggctaccaccgtgctttattgtctcgtgtttttgctgtcactcgttggtaatagcttagtcctatgggttctcgtaaaatacgaaagcctagagtctctgacaaacatttttatcttaaacctgtgtctgtctgacctggttttcgcctgcctgctgcctgtgtggataagtccgtaccattggggatgggtactcggcgactttctctgcaagttgctcaacatgatttttagcattagcttatactcaagcatcttttttctgacaataatgaccatacaccgatacctgtctgtcgtgagtccactcagcaccctaagagtgcctactttgcgctgcagggtgctggtcactatggcagtgtgggtggcgagcattctcagctccattctagataccatcttccataaagtgctgtccagcggctgtgactacagcgagctaacatggtatttgactagtgtctaccagcacaacctgttctttctgctgtccttaggtatcatcctcttttgctatgtggagattcttagaactctctttcggagcagatcaaagaggcggcaccgaactgtaaaacttatctttgccatcgtggtcgcctacttcttatcatggggaccctacaacttcacgttgttcttgcagactctcttcagaacacagataattagaagttgtgaagcaaagcaacagttggagtacgcactgctaatctgccggaatctagcattcagtcattgttgctttaatccagtgctctatgtgtttgtgggggtcaaattcagaacgcaccttaaacacgtcttgagacagttttggttttgcaggctgcaagctccttccccagctagtataccccattcaccaggagctttcgcctatgaaggggctagtttttactag

SEQ ID NO: 182586 - DNA, 300 bp, synthetic construct
  misc_feature 1..300: note = Description of Artificial Sequence: Synthetic coding sequence
  source 1..300: mol_type = other DNA
atgaaggtgagcgccgccctgctgtgcctgctgctgatggccgccacgttctcgccacaaggccttgcacagcccgattccgtgtcaatcccaattacttgttgtttcaacgttataaatcgcaagatacctattcaacgattagagtcttatactaggattactaacatccagtgcccaaaagaggctgttatcttcaaaactaaacgcgggaaagaagtttgcgccgaccccaaggaacggtgggttcgagacagcatgaagcacctggatcagatcttccaaaacctgaaaccttag

SEQ ID NO: 182587 - DNA, 291 bp, synthetic construct
  misc_feature 1..291: note = Description of Artificial Sequence: Synthetic coding sequence
  source 1..291: mol_type = other DNA
atgcagatcatcaccaccgccctggtgtgcctgctgctggccggcatgtggcccgaagacgtagactctaaaagtatgcaggtcccctttagccgctgctgtttctcttttgccgaacaggaaatccctctgagggccatcctgtgctaccggaacactagtagcatatgtagcaacgagggactgatattcaagctgaagcgaggtaaggaggcgtgcgccctagataccgtaggctgggtgcagcgccatcgcaaaatgctcaggcactgcccttccaaacggaaatag

SEQ ID NO: 182588 - DNA, 282 bp, synthetic construct
  misc_feature 1..282: note = Description of Artificial Sequence: Synthetic coding sequence
  source 1..282: mol_type = other DNA
atgaagatcagcgtggccgccatccccttcttcctgctgatcaccatcgctctcgggaccaaaaccgagtccagcagtcgcgggccctaccacccttcggagtgctgcttcacatatactacctataagatcccgagacagagaataatggattactacgaaactaactctcaatgctcgaagccgggtatcgttttcatcacgaagcgtgggcacagcgtgtgtactaacccatccgacaagtgggtacaggactacatcaaagacatgaaggaaaactag

SEQ ID NO: 182589 - DNA, 330 bp, synthetic construct
  misc_feature 1..330: note = Description of Artificial Sequence: Synthetic coding sequence
  source 1..330: mol_type = other DNA
atgaagatcagcgtggccgccatccccttcttcctgctgatcaccatcgctttgggaacaaaaaccgaatcttcctcacagacaggcggtaagcccaaagtggtgaaaattcagctcaagctggtgggcggaccctatcatccctccgagtgctgtttcacatatacgacatacaagattcctcgacagcgcatcatggactactacgagacaaactctcagtgctcaaagcccggcatcgtatttataaccaagaggggccactcagtgtgcactaaccctagtgataagtgggttcaagactacatcaaggatatgaaagagaactag

SEQ ID NO: 182590 - DNA, 330 bp, synthetic construct
  misc_feature 1..330: note = Description of Artificial Sequence: Synthetic coding sequence
  source 1..330: mol_type = other DNA
atgaagatcagcgtggccgccatccccttcttcctgctgatcaccattgctctgggtaccaaaaccgagtcgtcgagtcaaacagggggaaaaccaaaggtcgtcaaaatacaactgaagcttgttggaggcccatatcatccaagtgaatgttgtttcacctacacgacatacaagattccacgacaacgcataatggattactacgagaccaactcccagtgctctaagcctggcattgtgttcatcaccaagcgggggcactcggtctgcaccaatccttccgacaagtgggttcaggactatatcaaggatatgaaggaaaattag

SEQ ID NO: 182591 - DNA, 342 bp, synthetic construct
  misc_feature 1..342: note = Description of Artificial Sequence: Synthetic coding sequence
  source 1..342: mol_type = other DNA
atgaaggtgagcgtggccgccctgagctgcctgatgctggtggccgtgctcgggtcccaggcccagtttatcaacgatgctgaaactgagctgatgatgtccaagctaccccttgagaatcctgtagtactgaactcatttcatttcgcggccgactgctgcacgtcctatatctctcagagcattccctgctccctgatgaagtcatacttcgaaactagtagcgagtgttccaagccaggagtcatcttcctgactaaaaagggaagacaagtctgcgctaaacctagtggacctggggtgcaggattgtatgaagaaactgaaaccctacagtatctag

SEQ ID NO: 182592 - DNA, 186 bp, synthetic construct
  misc_feature 1..186: note = Description of Artificial Sequence: Synthetic coding sequence
  source 1..186: mol_type = other DNA
tgatgcaccagctacatcagccagagcatcccctgcagcctgatgaagtcctattttgaaacttcaagcgaatgcagtaagcctggagtcatcttcctcacaaagaagggccgtcaagtctgcgcgaagccttccggtcctggcgtgcaggattgtatgaaaaagttgaaaccctacagcatttag

SEQ ID NO: 182593 - DNA, 342 bp, synthetic construct
  misc_feature 1..342: note = Description of Artificial Sequence: Synthetic coding sequence
  source 1..342: mol_type = other DNA
atgaaggtgagcgtggccgccctgagctgcctgatgctggtggccgtgcttggaagccaggcacagtttattaatgacgctgaaaccgaactgatgatgtcaaagctgcctctggagaacccagtggtgcttaactcattccactttgcggctgactgctgtacatcatatatcagtcagagtattccttgcagcctgatgaagtcttacttcgagacttccagcgaatgttccaaaccaggagtaattttcttaaccaaaaagggtcgacaggtttgtgccaaaccaagcggacccggcgtccaggattgcatgaagaagctaaagccatatagcatttag

SEQ ID NO: 182594 - DNA, 342 bp, synthetic construct
  misc_feature 1..342: note = Description of Artificial Sequence: Synthetic coding sequence
  source 1..342: mol_type = other DNA
atgaaggtgagcgtggccgccctgagctgcctgatgctggtggccgtgctgggctcccaggcccagtttatcaacgacgctgagacagagctcatgatgagcaaacttcctctcgaaaatcccgtggttctgaattcatttcattttgcagccgactgctgcacgtcttatatcagtcagtcaatcccgtgctcacttatgaagtcttattttgagactagctcagaatgctcaaagcccggagtgatttttctaactaaaaaaggaagacaagtgtgcgcgaagccaagtggccctggcgttcaagattgtatgaagaagttaaagccctattcaatctag

SEQ ID NO: 182595 - DNA, 363 bp, synthetic construct
  misc_feature 1..363: note = Description of Artificial Sequence: Synthetic coding sequence
  source 1..363: mol_type = other DNA
atgaaggtgagcgaggccgccctgagcctgctggtgctgatcctgataatcaccagtgcttccagaagccagcccaaagtgccagagtgggttaatacaccttctacttgctgccttaagtactatgaaaaagtgctgccacgcagacttgtcgtgggatataggaaggccctgaactgccatctccctgccatcatctttgtcactaaacggaacagagaggtctgcacgaatcctaacgatgactgggtccaggagtatatcaaagaccccaatctgcctttgctaccaaccagaaatctctctaccgtgaagatcattactgcaaaaaacggtcagcctcaacttctgaattcccagtag

SEQ ID NO: 182596 - DNA, 1188 bp, synthetic construct
  misc_feature 1..1188: note = Description of Artificial Sequence: Synthetic coding sequence
  source 1..1188: mol_type = other DNA
atggcctggcggcacctgaagaagcgggcccaggacgccgtgatcatccttgggggtggtggactgctattcgcatcatacctgatggcaactggcgatgagcgcttctacgctgagcacttgatgccgacgctacagggtctcttggatcctgaatccgcacaccggctcgcagtacgttttacgagtcttggactactgccccgggccaggttccaagactcggatatgctggaggtgagagtgctaggccacaagtttaggaatccagtgggtatcgctgctgggttcgacaaacatggagaggcagtggacggactgtataagatgggctttggatttgtggaaatcgggtctgtgacgccgaagccacaagaaggcaacccgcgacctagagtgtttcggcttcctgaggaccaggctgtcataaatagatatgggtttaatagccacggactgagtgtggtggaacatagacttcgagcccggcagcagaaacaggctaaattgacagaggatggactgcctctgggagtcaacttgggtaaaaacaagaccagcgtggatgcagccgaggattacgcagaaggggtgcgtgtcctgggccctcttgctgactatctggtggtcaatgtatctagtcctaacactgccggtctgcggtcactgcaggggaaggcggagcttcgccgtctcctgactaaagtacttcaggaaagggatggccttaggcgcgtgcataggcctgccgttctggtgaagattgcaccagacctgacaagtcaggacaaagaggacatcgcttccgtggtgaaggagctgggcatcgacggactaatcgtgacgaacactactgtctcacgccctgcgggtttgcagggggctctgagaagcgaaactggcggattaagcggaaagccattgagagatctttcaacccagacaatccgggagatgtatgctctaacccaggggagagtcccaattatcggcgtgggcggtgtatcatcagggcaagatgctctggagaagatccgcgccggcgctagcctcgtgcagctgtataccgcactaacattttggggtccccctgtggtcggcaaggtcaagagagaacttgaggccttactgaaggaacagggctttggaggtgtgacagacgccatcggcgcggatcaccgcaggtag

SEQ ID NO: 182597 - DNA, 270 bp, synthetic construct
  misc_feature 1..270: note = Description of Artificial Sequence: Synthetic coding sequence
  source 1..270: mol_type = other DNA
atgaagggcctggccgccgccctgctggtgctggtgtgcaccatggccttatgttcctgcgcccaggttgggacgaataaagagctgtgttgcctggtttacacttcctggcagatacctcagaaattcattgtggattactccgaaacctctccacaatgccccaaacctggggttatactcctcactaagcggggacgacagatctgcgcagacccaaacaagaaatgggttcagaagtacatcagcgatctcaagttaaacgcctag

SEQ ID NO: 182598 - DNA, 297 bp, synthetic construct
  misc_feature 1..297: note = Description of Artificial Sequence: Synthetic coding sequence
  source 1..297: mol_type = other DNA
atggccctgctgctggccctgagcctgctggtgctgtggaccagcccggcccctacactgtctgggaccaatgacgcagaggattgttgtctgagcgtgacccagaagcccatcccaggatacatcgtaagaaattttcactatctactgataaaggacgggtgtagggtacccgccgtcgtcttcactacgctgcgagggagacagctgtgtgcacctccggatcagccatgggtggagcggatcattcaacgcttacagagaacatccgcaaaaatgaaaaggcgctccagctag

SEQ ID NO: 182599 - DNA, 315 bp, synthetic construct
  misc_feature 1..315: note = Description of Artificial Sequence: Synthetic coding sequence
  source 1..315: mol_type = other DNA
atggccctgctgctggccctgagcctgctggtgctgtggaccagcccagctcctacacttagcggaactaacgatgcagaggactgttgcctctctgtcacacaaaagcccatcccaggatacattgttcggaatttccactatctgctgatcaaagacggctgccgggtgccagcggtcgttttcacaactctccgaggccggcagttatgcgcccctcctgatcagccgtgggtcgagcggattatccagaggctgcaacgaacctctgcaaaagcctcccttgccctgcctggtcccgtatcttccctgtag

SEQ ID NO: 182600 - DNA, 291 bp, synthetic construct
  misc_feature 1..291: note = Description of Artificial Sequence: Synthetic coding sequence
  source 1..291: mol_type = other DNA
atgtgctgcaccaagagcctgctgctggccgccctgatgagcgtgctccttctgcacctgtgtggcgagtctgaggccgccagcaacttcgactgttgccttggctataccgacagaatcctgcaccccaagttcatagtgggattcacgcggcagctcgctaacgaagggtgcgacatcaatgcaatcatatttcacacaaaaaaaaagttaagtgtttgtgcaaacccaaagcagacgtgggtgaagtatattgtgcgactactctcaaagaaggtgaagaacatgtag

SEQ ID NO: 182601 - DNA, 288 bp, synthetic construct
  misc_feature 1..288: note = Description of Artificial Sequence: Synthetic coding sequence
  source 1..288: mol_type = other DNA
atgtgctgcaccaagagcctgctgctggccgccctgatgagcgtgctgctgctgcacctgtgtggagaatcagaggcatccaattttgattgctgcctaggatacacagacagaatcctgcacccaaaatttattgtgggttttacacgacagctggcaaacgaaggctgtgacatcaatgccatcatattccatactaaaaagaaactgagtgtctgcgctaacccaaagcagacctgggtcaaatatatcgtgaggctgctgtctaaaaaagttaaaaatatgtag

SEQ ID NO: 182602 - DNA, 405 bp, synthetic construct
  misc_feature 1..405: note = Description of Artificial Sequence: Synthetic coding sequence
  source 1..405: mol_type = other DNA
atggcccagagcctggccctgagcctgctgatcctggtgctggcctttgggatcccacgcacccaggggagtgacgggggagcacaggattgctgcctcaagtattcccagcggaagatccccgcaaaagtagtgcgttcttataggaaacaggagccctctttgggttgttccatccccgccatcctgttcctaccaagaaagagatcccaagcagagctgtgtgcagatcctaaagaactgtgggttcagcagttgatgcagcatctggacaagacccccagtcctcaaaaaccagcccaggggtgccggaaggatcgcggagccagcaagactggcaagaaaggaaagggaagtaaggggtgcaaacgtaccgagcgaagtcagactcctaaaggaccttag

SEQ ID NO: 182603 - DNA, 375 bp, synthetic construct
  misc_feature 1..375: note = Description of Artificial Sequence: Synthetic coding sequence
  source 1..375: mol_type = other DNA
atggcccagagcctggccctgagcctgctgatcctggtgctggccttcggcattccaagaactcagggcagcgatggcggagctcaggattgctgtctgaagtattcacagagaaaaattccagcaaaggtggtcagatcctatcgcaaacaggagccgtcactcggctgtagtattcccgccattttattcctgcccaggaagagatcccaagcagagctgtgtgccgaccccaaggaactatgggttcagcagctgatgcagcacctggataaaacaccctccccacagaagccggcacaaggttgtaggaaggatagaggagcttcaaaaacaggcaaaaaaggaaaaggatccaagggttgtaaaagatag

SEQ ID NO: 182604 - DNA, 549 bp, synthetic construct
  misc_feature 1..549: note = Description of Artificial Sequence: Synthetic coding sequence
  source 1..549: mol_type = other DNA
atggccgagttccccagcaaggtgagcacccggaccagcagccccgctcaaggagccgaggccagcgtcagcgccctcaggcccgacctcggattcgtgcggtcaagactcggcgctctgatgctgctccagctggtcctgggcctcctggtgtgggcgctgatcgccgacacaccgtaccacctgtaccctgcctacggatgggttatgttcgtggccgtcttcctgtggctggtgaccattgtactttttaacctctacttgttccagctgcacatgaaactgtacatggtgccctggcccttggtgcttatgatttttaacatatctgccaccgttctgtacattacagcctttattgcatgcagcgcggcggtcgaccttaccagtcttcgcgggacgcgaccttataaccagcgtgctgctgcctccttctttgcatgtctggtgatgatcgcgtatggggtgtctgctttcttcagctatcaagcgtggagaggagtaggaagcaatgctgctaccagtcaaatggccggcggatatgcctag

SEQ ID NO: 182605 - DNA, 414 bp, synthetic construct
  misc_feature 1..414: note = Description of Artificial Sequence: Synthetic coding sequence
  source 1..414: mol_type = other DNA
atgaaggtgagcgtggccgccctgagctgcctgatgctggtgaccgctctaggcagccaggctcgggtgactaaagacgccgaaaccgagttcatgatgagcaagctccctctggagaatcccgtgctgttggatatgctttggaggcgcaagatcggaccacagatgacgctgtcgcacgccgcaggttttcatgcaaccagtgctgattgttgtatcagttatacaccacgatctattccgtgcagcctactcgaatcctatttcgaaaccaactctgagtgcagtaagcccggcgttatcttcttgacaaagaagggtcggcgcttctgcgctaacccaagcgataaacaagtccaggtgtgtgtccgtatgctgaaactggacactaggataaaaacccgaaagaactag

SEQ ID NO: 182606 - DNA, 363 bp, synthetic construct
  misc_feature 1..363: note = Description of Artificial Sequence: Synthetic coding sequence
  source 1..363: mol_type = other DNA
atgaaggtgagcgtggccgccctgagctgcctgatgctggtgaccgcactgggcagccaagctcgggtcaccaaggacgcagagacagaattcatgatgtcgaaactgcccctcgaaaatccggtgctgttagacagattccatgccacatccgctgattgctgcatcagttatacaccacggtccattccttgttctcttctggagtcttacttcgaaacgaattccgagtgcagtaagccgggcgtgattttcctgacgaagaaggggagacggttttgcgctaatcctagcgataaacaggttcaggtatgcgttcgtatgctgaaattggacacccgtatcaagacaaggaaaaactag

SEQ ID NO: 182607 - DNA, 2862 bp, synthetic construct
  misc_feature 1..2862: note = Description of Artificial Sequence: Synthetic coding sequence
  source 1..2862: mol_type = other DNA
atggaggagcagggccacagcgagatggagatcatccccagcgagtcgcatccccacatacaactccttaagagtaacagggagttgctggtcacacatataagaaacacacagtgtttggtggacaatctgcttaagaacgattacttctcagccgaagatgcagaaattgtgtgtgcatgccctacccagccagacaaagtcaggaaaatcctggatctcgttcagtccaaaggcgaggaagtttctgaattctttctttacttgttgcaacagctggccgatgcctatgtggatctccgcccgtggctgctagagattgggtttagtcctagtttactgacgcagtccaaagtggtggttaacacagaccctgtctcccgctacactcagcagctgcgtcaccatctcgggcgagacagtaagtttgtgctctgctacgctcaaaaggaggagctactcttggaagagatttatatggataccatcatggagcttgtcgggttttctaacgaaagcctggggtctctgaacagtctcgcctgtctgctggatcataccaccggcattctgaacgagcagggcgagacaatctttatcttgggggatgccggcgttggcaagtccatgctgctgcagagacttcagtcactttgggccacgggtagacttgatgctggagtgaagttcttcttccatttcaggtgccgaatgttttcttgcttcaaggagtccgatcggctgtgtctccaggacctgctgtttaaacactactgttatcccgagcgggatcccgaagaagtatttgcgttcctgctgcgattcccacacgtagccttgtttacctttgatgggctggacgagcttcactcagatctcgatctgtcccgagtgcccgacagcagctgtccttgggagcccgcccacccgttggtcttgctggctaatctcctgagcggcaagcttctgaagggcgccagtaaactgctaacagcccgaacggggatcgaggtcccgcgccagtttctgaggaaaaaggtgctcctgaggggcttctccccttcccacttgcgagcatatgctcgacgcatgttcccagaacgagcacttcaagaccgcttgttatcccagctggaggccaacccaaatctgtgttccttgtgtagcgtgccactcttttgctggataatttttcgttgttttcaacattttcgcgccgctttcgaaggttccccccaactgcccgactgcacaatgactctcacggatgtctttcttcttgtgacagaggtccacctgaaccgtatgcagccctctagcctggtgcagaggaacacacgatcaccagttgaaaccttgcacgccggaagggacaccctctgcagcctggggcaggtggcccatagaggcatggagaaatctctgttcgtcttcacccaggaagaagttcaggccagcggcttgcaggagagagacatgcagcttggatttctgcgtgctctgccagagctgggcccaggaggggaccagcagtcttatgaatttttccatctgacgttgcaggcttttttcactgcgttcttcttagttctcgacgatagggtgggcacacaggagttactccgctttttccaagagtggatgcccccagctggggccgcaacaactagttgctatccaccgttcctcccgtttcaatgtttgcaaggttcagggccggctagggaggacctcttcaagaataaggaccatttccaattcacaaatttgtttctttgcggcttacttagcaaggccaaacaaaagctgctgcgccacctggtccccgccgccgctctgcgccgcaagcgcaaagccctgtgggctcaccttttttcctctctgcggggttatcttaagagcctgcctcgggtgcaagtcgagtcattcaatcaggttcaggcaatgcccacctttatatggatgctgcgatgtatctacgagacgcagtctcaaaaggtaggtcaattggctgcacgtggaatttgcgcgaattatcttaaacttacctactgtaatgcatgttccgctgattgttcagcattgtcctttgtgttgcatcatttcccaaaacgcctagcgctggaccttgataacaacaatctgaatgattacggggttcgggaactccagccttgcttttcacgactgaccgtgcttcgtctctctgtcaaccagataaccgacggaggggtgaaggtgttgagcgaggagctcaccaagtacaagatagtgacctacctgggcctatacaacaatcaaatcactgacgtgggcgctcgatatgtgacaaaaatcttagatgaatgcaaagggctcacacatctgaagctgggaaagaacaagattaccagtgaaggaggcaaatacctggctctcgcagtgaagaatagtaagagtatcagcgaggtcggcatgtggggaaatcaggttggagacgagggggccaaggcattcgctgaggccttgaggaaccatccatcattaaccacactgagcctggcaagtaacggcatctccaccgaggggggcaaatctctcgccagagcactccagcagaacacctccctggaaatcctgtggttaacccaaaacgaactgaatgacgaggtggccgagagcttggccgagatgctcaaggtgaaccagaccctgaagcacctgtggttaatccagaaccagattacagcaaagggcaccgcccagctggccgatgcattgcagtccaacacaggcatcaccgaaatatgcttgaacggaaacctgattaagcctgaagaagcgaaggtgtatgaagatgagaaacggattatttgtttctag

SEQ ID NO: 182608 - DNA, 360 bp, synthetic construct
  misc_feature 1..360: note = Description of Artificial Sequence: Synthetic coding sequence
  source 1..360: mol_type = other DNA
atggccggcctgatgaccatcgtgaccagcctgctgttcctgggcgtctgtgctcatcatattattcccactggctccgtagtgataccgagcccttgttgtatgttttttgtctccaagcgtatcccggaaaatcgagtggtctcttatcagctgagcagtaggagcacatgcttgaaagctggtgtgattttcaccactaagaaggggcagcagttctgtggcgatccaaagcaggaatgggtacagcgttacatgaagaacctggatgcaaaacagaagaaggccagccctagggcgcgcgcagtcgccgtcaaagggcccgtgcaaaggtaccccggcaatcagacgacatgttag

SEQ ID NO: 182609 - DNA, 450 bp, synthetic construct
  misc_feature 1..450: note = Description of Artificial Sequence: Synthetic coding sequence
  source 1..450: mol_type = other DNA
atgaacctgtggctgctggcctgcctggtggccggcttcctgggcgcatgggcgcctgcagtccacacgcagggggtgtttgaggattgttgcttagcgtaccattatcccataggttgggcggtcctgcggcgtgcctggacatacagaatacaggaggtctctgggagctgtaacctgccagcggcgatcttttacctacctaagaggcatcggaaagtatgtggtaacccaaagagcagagaagtgcaaagggctatgaaacttctcgatgcccggaataaagtgtttgcaaagttacatcacaacactcagacgttccaaggcccgcacgccgtgaaaaaattgtcttcaggaaacagtaaactttcttcatccaaattttccaaccccatatcctcaagtaagcgtaatgtttctctgcttatctcagccaacagcggtctgtag

SEQ ID NO: 182610 - DNA, 255 bp, synthetic construct
  misc_feature 1..255: note = Description of Artificial Sequence: Synthetic coding sequence
  source 1..255: mol_type = other DNA
atgaacctgtggctgctggcctgcctggtggccggcttcctgggcgcctgggccccagccgtccatactcagggtgtttttgaagattgttgtttagcataccattaccctatcggatgggctgtgctgcgtagagcgtggacataccggatccaggaggtgtccggatcatgtaatctgcctgccgccatccgtccatcatgttgtaaggaggtggagttctggaagttgcaggttatcatcgtccaggtatag

SEQ ID NO: 182611 - DNA, 453 bp, synthetic construct
  misc_feature 1..453: note = Description of Artificial Sequence: Synthetic coding sequence
  source 1..453: mol_type = other DNA
atgaacctgtggctgctggcctgcctggtggccggcttcctgggcgcctgggcacccgctgttcatacacagggagttttcgaggactgctgtctcgcctatcactatcctatcggatgggcagttctacgcagggcttggacatacaggatccaagaggtgtcagggtcttgcaatttgcctgccgctatcttctatctccctaaaaggcatcggaaggtgtgcggtaacccgaagtcccgcgaagtgcagagagccatgaagctactggacgcgcgcaacaaggtgtttgctaaacttcaccacaacactcagacttttcaagcgggcccccacgccgtgaagaagttgtcaagtggaaacagcaaactctcatcctcaaagttcagtaatccgatcagctcttccaagcgaaatgtatcgctgcttatttcagcaaattcagggctatag

SEQ ID NO: 182612 - DNA, 285 bp, synthetic construct
  misc_feature 1..285: note = Description of Artificial Sequence: Synthetic coding sequence
  source 1..285: mol_type = other DNA
atgatgggcctgagcctggccagcgccgtgctgctggccagcctgctgagcctgcacctaggcaccgcaactcgaggctccgatatctcaaagacctgttgtttccagtacagtcacaagcctctgccctggacctgggttcgttcatatgagtttacctccaatagctgctcccaacgagccgtgattttcactaccaaaagggggaagaaggtgtgtacacaccctagaaagaaatgggtgcagaaatacatctctttgctgaagacccccaagcagctgtag

SEQ ID NO: 182613 - DNA, 285 bp, synthetic construct
  misc_feature 1..285: note = Description of Artificial Sequence: Synthetic coding sequence
  source 1..285: mol_type = other DNA
atgatgggcctgagcctggccagcgccgtgctgctggccagcctgctgtcccttcacctggggacagcaactagaggcagtgacatttctaaaacctgttgtttccagtattcgcataaaccgttgccttggacgtgggtccgctcgtatgaatttacctccaattcctgctcacagagggccgttattttcaccaccaaacgaggcaagaaagtgtgcacacaccccagaaaaaaatgggtccagaaatatatctctctattaaagactcccaagcaactgtag

SEQ ID NO: 182614 - DNA, 339 bp, synthetic construct
  misc_feature 1..339: note = Description of Artificial Sequence: Synthetic coding sequence
  source 1..339: mol_type = other DNA
atgaagggcccccccaccttctgcagcctgctgctgctgagcctgctgttaagcccagatccgacagccgcgtttctcctccccccatctaccgcttgttgcacacagctgtatcggaagccacttagcgacaagcttctgagaaaagtgatccaggtagagctgcaggaggccgacggagactgtcacctgcaagcattcgtgctgcatttggcccaacgttctatctgcattcatcctcagaaccccagcctcagccaatggttcgaacaccaggagcgaaagcttcacggtacacttcctaagctcaattttggaatgttgaggaaaatgggctag

SEQ ID NO: 182615 - DNA, 384 bp, synthetic construct
  misc_feature 1..384: note = Description of Artificial Sequence: Synthetic coding sequence
  source 1..384: mol_type = other DNA
atgcagcagcggggcctggccatcgtggccctggccgtgtgcgccgcgttacatgctagcgaagctatcctgcccatcgcttcctcatgttgtacagaagtaagtcatcacatcagcaggcgactgttggagcgggtaaatatgtgtagaatccaaagggcagacggggactgcgaccttgctgccgttatcctgcacgtgaaacgtcggcgaatctgtgtctctccccataatcacacagtcaaacaatggatgaaggtacaggccgccaagaagaacgggaaaggaaacgtctgtcaccgaaagaaacatcacggcaagaggaacagcaatcgggcacaccagggaaaacacgagacgtacgggcacaagacgccatattag

SEQ ID NO: 182616 - DNA, 384 bp, synthetic construct
  misc_feature 1..384: note = Description of Artificial Sequence: Synthetic coding sequence
  source 1..384: mol_type = other DNA
atgcagcagcggggcctggccatcgtggccctggccgtgtgcgccgcactccacgcttcggaggcgattctgccaatcgcgtcgtcctgctgtacagaagtttcccatcacatcagccgccgactactggagcgcgtgaacatgtgccgcatccaaagggctgacggcgactgcgatcttgccgccgtaattctgcacgttaaacggaggagaatttgtgtctcaccccataatcacaccgtaaaacagtggatgaaagtgcaggccgctaaaaaaaatggtaaaggtaatgtgtgccatcgaaagaagcaccatggaaagagaaattctaacagagcccaccagggtaaacatgaaacctatggccacaaaactccgtattag

SEQ ID NO: 182617 - DNA, 243 bp, synthetic construct
  misc_feature 1..243: note = Description of Artificial Sequence: Synthetic coding sequence
  source 1..243: mol_type = other DNA
atgtgccggatccagcgggccgacggcgactgcgacctggccgccgttatcctgcacgtcaagcggcgaaggatctgcgtttcacctcacaaccataccgtcaagcaatggatgaaagtccaagccgccaaaaaaaacggtaaaggcaatgtgtgtcatcgcaaaaagcatcacgggaaacggaacagtaacagagcccaccaaggcaagcacgagacatacggacataagactccttattag

SEQ ID NO: 182618 - DNA, 354 bp, synthetic construct
  misc_feature 1..354: note = Description of Artificial Sequence: Synthetic coding sequence
  source 1..354: mol_type = other DNA
atgcagcagcggggcctggccatcgtggccctggccgtgtgcgccgcgctgcacgcttctgaggccatcttacctattgccagctcatgctgcacagaggtgtcccaccacatttcccgccgcttgctcgagcgtgttaacatgtgccggattcagcgggctgacggggactgcgatctcgccgcggttatgttggaatgcagtgacatgataagcgctcactacaaccttcatcttcccggctccaatgattccccgacctcagccttccaggtggcgggtatcactgcttttatgagtagcgcagaggagtccgtgtctgctcggaccaccatccttctcagctcaggatag

SEQ ID NO: 182619 - DNA, 282 bp, synthetic construct
  misc_feature 1..282: note = Description of Artificial Sequence: Synthetic coding sequence
  source 1..282: mol_type = other DNA
atgcaggtgagcaccgccgccctggccgtgctgctgtgcaccatggctctgtgtaatcaggtactgagcgcacctctggctgcggacacacctaccgcttgctgtttttcgtacaccagtagacaaatcccgcaaaacttcattgccgactacttcgagaccagctcccagtgtagtaagccctctgtgattttcctcactaagcgggggaggcaggtctgtgccgatccctccgaggaatgggtgcagaaatatgtatcagacctcgagctgtctgcatag

SEQ ID NO: 182620 - DNA, 159 bp, synthetic construct
  misc_feature 1..159: note = Description of Artificial Sequence: Synthetic coding sequence
  source 1..159: mol_type = other DNA
atgcaggtgagcaccgccgccctggccgtgctgctgtgcaccatggctctttgcaaccaagtgctgtctgcaccattgtccaggcctagggaagccggcagatccgtgctcacccccgtccgcagcgggtctaggaacacaagtgtgacctggagctag

SEQ ID NO: 182621 - DNA, 144 bp, synthetic construct
  misc_feature 1..144: note = Description of Artificial Sequence: Synthetic coding sequence
  source 1..144: mol_type = other DNA
atgcaggtgagcaccgccgccctggccgtgctgctgtgcaccatggcactgtgtaaccaggtgttgtccgccccacaggctggcaggagcgtgctgacccccgtaaggtccggaagcaggaatacgtcagtgacatggagctag

SEQ ID NO: 182622 - DNA, 279 bp, synthetic construct
  misc_feature 1..279: note = Description of Artificial Sequence: Synthetic coding sequence
  source 1..279: mol_type = other DNA
atgaagctgtgcgtgaccgtgctgagcctgctgatgctggtggccgccttttgttcacccgctttgagcgctcctatgggcagtgacccgcccaccgcttgttgtttttcatatacagctaggaagttacccaggaactttgtggtggactactacgagacctcttctttgtgcagccaaccagctgtcgtgtttcagactaagaggagcaaacaggtctgcgcagatccgagtgagtcttgggtgcaggaatatgtctatgaccttgagctgaattag

SEQ ID NO: 182623 - DNA, 159 bp, synthetic construct
  misc_feature 1..159: note = Description of Artificial Sequence: Synthetic coding sequence
  source 1..159: mol_type = other DNA
atgaagctgtgcgtgaccgtgctgagcctgctgatgctggtggccgctttctgcagccccgccctctccgcacctaatagtaaacccaaagaagcaagcaagagcgtgctgattcctgtgaatcctggatcccgatcaacctgcatgacctggaactag

SEQ ID NO: 182624 - DNA, 159 bp, synthetic construct
  misc_feature 1..159: note = Description of Artificial Sequence: Synthetic coding sequence
  source 1..159: mol_type = other DNA
atgaagctgtgcgtgaccgtgctgagcctgctggtgctggtggccgcgttctgcagtttagctctctctgcacccaactctaaacccaaggaagcttccaaatccgctctcacccccgtctcccctggctcacgctcaacatgcatgacctggaactag

SEQ ID NO: 182625 - DNA, 207 bp, synthetic construct
  misc_feature 1..207: note = Description of Artificial Sequence: Synthetic coding sequence
  source 1..207: mol_type = other DNA
atgaagctgtgcgtgaccgtgctgagcctgctggtgctggtggccgccttttgctctcttgctttatcagcccccactaagtcttcagagtggaaattgcagggggtttgctttcagtgctgctcccgcaaggatccgattcaccagtcctgtcccacatggactatggttcgacagcgcaagatgccaaccactgggaagggttag

SEQ ID NO: 182626 - DNA, 261 bp, synthetic construct
  misc_feature 1..261: note = Description of Artificial Sequence: Synthetic coding sequence
  source 1..261: mol_type = other DNA
atgaagctgtgcgtgaccgtgctgagcctgctggtgctggtggccgccttttgcagcctcgccctatctgcgcctatgggcagcgatccgccaaccgcctgctgcttttcttacacagcccgcaagttaccacgaaatttcgtcgttgattactacgaaacctccagtttatgttcccagcccgccgtcgtcgcggctccacacgggccatggagcggacgtggtagatgcttgcctcaagctagggataaagctaggtag

SEQ ID NO: 182627 - DNA, 279 bp, synthetic construct
  misc_feature 1..279: note = Description of Artificial Sequence: Synthetic coding sequence
  source 1..279: mol_type = other DNA
atgaagctgtgcgtgaccgtgctgagcctgctggtgctggtggccgccttttgctctttagccctgagcgcccccatgggaagcgaccctcctacagcctgttgcttctcgtatacagcccggaagcttccccgcaacttcgttgttgactattatgaaacttcctcactctgcagtcaaccggccgttgtttttcaaaccaagcgcggtaaacaggtttgtgccgatccatccgagagttgggtgcaggagtacgtttatgacttagagctgaactag

SEQ ID NO: 182628 - DNA, 300 bp, synthetic construct
  misc_feature 1..300: note = Description of Artificial Sequence: Synthetic coding sequence
  source 1..300: mol_type = other DNA
atgaaggtgagcgccgccctgctgtgcctgctgctgatcgccgccaccttcatcccgcagggacttgcccagccggacgccataaatgcaccagtcacctgttgctacaacttcaccaaccgtaagatcagcgtgcagagattggctagctaccgcagaatcacttcaagtaaatgcccaaaggaagctgtgatttttaaaactatcgttgcgaaagagatctgcgctgacccaaaacaaaagtgggttcaggacagtatggaccatctagataagcagacccagactcccaagacctag

SEQ ID NO: 182629 - DNA, 330 bp, synthetic construct
  misc_feature 1..330: note = Description of Artificial Sequence: Synthetic coding sequence
  source 1..330: mol_type = other DNA
atgctgaagctgacccccctgcccagcaagatgaaggtgagcgccgcacttctttgcctgctcttgatggccgccaccttcagcccgcaaggccttgctcagcctgactccgtatcgatcccaatcacgtgttgtttcaatgtaatcaatcgtaagatccccatacaacggctggagtcctacacgaggataaccaacatccagtgcccaaaagaggccgtgatcttcaagaccaaacgggggaaggaggtgtgcgcagatccaaaagagcggtgggtgagggactctatgaaacatctggatcagatctttcagaatcttaagccctag

SEQ ID NO: 182630 - DNA, 1068 bp, synthetic construct
  misc_feature 1..1068: note = Description of Artificial Sequence: Synthetic coding sequence
  source 1..1068: mol_type = other DNA
atggagacccccaacaccaccgaggactacgacaccaccaccgagttcgattatggtgacgccaccccttgtcagaaggtgaacgaacgtgcctttggtgcccagcttctccctccgctgtattcactagtgttcgtaattgggttagtcgggaatatccttgttgtacttgttcttgtccagtacaagcgcctgaagaacatgacgagcatctaccttctgaaccttgcaatcagcgacttattgtttctgttcacactccccttttggattgactacaaactcaaagatgactgggttttcggcgatgcaatgtgcaaaattctgagcggattctattacacgggactgtactcagaaatcttctttattatactgctcacaattgatcgttacttagctatcgtccacgccgtctttgcactgcgggcccggacagttacctttggagtgattacatctattattatttgggctctggccatcttagcatcaatgcctggattgtatttttccaagactcagtgggagttcacacaccacacttgcagcctccacttccctcacgaatccctacgggaatggaagctgttccaagccttgaaactcaacttgtttgggttggtactgcctcttctcgtcatgattatctgttacacgggaataattaagatcctgcttagaagacctaacgagaagaagtccaaggctgtgcgactgatcttcgtgattatgatcatcttcttccttttctggaccccttataatctaactattcttatttcagtctttcaagacttcctgtttacgcatgagtgtgaacagtcacggcatcttgatctggcagtgcaagttacagaagtcatcgcctacactcattgttgtgtaaatcccgtcatttacgccttcgtgggagagaggttccgaaaatacctgcggcaattattccacaggcgagtcgctgtgcatctggtaaagtggctccctttcttgagcgtggacagactggaacgcgtctcctctaccagcccgagcaccggcgaacatgagctcagcgctggattctag

SEQ ID NO: 182631 - DNA, 1089 bp, synthetic construct
  misc_feature 1..1089: note = Description of Artificial Sequence: Synthetic coding sequence
  source 1..1089: mol_type = other DNA
atgggcaccgaggccaccgagcaggtgagctggggccactacagcggggatgaggaggacgcttattcagctgaacccctgcctgagctctgttacaaggctgatgtccaggctttttcccgcgcttttcagcccagcgtctccctcactgtcgccgccttgggtttagccggcaatggtcttgtgctcgcgacgcatttagccgcgaggcgggctgccagatcgcccacttcagcccatctgctgcagttagcccttgctgatctgttgctcgcactgacgctccccttcgctgccgccggcgccctgcaggggtggagcttggggtctgcgacctgccgaaccatcagtggactatactccgcctccttccacgctggcttcctgtttctggcatgcatttcggccgaccggtatgtggcaatcgcccgggctctgcccgccgggcccagacccagcactcctggaagagcccatctggtgtcggtaattgtgtggctgctgagcctgctcctggccctgccagctctgttgttcagtcaggacggacagcgggagggacagagacgatgtcgcctgatcttcccagaggggttaacgcagacagttaaaggcgcgagcgcggtggctcaggtagccctcggttttgcacttccgctgggcgttatggtagcctgttacgcactcctcggacgcacacttctagcggcccggggtcccgaaagacggagggctctgagagttgtggtagcattagtggccgcattcgtcgtgctgcaactgccctactctttggccctattgctggataccgctgacctgttggctgctcgagagagaagctgtccagcctcaaagcgcaaggacgttgcgctcctggtgactagtggccttgctctggctaggtgtggcctcaatcctgtcttatatgcattcctaggcctgcgcttccgtcaggaccttagacgcttactgagagggggcagctgtccgtctgggcctcaacctaggcgcggctgtccccggcgaccaaggctgagcagttgctctgctcccactgagacccacagcttatcttgggacaactag

SEQ ID NO: 182632 - DNA, 1125 bp, synthetic construct
  misc_feature 1..1125: note = Description of Artificial Sequence: Synthetic coding sequence
  source 1..1125: mol_type = other DNA
atgctgagcaccagccggagccggttcatccggaacaccaacgagagtggagaggaagtaactacattttttgactacgactacggagccccatgccataaatttgacgtgaagcagatcggcgctcagctgctgcctcccctctacagtcttgtctttatcttcggattcgtggggaatatgttggtggttcttatcttgattaactgtaagaagctgaaatgcctgacagatatctatctgctaaacttagcaatcagtgacctgttgttcctaataacgctcccactttgggcccatagtgccgccaatgagtgggtgtttgggaacgccatgtgcaaattattcacaggactgtaccacattgggtatttcggcggaattttctttattatccttctcaccatcgaccgctatctggccattgtgcacgcggtgttcgcccttaaggctcgaacggtgacctttggggtcgtgaccagtgtgatcacttggctggtcgccgttttcgccagcgtgcccggtatcattttcacaaagtgccagaaggaggattctgtgtacgtgtgcggaccttacttcccacgaggttggaacaattttcatacaatcatgcggaatatcttaggtctggtgctgcctctgttaatcatggttatttgttattccggaatccttaagaccctcctccgttgccgcaacgagaagaagaggcatcgggcagtccgagttatatttaccattatgattgtctacttcctgttctggacaccgtataacatcgtgatactgctcaataccttccaggaattttttgggctgtccaattgtgaatccacatctcagctcgaccaggccacacaagtgaccgagaccctgggcatgacccattgctgcattaaccccattatatacgctttcgtcggggaaaaatttaggtccttgttccacattgcattgggctgtaggattgcgcccctacagaagcctgtgtgcgggggtcccggcgttaggccagggaagaacgtgaaggtcacaacacaggggctgttggacggccgcggaaaagggaaatccattggcagagcgcccgaagcgtctttgcaggataaagagggtgcatag

SEQ ID NO: 182633 - DNA, 1125 bp, synthetic construct
  misc_feature 1..1125: note = Description of Artificial Sequence: Synthetic coding sequence
  source 1..1125: mol_type = other DNA
atgctgagcaccagccggagccggttcatccggaacaccaacgagtcaggggaagaagtgaccaccttcttcgactacgactacggagctccttgccataagtttgacgtgaagcagataggcgcccagctgctgccccccctgtattctctggtgtttatcttcgggttcgttgggaacatgctggtggtcctgattctgattaactgcaagaagctgaagtgtttaactgacatatatttactcaacttagccatctcagatctcctttttctgataactctgcccttgtgggcacattccgctgccaatgagtgggttttcggcaatgccatgtgtaaattgttcactggcctgtatcacattggctacttcggtggtatcttcttcataatcctgctcaccattgaccgctaccttgccatagtccacgcggtgttcgccttgaaagcgcggaccgttacattcggcgtggtaacctccgtgatcacatggcttgtggccgtgttcgccagcgtgccaggaattattttcaccaaatgtcagaaggaagactctgtgtatgtttgcggcccatacttccccagggggtggaacaacttccataccatcatgcgtaacatactgggattggtattgccactgcttattatggtaatttgttactctggaatcctgaaaactcttcttagatgccggaacgagaagaagaggcatagagccgttcgagttattttcacaattatgatagtctatttccttttctggaccccctataacattgttatactcctgaataccttccaagagttttttggcttatctaattgcgaatctacctctcagcttgaccaggcgacacaggttacagagaccctcggcatgacacactgctgtatcaaccccatcatctatgctttcgtgggggagaaattccgaagcctctttcacatcgcactgggctgtagaatagcacccctgcagaaaccagtgtgtggtggcccgggtgtgcgtccaggaaagaatgtcaaagttactactcaagggttgctggatggaaggggcaagggaaagtccataggcagagctcctgaagccagccttcaggataaggagggcgcatag

SEQ ID NO: 182634 - DNA, 366 bp, synthetic construct
  misc_feature 1..366: note = Description of Artificial Sequence: Synthetic coding sequence
  source 1..366: mol_type = other DNA
atgctgagcaccagccggagccggttcatccggaacaccaacgagagcggcgaggaagtgacgactttttttgactatgattacggagccccttgtcacaagtttgacgtgaaacagattggagcccagttgctgccgccactgtatagcctggtgttcatatttggattcgtgggaaacatgctcgtggtgcttatactgattaactgtaagaagctgaaatgcctaacagatatatatctcctcaacctggccatttccgatcttttgttcttgatcaccctccctctatgggcacactctgcagctaacgaatgggtttttggtaatgcgatgtgtaagctgttcacaggtctgtatcactag

SEQ ID NO: 182635 - DNA, 1083 bp, synthetic construct
  misc_feature 1..1083: note = Description of Artificial Sequence: Synthetic coding sequence
  source 1..1083: mol_type = other DNA
atgctgagcaccagccggagccggttcatccggaacaccaacgagagtggcgaggaagtgacgaccttcttcgactacgactatggtgccccttgtcataagtttgatgtgaaacagattggggcacagttactgccgccgttatacagtcttgtgtttatctttggattcgttgggaacatgctggtagtgctcatcctgataaattgcaagaaacttaagtgtctgactgatatctacctgctgaatcttgccatcagcgatctgctctttttgatcaccctaccactgtgggcacactcagccgcaaatgaatgggtgttcggtaatgccatgtgcaaactgtttactggcctctaccacatcgggtacttcggcggcattttttttatcatactgttgacaatagacaggtatctcgccattgttcacgccgtgttcgcgctcaaggcgcgtacagtgacattcggcgtcgtgacaagtgtaattacttggctagttgctgtgtttgcctctgtgcctggcataattttcactaaatgtcaaaaggaggatagcgtgtacgtatgcggaccgtacttcccaagagggtggaacaactttcacacgatcatgaggaacatactgggcctggtgcttcccctactgatcatggtgatttgctactcggggatattgaaaaccctccttcgttgcagaaacgagaaaaagaggcacagagctgtgcgggtgatttttactatcatgattgtgtattttcttttctggacaccctataatattgttatcttattaaatacttttcaggagttcttcggactatcaaattgcgagtccacctcgcaactcgaccaggccacacaggtgacagagacactcggcatgacgcattgttgcatcaacccaattatttacgcctttgtgggcgagaagtttcggcggtatctgagcgtcttttttaggaaacacattaccaaacgcttttgcaaacagtgtccagttttctacagggaaactgtagatggtgtgacctccactaatacacctagcaccggggaacaggaagtctccgcaggtctttag

SEQ ID NO: 182636 - DNA, 1068 bp, synthetic construct
  misc_feature 1..1068: note = Description of Artificial Sequence: Synthetic coding sequence
  source 1..1068: mol_type = other DNA
atgaccaccagcctggacaccgtggagaccttcggcaccaccagctattacgatgatgtcggcctcctttgcgagaaagcagacacacgcgcactcatggcccagttcgtaccgccactctacagcctggtgttcaccgtaggactactcggcaatgtcgtcgtcgtgatgattttaatcaaatacaggagactaaggattatgacaaacatatatctgttgaaccttgcaatctctgatttacttttcctggtaacgctcccattctggattcactatgtgcgtggccacaattgggtgttcggtcacggtatgtgtaaacttctgagcggtttttatcacaccggcctatattcggagatctttttcatcatccttctgaccatcgatagataccttgctatcgtccacgccgtttttgcgctgagggcacgtacagtgactttcggagtgattacatcaattgtgacctggggtctcgctgtgcttgcagccctgcctgaattcatattttacgaaacagaggagctttttgaagagaccttatgcagtgccctgtacccagaagatactgtgtatagttggcgccacttccatactctccgcatgacaatcttctgtctagtgttgcccctgctggtgatggcaatatgttacacaggtattatcaagactctcctgagatgcccaagcaaaaagaaatacaaagctattcgcctgatcttcgtgattatggcagtgttctttattttttggaccccttacaacgtggctattttgctgtcttcataccagtccattctcttcggcaatgactgcgagcggagtaaacaccttgacttggtgatgctcgtgacagaagtgattgcttatagtcattgttgtatgaacccagtcatctatgcctttgttggggagcgctttcgaaaatatctccgccatttcttccaccgtcatctattgatgcatctggggaggtacatcccattccttccttcagagaaactggagaggaccagctcggtgtcaccatctaccgctgaaccagagctctcaatagttttctag

SEQ ID NO: 182637 - DNA, 1068 bp, synthetic construct
  misc_feature 1..1068: note = Description of Artificial Sequence: Synthetic coding sequence
  source 1..1068: mol_type = other DNA
atgaccaccagcctggacaccgtggagaccttcggcaccaccagctattatgacgacgtcggcctcctatgcgagaaagctgacacacgtgccctcatggcccagttcgtcccacctctgtacagccttgtattcacagtcggtctgttagggaacgtggtggtggttatgatcctcatcaagtatcggcggcttcgaattatgaccaatatctacttgctgaacttggcgattagtgaccttctgtttctggtgacgctccctttttggattcactatgtgaggggccacaattgggtgttcggtcacgggatgtgtaagttgctttcagggttttatcacactgggctgtattcagaaatattctttatcatccttcttaccatagaccggtacctggctatcgtgcacgccgtcttcgccctgcgggctagaacagtgacttttggcgtaatcaccagcatcgtcacatggggcttagccgtactggccgctctgcctgaattcattttctatgagaccgaagagctgtttgaggaaaccctctgttcagcgctgtatcccgaggacaccgtgtacagttggaggcattttcacactcttcgcatgacaatcttttgtctggttctacccctgctggtgatggcgatctgttatacggggatcatcaaaacactccttcgatgtccctctaagaaaaaatataaagctatccgcttaatttttgtcataatggctgtgttcttcatcttttggactccttataatgtggccatcctcctgtcttcttatcagagtatactgtttgggaacgactgcgagcggtccaagcacttggacctggtcatgctcgtaaccgaggttatcgcttatagccactgctgcatgaaccctgtgatttatgcttttgtaggcgaacgcttccggaagtacctgcggcattttttccaccgacacctcttaatgcacctcggccggtatattccctttctgccgtctgagaagctcgagaggacctcgtcagtgtccccaagtacggcggaacccgagttatccattgtgttctag

SEQ ID NO: 182638 - DNA, 1068 bp, synthetic construct
  misc_feature 1..1068: note = Description of Artificial Sequence: Synthetic coding sequence
  source 1..1068: mol_type = other DNA
atgaccaccagcctggacaccgtggagaccttcggcaccaccagctattacgacgacgtgggactgctgtgcgagaaagcggataccagagcactcatggcccaattcgtcccccctctctactccctggtgttcacagtcggactcctgggaaatgtcgttgttgtgatgatcctcatcaagtaccggaggttaaggatcatgaccaacatctatctgttgaacttggccatatctgacctccttttcctggttaccttaccgttttggatacactacgtccgcggccacaattgggtgttcgggcatggcatgtgcaagctgctatccgggttctatcacaccggactgtatagcgagatattctttatcattctcctaacgattgatcggtacttggccatcgtccatgctgtcttcgcactgcgggcccggaccgtgacattcggcgtgatcaccagcattgtgacttggggactagcagttctggcggccctgccggagtttattttctacgaaactgaggagctatttgaggagacactgtgcagcgccctgtaccctgaagacacagtatactcatggaggcactttcacactctgcggatgacgatattttgccttgtgttaccactccttgtaatggccatctgctataccggcatcatcaagactttgcttagatgtcctagtaagaagaagtataaggccattcggctgatttttgtgatcatggctgtcttctttattttttggaccccttataacgttgcaatcttgctgtccagctatcagtctatcctgttcggtaatgattgtgaacggtctaagcatctcgatcttgttatgctagtcaccgaggtcatagcctactcccactgctgtatgaatcccgtgatctatgccttcgtaggagagcgctttagaaagtacctcagacacttcttccacaggcatctgttgatgcacctcggccggtatattccctttctgccaagtgagaaactagagcggacctcctcagtgtccccgtctaccgccgaacctgagctgagtattgtattttag

SEQ ID NO: 182639 - DNA, 243 bp, synthetic construct
  misc_feature 1..243: note = Description of Artificial Sequence: Synthetic coding sequence
  source 1..243: mol_type = other DNA
atgaccaccagcctggacaccgtggagaccttcggcaccaccagctattacgacgacgttgggctactttgcgagaaggccgacaccagagccctaatggcccagtttgtaccacccctgtacagcctggtattcacagtaggcctcctgggcaatgttgtggtagtcatgatactgatcaaatatcgccgccttaggattatgactaacatttacctgctcaatttggcaatctcagactag

SEQ ID NO: 182640 - DNA, 66 bp, synthetic construct
  misc_feature 1..66: note = Description of Artificial Sequence: Synthetic coding sequence
  source 1..66: mol_type = other DNA
atgaccaccagcctggacaccgtggagaccttcggcaccaccagctactatgacgacgttggatag

SEQ ID NO: 182641 - DNA, 1068 bp, synthetic construct
  misc_feature 1..1068: note = Description of Artificial Sequence: Synthetic coding sequence
  source 1..1068: mol_type = other DNA
atgaccaccagcctggacaccgtggagaccttcggcaccaccagctactatgatgacgtggggctgctttgtgagaaggcagacacccgggctctgatggctcagttcgtcccccctctgtacagcttggtttttacagtcggtttactcggcaacgtggttgtagtaatgatcctgatcaagtaccggcgactcaggataatgaccaacatttacctgctcaacctggccatctctgatctgctattcctggtgaccctgcccttctggatccactacgtcagaggccataactgggtctttgggcacggaatgtgtaaacttctgtcgggcttttatcataccgggctgtacagcgagatcttctttatcattcttttgacaatagacagatacctggcaattgtccacgctgtgttcgccctgcgggctcgtaccgtgaccttcggagttatcacatcaatagttacttgggggctcgcagtgctggcagccctccctgaattcatcttttatgagacagaggaactctttgaagaaactctgtgctcggcactgtacccagaggatacagtatatagctggaggcactttcacacccttaggatgactattttttgcctggtgcttcctctgctggtcatggccatttgttacactggaatcataaagacgctcctgcggtgtcccagtaagaaaaagtataaagccataagactgatctttgtgataatggccgtgttttttatcttctggacaccttataatgtggccatcctgttgagctcttatcagtccatcctgtttggtaatgattgtgaaaggagcaaacacctcgacttagtgatgctggtgaccgaagtgatagcctactcgcattgttgtatgaaccctgtgatctacgcatttgttggagagcgctttcgtaaatatctccggcactttttccatagacacctcttaatgcacctaggcagatacatcccatttttaccctccgaaaaactggaaagaacctccagcgtctccccgtctaccgctgagccagagctaagtatcgtcttttag

SEQ ID NO: 182642 - DNA, 1131 bp, synthetic construct
  misc_feature 1..1131: note = Description of Artificial Sequence: Synthetic coding sequence
  source 1..1131: mol_type = other DNA
atgcccttcggcatccggatgctgctgcgggcccacaagcccggcagtagccgcaggtccgagatgactacaagtctggataccgtcgagacgtttgggacaacctcctactacgacgatgtaggtctgctgtgtgagaaggctgatacccgggccctaatggctcagtttgtgccacccttgtatagcttagtgtttacagtgggtctcttgggcaacgtggtggtggtaatgattctgattaagtaccggagacttcgcattatgaccaatatttacctgctcaatctggccattagtgacctccttttcctggttacgctgcccttctggatccattatgtgaggggccacaactgggtttttggacacggcatgtgcaagctgttgtctgggttttaccataccgggctctatagtgagatttttttcattattctcctgaccattgaccggtatctggcaattgtacatgcggtattcgccttgcgtgctagaacggttacttttggagtaatcacctccattgtgacatggggattggctgttctggctgcacttccggaattcatcttttatgagactgaagaactcttcgaggagactctgtgcagcgcgctgtaccctgaagatacagtctatagttggcggcacttccataccctgcggatgaccatattttgtctcgtgcttcctctattggtgatggccatttgttacactggcatcatcaaaactctactccgttgtccatccaagaaaaagtataaggcaatccggctgattttcgttattatggcggtgttctttatcttttggacaccatataatgttgctatactgctgtcatcctaccaatctatactgttcggcaacgactgcgagaggagtaaacacctggacttagtgatgttagttaccgaagtgatcgcttattctcattgttgtatgaaccctgtgatctacgcttttgtcggagaaagattccgcaagtatctccggcatttttttcacaggcacctgcttatgcacctgggccggtacattccatttttgccaagtgagaagctggagaggacttcttctgtgtcaccttcaactgccgaaccagagttgtccattgtgttttag

SEQ ID NO: 182643 - DNA, 1083 bp, synthetic construct
  misc_feature 1..1083: note = Description of Artificial Sequence: Synthetic coding sequence
  source 1..1083: mol_type = other DNA
atgaaccccaccgacatcgccgacaccaccctggacgagagcatctatagtaactattacctttatgagtctattcctaagccatgtaccaaggaaggcattaaagcttttggcgagctgtttctccctcccctgtattccttggtcttcgtgttcgggctgctggggaattccgtggtggtactggtccttttcaagtataagagactacgctctatgactgatgtgtatctgcttaacctggcgatttctgacctcctgtttgtcttttcactgccattctggggctattatgcagctgaccagtgggtgtttgggttgggcctatgtaagatgataagttggatgtatttagtcggattttattcggggatcttctttgtcatgctcatgtctatagatcggtacttagctatagtgcatgccgtgtttagtctgcgcgccaggactctgacttacggagtcattacgagtctggctacgtggtccgtggccgtcttcgcctctctgccaggatttctgttttcaacatgctatacggaaaggaaccacacctattgtaagacaaaatacagtctgaattctacaacctggaaagttctgtcttcactggaaatcaatattctggggctggtgattccattgggaatcatgctcttctgctacagcatgattatccggacgctccagcattgtaaaaatgaaaagaagaacaaagccgtcaaaatgatttttgcagtcgtcgtgctgtttcttggtttctggaccccttataacatagttttgtttctggaaactttagttgaactcgaggttctgcaggattgcacattcgagcggtatttggattacgccattcaggctaccgaaaccttggcgtttgtgcactgttgcttaaatccaataatttacttttttctgggtgaaaagttcaggaaatatatcctccagctgttcaagacatgtagaggactatttgtgttgtgccaatattgcgggctgctgcaaatctattccgccgacacaccctcgagctcttacacacaaagcaccatggatcacgacctgcacgatgccctatag

SEQ ID NO: 182644 - DNA, 1059 bp, synthetic construct
  misc_feature 1..1059: note = Description of Artificial Sequence: Synthetic coding sequence
  source 1..1059: mol_type = other DNA
atggactaccaggtgagcagccccatctacgacatcaactactacacatcagagccctgtcaaaagatcaatgtcaagcaaatcgccgcccggctgctgccacccttatatagtctggtatttatctttggctttgtgggtaacatgctcgtcattcttattctcattaattgcaaaagactgaagtccatgacagacatttatctgctgaacttggcaatcagcgatctgttttttctgctgacagtccctttttgggcgcattatgctgcagctcaatgggatttcggtaacactatgtgccagctgctcaccggactgtactttatcgggttcttttccggaatattttttatcatcctgttaactattgacagatatttggcagttgtgcacgccgtttttgccctgaaagcgcggacggtgacatttggcgtagtgaccagcgtgataacatgggtggtcgccgtctttgccagcctccctggcatcatatttactcggtctcagaaagaaggcctccactatacttgcagcagccattttccatactcacagtaccagttttggaagaactttcagaccctgaaaatcgtcatccttggacttgtcctccccctgcttgtcatggttatttgttactctggcatcctgaaaactttactccgatgcaggaatgaaaagaaacggcaccgcgccgtgagactgatcttcaccatcatgatcgtgtacttcctgttttgggccccctacaacatagtgctgctgttgaatacgttccaggagttctttggcctgaacaactgcagttcatccaaccggctggatcaggctatgcaggtgacagagacactaggtatgacacattgctgcatcaacccaattatctatgccttcgttggagagaaatttaggaactatctcctggtgttctttcagaagcacatcgccaagaggttttgtaagtgttgctcaatcttccagcaagaagcgcccgagcgagcatcttctgtgtatactaggtctaccggcgagcaagaaattagtgtcggcctttag

SEQ ID NO: 182645 - DNA, 1059 bp, synthetic construct
  misc_feature 1..1059: note = Description of Artificial Sequence: Synthetic coding sequence
  source 1..1059: mol_type = other DNA
atggactaccaggtgagcagccccatctacgacatcaactactacactagcgaaccctgtcagaaaattaacgtgaaacagatcgctgcacgacttctgcctccattatattccttagtttttatatttggcttcgtggggaacatgttggtgatactgattctcattaactgcaagcggctcaagtctatgactgatatttatttgctaaacctcgcgatttccgaccttttcttcctgctcactgtccccttctgggcccactatgcagcggcgcagtgggattttgggaatactatgtgtcagctcctgacaggattgtacttcatcgggttcttctcaggcatctttttcattatcctactgacaatcgaccggtatctggctgtggttcatgccgtgttcgccctcaaggccagaaccgttaccttcggtgtagtgacctcagtgattacgtgggtggtagcagtttttgcctcccttcccgggattatttttaccagatcacagaaagagggtctccattacacgtgttcgagtcatttcccctatagccagtaccaattctggaaaaacttccagacattgaagatcgtgattttggggctggttctgcccctacttgtgatggtcatttgttatagcggaatccttaagacacttctgaggtgtaggaacgaaaagaaacggcatcgtgccgtacgattgatcttcaccatcatgatcgtatacttcttattctgggcaccttataacatagtgctccttctgaatacctttcaagagttcttcggattaaataactgttcttcgagtaaccgcctcgatcaagctatgcaggtgaccgagacgctcggaatgacacactgttgtataaacccaatcatctacgcctttgttggggaaaaatttcggaattatctgctagtgttttttcagaagcatattgccaaaaggttttgcaagtgctgttcaatctttcagcaagaagcccccgaaagagcatcctctgtgtatacccggtctaccggcgagcaggaaataagtgtagggctctag

SEQ ID NO: 182646 - DNA, 999 bp, synthetic construct
  misc_feature 1..999: note = Description of Artificial Sequence: Synthetic coding sequence
  source 1..999: mol_type = other DNA
ctgcccaagaaccagtgcgaggccaaccggagccccccccccgcctccgcccttcttacaggggtgcacttgtggttctgcaacatgctagtcatactaattctgatcaactgcaagaggctgaagagtatgacggatatttacttgctgaatttggctatctcagatctctttttcctcctcactgtgcctttttgggcccactatgctgcggcccaatgggattttggaaataccatgtgtcagcttttaactggcctgtatttcatcggctttttctcaggcatcttttttatcatcctgctcaccatagaccggtatctggccgtagttcacgccgtttttgccctgaaagctagaaccgttaccttcggcgtcgtgactagcgtcatcacctgggtagtggccgtgttcgctagtcttccaggtattatcttcacacgatcccaaaaggagggcctgcactacacgtgttcatcccactttccatatagccaatatcagttctggaaaaatttccagactttaaaaatcgtgatactcggcctggttctgcctttactggtgatggttatctgctacagcggtatcctcaaaactcttctgagatgcaggaacgagaagaagagacaccgggctgtacgcctgattttcacaattatgattgtttactttctgttttgggccccatacaatattgtcctgttgcttaatactttccaggagttctttgggctgaacaattgcagttcaagcaaccggcttgaccaggccatgcaggttactgagactctcgggatgacgcactgttgtattaatcccatcatttatgccttcgtgggcgaaaagttccgtaattatctactggttttctttcagaagcacattgctaaaagattttgtaaatgttgcagcattttccagcaggaggcccctgagcgtgcgtcttcagtttacacccgcagcacgggagagcaagagatctccgtcggactgtag

SEQ ID NO: 182647 - DNA, 1059 bp, synthetic construct
  misc_feature 1..1059: note = Description of Artificial Sequence: Synthetic coding sequence
  source 1..1059: mol_type = other DNA
atggactaccaggtgagcagccccatctacgacatcaactactacaccagcgaaccgtgtcaaaaaattaacgtcaaacagatcgctgcaaggttgcttccccccttgtactcactggtgtttatctttgggtttgtgggtaacatgctggtgattcttatacttattaattgtaaacggctgaaaagtatgacagatatttatttgctgaatttggcaatatcagacctttttttccttttaaccgtgccgttctgggcacactacgccgctgcccaatgggattttggtaacaccatgtgccagctcctcacaggactgtactttatcggcttctttagtggcattttctttattatattactgactattgataggtaccttgccgtggttcacgctgtgtttgccctgaaggcgcgcactgtcacctttggagtggttacatcagtgatcacgtgggttgtggctgtattcgcctccctgcctggcattatattcactaggagccaaaaggaaggcctgcactatacctgcagctcccactttccatattcccagtaccagttctggaagaattttcagaccctgaagatcgtgattcttggcctagttctgccgctcttagtgatggtgatttgttactcaggtatcttaaagacactccttcgatgtagaaacgaaaaaaaaaggcaccgagctgttcgacttatattcacaatcatgattgtctacttcctattctgggcgccctacaatatcgtactgctgctaaacacttttcaggaatttttcggcctgaacaactgtagcagttctaatcgacttgaccaggccatgcaggtgacagagactctggggatgacacactgttgcataaacccaataatttacgcctttgtgggagaaaagttcagaaattatctcctagtgttctttcagaagcacattgccaagagattttgcaagtgttgctccatctttcagcaggaggccccagagcgggcctcatcggtgtacacccgttcaacaggcgagcaggagatttccgtcggcctgtag

SEQ ID NO: 182648 - DNA, 1125 bp, synthetic construct
  misc_feature 1..1125: note = Description of Artificial Sequence: Synthetic coding sequence
  source 1..1125: mol_type = other DNA
atgagcggcgagagcatgaacttcagcgacgtgttcgacagcagcgaagattattttgtttctgttaacactagctattactccgtagatagtgagatgctgttgtgtagcttgcaggaagtcagacagttctcacggctgtttgttcccattgcatatagcttgatttgcgtctttggtctcctgggcaatattctcgtcgttatcaccttcgccttctacaaaaaggcacgttcaatgaccgacgtctatcttctaaatatggcaattgccgatatcttatttgttctgacacttccattctgggctgtgtctcacgccaccggagcatgggtgttttccaacgcaacttgcaaactacttaagggcatctacgctataaatttcaactgcgggatgctgctgctaacctgtatatcgatggaccgatacatagccattgtgcaagcaacaaaaagcttcaggctgcgcagcagaactctccctaggagtaagattatctgcctcgtggtatggggtttatctgtgattatatcaagtagtacttttgtgtttaaccagaagtataatacacaggggagcgacgtatgtgaacctaagtaccagaccgtctcagaaccaattcggtggaaacttctgatgctgggcctggagctgctgttcggcttctttattccccttatgtttatgattttctgctatacattcatagtcaaaacactcgtacaggcgcagaattccaagagacataaagccatcagagtgattatcgccgtggtgttggtgttcctcgcctgccagatcccacataatatggtgctgcttgtgacagctgccaatctcggaaaaatgaacaggtcctgccaatccgagaaattaatcgggtataccaagacagttacagaggttttggcgtttctacattgctgtttgaatcctgttctctatgccttcatcgggcagaaatttcgtaactatttcctgaagattctgaaagatttatggtgtgtgcgacggaagtacaaaagctccggatttagttgcgctggaaggtatagcgagaatattagccgccagacctcagagacagcagacaacgataatgctagctcctttactatgtag

SEQ ID NO: 182649 - DNA, 1125 bp, synthetic construct
  misc_feature 1..1125: note = Description of Artificial Sequence: Synthetic coding sequence
  source 1..1125: mol_type = other DNA
atgagcggcgagagcatgaacttcagcgacgtgttcgacagcagcgaggattacttcgtttctgtgaacacgagttactacagcgtggactccgaaatgctcttgtgctccctgcaggaagttagacagttctcaaggctctttgtaccaatcgcatacagcctaatttgtgtctttgggctgctggggaacatcctcgtcgtgatcaccttcgctttttataaaaaagctcgatccatgactgacgtgtatctgctgaacatggccattgcggacatcctattcgtgctcaccttacctttctgggccgttagccatgccactggcgcttgggtgttctccaatgcaacatgcaagctacttaagggaatctacgcaattaatttcaattgcggaatgctgctcctgacttgtatttcaatggaccggtacatcgctatagtacaggccactaagtcgttccgcttgaggtctcgtaccctgcccagaagcaaaattatctgtctggtcgtctggggcctgtcagtgatcatcagctccagcacattcgtattcaaccagaagtacaatacacaagggagcgacgtctgcgaacccaagtatcagactgtttcagagccaattagatggaagctgttgatgttagggttagaactgctcttcgggttttttatacctctgatgttcatgatcttctgttatacctttatcgtgaaaaccctggtgcaggcccaaaattccaagaggcataaggcgatcagggtgatcattgcggtggttctggtttttttggcgtgtcagatccctcacaatatggtactacttgttaccgccgcaaaccttggtaaaatgaaccgaagctgtcaaagtgaaaagctcatcggatacaccaagactgtaaccgaggtgctggccttcctgcactgctgcctgaatccagttctgtatgccttcattggccagaagttccggaattactttctcaagatcctcaaagacctttggtgcgtgagaaggaaatacaaatctagtggcttcagctgtgctgggcggtacagcgagaacataagcagacagacctccgaaaccgccgataatgataacgcatcaagtttcacgatgtag

SEQ ID NO: 182650 - DNA, 1125 bp, synthetic construct
  misc_feature 1..1125: note = Description of Artificial Sequence: Synthetic coding sequence
  source 1..1125: mol_type = other DNA
atgagcggcgagagcatgaacttcagcgacgtgttcgacagcagcgaagactatttcgtttcagttaatacctcttactactccgtcgattctgaaatgttgctctgctctctccaggaggtcagacagttctcgagactgtttgtgcctattgcatactccctgatttgcgtgttcggccttctggggaatatactggtggtgataacctttgctttctataaaaaggctcggtctatgacagacgtctacctcctcaacatggctatcgccgacatcctgtttgtgctcacactgccgttctgggctgttagccatgctactggagcctgggttttctccaacgccacgtgcaagcttctgaaggggatttacgccatcaatttcaattgtgggatgcttctgcttacatgcatctccatggatcgctacatcgcaatcgtccaggccacgaagtctttcaggctgcgctcccgaacgttgccgcgctctaagatcatctgtctggtggtctggggactttcagtaataatatcttcttcgactttcgtattcaaccaaaagtacaacacacagggctctgacgtgtgtgaaccgaaatatcagactgtttctgagcctatacgctggaagcttctcatgctcggcctcgaactgttgtttgggttttttattcctcttatgttcatgattttctgctacacttttattgttaagacgctggtacaagcacagaattcgaaacggcacaaagctatccgtgtgattattgctgtggtgcttgtgtttctggcttgtcaaatcccacacaatatggtccttttagtcacagctgctaatctagggaaaatgaataggagttgccagagtgagaaattaattgggtatacaaaaacagtgacagaggtgctggccttcttacattgctgtctgaatcccgtactgtacgcattcatcggtcagaaatttaggaactactttctcaaaatattgaaggatttgtggtgcgtaagaaggaaatataaaagttctggcttctcgtgcgccgggcggtactccgaaaacattagcagacagacctcagagaccgcggacaatgacaacgctagtagtttcacaatgtag

SEQ ID NO: 182651 - DNA, 1137 bp, synthetic construct
  misc_feature 1..1137: note = Description of Artificial Sequence: Synthetic coding sequence
  source 1..1137: mol_type = other DNA
atggacctgggcaagcccatgaagagcgtgctggtggtggccctgttagtgatcttccaggtgtgtctatgccaggacgaggtcaccgacgactatattggcgacaacaccaccgtcgattataccctttttgaatccctatgttccaagaaagacgtgcgaaattttaaggcctggtttctgccaattatgtatagcatcatctgtttcgtcggcctgctggggaatgggctggttgttctgacatacatttactttaaaagactgaagacaatgacagatacctatctcctcaatctggcggtagcggacattctgtttctgctcaccttacctttttgggcgtatagtgccgccaaatcctgggtatttggagtacacttctgtaagcttatatttgcgatatataaaatgtccttcttctcaggcatgctcctgctcctgtgtattagtatagatcggtatgtggctatcgttcaagccgtcagcgcccaccggcatagagcccgagtactgctgatctccaagctatcctgcgtgggaatctggatcttggcaactgtgctgtctatacccgagctcctgtacagtgatttacagagaagttccagcgagcaggccatgaggtgctcccttattaccgaacatgtggaggcatttatcaccatccaggtggcacagatggttataggctttctagtcccattgcttgcaatgagcttctgctacctggtgatcattagaaccttgctgcaggctcgaaacttcgagcggaataaggcaattaaggttattattgcggtcgttgttgtgtttatcgtgttccagctcccttacaatggtgttgtgcttgctcagaccgtggccaactttaacatcacatcatctacatgcgaacttagcaagcagctcaacattgcctatgatgtcacatactcactggcatgtgtgagatgctgcgtaaacccattcctttacgctttcatcggcgttaaatttaggaacgatctgttcaagctcttcaaagatttagggtgcctgtcccaagagcagctgcggcagtggtcttcctgccggcatatcaggcggagtagtatgagtgtggaggctgaaacaactaccaccttctcaccttag

SEQ ID NO: 182652 - DNA, 1068 bp, synthetic construct
  misc_feature 1..1068: note = Description of Artificial Sequence: Synthetic coding sequence
  source 1..1068: mol_type = other DNA
atggactacaccctggacctgagcgtgaccaccgtgaccgactactactatcccgatatcttcagttcaccttgtgatgctgaactgatccagacaaatggtaaactgttgctcgccgtgttttactgtctgctgtttgtctttagcttgctgggcaactccttagtaatactggtgctggtggtctgcaagaagctccgcagcattacagatgtttaccttctgaatctagcactatcagatctcttgttcgttttttcatttccttttcaaacgtattacctgctggaccagtgggttttcggcacagttatgtgcaaagtggtatccggtttttactatatcggcttctatagttcaatgttcttcataactcttatgagcgttgatagatacctggccgtggtgcatgctgtgtacgctctgaaggtgcggacgattcggatgggcaccacattgtgtctggccgtctggctgacagcaattatggctacaatcccactgcttgtattttaccaggtggcatctgaggacggggtgctacagtgttacagtttttataatcagcagaccctgaaatggaagatctttacaaactttaagatgaacatcctgggactgctcataccgtttacaatattcatgttttgctatattaagatactccatcagcttaaacgatgtcagaaccacaacaagactaaagcaatccgtcttgttctgattgtcgtgatcgcaagtttactgttttgggtgccgttcaatgttgttttattccttacttctctgcactctatgcacatcttggacggctgctcaatatcccagcaactcacatatgccacccacgtgactgagattataagttttacgcactgttgtgtgaaccctgttatttacgcatttgttggcgaaaagttcaaaaagcacttgtctgagattttccagaaaagctgtagccaaatattcaactatctgggacggcagatgccccgggagtcctgtgaaaagagttctagctgccagcaacactcttccagatcgtctagcgtggactatatcctatag

SEQ ID NO: 182653 - DNA, 819 bp, synthetic construct
  misc_feature 1..819: note = Description of Artificial Sequence: Synthetic coding sequence
  source 1..819: mol_type = other DNA
atgcggaacctgttccggcagatgacctactacctgctggaccagtgggtgttcgggactgtgatgtgcaaagtagtgtcgggcttctactacatcggtttctactcatcgatgttttttattaccctgatgagcgtagatcgatacctcgcggtcgtccatgctgtgtatgctctcaaggttcgtaccataagaatgggaacgaccctctgtctcgctgtgtggttgactgccattatggctaccattcccctgcttgtcttttatcaggttgcctcagaggacggcgtgctccagtgttatagtttctacaaccagcagaccctcaaatggaagattttcactaacttcaagatgaacatattgggcctgcttatccctttcacaatattcatgttttgctatatcaagattttacatcagctcaaacgctgtcagaatcataataagactaaggcaatacgcctggttctgatcgtagtcattgcatctttgcttttctgggtgccgttcaatgtggtattatttctcacgtccctccacagcatgcacatacttgacggatgttctattagccagcagttgacgtatgctactcacgtaacggagatcatttcattcactcattgctgcgttaatcctgttatctacgcattcgtaggcgaaaaatttaaaaaacatctaagtgagatcttccagaaatcatgtagccagatcttcaattatctaggccggcagatgccgcgggagagttgcgaaaaaagctcctcttgccagcagcatagctctaggtccagctccgttgattacatcttgtag

SEQ ID NO: 182654 - DNA, 1074 bp, synthetic construct
  misc_feature 1..1074: note = Description of Artificial Sequence: Synthetic coding sequence
  source 1..1074: mol_type = other DNA
atggccgacgactacggcagcgagagcaccagcagcatggaggactatgtgaattttaattttactgacttttactgcgaaaagaacaacgtcaggcaattcgcatctcacttcctgccaccactatactggctcgtgtttattgttggtgctctagggaattctttggtcatcttggtgtattggtattgtacccgggtgaagaccatgacagacatgttcctgctgaacctggcgattgccgacctgttatttttggtgacactccccttctgggccattgctgccgctgatcagtggaaattccagacattcatgtgcaaagtcgttaatagtatgtataagatgaatttttactcttgtgtgctgcttataatgtgtattagcgtcgacagatacatcgcaatcgctcaggcaatgcgagcccatacctggcgagagaaacggctgctatattctaagatggtatgttttaccatttgggttctggctgctgcattgtgtataccggaaatcctgtatagccaaataaaagaggagtctggaattgccatttgcactatggtttacccctccgacgagagcacaaaactgaagagcgccgtcctcaccctgaaggtaatcttgggattttttctccccttcgtggttatggcttgttgctataccattatcatccatactcttatacaggctaaaaagagctcaaaacacaaagccttgaaagtgaccatcactgtgctgactgtgtttgtgctcagccagttcccatataattgtattctcctggtccaaaccatagacgcatacgctatgtttatctccaactgcgctgtgagcaccaacatcgatatttgtttccaggtgacgcaaacaattgccttctttcattcatgcctgaatccagttctttacgtctttgttggcgagcggttcagaagggatttagtaaagaccctcaaaaacctggggtgtatcagccaggcccaatgggtctctttcacccgaagagaaggttccctcaagttgtctagtatgctgctagaaacaacgtctggcgcgctgtctttgtag

SEQ ID NO: 182655 - DNA, 1110 bp, synthetic construct
  misc_feature 1..1110: note = Description of Artificial Sequence: Synthetic coding sequence
  source 1..1110: mol_type = other DNA
atgacccccaccgacttcaccagccccatccccaacatggccgacgactatggcagtgaatccaccagttctatggaggactacgtaaacttcaacttcactgatttctactgtgagaagaacaacgtgcggcagttcgcgtcacattttctgccaccactgtattggctcgtatttatcgtcggagccctggggaacagtctggtgatattagtgtattggtactgtactcgagtcaagacaatgaccgacatgttcctgctgaacctcgcaatagcagatctgctattcctggtaaccctacctttctgggccatcgctgctgccgaccaatggaagttccaaacctttatgtgcaaagtggttaactctatgtacaagatgaatttttacagttgcgtcttgctgattatgtgtattagcgttgacagatatatcgctatcgcgcaggctatgcgcgcgcacacttggagagagaagaggctcctttacagcaaaatggtttgctttaccatatgggttttggcagcagctttgtgtattccggaaatcctttactcacagattaaagaggaatccggtattgcaatatgcaccatggtctacccctctgatgaaagcacaaaactgaagtctgccgttctgactctgaaagtgattctcggatttttcttgcctttcgtcgtgatggcctgctgctatactatcattattcatacattgatacaggcaaagaagagctccaagcataaagcattgaaggtcactattactgtgttgaccgttttcgtgctgtcacagttcccctacaattgcattttgttagtccagacgatagacgcttatgccatgtttatctctaattgtgccgtctcaacaaatattgatatttgtttccaagtgacacaaactatcgcgtttttccactcctgcctaaatcccgtcttatacgtgtttgtgggagagagattccgtcgtgatctagttaaaaccctgaagaaccttggttgtatctcccaggcacagtgggtgagttttacacgtcgcgaggggagtctgaagctttcctctatgcttctcgagacaactagcggtgccctgagcctgtag

SEQ ID NO: 182656 - DNA, 1074 bp, synthetic construct
  misc_feature 1..1074: note = Description of Artificial Sequence: Synthetic coding sequence
  source 1..1074: mol_type = other DNA
atggccgacgactacggcagcgagagcaccagcagcatggaggactacgtgaacttcaattttaccgacttttactgtgaaaaaaacaatgtgaggcaattcgccagccatttcttacccccactgtattggctcgtcttcatcgtcggtgcgctggggaactccctggtgatcctcgtctactggtattgtacgcgggtgaaaacaatgactgacatgttcctgctgaaccttgccattgcggacctgctgtttctagttaccctgcccttctgggcgatagcagccgctgatcagtggaagttccagaccttcatgtgtaaagtcgtgaattccatgtataaaatgaatttttactcctgtgtgctgttgattatgtgcatttcagtcgaccgctacatcgccatcgcccaggctatgcgggcacatacatggcgagaaaagcgtctcctgtattctaagatggtatgttttaccatttgggtcctcgcggccgcactgtgcatcccagaaattctttactctcaaattaaggaggaatccggtatcgccatctgtacaatggtctacccatcagacgaatctaccaagctgaaatccgctgtgctgacactcaaagttattctgggtttctttctaccatttgttgtgatggcgtgctgttacactatcatcatacacactctcattcaggccaagaagagtagcaaacacaaagcactgaaggtcactataacggtgttgactgtattcgtgctctcgcaattcccatataactgtatcttgttggtccaaaccatcgatgcctatgcgatgttcatcagtaactgtgctgtctccactaatatagatatttgttttcaggttacccagacaatagcttttttccattcttgcctcaatccggtgctctatgtgttcgtgggagagcgtttccggagggatctggttaagactttaaagaatctgggttgtatctctcaagcccaatgggtgtcctttaccagacgggaggggtccttgaaactctcttccatgctcctagagactacaagcggcgctttatccctgtag

SEQ ID NO: 182657 - DNA, 1053 bp, synthetic construct
  misc_feature 1..1053: note = Description of Artificial Sequence: Synthetic coding sequence
  source 1..1053: mol_type = other DNA
atggccctggagcagaaccagagcaccgactactactacgaggagaatgaaatgaatggaacatacgattactcccagtacgagcttatatgtatcaaagaggacgtcagagaattcgccaaagtatttcttcccgtcttcctgaccatcgtgttcgtcataggactggctggcaacagcatggtggtagccatctacgcctattacaaaaaacagaggactaagactgatgtgtacattctgaatctggctgttgcggatctgctcctgctcttcactctgccattttgggccgtaaatgccgtgcacgggtgggtgcttggtaaaattatgtgtaagattacctctgccctttacacgttaaactttgtttcaggcatgcagtttttggcatgtatttctatcgataggtatgtcgctgtgacaaaagtcccaagccagtccggcgtgggaaagccttgttggattatctgcttctgtgtttggatggccgccatcctgctatccattccccagcttgtgttctataccgtgaacgacaacgcccgttgtattcccatctttccccggtacttgggtactagtatgaaggccctgatacaaatgctcgaaatctgcattggctttgtggttccgtttctgatcatgggggtgtgttattttatcaccgcaaggacacttatgaagatgcctaacatcaagattagtcggccgctgaaggtgcttttgacggttgtgatcgtctttatcgtgacccagctgccatataacatcgtgaagttctgcagagcaatcgatattatttattctttgattacttcatgtaatatgtcgaagagaatggatattgcgatccaagtgaccgaatcgatcgccttgttccactcgtgcctgaacccaatcctctatgtatttatgggcgcaagctttaagaactacgttatgaaggttgcaaagaagtacggttcctggaggaggcagcgccagtctgtcgaggagtttcccttcgatagtgagggcccgacagaacccacgtctaccttctccatctag

SEQ ID NO: 182658 - DNA, 825 bp, synthetic construct
  misc_feature 1..825: note = Description of Artificial Sequence: Synthetic coding sequence
  source 1..825: mol_type = other DNA
atggccctggagcagaaccagagcaccgactactactacgaggagaacgagatgaatggcacttatgattacagccagtatgagctcatttgcatcaaggaagatgtcagggaatttgcgaaggtcttcttacccgttttcctgacgattgtgtttgtgatcggcctggccgggaacagcatggtcgtcgccatatatgcgtattacaagaaacagagaacgaagaccgatgtatacatcctgaatctcgccgtcgcggatttgctcctgctttttaccctgccattctgggcggttaatgctgtgcacggctgggtgcttggcaagattatgtgcaaaattacatctgcactctacaccctaaacttcgtatccggaatgcagttcctggcctgcatcagcattgacaggtatgtggcagtcaccaaagtaccttcacagagcggggtgggcaagccttgctggattatctgtttctgcgtgtggatggccgctatattgctctctatcccccagctggttttctataccgtgaatgataatgcaagatgtattcccatctttcctagatatctgggaactagcatgaaggctcttatccagatgttggagatctgtattgggttcgtcgttccattcctgataatgggcgtttgctattttatcaccgcccgcacactcatgaagatgccaaatattaagatttcacgtcctctgaaggtgctgctcacagtggtcatagtgtttatcgtcacccagctacctttcgcctggatccatatgaatgacgccttcccctccaataaaacctccgccttattctag

SEQ ID NO: 182659 - DNA, 1071 bp, synthetic construct
  misc_feature 1..1071: note = Description of Artificial Sequence: Synthetic coding sequence
  source 1..1071: mol_type = other DNA
atgatctacacccggttcctgaagggcagcctgaagatggccaactacacgttagctcccgaagatgagtacgatgtgctcatcgagggggaattagaatcggatgaggcagagcagtgcgataaatacgacgcccaggcactgtcagcccagctggtaccaagcctgtgcagcgccgtgtttgtgattggcgttctggataatctcctggtcgtgttgatcctcgtgaagtacaaagggctgaagagagtggagaacatatacctgctgaacttggctgtgtcaaatctctgctttctgctcacactacccttctgggctcatgccggcggcgacccgatgtgcaagatcttgattggtctgtacttcgtcggcctgtatagcgagaccttcttcaactgtctgctgaccgtgcagaggtatctcgtgttcctgcacaagggtaatttctttagcgctcggagacgcgtgccttgcgggatcataacatcggtcctggcatgggtgaccgcaattttagccacgctccccgagttcgtggtctataagccccagatggaggaccaaaaatataagtgcgcgttcagtcgcaccccgttcctgccggcggatgagactttctggaagcacttcctcacactgaagatgaacataagtgtgctggtgttgcccttatttatatttacgtttctgtatgtgcagatgcgcaaaaccctcaggttccgagaacagagatactccctgtttaagctggtgttcgcaattatggtggtctttctcttgatgtgggccccatacaatattgctttttttcttagcacattcaaggaacatttctccctgtctgattgcaagtcatcctacaacctggacaaaagcgtacacattacgaagctcatcgcgacgactcactgctgcattaatcccctgttgtatgcgtttctagacggtaccttctcaaaatatctgtgcaggtgctttcacctccgttccaacactcctctccaacctcgcggtcagtctgcgcagggcactagtcgcgaagagcccgaccacagtactgaagtgtag

SEQ ID NO: 182660 - DNA, 1035 bp, synthetic construct
  misc_feature 1..1035: note = Description of Artificial Sequence: Synthetic coding sequence
  source 1..1035: mol_type = other DNA
atggccaactacaccctggcccccgaggacgagtacgacgtgctgatcgagggcgagttggagagcgacgaagccgaacagtgtgacaaatatgatgcccaggccctgtccgctcagctggtgcccagcttgtgcagcgccgtcttcgtcatcggcgtcctagataatctacttgtggtgctgatcctggtcaaatacaaaggactgaagagggtagagaacatctatcttctgaatctcgctgtgtccaatttatgttttctactcacgctgcctttttgggctcacgctggtggagatcccatgtgcaagatacttatcggcctctatttcgtgggcttatactcagaaactttctttaactgtctactgaccgtgcagcgctacctggtattcctccacaaaggtaatttcttctccgcccggcgccgagtgccgtgtggtatcattacgagtgtgctggcatgggtgaccgccatacttgcaaccttacctgaatttgtcgtgtacaagccacaaatggaagaccagaaatataaatgcgctttctctagaacgccttttctacctgccgatgagacgttctggaaacattttctcactctgaaaatgaatatctccgtcctggtgctcccactgtttattttcaccttcctgtatgtgcagatgcggaagaccttgcgcttccgcgaacagaggtatagcctgttcaagctggtgttcgccataatggttgtgttcctgttgatgtgggccccttacaatattgcctttttcctaagtaccttcaaggagcacttctctctgagcgattgtaaaagctcctataaccttgataagtcggttcacatcactaaactcatagccacaacccattgctgtatcaatccactgttgtacgctttcctcgacggcaccttttcaaagtatctctgccgctgcttccatcttcgcagcaacactcctcttcaaccacgagggcaatccgcccagggaacctctagagaggagcccgatcactcaacagaagtgtag

SEQ ID NO: 182661 - DNA, 1035 bp, synthetic construct
  misc_feature 1..1035: note = Description of Artificial Sequence: Synthetic coding sequence
  source 1..1035: mol_type = other DNA
atggccaactacaccctggcccccgaggacgagtacgacgtgctgattgagggggaactcgaatcagacgaggcagagcaatgcgacaaatatgatgcccaggcgctcagtgcccagctggtgccctcgctttgttccgcggtcttcgtgatcggagtgctggacaatctgctggtcgtcttaatcctggtcaagtacaagggactgaagcgggtagaaaatatttacctgctcaacctggctgtgagcaatctgtgcttcctcctgactctgcccttctgggctcacgctgggggcgacccaatgtgtaagattctgatcgggttatacttcgtgggcctctattccgagacgttttttaactgtttactcacagtgcaaaggtatcttgtgtttttacacaagggcaatttctttagcgctcgcaggagggtgccctgcggcatcatcacgagcgtacttgcctgggtgactgcaattctagccacccttcctgagttcgtagtctacaagccccagatggaagaccagaagtataagtgcgccttcagtagaacccccttcctcccggcggatgagaccttctggaagcatttcctgaccctgaaaatgaatatctccgtccttgtgttgcccctattcatctttacctttctctacgtgcagatgcgcaaaaccctcagattcagggaacagcgctattctctctttaagctcgtcttcgctattatggttgtttttctgctgatgtgggcaccgtacaatatcgcattcttcctctcaacctttaaggaacattttagtctctcagactgcaaaagctcctacaacctagataagtcggtacacattacaaagctcatcgccacgacacattgctgtattaacccgctgctttatgcctttttggatggcactttttcaaagtatctgtgtagatgctttcacctcagatccaatacccccctccaacctcgggggcagagcgcccaaggcacctctagggaggagcctgaccattccactgaagtctag

SEQ ID NO: 182662 - DNA, 1035 bp, synthetic construct
  misc_feature 1..1035: note = Description of Artificial Sequence: Synthetic coding sequence
  source 1..1035: mol_type = other DNA
atggccaactacaccctggcccccgaggacgagtacgacgtgctgattgagggggagttagagtcagacgaagctgagcagtgtgacaaatatgacgcacaagccctttcagcgcaacttgtaccgtcactctgtagcgctgtattcgtgattggggtgctggacaatctcctagtcgtgttaatccttgtgaaatacaaggggctgaagcgagtagagaatatttatcttctaaacctagcagtatccaatctgtgctttctccttaccctgcctttttgggcgcacgcggggggcgatcccatgtgcaagatactgataggactgtacttcgtgggtctgtacagcgaaacattttttaattgcctcctgactgtgcagcggtatcttgtgttcctgcacaagggtaacttcttctctgcccggcgtagggtgccatgtggtatcatcacttcggtgctagcctgggttactgcaattctggcgactctgcccgaatttgtcgtttacaaaccacagatggaggaccagaaatacaaatgtgcatttagtagaaccccatttctgcctgcggacgagacattctggaaacatttcctgacactcaaaatgaacatttcagtgctggtattgccgctgtttatttttacctttctgtacgttcaaatgaggaagacccttaggttcagggagcagcggtactcattgttcaaattggtttttgctattatggtggtctttcttctgatgtgggccccttataacatcgctttttttctgtccacgtttaaggagcatttttctctctccgactgcaagtcatcgtataacctggataagagtgtccatataaccaagctaattgccactacacattgctgtataaacccactcctgtatgcatttctggacgggacattctcaaagtacttgtgcagatgcttccatctgaggtcgaatacccctttacagccacgagggcagagcgcacagggcacgtccagagaagagccagatcactccacagaagtttag

SEQ ID NO: 182663 - DNA, 654 bp, synthetic construct
  misc_feature 1..654: note = Description of Artificial Sequence: Synthetic coding sequence
  source 1..654: mol_type = other DNA
atggccaactacaccctggcccccgaggacgagtacgacgtgctgattgagggtgaactggagtccgacgaggctgagcagtgtgacaagtacgacgcgcaggcactgtcagctcagctagttccaagtctctgctcagctgtgttcgtcataggcgtgctggataacctcctggtggtgctgatactagtgaaatacaagggccttaagcgcgtcgaaaacatttatttgctgaaccttgctgtgtccaacctctgcttcctgctgaccttgcccttttgggctcacgcaggaggcgaccccatgtgtaagatattaattggtctgtacttcgtgggcctctattccgagacattcttcaattgcctcctgactgtccaaaggtacttagtgttcttgcacaagggcaactttttctcagccaggcgaagagtgccctgcgggatcatcacatccgtactggcctgggtgaccgcaatacttgcgaccctgcctgagttcgtggtctacaagccacaaatggaagatcagaagtacaaatgcgcctttagccggactccatttctccctgccgatgaaaccttctggaagcactttctaacattaaaaatgaacattagcgtgctcgtgctgccactttttatctttacctag

SEQ ID NO: 182664 - DNA, 1194 bp, synthetic construct
  misc_feature 1..1194: note = Description of Artificial Sequence: Synthetic coding sequence
  source 1..1194: mol_type = other DNA
atggcccccatcagcctgagctggctgctgcggctggccaccttctgccatcttacagtccttctggcgggacagcatcacggcgtaactaaatgtaacattacctgctcaaaaatgaccagcaaaattcccgtcgcgcttctgatccattaccaacagaatcaggccagctgtggcaaacgcgctattatactcgagaccagacagcacagactcttttgcgccgatcctaaggagcagtgggtcaaagatgccatgcagcatttggaccggcaggccgcagctctaactcgtaacggcggcactttcgagaaacaaattggagaagtgaaacctaggaccacccccgcagccggaggcatggatgagagcgtggtcttggagccagaggcaactggggaaagctctagcctggagcccacgccatccagtcaagaagctcagcgtgctctgggcacaagccctgagctgcccactggagtgacaggatcttccggaacccgcctgcctcccacccccaaggcacaagacgggggccctgttggcacagagttgtttcgggtgcctcccgtgtctacagccgcgacatggcaaagttccgccccccaccagccgggaccctctttgtgggcggaagccaagacaagtgaagccccaagcacacaggatccttcaacgcaagcctctacggcatcatctcccgctcccgaagagaatgcaccttcagagggtcaacgggtgtggggacagggccagtccccacggcccgaaaactctctggagagagaagagatggggcccgtgcccgcacacactgatgctttccaggactgggggcctggttctatggcccacgtatctgtcgtccctgtatcaagcgagggtacaccgtcccgagaaccagttgcctcaggctcctggactccaaaggcagaagaacccatccacgctacaatggatccccagcgcctcggagtcctgatcacaccggtcccggacgctcaggcggctaccagacgccaagctgttgggctattggcttttctcggtctgctgttctgcctgggagtcgccatgtttacttaccaatctctgcaaggctgtccacgcaaaatggctggcgagatggcagagggccttcgatatatcccccgatcttgtggttcaaactcctatgtccttgtgcctgtgtag

SEQ ID NO: 182665 - DNA, 1164 bp, synthetic construct
  misc_feature 1..1164: note = Description of Artificial Sequence: Synthetic coding sequence
  source 1..1164: mol_type = other DNA
atgcgggagcccctggaggccttcaagctggccgacctggacttccggaagtccagtctggcgtccggctggcgaatggccagcggtgccttcactatggaccagttccctgagtccgttactgaaaattttgagtacgacgacctcgcagaagcttgctacatcggagacattgtcgtcttcggaacagtcttcttatctattttctatagtgtcatttttgcaatcgggctggtgggcaatttactcgtggtcttcgcgctcaccaattctaagaagcctaagtctgtgacggacatttacttgctcaacttggccctgtctgaccttttgttcgtggcaactttaccattttggacacactacctgattaacgagaagggacttcacaacgctatgtgtaagtttaccacagcctttttctttattggcttcttcggcagtatatttttcattacagtgatttctatcgatcggtacctcgcaattgttttagcagcaaattctatgaacaaccgaactgtccaacacggagtcacgatttcattgggtgtgtgggccgctgccatccttgtggcagctccccagttcatgttcaccaaacaaaaggagaatgaatgtctcggcgattatcccgaagttttacaggagatttggcctgtattgagaaatgtcgagacaaactttttggggtttctgctgcccttgttgattatgtcctattgttatttcaggattatccagaccctcttttcttgtaaaaatcataagaaggctaaggcgattaagctcattctgcttgtggtgattgtcttcttcctcttctggaccccttataatgtcatgatctttctcgaaaccctcaagctctacgacttctttcctagctgcgatatgcgtaaagacctgcgcctggctctgtctgtgaccgagaccgtggcttttagccattgctgtctgaatccgcttatttacgcgttcgccggcgagaagtttagacgctatctgtatcacctatacggcaaatgccttgccgtcctgtgcgggcggtctgtacacgttgatttcagtagctcagaatcacagcgttctagacacggatcagttttgagctccaattttacatatcatacatcggacggggatgccttactgctcctgtag

SEQ ID NO: 182666 - DNA, 1068 bp, synthetic construct
  misc_feature 1..1068: note = Description of Artificial Sequence: Synthetic coding sequence
  source 1..1068: mol_type = other DNA
atggaccagttccccgagagcgtgaccgagaacttcgagtacgacgacctcgcagaagcttgctacattggcgatatcgtagtgtttgggactgtcttcctgtctattttctactctgttattttcgccattggacttgtgggtaatctgctggtagtgttcgcattgaccaactctaagaaacctaagtcagtgaccgatatctatctgctgaacctggcgctttcagacctgctcttcgttgctacactgcccttctggactcattacctcattaacgaaaagggtctgcacaacgccatgtgcaaattcaccactgcatttttttttatcggatttttcggatccattttttttatcacggtgatttccatcgaccgctatctggccatcgtgttagccgccaattccatgaacaaccgaactgtgcagcacggagtgactattagcttaggggtatgggcagctgctatcctcgtcgcagccccacagtttatgtttaccaagcaaaaagaaaacgagtgcctgggggattaccctgaagtgctgcaggagatttggccagtgctgcgcaatgtggagaccaatttcttggggttcttactgccactgctcatcatgagctactgttacttcaggattatccagactttgttttcttgtaagaatcacaagaaggccaaggctattaagcttatcttgctggtcgtgattgtcttctttctcttttggactccttataacgtgatgatcttcttagagacacttaagctgtacgactttttcccatcttgcgacatgcgcaaggacctgcgcctggcactgtccgtaactgagacggttgcttttagtcactgttgcctaaaccctctgatctacgccttcgccggagagaaatttagaagatatctgtaccatctgtatggcaaatgcctcgctgtgctgtgcggtcggtcggtccacgtggatttttccagttctgagagccagaggtccaggcatggttcagtactgagcagcaacttcacttaccacacctctgatggcgatgctctcttactcctgtag

SEQ ID NO: 182667 - DNA, 321 bp, synthetic construct
  misc_feature 1..321: note = Description of Artificial Sequence: Synthetic coding sequence
  source 1..321: mol_type = other DNA
atggaccagttccccgagagcgtgaccgagaacttcgagtacgacgacttagctgaggcgtgctatattggcgacattgtggtattcggaacagtgtttttgtcaatattttattccgtaatattcgctataggactggtgggaaatctgttggtcgtattcgccctgactaacagcaaaaaacctaaatctgtgactgacatctatctgctcaatctggcactgagcgacctgctgttcgtggccacccttcccttctggacgcactacctaattaacgagaagggtttgcacaatgcgatgtgtaaattcactacatag

SEQ ID NO: 182668 - DNA, 501 bp, synthetic construct
  misc_feature 1..501: note = Description of Artificial Sequence: Synthetic coding sequence
  source 1..501: mol_type = other DNA
atggaccagttccccgagagcgtgaccgagaacttcgagtacgacgatctggcagaagcttgctatattggggatatcgtggtgttcgggactgtgtttttaagcattttctatagcgtgatatttgctataggcctggtgggcaatctcctcgtggtatttgcgctcacgaatagtaaaaagccaaaaagtgtcaccgatatctacctactcaacttggcactgagtgacttgctttttgtagcaacgttacccttttggacccactacctgattaacgagaagggcctccataatgcgatgtgtaagttcaccactgccttcttctttatcggcttcttcggctcgatctttttcattactgtgatcagcatagacaggtacctggccatcgtgcttgccgcaaatagcatgaacaaccggacggttcagcacggtgtgacaatcagtctgggagtgtgggcggccgccatcctggtggcagcgccccagttcatgtag

SEQ ID NO: 182669 - DNA, 1092 bp, synthetic construct
  misc_feature 1..1092: note = Description of Artificial Sequence: Synthetic coding sequence
  source 1..1092: mol_type = other DNA
atggccagcggcaaggccttcaccatggaccagttccccgagagcgttaccgaaaattttgagtatgacgatcttgctgaggcttgttacattggagacatagtcgtctttgggaccgttttcctgagtatattttactcagtcatcttcgccatcggactcgtgggtaatctgctcgtggtcttcgctttgacgaactcaaagaaacctaagtccgttacagacatatacctgctgaatctggcgctctccgacctgctattcgtggcgacattaccattctggactcattacctgatcaacgagaagggcctgcataatgctatgtgtaaatttacaaccgccttcttttttatcggcttctttggctccatcttcttcatcactgttatttccattgacagatacttagcaatcgtgctggctgccaactcgatgaacaaccgtaccgtgcagcatggcgttaccatttctctgggagtgtgggccgctgcaattttggtggccgcccctcagttcatgttcacaaagcagaaagaaaatgaatgtcttggagattaccctgaggtattgcaagagatatggcctgttctgcgcaatgtggaaacaaacttcctgggctttcttttacctctcctgataatgtcttattgttacttcagaattattcagaccctgttctcctgtaaaaatcataagaaggctaaggccataaagctcatccttttagtggtgatcgtgtttttcttattttggaccccctataacgtcatgatcttcctggagaccctcaagttgtatgactttttcccctcctgcgacatgcgcaaagacctgagactcgctttatctgtgaccgagactgtggctttcagtcactgttgccttaatcccctaatttacgcgttcgccggggagaaattccgtcgatacctctaccacttatacggaaagtgcctggccgtgctctgtggccggagtgtgcacgtcgactttagctcaagtgagagtcagcgaagtagacatggtagcgtgttaagcagcaacttcacctatcataccagcgatggtgatgccctcttactgttgtag

SEQ ID NO: 182670 - DNA, 1068 bp, synthetic construct
  misc_feature 1..1068: note = Description of Artificial Sequence: Synthetic coding sequence
  source 1..1068: mol_type = other DNA
atggaccagttccccgagagcgtgaccgagaacttcgagtacgacgacctggccgaggcctgttatatcggtgatatcgtcgtgttcggtaccgtgtttttaagtatcttctactccgtaatcttcgccatcgggctggtgggtaatctgcttgtagttttcgccctcacaaattcaaagaaaccgaaaagcgtgaccgacatttacctgctgaacctggcattatcagatctgctgttcgtcgccaccttgcccttctggacacattatctgatcaatgaaaaaggactccacaacgcaatgtgtaagttcacgaccgcctttttcttcattggtttctttggttccatttttttcatcacagtcatcagcatcgatcgttacctggcgattgtgttagcagccaattccatgaataatagaactgtccagcacggagtgacgatttcgctgggcgtgtgggccgctgctattcttgtcgctgcgccgcagtttatgttcacgaaacagaaggaaaatgaatgtttaggcgattatcccgaggtgctccaagaaatttggccggtgctccgcaacgttgagactaatttcctagggtttctgctgcccctcctgataatgtcatactgctatttccgaattatccaaactctgttcagctgcaaaaatcataagaaggcaaaggcaattaagctgatcctacttgttgtgatcgtgttctttctcttctggactccctataatgtaatgatcttcctagagacactcaagctgtatgacttttttcccagttgcgacatgcgcaaggacttgagacttgcactcagcgtcaccgagacagtcgctttcagccactgctgcttgaacccactgatatatgcctttgccggagaaaaattcagacgctacctttatcacttgtacggcaaatgtctggcagttctgtgtggtagaagtgtccacgtggacttttccagttccgaatcccaacgatcacggcacgggtccgtcctgtcttctaatttcacatatcatacctcggacggcgacgccttactgctgttgtag

SEQ ID NO: 182671 - DNA, 1068 bp, synthetic construct
  misc_feature 1..1068: note = Description of Artificial Sequence: Synthetic coding sequence
  source 1..1068: mol_type = other DNA
atggaccagttccccgagagcgtgaccgagaacttcgagtacgacgatcttgctgaggcttgttacatcggcgacattgtagtgtttgggactgtttttctatcaatcttctactcagttatctttgctatcggactggtggggaacctcctcgtcgtcttcgccttgactaacagtaagaaacccaaatccgttaccgatatatacctgttgaacctggcactttccgatctgctatttgtcgcaaccctgcctttctggacccattacttgattaatgagaagggcctacacaatgccatgtgcaaatttactaccgctttcttcttcattggattcttcggcagcattttttttatcacagtcatttcaattgatcgttatctggccatcgtgctagctgcaaactctatgaacaacagaaccgtgcaacatggagttacaatttccctcggcgtgtgggcagccgccattctggtcgcggcccctcaatttatgtttacaaaacagaaagagaacgagtgtctgggtgactaccctgaggtgttacaagagatttggcccgtgctgcggaacgttgagacaaattttctcggttttttattgcccctcctaatcatgtcctattgctactttaggatcatccagaccctcttttcgtgtaaaaatcacaaaaaggccaaggctattaagcttatcctccttgtggtgatcgtatttttccttttctggaccccatataacgttatgatatttttggagacactgaaactatacgacttcttcccgtcctgcgacatgcggaaggatctgcgactggctctttccgtcactgagacagtcgcttttagtcattgctgcttgaacccgttaatctacgccttcgctggggagaagtttcgcagatatctttaccacttgtatggcaaatgcctggctgtgctttgcggacggtccgttcatgttgattttagttctagtgagtctcagaggtccaggcatggttcagtgttaagtagtaacttcacctaccacacctcagacggcgacgctctccttctcttatag

SEQ ID NO: 182672 - DNA, 324 bp, synthetic construct
  misc_feature 1..324: note = Description of Artificial Sequence: Synthetic coding sequence
  source 1..324: mol_type = other DNA
atggcccgggccgccctgagcgccgcccccagcaacccccggctgctcagagtggccttactgcttctgctgctcgtagccgcggggagaagggcggctggcgcctctgttgccacagaactccgttgtcagtgtctccagactctgcagggcattcacccaaagaacatccagagtgtgaatgtgaaaagcccgggacctcattgtgcccagaccgaggtgattgccaccctgaagaatgggaggaaagcttgtttaaaccccgcgtcgccaatcgtcaagaagattatcgaaaagatgcttaactcagacaaatccaattag

SEQ ID NO: 182673 - DNA, 285 bp, synthetic construct
  misc_feature 1..285: note = Description of Artificial Sequence: Synthetic coding sequence
  source 1..285: mol_type = other DNA
atgagcgtgaagggcatggccatcgccctggccgtgatcctgtgcgcaaccgtcgtgcagggttttcccatgttcaagaggggacgatgcttgtgtatcggccctggcgtgaaggccgtaaaagtggctgatatcgaaaaggctagtataatgtatcctagtaataattgtgacaagattgaagtcattattacccttaaggagaacaaaggccagcgctgtctcaatcctaagagcaaacaggccagactgataattaagaaagtcgaaagaaaaaacttctag

SEQ ID NO: 182674 - DNA, 285 bp, synthetic construct
  misc_feature 1..285: note = Description of Artificial Sequence: Synthetic coding sequence
  source 1..285: mol_type = other DNA
atgagcgtgaagggcatggccatcgccctggccgtgatcctgtgcgctaccgtggtccaggggttccccatgttcaagcggggaaggtgcctgtgcatcggtcccggcgttaaggccgttaaggtggccgacatcgaaaaagccagcattatgtatcctagcaacaattgtgataagatagaagtgattatcaccctgaaggagaacaagggtcagagatgcctgaatcctaagtccaagcaggcaaggctgattatcaagaaagtggaaagaaaaaacttttag

SEQ ID NO: 182675 - DNA, 336 bp, synthetic construct
  misc_feature 1..336: note = Description of Artificial Sequence: Synthetic coding sequence
  source 1..336: mol_type = other DNA
atgagcctgctgccccggcgggccccccccgtgagcatgcggctgctggccgccgccctgctgctgttacttcttgccctgtataccgcgcgagttgacggctccaaatgcaaatgttcgcggaagggcccaaagatccgatactccgatgtcaagaaactggagatgaaaccaaagtatccacattgtgaagagaagatggtgattatcacaactaagtccgtaagccgatataggggccaggaacattgccttcacccaaaactccagtccacgaagagattcataaagtggtacaacgcttggaatgagaagagacgcgtgtatgaagaatag

SEQ ID NO: 182676 - DNA, 300 bp, synthetic construct
  misc_feature 1..300: note = Description of Artificial Sequence: Synthetic coding sequence
  source 1..300: mol_type = other DNA
atgcggctgctggccgccgccctgctgctgctgctgctggccctgtacacagcacgtgtggatgggtcaaaatgcaaatgctcgcgcaaaggacccaagataagatactctgatgtcaagaagttggagatgaagcctaaataccctcactgtgaagaaaagatggtgatcattaccaccaagtctgttagcagataccgggggcaagagcattgtctccatcctaagttgcagtccacaaagcggtttatcaaatggtataatgcatggaatgaaaagaggcgcgtgtatgaggaatag

SEQ ID NO: 182677 - DNA, 822 bp, synthetic construct
  misc_feature 1..822: note = Description of Artificial Sequence: Synthetic coding sequence
  source 1..822: mol_type = other DNA
atgagcggcagccagagcgaggtggcccccagcccccagagccccagaagtcccgagatgggcagggacctccgccccgggagcagagtgctgctgctcttgctgctcctcctgcttgtgtacctcacacagcccggaaacggcaacgagggctctgttactggctcctgctactgcggcaaacgaattagcagtgattctcctccctcggtccagtttatgaaccgcttacgtaaacatctccgagcatatcatcgatgcctatactatacacggttccaactcctctcctggagcgtatgcggcggaaataaggacccctgggtccaggagctcatgtcgtgtctggaccttaaggaatgcggacatgcttacagcggtatcgtagcccaccagaaacacttattaccaaccagtcctcccatttctcaggcctccgagggagcgagcagcgatatccacacacctgcccaaatgctgctttctaccctgcaatcgacacagcgaccgacacttcccgtgggatcactgagctctgacaaagagctcacgcggccaaatgaaactaccattcatactgcaggtcactcactcgccgccggtccagaggcaggggaaaatcagaagcaacccgaaaaaaatgccgggcctaccgcccgtacctccgcgacagtgccagttctctgtctgctagctatcatattcattctgactgccgccttatcctacgtgttatgtaagcggcgcagggggcagagtccacagtcttcaccagaccttccagtccactatatccctgtggcccccgacagtaacacctag

SEQ ID NO: 182678 - DNA, 822 bp, synthetic construct
  misc_feature 1..822: note = Description of Artificial Sequence: Synthetic coding sequence
  source 1..822: mol_type = other DNA
atgagcggcagccagagcgaggtggcccccagcccccagagccccagatccccagagatgggcagggacctgcgccccggctcacgagttttattgcttctcctactcctgttacttgtgtatcttacacagccaggtaacggaaatgaaggctctgtgactggttcttgctactgtggcaaacgaattagcagcgattcacccccatcagtgcagtttatgaatcgtctcaggaagcacttgcgggcatatcaccgatgtctgtactacacacggttccagctgctcagctggagcgtgtgcgggggtaataaggacccctgggttcaggaactcatgagttgtctagacctgaaggagtgcggtcatgcttactctgggatcgtagcccaccagaagcaccttctcccaactagtccccctatctcgcaagcctccgagggtgcatccagtgacatccatactccagcccagatgctgttgtctacgctgcagtcgacccagagaccaacattgcctgtgggctcccttagctcagacaaagagcttactaggcctaatgaaaccaccatacacacagctgggcactcactcgctgctggccctgaagccggggagaatcagaaacagcctgagaaaaacgccggacccactgccagaacaagcgcaacagtgcccgttctgtgcctcctagcgatcatcttcatcctcactgcagccctctcatacgtgctgtgtaaaaggcgaagaggccagtctccccaaagctcccccgatctacccgtccactacattccggtggctcctgacagtaacacatag

SEQ ID NO: 182679 - DNA, 360 bp, synthetic construct
  misc_feature 1..360: note = Description of Artificial Sequence: Synthetic coding sequence
  source 1..360: mol_type = other DNA
atgaaggtgctgatcagcagcctgctgctgctgctgcccctgatgctgatgagcatggtgtctagcagcctgaaccctggcgtagccagaggtcaccgagaccgaggccaggcgtcaagacgctggctccaggaaggcggtcaagagtgtgaatgcaaggattggttcctgcgcgcacctagaagaaagtttatgacagtctccggcctgccaaaaaaacaatgtccctgcgatcatttcaagggtaacgtgaagaagacccggcatcaacggcaccataggaaacccaacaaacatagcagggcctgtcagcagtttcttaagcagtgtcagttgcggtcgtttgccctccctctatag

SEQ ID NO: 182680 - DNA, 360 bp, synthetic construct
  misc_feature 1..360: note = Description of Artificial Sequence: Synthetic coding sequence
  source 1..360: mol_type = other DNA
atgaaggtgctgatcagcagcctgctgctgctgctgcccctgatgctgatgagcatggtatcgagtagccttaaccccggcgttgctcgcggccaccgcgaccgcggccaggcctcccgtaggtggcttcaggaggggggtcaggagtgcgagtgtaaagactggtttctcagagccccccgacggaagttcatgacagtatcaggactgccaaagaagcagtgcccctgcgatcactttaaaggcaacgtgaaaaagacacgtcatcaacgccaccaccggaaacctaacaaacatagcagagcttgccagcagtttttaaagcagtgtcagctcagatcttttgcccttccactgtag

SEQ ID NO: 182681 - DNA, 324 bp, synthetic construct
  misc_feature 1..324: note = Description of Artificial Sequence: Synthetic coding sequence
  source 1..324: mol_type = other DNA
atggcccgggccaccctgagcgccgcccccagcaacccccggctgttacgggttgcactgctgctactgttattggtagcagcttcacggagggcggcaggggctccactcgctaccgaactgcggtgccagtgtttacagacactgcaggggatccatctcaagaatatccagtctgtgaaagtcaagagcccagggccacactgcgcacagaccgaggtcatcgccacactcaaaaatggccaaaaggcctgtttgaaccctgcttcgccaatggtaaaaaagatcatcgagaagatgttaaaaaatgggaaatccaattag

SEQ ID NO: 182682 - DNA, 324 bp, synthetic construct
  misc_feature 1..324: note = Description of Artificial Sequence: Synthetic coding sequence
  source 1..324: mol_type = other DNA
atggcccacgccaccctgagcgccgcccccagcaacccccggctgctacgcgttgctctcctgctgctccttctcgttgccgcctcacgcagagccgctggtgcatccgtagtgacagaacttcgatgtcaatgcttacagactctccagggaatacacctgaaaaatattcagtctgtgaatgtaaggtctccaggtccccactgtgctcagacagaagttattgcaactttgaaaaacggcaaaaaggcatgtctgaatcccgcctcaccaatggttcagaaaatcatagagaagatcctgaacaagggaagcacgaactag

SEQ ID NO: 182683 - DNA, 345 bp, synthetic construct
  misc_feature 1..345: note = Description of Artificial Sequence: Synthetic coding sequence
  source 1..345: mol_type = other DNA
atgagcctgctgagcagccgggccgcccgggtgcccggccccagctcaagcttgtgcgctttgctggtgcttctactcttgcttactcagccaggccccattgcctccgccggccctgccgccgccgtgcttagagaactgcggtgtgtctgcctacaaaccacacagggtgttcaccctaagatgatttctaatttgcaggtgttcgcaatcggcccccaatgcagcaaggtggaggtcgttgcgtcgctgaaaaacggcaaagaaatttgtttagatcccgaagctcctttcctcaaaaaagtgattcagaagatcctggatggcggaaacaaggaaaattag

SEQ ID NO: 182684 - DNA, 1053 bp, synthetic construct
  misc_feature 1..1053: note = Description of Artificial Sequence: Synthetic coding sequence
  source 1..1053: mol_type = other DNA
atgagcaacatcaccgacccccagatgtgggacttcgacgacctgaattttactggtatgcccccagccgacgaagactactcaccctgcatgctagaaactgaaaccctcaataaatacgtggtgataatcgcgtacgctctggtgttcctgctgagcttattgggcaattctctggttatgctggtcatcctttactcgagggtggggcggtctgtgactgacgtttacctgttaaacctggcactggccgatctcctgttcgctctaaccctcccaatctgggccgccagcaaggtgaacggatggatctttggaacttttctctgtaaagtggtgagcctgctgaaagaggttaacttttatagcggcattctcttactggcctgtataagcgtcgaccgttacctggccatcgtccacgcgactcgcacacttacccaaaagaggcacctcgtcaaatttgtttgcttggggtgttggggactgagtatgaatctttcgctgccctttttcttgttccgccaggcttaccatccaaacaactcgtctccggtctgctatgaagtcctcggaaacgacacagccaagtggcgtatggtcttacggatcctcccacacacttttggcttcattgtccctctattcgtcatgctgttttgctatggattcactctgaggactctatttaaggcccacatgggccagaagcaccgcgccatgcgcgtcatcttcgccgtagtgctcatttttcttctctgttggctgccatacaatcttgtgcttcttgccgacactctaatgcgcacccaggtgattcaagaatcctgcgaaaggagaaacaacatcggacgtgcactggacgcaacggagatcttaggattcctccacagttgtttgaaccccatcatctatgcttttatcgggcagaactttagacatggatttttaaaaatcttggccatgcatggcctcgtgtcaaaagaattcctggcccggcaccgcgtgacttcttatacttcctctagcgtgaacgtgtcttccaacttatag

SEQ ID NO: 182685 - DNA, 885 bp, synthetic construct
  misc_feature 1..885: note = Description of Artificial Sequence: Synthetic coding sequence
  source 1..885: mol_type = other DNA
atgagcaacatcaccgacccccagatgtgggacttcgacgacctgaatttcaccgggatgccaccagcagacgaagactatagcccttgtatgctcgagaccgagactctaaataagtacgtggtgattattgcctacgccctggtattcctcttatctttgttgggcaactcactggtgatgctggtcattctctattctcgggttgggcggagtgtcaccgacgtgtatttgctaaatctagccattgtccacgcgactcgcactctcacgcagaagcgccacttggtaaagttcgtgtgccttggatgctggggactgagcatgaatttgtctctgccctttttcctcttcagacaggcataccaccccaacaactcttcacccgtttgctatgaggttctggggaatgacaccgccaaatggaggatggtactgaggattttgccccatactttcggcttcattgttcccttatttgtgatgctcttctgttacggattcacactcagaaccctgttcaaggcacatatggggcaaaaacaccgcgcaatgagggtcatcttcgccgtagtcttgatctttttattgtgttggctaccctataatctcgtcctgctggcagatacgcttatgaggacgcaggtcatccaagagtcctgtgagagaaggaacaatattggcagggcgcttgatgctaccgagatcctcggattcctgcactcatgtctaaatccgattatctacgcttttattggccagaacttccgccacggttttttaaaaattctggcgatgcacggactggtatcaaaggaattccttgcccgccaccgcgtaacatcctatactagcagctctgtgaacgtgtcatccaacctctag

SEQ ID NO: 182686 - DNA, 804 bp, synthetic construct
  misc_feature 1..804: note = Description of Artificial Sequence: Synthetic coding sequence
  source 1..804: mol_type = other DNA
atggtgctggaggtgagcgaccaccaggtgctgaacgacgccgaggtcgcagcgctcctggagaatttttcgtcctcttacgactacggtgagaatgagtccgactcttgctgtactagccccccatgtccccaagatttttccctaaacttcgatagggcctttcttcccgcgctttactctttgctgttcctgctgggactgctcggtaatggagccgttgctgctgtgctcctttctcgacgaaccgcccttagtagcaccgacacatttctgctccatctggccgtcgcagatactctgctagtgctgactctgcctttgtgggccgtcgacgctgctgtgcagtgggtatttgggtctggtctgtgcaaagtcgcaggtgccctctttaacatcaacttctatgccggggcactccttctcgcctgtatttcctttgacaggtaccttaacatcgtgcacgccacacagctgtaccggagagggcctcctgcccgcgttaccttgacctgtctggcggtgtgggggctctgcctgttatttgccctgcctgacttcatcttcctgtcagcacaccacgacgagaggctcaacgcgactcattgccagtacaactttccccaaggctccagctctggatctggctgcggatgctgctcctgcgcttgggcagccccgacccgggagggatccaggggaagtcaccgcctgcccgccggaattcatcctggcctgcgcccccagaggcctcccaccagagcttgcgaagccggcatccgagcccccctctcacccacgtag

SEQ ID NO: 182687 - DNA, 1248 bp, synthetic construct
  misc_feature 1..1248: note = Description of Artificial Sequence: Synthetic coding sequence
  source 1..1248: mol_type = other DNA
atggagctgcggaagtacggccccggccggctggccggcaccgtgattgggggcgcagcccaatccaaaagccaaacaaagagcgactctataacaaaggaattcctcccgggactctacaccgctccatcatccccctttcccccctcccaagtgagtgaccaccaggtcctaaacgacgctgaggtggccgcgctgttggagaatttctcctccagctacgactatggcgaaaacgaatcggactcttgctgtacttcacctccatgcccccaggacttcagcctgaacttcgatagagcctttctcccggccctgtatagtcttctattcctcctcggcttgctcggcaatggcgcggttgcggctgtcctgctgtccagaaggacagctctgagtagcaccgataccttcctgttgcatctggccgtggctgataccttactcgtgctgacactccccctgtgggctgtggacgcggccgtacagtgggtattcggttcaggtctctgtaaggtcgcaggcgcgctttttaacattaacttttatgcaggggctcttctccttgcatgtattagctttgacagatatttgaacatagttcatgccacccagttataccgacgcggcccccctgcaagagtcacacttacttgccttgcagtctggggactgtgcctgctgtttgctctccccgacttcatctttttgtcagcccatcatgacgagaggctgaacgcaacccactgtcaatataactttccacaagtcggaagaaccgcactacgagttctacagctggtggccgggtttctgctacccctgctggtgatggcctattgttacgctcacatccttgcagtgctgctggtatcccgtgggcaaagaaggctaagagctatgagactggtggtggtagttgtagttgcattcgcgttgtgttggacaccttaccatttggttgtgctggtggacattctcatggacttgggggcccttgctagaaactgcggtcgcgaatccagggtcgacgtcgctaagagcgtgaccagcggcctgggctacatgcactgctgcctgaaccctttgctttatgcctttgtgggggtaaagtttagggagcgcatgtggatgctgctactgcgcttgggttgccctaaccaacggggcctccagcgccaaccaagctccagtcggcgagactctagttggagtgagacatctgaggcctcttatagcggattatag

SEQ ID NO: 182688 - DNA, 1107 bp, synthetic construct
  misc_feature 1..1107: note = Description of Artificial Sequence: Synthetic coding sequence
  source 1..1107: mol_type = other DNA
atggtgctggaggtgagcgaccaccaggtgctgaacgacgccgaggtggccgcattactggagaatttttcaagctcatacgattacggcgaaaatgagtccgactcctgttgcacatcaccaccctgtcctcaggacttttccctcaattttgacagggctttcctgccagccctgtactccctgctgtttctcttggggctgcttggtaatggtgccgttgcagccgtgttactgagtaggaggactgccctctcctccaccgataccttcctgctgcacctcgccgtcgccgataccctactggtgttgaccctccctctgtgggccgtggatgcagctgtgcaatgggtcttcgggtctggactgtgtaaggtcgcgggtgccttattcaatattaacttctacgctggcgctctgctgctggcctgcatctcctttgatcgatatctaaatatcgtacacgccacacagctgtaccgtagaggaccacccgctcgagtaactctcacatgtcttgccgtttggggcctgtgtttgctcttcgcgttgccagactttattttcctgtcagcccaccacgatgaacgcttgaacgctactcactgccaatacaatttccctcaagtgggaagaaccgctctccgggtcctccagctggttgctggatttctgctacctcttctcgtgatggcttactgctacgcccacatcctggccgtcttgctagtgtctagaggtcagaggcggctcagggcgatgaggcttgtggtcgtggtggttgtggcttttgccctatgttggacaccttaccacttggtggttttggtcgatatcttgatggatctgggcgctctagcccggaactgtggtagggagagtcgtgtagatgtggccaagtccgtaacttcaggtctgggctatatgcactgttgcctcaacccccttctgtacgccttcgtcggagtcaaattccgggagcgcatgtggatgctgctgcttcggctgggctgccctaaccagcggggcttacagcgccagcctagttcttctcgtcgcgacagcagctggtctgagacctctgaggcgtcgtactcaggactatag

SEQ ID NO: 182689 - DNA, 1119 bp, synthetic construct
  misc_feature 1..1119: note = Description of Artificial Sequence: Synthetic coding sequence
  source 1..1119: mol_type = other DNA
atgaactaccccctgaccctggagatggacctggagaacctggaggatctgttctgggagttagacaggctggataactataatgacaccagtctggtcgagaaccacctctgtcccgccactgagggccccttgatggctagctttaaggcggtcttcgttcctgtcgcctattctcttatcttcctgctgggggtgattggaaacgtgctggtgctggttatcctggagaggcatcggcaaaccaggtcctccacggagaccttcttgtttcatctggccgtggctgacctactcttggtgttcatcctccctttcgccgtcgctgaaggaagcgtcggatgggtgctaggtacctttctatgtaaaaccgtgatcgctttgcacaaagtaaatttctattgttccagcttactcttagcttgcattgctgtcgataggtacctagcgattgttcatgctgtgcatgcctatagacacaggcgcctccttagtatccatatcacatgtggtacaatatggctcgtcggttttttactggccctgccggagatcctgtttgccaaagtgtcgcagggtcatcacaataattccctgccaagatgtacctttagtcaggaaaaccaggcagagacgcacgcgtggttcaccagccgctttttgtaccatgtggccggatttcttctccccatgttggtgatggggtggtgctacgtcggcgtggttcaccgcctcaggcaagcccagcggcgaccgcagagacagaaggccgtgcgggttgccattcttgtcactagtatcttttttctctgttggtccccttaccatatcgtgatcttccttgacacactcgctcgtctgaaagccgtcgacaacacgtgtaaacttaatgggtctctgcctgtagcaattacaatgtgtgagttcctgggtctggcccactgctgtttgaaccccatgctgtacacttttgctggggtgaaattccgctcggatttaagtaggctgctcactaaactcggctgcactggccccgcctctctatgccagttgttccctagctggcgaaggtcgagcctgagtgagtccgaaaacgcaacttccctcactacgttttag

SEQ ID NO: 182690 - DNA, 1029 bp, synthetic construct
  misc_feature 1..1029: note = Description of Artificial Sequence: Synthetic coding sequence
  source 1..1029: mol_type = other DNA
atggccgagcacgactaccacgaggactacggcttcagcagcttcaacgactccagccaggaggagcaccaagattttctgcagttttccaaagtcttcctcccttgcatgtatctcgtggtgtttgtttgcggcctggtgggaaactccctggtacttgtcattagcattttttaccataaacttcagtcactcacagacgtgttcctggtgaacctgcccctcgccgatctggtatttgtgtgtactctgcccttttgggcctacgcgggtatccacgagtgggtgtttggacaggtaatgtgtaagtccctgctgggcatttatactatcaatttttacaccagtatgctaatcctcacttgtatcacggtggaccgcttcattgtggttgtgaaagccacgaaagcttacaaccagcaggccaaacggatgacatgggggaaagtcaccagtctgctgatttgggtgatttctctcctggtgagtctgccccagattatttatggcaacgtgtttaacttagataaactgatatgcggataccatgacgaggccataagtactgtggtattagctactcagatgacactgggatttttcctcccactgctcacaatgattgtgtgttactctgtgattataaagacactgctccatgcaggcggctttcagaaacacagatctttgaagattatcttcctggtcatggccgtctttctgctgacgcagatgccctttaacctgatgaaattcatcagaagcactcactgggagtactatgccatgacctcgtttcactatacaattatggtaactgaggccatcgcctatctgagagcgtgcctgaacccagtgctgtatgccttcgtgtcactgaagtttcgaaaaaatttctggaaacttgtcaaagacataggatgcctgccctacctgggggtgagccatcagtggaaaagttcggaagataattcaaagacattctccgcctcacataacgtggaggctacgagtatgtttcagctttag

SEQ ID NO: 182691 - DNA, 1029 bp, synthetic construct
  misc_feature 1..1029: note = Description of Artificial Sequence: Synthetic coding sequence
  source 1..1029: mol_type = other DNA
atggccgagcacgactaccacgaggactacggcttcagcagcttcaacgattcctcacaggaagaacaccaggacttccttcaattttctaaagttttcttgccatgcatgtatctggtggttttcgtgtgcgggctggtgggcaactctttagtgctagtgatttcaattttctatcacaagcttcagtccctgactgacgttttcctcgtgaacttgcctcttgccgacctggttttcgtctgcacgctccccttctgggcctatgcaggcatacacgagtgggtattcggacaagtaatgtgcaagtccctccttggcatctataccatcaatttctatacaagcatgctgatcctgacgtgcatcaccgtcgataggttcatcgtggtggttaaggccacaaaggcatataaccagcaagccaaacgcatgacatggggcaaagtgacaagcctactgatctgggtgatttcacttcttgtctctctaccacaaatcatttatggtaatgtttttaacctggacaaactgatttgcggatatcacgatgaagccatctcaacggttgtcttggcaacacaaatgactctgggattcttcctgcccttactgactatgattgtctgctattctgttattattaagaccctgctgcacgctggtgggtttcagaagcacagatctctcaaaatcatcttcttggtgatggcagtatttctcctgacacaaatgccatttaacctgatgaagttcataagatctactcattgggagtattacgcaatgacctccttccattatacgattatggtcacggaggcaatcgcctacttgagggcatgtcttaaccctgtgttatatgcatttgtttctcttaaattcaggaaaaacttttggaagctggtgaaagacattggatgccttccatatttgggggtgtctcatcagtggaagagtagcgaagacaatagtaagactttctctgcgagccacaatgtggaagctacatccatgttccagctgtag

SEQ ID NO: 182692 - DNA, 1029 bp, synthetic construct
  misc_feature 1..1029: note = Description of Artificial Sequence: Synthetic coding sequence
  source 1..1029: mol_type = other DNA
atggccgagcacgactaccacgaggactacggcttcagcagcttcaatgatagtagtcaggaggaacatcaggacttcctgcagtttagcaaggtgttcctgccgtgtatgtatttagtggtgttcgtgtgcggactggttggtaactctctagttttggttatctctatattttaccacaagttgcagtctctaactgacgtgtttttggtgaatctgcccttggctgacctagtgttcgtctgtacgttacccttttgggcatatgctggtattcatgaatgggtcttcggccaggtaatgtgtaaatcacttctcgggatctacacaatcaatttctatacatctatgcttatcctcacctgtataacggtggatcgcttcattgttgtcgtgaaggccactaaagcgtataatcagcaggccaaaaggatgacttggggtaaggtgactagtctcctcatctgggtgatcagcctgcttgttagcctccctcagatcatctacggaaatgtgttcaaccttgacaagctcatatgcggctatcatgatgaagctatctccaccgttgtcctggcaactcaaatgacattaggattctttctgccactgctgacgatgattgtctgctattccgtgattatcaaaactcttctgcatgctggcggctttcaaaaacaccgcagcctgaagatcatcttcctcgtgatggccgtgttcctgctaacacagatgccatttaatcttatgaaattcattagaagcactcattgggaatattatgccatgacaagtttccattatacgatcatggtgactgaagctatcgcttacctcagggcatgtctaaatccagtcctgtatgcttttgtatctttgaaattcaggaagaacttttggaagctggtaaaggatatcgggtgcttgccctatctcggggtgagccatcagtggaaatcctccgaggacaattcaaagacgttctctgcctcccacaacgtagaagctacttctatgtttcagctgtag

SEQ ID NO: 182693 - DNA, 1029 bp, synthetic construct
  misc_feature 1..1029: note = Description of Artificial Sequence: Synthetic coding sequence
  source 1..1029: mol_type = other DNA
atggccgagcacgactaccacgaggactacggcttcagcagcttcaacgattcctctcaggaggagcaccaggactttctacagttttccaaagtctttcttccgtgtatgtacttggtcgtgttcgtgtgcgggcttgttggcaatagtctggtgttagttatctcaattttctatcacaagctccagtccctgacggacgtgtttctagtaaatctgccgctggctgatctcgtgtttgtgtgcaccctgcccttctgggcttatgctgggatccacgagtgggtgttcggtcaggtcatgtgcaagagtttgctgggcatttacacaatcaatttttacacttcaatgctgattctcacctgcatcaccgtggaccgatttatcgtggtggtgaaggcaacaaaagcctacaatcagcaggctaaacgcatgacatggggcaaagttacgagtctgcttatatgggtgatttccttactggtgagtttgccccaaattatttacggcaatgtgtttaatttagataagttgatctgtggctaccacgacgaggccatttcaactgtggtgcttgcaacgcaaatgacacttggattttttctaccgctgctcactatgattgtctgttactctgtcattataaaaactctgcttcacgcaggtggattccagaagcaccggagtctgaaaattatattcctcgtgatggcggttttccttttgactcagatgcctttcaatctgatgaagttcatccgatccacacactgggagtactatgcaatgacatcatttcactataccatcatggtgactgaagcaatcgcatacttgagagcctgtctgaaccccgttttgtacgccttcgtgtcattgaagtttcggaagaatttttggaagctggtgaaagatattggctgtctgccgtatctgggagtatcgcatcagtggaaaagctccgaagataacagcaagactttttcggccagtcacaacgtcgaagcaacatccatgtttcagctctag

SEQ ID NO: 182694 - DNA, 1089 bp, synthetic construct
  misc_feature 1..1089: note = Description of Artificial Sequence: Synthetic coding sequence
  source 1..1089: mol_type = other DNA
atggacctgcacctgttcgactacagcgagcccggcaacttcagcgatatatcctggccttgcaactccagtgactgtatcgtagtggacactgtaatgtgtcctaacatgcccaataaatcagtgctgctgtacacactctccttcatttatatttttatcttcgtgattggcatgatagctaattctgtggtcgtgtgggtgaatatacaggccaagaccacaggctacgacacgcactgctacatactcaacctggccattgctgacctctgggtcgtcctgacaataccggtctgggtggtatcattagtgcagcacaaccagtggccaatgggcgagctcacatgcaaggtgacccaccttatcttcagtattaacctgttcggctccattttttttctgacatgcatgagcgttgatcgatacctgagcattacttattttactaacacaccctccagccgtaaaaagatggtgcggagagtagtatgtatactcgtctggttgctcgccttctgcgttagtctgccagatacatattacctaaagaccgtgacaagcgcgagcaataatgagacctattgtaggagtttctaccccgagcattcaatcaaggagtggctaataggaatggaactcgtttccgttgtcctcgggttcgccgttcccttttccatcatcgctgtgttctattttctgttggcacgcgcaatttcggcttcttctgaccaggagaaacactcatctagaaaaattatctttagctatgtggttgtgttcctcgtttgctggcttccttatcatgtagccgttctcctggacattttcagtattctgcactacataccattcacctgcagactggaacatgcacttttcacggccctacatgtgacacagtgcctcagcctcgtgcattgctgtgtgaatccggtgctgtattcctttataaacaggaattaccggtacgagctgatgaaagctttcatcttcaaatactctgcaaaaaccggacttactaagctgatcgacgcgtctcgcgtgtctgagacagaatactcagcacttgagcagagcactaagtag

SEQ ID NO: 182695 - DNA, 636 bp, synthetic construct
  misc_feature 1..636: note = Description of Artificial Sequence: Synthetic coding sequence
  source 1..636: mol_type = other DNA
atggacctgcacctgttcgactacagcgagcccggcaacttcagcgatattagttggccatgcaactctagcgattgtatcgttgtggacaccgtgatgtgtccaaatatgcctaataagagcgtgctgctttataccctgtctttcatctatattttcatcttcgtaattggcatgatcgccaacagcgtcgtagtatgggttaacatccaggctaagaccacgggatacgacactcactgttacattttgaaccttgcaatcgcagatttgtgggtcgtactgactattccagtttgggttgtgtccctggtccagcataaccagtggccgatgggcgagctgacctgtaaagtgactcaccttattttttccataaatctctttggttccatcttttttctgacttgcatgtcagttgaccgctacttatccatcacttacttcacgaatacacccagcagccggaaaaaaatggtgcgacgagtggtatgtatcctagtgtggctgttggccttctgtgtcagtttgcccgacacctattacctgaagacagtcacgagcgcctctaacaatgaaacgtattgccgctcattctaccccgagcacagtattaaagagtggctgatcggatag

SEQ ID NO: 182696 - DNA, 1155 bp, synthetic construct
  misc_feature 1..1155: note = Description of Artificial Sequence: Synthetic coding sequence
  source 1..1155: mol_type = other DNA
atggccgccaccgccagcccccagcccctggccaccgaggacgccgactctgaaaattccagcttctattactatgattatctcgacgaagtcgcttttatgctttgccgtaaggacgctgtagtgtcttttggcaaagtgttcctgccagtgttctactcccttatctttgtgctggggctgtcagggaatttgctgctcctgatggtccttcttcggtacgtccccagacgaaggatggtcgaaatttacctcctcaatctcgcaatcagcaatctcctgtttcttgttaccctgccattttggggcatttccgtcgcctggcactgggtcttcggttcttttctgtgcaagatggtttccacattgtatacaatcaacttttactctgggatattcttcatctcctgcatgtcgctggacaagtatttggaaatcgtacacgctcagccttaccatcgacttcgcacccgagccaagtccctgctgctggctaccatcgtatgggctgtgtcgttggcggtgtcaatccccgatatggtatttgtacagactcacgaaaatcccaagggcgtctggaactgccacgctgatttcggtgggcatggcacaatttggaaactgtttctacgcttccaacaaaatctgctcggttttttgttgcctctccttgccatgatcttcttctacagcaggatcgggtgtgtacttgtcaggttgagacctgcgggtcaggggagagctctgaagatcgcagctgcactcgtcgtggcttttttcgtgctgtggttcccttacaacctgaccttgtttcttcatactttgttagacctgcaggttttcggtaactgtgaggtgtcccagcacctcgattacgctctacaggtcaccgaatctattgcctttttgcactgttgcttcagccctattctgtacgctttttcttctcaccgtttcagacagtacttgaaagctttcttagcagctgtgttgggatggcacctagcccctggaactgcccaggcttcactgtcttcatgctcggagtctagtatcctgacagctcaggaagagatgactgggatgaatgatctgggcgaacgccaaagcgaaaactaccccaataaggaagacgtaggcaacaagtctgcctag

SEQ ID NO: 182697 - DNA, 1155 bp, synthetic construct
  misc_feature 1..1155: note = Description of Artificial Sequence: Synthetic coding sequence
  source 1..1155: mol_type = other DNA
atggccgccaccgccagcccccagcccctggccaccgaggacgccgacagtgagaacagtagcttttactactatgattacctcgacgaggtcgcctttatgctgtgccgcaaggacgccgtagtctcttttggcaaggtgttcctgccagtgttttactcactcatatttgtcctgggcctttcagggaatctacttctgctgatggtgctcctgcgttatgtccccaggagacgtatggtcgagatctacttgctcaacctagctatctcaaacctcttatttctggtgacactacccttctggggaatctctgtcgcatggcactgggtctttggatcgttcctgtgtaagatggtatcaactctctacaccataaacttctacagtgggatcttcttcatctcctgtatgtcactcgacaaatacctcgaaattgtacacgcccagccctatcacaggttgagaacacgggccaaatccttactgctggccacaatcgtgtgggctgtttctctcgccgtgtctattcccgatatggtgtttgttcaaacacacgaaaatccgaagggcgtgtggaactgtcatgctgactttggtggtcacggaaccatatggaaactgttccttcgattccagcaaaatctgctgggcttcttgctccctctcctcgctatgatatttttttacagtcgtatcggctgcgtgctagtccggctaaggccagctggccaaggacgcgcattgaaaatcgcagctgcactagtggttgcctttttcgtgctctggtttccatacaacctgaccctcttcttacacacactgctggacctccaagtgttcgggaattgtgaggtatcccagcaccttgactacgctctacaggtgactgaaagcatagcctttctgcattgttgcttctccccaattttatatgctttttccagtcaccgtttcaggcagtatttgaaggccttcctcgcagcggtgctgggctggcacctggcacctgggactgctcaggcaagcctgagcagttgttcagagagttccatcctgacagctcaggaggagatgaccgggatgaacgacctgggagagaggcagagtgagaactatccgaataaggaggatgttggaaataaatctgcctag

SEQ ID NO: 182698 - DNA, 1155 bp, synthetic construct
  misc_feature 1..1155: note = Description of Artificial Sequence: Synthetic coding sequence
  source 1..1155: mol_type = other DNA
atggccgccaccgccagcccccagcccctggccaccgaggacgccgactccgaaaactcctccttctactactatgactacttggacgaagttgcatttatgctctgtcgaaaagacgcggtagtctccttcggtaaagtattcctgccagtcttttactccctgatttttgtgcttgggctgtctgggaacctgctcctgctaatggtgctcttgcgttatgtgccacgcagacgaatggtggagatttatctgttgaatctggctatcagcaacctcctgtttctggtaacactgcccttttggggcatctctgtagcgtggcattgggtgttcggtagcttcttgtgtaagatggttagcacgctgtacaccatcaatttctactctggtatcttctttatctcctgtatgtctctggataagtatctggagatagtccacgcccagccataccatcggctcagaaccagggcgaagagtctcctgctcgccaccattgtatgggctgtcagtctggccgtatctattcctgacatggtctttgtgcagacccatgaaaacccgaagggggtctggaattgtcatgctgatttcggcggccatggaaccatttggaaacttttccttaggtttcagcagaacctcctggggttcctgctgccacttttggcaatgatctttttttatagccgaatcggatgtgtcctggtgaggcttaggcctgccggccagggacgggccctgaaaatcgcagccgctctcgttgtggcattttttgtgctgtggtttccttataatctgactctcttcttacacactttgctggacctccaagtgtttggcaattgcgaagtctcccagcatttagactacgccttgcaggtgacggaatccatcgccttcttgcattgttgcttttctcctatactctatgctttttcttcccacagattcaggcagtatttaaaagctttcctggctgccgtgctaggttggcacctagctcccgggacggctcaggcgtccctctccagctgttcagaatcttcaattctgaccgcacaggaggagatgacgggaatgaatgacctgggggaaaggcaatctgagaactatccgaataaggaggatgttgggaataagagtgcgtag

SEQ ID NO: 182699 - DNA, 1122 bp, synthetic construct
  misc_feature 1..1122: note = Description of Artificial Sequence: Synthetic coding sequence
  source 1..1122: mol_type = other DNA
atgcggatggaggacgaggactacaacaccagcatcagctacggcgatgagtaccccgattatctggactctatcgtcgttctggaggacttgagcccccttgaggctagagtcacacgcatttttctggtggtggtctactccatcgtgtgttttctcggtatcctaggcaacgggttggtgataatcatcgctacatttaaaatgaaaaagactgtgaacatggtgtggttcctgaacctcgctgtcgccgatttcctgttcaacgtctttctgcccattcatataacctacgcagcaatggactatcactgggtctttgggacagccatgtgtaaaataagcaatttcttgctaatccataacatgtttacctcagttttcctactgactattatcagctctgataggtgcatttcagttttgctgccagtttggtctcaaaaccaccggagcgttagattagcttatatggcctgcatggtgatctgggtgctggcattttttctgagctccccaagtctagtatttcgggacactgccaatctccatggaaaaatatcatgctttaataacttcagtctgagcacacccggatcttcttcgtggcctacacactcccagatggacccagtcggatattctagacacatggtcgttactgtaacccggttcctgtgcggttttctggtgccggtgctcattataaccgcgtgttacctcacaattgtctgtaagttgcaaaggaacaggctcgctaagacgaaaaaacccttcaaaatcattgtgactattatcatcacattctttctgtgctggtgtccttaccacactctcaatctcctcgaactgcaccacacggcaatgccgggttctgtctttagtcttggtcttccattggcaaccgcattggccatcgccaatagttgcatgaatcctatcctgtacgtgtttatggggcaggatttcaaaaaatttaaggtcgccctgttcagccggctcgttaatgctttatctgaagacacagggcatagctcatacccatcccataggtcattcaccaaaatgtcttctatgaatgagagaacatccatgaatgagcgcgagaccgggatgctgtag

SEQ ID NO: 182700 - DNA, 1116 bp, synthetic construct
  misc_feature 1..1116: note = Description of Artificial Sequence: Synthetic coding sequence
  source 1..1116: mol_type = other DNA
atggaggacgaggactacaacaccagcatcagctacggcgacgagtatcctgactacctagactctatcgtagtgctcgaggacctgtcccccctcgaggctcgtgtcacacgaatcttcctggtagtagtttatagtatcgtctgcttcttgggcatactgggcaacggactcgttataataattgcgaccttcaagatgaagaaaacagttaatatggtttggtttctgaatctggccgtggccgatttcctctttaacgtattcctgccaatccatattacatacgctgcaatggactaccattgggtgtttgggaccgctatgtgcaaaataagcaatttcttgctaatccataatatgtttacttcggtgttcctcctcactattattagttccgatcgttgtatttctgtcctgctgcccgtgtggtcccagaatcacaggtctgtcagactggcgtacatggcgtgcatggtaatctgggttcttgcattttttctgtcctctccctctctcgtgttccgagacactgccaatctccacggaaagatctcctgctttaacaattttagtctgtctacacctgggagcagctcctggccaacccactctcagatggacccagtcgggtatagcaggcacatggtcgtgactgtgacacgatttttatgcggctttttggtgcccgtactgataatcacagcctgttacctcacaatcgtttgtaaattacagcgaaataggctggcgaagaccaaaaagcccttcaaaattatcgtgacaatcatcattacttttttcctttgctggtgtccttaccatacattaaacttgctggaattgcatcacactgccatgccggggagtgtattttccctgggtttgcccctcgcaaccgcacttgccattgcgaatagttgcatgaaccctatcctctatgttttcatgggtcaggatttcaagaaattcaaagtggctctgttctcgcgacttgttaacgccctttcagaggacactggccactcctcatacccctcacatcgctcatttactaaaatgagctcgatgaacgagagaacctccatgaacgagcgcgaaacaggaatgctatag

SEQ ID NO: 182701 - DNA, 1122 bp, synthetic construct
  misc_feature 1..1122: note = Description of Artificial Sequence: Synthetic coding sequence
  source 1..1122: mol_type = other DNA
atgcggatggaggacgaggactacaacaccagcatcagctacggcgacgaatacccagactacttggattcaatcgtggtattggaggatctgagccccctggaggcgagagtgactaggatcttcctggtggtggtatactccattgtgtgttttctggggatcttaggtaatggccttgtgattattatcgccacctttaagatgaaaaagaccgtaaacatggtctggtttcttaacctcgctgtcgcagatttcctcttcaatgtgtttctccccatacatattacatatgccgccatggattaccattgggtgttcggcaccgccatgtgtaagatctcgaattttttgctgatccataatatgttcacttctgtgtttctgctgactataattagtagtgacagatgtatctctgtgcttctgcctgtgtggtcgcagaaccacaggtcagttcgactggcttatatggcctgcatggtgatatgggtgctcgcgttttttctctcaagcccatccctcgttttccgcgatactgctaacctgcatggcaagatctcatgtttcaacaactttagtctgtccacccccggcagcagctcctggccaactcactcacagatggatcctgttgggtacagcaggcatatggtagttactgtgaccaggtttctgtgtggcttcttggtacccgttttgattatcacagcctgttacctgaccatagtatgtaagcttcagcggaatagactggccaagacaaaaaaaccctttaagatcattgtaacaatcatcattactttcttcctctgttggtgcccttatcacactcttaacctgttggagctgcatcacaccgcaatgcccgggtccgtctttagtctggggctgcctttagctactgccctcgcgatcgcgaatagttgcatgaatcccattctgtatgtgtttatgggtcaggattttaaaaaatttaaggtcgccctcttttctaggctggtcaacgccttgagcgaagatacgggccacagctcttacccctcacacaggagctttaccaagatgtctagcatgaacgaaagaacttccatgaatgagcgtgaaacaggtatgctgtag

SEQ ID NO: 182702 - DNA, 432 bp, synthetic construct
  misc_feature 1..432: note = Description of Artificial Sequence: Synthetic coding sequence
  source 1..432: mol_type = other DNA
atgcggatggaggacgaggactacaacaccagcatcagctacggcgacgaatacccagactatctagacagtatagtcgtgctggaagacctcagccccctggaagctcgtgtaactagaatttttcttgtagttgtttactccatcgtatgctttctggggatcctggggaacggtcttgttattatcatcgccacatttaagatgaaaaagacagtcaatatggtgtggttcctaaaccttgcagtggctgattttctctttaatgtatttctgcccattcacatcacttacgcggcgatggattaccactgggtcttcgggactgccatgtgtaagatttccaactttctactcatccacaatatgtttacaagcgtgttcctgctcaccattatctcctcagataggtgcatctccgtgttgctgtag

SEQ ID NO: 182703 - DNA, 1122 bp, synthetic construct
  misc_feature 1..1122: note = Description of Artificial Sequence: Synthetic coding sequence
  source 1..1122: mol_type = other DNA
atgcggatggaggacgaggactacaacaccagcatcagctacggcgatgagtacccagactacctcgacagtatcgtcgtcctcgaagatctgtcaccgctggaagccagggttacaagaatatttctggtggttgtgtactcaatcgtatgctttctgggaatcttaggcaacgggctcgtcattatcattgctacgttcaagatgaaaaaaacagtcaatatggtatggttcctcaacttggccgtagccgatttcctgtttaacgtattcctaccaatacatattacttatgctgccatggactaccattgggtcttcggcaccgccatgtgcaagatttcaaatttcctgctgatccacaatatgttcacgagcgtgttcctcctcactattatctctagcgataggtgcatttctgttctcctgcccgtctggagccaaaatcacaggtctgtacgtctcgcttatatggcctgtatggtcatttgggtactggccttcttcttatcttccccttcccttgtcttccgagacactgccaacctgcatgggaagatctcctgctttaacaacttctcactgagcacacccggtagttccagttggcctacacactcccagatggaccctgtcggctacagcaggcacatggtggtgactgtgaccaggtttttatgcgggttcctggtcccagtgcttatcattactgcctgctacctaaccatagtgtgcaaattacagaggaaccgcctcgctaagaccaagaaaccgttcaagattatcgtcacaattatcattacctttttcttatgttggtgcccctatcacactcttaacttgctggaattgcaccacacagccatgcccgggtccgtgtttagtctgggcttgcctctggccacagctcttgctatcgctaattcctgcatgaatcccattctctacgtctttatgggccaagactttaaaaaattcaaagtggctttgttctccagactcgttaatgccctgagtgaggacactggacactcctcttatccgagtcacagaagtttcacgaaaatgtcatctatgaacgaacgaacctccatgaacgagagagagaccggcatgctttag

SEQ ID NO: 182704 - DNA, 444 bp, synthetic construct
  misc_feature 1..444: note = Description of Artificial Sequence: Synthetic coding sequence
  source 1..444: mol_type = other DNA
atgcggatggaggacgaggactacaacaccagcatcagctacggcgatgaataccctgattacctagatagcatagtcgtactggaggacctgtcacccttagaagctcgggttacacgcatctttctggtggtggtttattccattgtgtgcttcctgggcatactgggaaatggattagtcatcattatcgcaacatttaaaatgaagaaaacagtcaacatggtttggtttttaaacctcgcagttgccgactttctgttcaacgtcttccttccaattcacatcacctacgcagctatggattaccactgggtttttggtaccgccatgtgcaagatctcgaattttctgctgatccataatatgtttaccagtgtgtttctgctgacaataattagtagcgatagatgcatctctgtgcttctccccgtgtggagttag

SEQ ID NO: 182705 - DNA, 1116 bp, synthetic construct
  misc_feature 1..1116: note = Description of Artificial Sequence: Synthetic coding sequence
  source 1..1116: mol_type = other DNA
atggaggacgaggactacaacaccagcatcagctacggcgacgagtaccccgactaccttgactcgatcgtggtcctcgaagatttaagccccctggaggcccgggttacccgcatctttctcgtggtcgtgtactctatagtgtgtttcctcggaatccttggcaatggtctcgttatcataatagcaacatttaagatgaagaaaactgtcaatatggtgtggttccttaatctcgccgtagctgacttcctgttcaatgttttcctccccatacacatcacttacgcagctatggactaccactgggttttcgggaccgccatgtgcaaaatttcaaattttctgctgattcataacatgtttacttccgtcttcctgcttacgatcatttcctctgaccgctgcatctcagtgctccttcccgtttggtcccagaatcataggtccgtcaggctggcttatatggcctgcatggtaatctgggtgctcgctttcttcctgagcagtccttcccttgtcttccgcgatacagccaatctgcatggaaagattagctgttttaataatttctccctgagcaccccgggcagttctagctggcccacccacagtcaaatggatcctgtcggatattcgcgacatatggtcgtgacagtgaccagattcctatgcggatttcttgttccagttctaattatcacagcctgctatctgaccatagtctgtaagcttcagcgtaatcgattggcgaaaaccaaaaaaccctttaagatcatagttaccatcattatcacatttttcctctgttggtgcccctatcacaccctgaacctgctggagttacaccacaccgctatgcctggatccgtgttcagccttggcctgcccctcgctaccgccctggcaattgcgaactcgtgcatgaaccctatactctatgtctttatggggcaggacttcaagaaatttaaggtggccctctttagccgactcgttaacgcgctctccgaggatacgggccactccagttatccttcgcatcgatcttttacaaaaatgtcgagtatgaacgagcgaacgtcaatgaatgaaagggaaacgggcatgctgtag

SEQ ID NO: 182706 - DNA, 1005 bp, synthetic construct
  misc_feature 1..1005: note = Description of Artificial Sequence: Synthetic coding sequence
  source 1..1005: mol_type = other DNA
atgcccagcaaggagagctggagcggccggaagaccaaccgggccgcagttcacaagtctaagcaggaaggtcgccagcaggacttattgatagctgccctcgggatgaaactggggagtccgaaatcttcagtcactatttggcagccattgaaactttttgcatatagccagcttacgtcgttggtgagaagggctacactcaaagaaaacgagcaaatcccaaagtatgagaagatacataatttcaaagtgcatacctttaggggtccccattggtgcgagtactgcgcaaatttcatgtggggactcatagctcagggcgtgaagtgtgctgactgtgggctgaatgtccataaacagtgttctaagatggtgcccaatgattgcaaacctgacttgaagcacgtcaaaaaggtatacagctgcgatctcaccaccctggttaaggcccataccaccaaacgtcctatggtggtggacatgtgcatccgtgagatcgaatccaggggcttgaattccgaaggactctatagagtgagcggcttctcagatctgatagaagacgtcaagatggcgttcgatcgggacggcgaaaaggcggacatttcggtgaacatgtacgaggacataaatattattaccggagctctcaaactctatttccgtgatctccccattcccctgattacctacgatgcatacccaaagtttatagagtctgccaagattatggatcccgacgagcaactcgaaacactgcacgaagccctaaagctgctgccgcccgctcactgcgaaaccttgcgctatctgatggcgcatctgaagagggtgacactgcatgagaaggagaacttaatgaacgcagaaaacctgggcatcgtgttcggcccaacactgatgcgatcccccgagctcgatgccatggcagcgctcaacgatatcagataccagagactggtcgttgaactgcttattaagaatgaggacatcttattttag

SEQ ID NO: 182707 - DNA, 1302 bp, synthetic construct
  misc_feature 1..1302: note = Description of Artificial Sequence: Synthetic coding sequence
  source 1..1302: mol_type = other DNA
atggccctgaccctgttcgacaccgacgagtaccggccccccgtgtggaaaagctatctttatcagcttcagcaggaggctccccacccccggcgcataacctgtacatgcgaagttgagaatcgaccaaagtattacggacgcgagttccacggaatgatctctagggaagctgctgaccagctgctgatagttgcagaagggtcttatctaatccgtgagagtcagagacaacccggcacttatactctggctctcaggttcgggtcccaaacccggaactttcggctctactatgatgggaagcatttcgttggggaaaagaggtttgaatcgattcatgacctggtgaccgatgggctgatcaccctgtacattgaaaccaaagctgcggagtacatcgccaagatgacgatcaatccaatatacgaacacgttgggtatacaacattgaatcgcgagcctgcttacaaaaagcatatgcccgtcctaaaggagacgcatgatgagagggactctacgggtcaggacggggtgtctgagaagagggtccacacctttcgcgggcctcattggtgtgagtattgtgccaactttatgtggggactgatcgcccagggtgtaaaatgtgccgactgcggattaaatgtccacaaacagtgttctaagatggttccgaacgattgcaagcctgacttgaagcacgtaaagaaagtgtactcttgtgatctgaccacattggttaaggctcatacaactaagcgccccatggtcgtagacatgtgtatcagagagatcgagtcaagggggctaaattccgaaggcttgtaccgagttagtgggttctctgacctaatcgaagatgtgaagatggccttcgacagggatggtgaaaaggccgatatctctgtcaacatgtatgaggatatcaatatcattaccggcgccctcaagttgtacttcagggatttgccaatacctctgatcacctacgacgcttacccaaagtttatagagtctgcaaaaataatggatcccgacgagcagcttgagactttgcacgaggcgcttaaacttctcccccccgctcactgtgaaaccctgagatatctgatggcccacctcaagagagtcactttacacgaaaaagaaaacctgatgaacgcagaaaatttgggaatcgtattcgggccgactctcatgcggtctccagagctggatgccatggcagcactgaacgatatacgttaccagaggttggtagtggaactgctcatcaagaatgaggatatcctgttctag

SEQ ID NO: 182708 - DNA, 1380 bp, synthetic construct
  misc_feature 1..1380: note = Description of Artificial Sequence: Synthetic coding sequence
  source 1..1380: mol_type = other DNA
atggccctgaccctgttcgacaccgacgagtaccggccccccgtgtggaaatcttacctttaccagcttcagcaggaagccccacacccacgcaggatcacttgcacatgtgaggtagagaacagaccgaagtactacggaagagagtttcacggaatgatatctcgggaggcggctgatcagctgttaattgtcgccgagggctcctacctgatccgtgaatcccaacggcaacccggaacctacaccctggccctgcgcttcggatcacagacaaggaactttcggctgtactacgatgggaagcactttgtcggcgagaagcgctttgaaagtattcacgatctagtcactgacggtcttataacactgtacattgaaacaaaggccgctgagtacatcgctaagatgaccataaaccccatctacgaacatgtcggttatactactctcaatagggaacccgcctacaaaaaacatatgcctgtcctgaaagagacccacgacgagagagattcgactggacaggacggtgttagcgagaagcgtcttacaagtctggtgaggcgggccactttaaaagaaaacgaacagatcccaaaatatgaaaaaatacataactttaaagtgcatacttttaggggtccccactggtgtgaatactgtgccaatttcatgtgggggctcatagcccagggagtaaagtgcgccgactgtggcttgaatgtgcataagcagtgttctaagatggtgcctaacgactgtaagcctgacttgaagcacgtgaagaaagtgtattcttgtgacctgacaaccctggtgaaggcccacaccaccaaaagacccatggtagtggatatgtgcattagggaaatagaatcaagagggctgaactcagaaggactgtaccgcgtgtctggatttagtgacctaatcgaagatgtgaaaatggcttttgacagggacggtgagaaggccgacatcagcgtgaatatgtacgaagatatcaacataatcaccggagctttgaagctgtatttcagggatcttccaatacctctcattacctatgacgcctatcccaagttcatagagtccgcgaaaattatggaccccgatgagcaattggaaacgctccatgaagctttgaagctcctcccacccgcccattgtgagaccttacgctacttgatggctcatttaaagcgcgtcacactgcacgagaaggagaatctaatgaatgcggaaaaccttggaattgtgtttggtcccactctcatgcgatccccggaattggatgccatggcagccctgaatgatattagatatcaaagacttgtggtagagcttctcatcaagaatgaggacattctgttttag

SEQ ID NO: 182709 - DNA, 1167 bp, synthetic construct
  misc_feature 1..1167: note = Description of Artificial Sequence: Synthetic coding sequence
  source 1..1167: mol_type = other DNA
atgaccgccagcgtgctgctgcacccccggtggatcgagcccaccgttatgttcttatatgataacgggggtggcctggtggctgacgagctcaacaagaatatggagggtgcagctgccgcggcagccgcagcagctgcagctgctgcagcgggggctggcggagggggtttccctcaccccgccgccgccgccgccggcggcaatttctctgtggccgcagccgctgctgcggctgctgccgctgctgccaaccagtgtaggaacctgatggcccaccccgctccattggctcctggggctgcctcagcttattcatcagcccctggagaagcaccgccgagtgcagctgccgctgctgctgcagccgctgcagccgcagcagctgccgcagccgctagctcctctggaggacccggtcctgcaggtccggcaggcgctgaagccgccaaacaatgcagtccatgcagcgcagccgcccaaagttcatctgggcctgcagcactcccttatggctattttggaagtggctactatccttgtgcgcggatgggacctcaccctaatgccatcaaatcgtgcgcccagcccgcctctgccgccgctgccgccgcttttgcagacaagtacatggatacggctggcccagctgcagaggagttcagcagccgtgctaaggaattcgccttttatcatcagggttatgccgctgggccttaccaccaccaccagcctatgcccggttacttggatatgcccgtcgtacctggactggggggacctggcgaatcgcgccacgagccactggggctgccgatggaatcataccagccctgggcgctgcctaatggttggaatggacagatgtattgcccaaaggagcaggctcaaccaccccatctgtggaagtccaccttgccagatgtggtgtcccacccctcggatgcctctagctaccgcaggggccggaagaagcgcgtaccgtacacgaaggttcagctcaaggagctggaacgggagtatgcgaccaataaatttattacaaaggacaaaaggagacgtatctccgcgactactaacctttccgaaagacaagtgaccatttggttccaaaacaggcgggtaaaggaaaagaaggtgattaataagttgaaaaccacatcctag

SEQ ID NO: 182710 - DNA, 999 bp, synthetic construct
  misc_feature 1..999: note = Description of Artificial Sequence: Synthetic coding sequence
  source 1..999: mol_type = other DNA
atgttcagcgaggagctgtggctggagaacgagaagaagtgcgccgtggtgaggaagtctaaacaaggtcgcaagcggcaggagcttctggctgtagccttcggtgttaaagtgggagtcaaggggggcttcttgtggccaccactgaagctgttcgcctgctcccagatttccagtctagtacgccgggctgccctcactcataacgataaccatttcaattacgagaagactcacaatttcaaagtgcatacattccgggggccccattggtgcgagtactgcgctaactttatgtggggactcatagctcagggagttagatgcagtgactgtggactcaacgttcataagcagtgctcaaaacacgttcccaacgactgtcagccggatctcaagcgcatcaaaaaagtttattgctgcgatcttaccaccctagttaaggcccacaacacccaacgcccgatggtggtggacatttgcataagggagattgaggctagaggattgaagtccgagggcttgtatcgagtgtctgggttcacggaacacatcgaagatgttaaaatggcctttgatcgcgatggtgaaaaagctgacattagcgccaacgtgtaccccgacatcaatattattactggagccctgaagctgtacttccgggatctgcccattcctgtgataacctacgacacctattccaagttcattgatgccgccaagatctcaaatgcggatgagagattagaggctgtccacgaggtgctgatgctgctgccgcctgctcactatgagaccttacgctacttgatgatccacttaaagaaggttactatgaatgagaaagataattttatgaatgcagaaaatctagggattgtatttggtccaaccctcatgcgaccccctgaagacagcaccctaacaactttgcacgatatgagataccagaagttgatcgtgcagatactaatcgaaaacgaggacgtccttttctag

SEQ ID NO: 182711 - DNA, 525 bp, synthetic construct
  misc_feature 1..525: note = Description of Artificial Sequence: Synthetic coding sequence
  source 1..525: mol_type = other DNA
atggccgccagcagcaacagcagcctgagcggcagcagcgtgagcagcgtctatagcgagccgaggagtccaagagaacttccaaagtatgcagaagaataccaaccccccatatggaagtcatacctttaccagctccaacaggaagctcctcggcctaaacgcatcatctgtcccagagaggtggagaaccgccccaagtactacggccgggagttccatggaatcatcagccgagaacaggcagacgagctactgggcggcgtagaaggcgcttatatattgcgcgagtcccagcggcaaccgggatgttacacactggcgctgagattcggaaaccagactttaaattataggctcttccacgatgggaagcattttgtgggagagaagcggttcgaatctatccatgaccttgtaacagatgggctaatcaccctgtacattgagacaaaggcagccgagtacataagtaaaatgacgaccaatccaatctatgagcacattggctacgctaccctgtag

SEQ ID NO: 182712 - DNA, 825 bp, synthetic construct
  misc_feature 1..825: note = Description of Artificial Sequence: Synthetic coding sequence
  source 1..825: mol_type = other DNA
atgttcagcgaggagctgtggctggagaacgagaagaagtgcgccgttgttagaaagtctaagcagggacggaagaggcaagagctgcttgctgttgccttcggcgtgaaagtcggcgtcaaaggcggttttctctggccccccctgaaattgtttgcatgctcccaaattagctctctggttagacgggctgcgctgacacataatgacaatcattttaactacgagaaaacacacaatttcaaagtgcacactttccgcggaccgcactggtgcgagtattgtgccaatttcatgtggggtctgattgcacagggggttcgatgctccggcttaaagtccgagggcctttatagggtttcaggattcacagagcacatagaggatgtcaaaatggccttcgacagggatggagagaaggccgatatcagcgccaacgtctaccctgatataaatatcatcaccggcgcgctgaaactgtattttcgggacctgccgattcctgttatcacttacgacacatatagtaaattcattgatgcagctaaaataagcaatgccgacgagaggctggaggcggttcatgaagttcttatgctgttgccacccgctcattatgaaaccctccggtatctcatgattcacttaaagaaagtcacaatgaacgaaaaggacaatttcatgaacgcggaaaatttggggatcgtattcgggccaaccttgatgcggccacctgaagacagtacactcaccactttacacgatatgagatatcagaagctcatagtgcaaatcctgattgaaaatgaagacgttctcttctag

SEQ ID NO: 182713 - DNA, 864 bp, synthetic construct
  misc_feature 1..864: note = Description of Artificial Sequence: Synthetic coding sequence
  source 1..864: mol_type = other DNA
atgttcagcgaggagctgtggctggagaacgagaagaagtgcgccgttgtccgcaaatcgaagcagggacggaagagacaggaactgctcgctgttgccttcggcgtcaaggttcatacttttcgcggaccacattggtgcgagtactgcgctaatttcatgtggggcctgattgcccagggagtgcggtgctcagattgtgggctgaatgtacacaaacaatgtagcaagcacgttcccaacgattgccagccagacctaaaacgcataaaaaaggtgtactgctgtgaccttaccactttggttaaagcccacaatacccaaagacccatggtggtagacatttgtatccgggaaatcgaggcaagaggtttaaagagtgagggcctttatcgtgttagtggattcaccgagcatatagaggatgtaaagatggcttttgatcgagatggcgaaaaggccgatatcagtgcaaacgtctatcctgacattaacataattactggcgcacttaagctatacttccgggatctgccaatccccgtgattacgtacgatacatattctaagtttattgatgccgcaaagatctccaacgccgacgaacgacttgaggccgttcatgaagtgcttatgctgctccctcccgcacactatgagaccttaaggtatttgatgatccacctcaagaaagttacaatgaacgaaaaggataactttatgaacgcggagaacctgggaatcgtcttcggacctactctaatgaggccgcctgaagattctacactgactaccctgcacgatatgagatatcaaaagttaatcgtgcagatactgatcgagaacgaagacgtgctcttttag

SEQ ID NO: 182714 - DNA, 579 bp, synthetic construct
  misc_feature 1..579: note = Description of Artificial Sequence: Synthetic coding sequence
  source 1..579: mol_type = other DNA
atggccgccagcagcaacagcagcctgagcggcagcagcgtgagctctgacgccgaggagtatcagcctcccatatggaagagctacttgtaccaactacaacaggaagctcctaggcctaaaagaatcatatgccccagagaagtcgaaaataggccgaagtactacggaagggagttccatgggatcatttctagggagcaggcagacgaactgctcggaggagtggaaggagcatacattctccgtgaaagccagcggcaacccgggtgctacaccctggctctccgaaatcccacaaagatttcaaatgctgatgagaggctggaggccgtccacgaggttcttatgctgctcccaccggctcattatgagacattgagatacctgatgattcaccttaaaaaagtgactatgaacgagaaggacaacttcatgaacgcggagaaccttggaattgtgttcggacccactttaatgaggcccccagaagactctactttgacaaccctgcacgacatgaggtaccagaagctcattgtgcaaatcttgattgagaacgaggatgtccttttttag

SEQ ID NO: 182715 - DNA, 861 bp, synthetic construct
  misc_feature 1..861: note = Description of Artificial Sequence: Synthetic coding sequence
  source 1..861: mol_type = other DNA
atgttcagcgaggagctgtggctggagaacgagaagaagtgcgccgtcgtgaggaagagcaagcagggtcgcaaaagacaggaactcctggccgttgcgtttggcgtgaaggtgggtgtcaaagggggcttcttgtggccccctctgaagctcttcgcatgctcccagatttccagcctcgtgcgccgtgcagcactgacgcataacgacaaccacttcaattacgaaaagacccacaacttcaaggtgcacacatttaggggcccgcattggtgcgaatactgtgctaatttcatgtggggcctgattgcacagggcgtgcgatgcagtgactgtggcctgaatgtacataaacagtgcagcaaacatgttcctaatgactgccaacccgacctaaaacgaataaagaaagtctactgttgcgatctcaccaccctggtcaaagcccacaatacacaacgacctatggtggttgacatttgcatcagggagatcgaggccagaggattgaagagtgagggactgtacagggtgagcggcttcaccgagcacattgaagatgtgaaaatggctttcgacagagaaatctctaatgcggatgaaaggctggaagctgttcacgaagtgctgatgctgctacctccagctcactacgagaccttgcggtatctgatgatccatttaaaaaaggtgactatgaatgagaaagacaactttatgaacgccgaaaatctggggattgtctttggacccaccctgatgcggccgcctgaggactccacactcaccacgttgcatgacatgaggtatcagaagttgattgtccagattctgattgaaaacgaagatgttctcttctag

SEQ ID NO: 182716 - DNA, 1446 bp, synthetic construct
  misc_feature 1..1446: note = Description of Artificial Sequence: Synthetic coding sequence
  source 1..1446: mol_type = other DNA
atggccgccagcagcaacagcagcctgagcggcagcagcgtgagctctgtctactccgagccgcgtagtccgcgagagctgcctaaatacgctgaggagtatcagccgcccatatggaaaagctacctgtatcagctacagcaggaggcaccgagaccgaagagaattatttgcccccgggaggtggagaacaggccaaaatattatgggcgggagtttcacggaataataagcagagagcaggctgatgagcttttaggaggggtcgagggagcatacatcttacgcgagtcacagagacagcccgggtgctacacactggccctgagatttggaaatcagaccttgaattatagactgtttcacgacggcaagcatttcgttggggagaagcgctttgagtccatacacgatctggtaactgacggcctgatcacactgtacattgagacaaaggcggctgagtatatctctaagatgacaaccaaccccatttatgagcatattggatacgccaccctgctaagagagaaggtgtcccgcagactctcacgcagcaaaaacgaacctagaaagaccaacgtgacccacgaggaacacacagctgttgagaagattagctctcttgtgcgccgagctgccctgacccacaacgataatcacttcaactacgagaagactcacaactttaaagtccacacatttcgcggaccacattggtgtgagtactgtgccaactttatgtggggactgattgcccagggtgtgaggtgctctgactgtggcctcaacgtgcacaagcaatgcagcaaacatgtacctaacgactgccagcccgatctcaagagaattaagaaggtgtactgttgcgacctgaccactctcgtgaaggctcacaacacacagcgcccaatggttgtggacatatgcataagggagatcgaggcgaggggcctcaaatcagaaggcctgtaccgcgtcagcggatttacagagcatattgaggacgtcaagatggcttttgatcgagatggcgaaaaggccgacatatctgcgaatgtttatcctgacatcaatataatcactggggcccttaagctatactttagagacctcccgattccagtgattacttatgacacctattctaagttcattgacgcagccaaaatttccaatgccgatgagagattagaggctgtccatgaagttctgatgttactgccacccgcccactacgagacgctgcgctacctgatgattcatctgaaaaaggtcacaatgaacgagaaagataattttatgaacgcagaaaatctcggcatcgtattcgggcctaccctgatgcgacctcccgaggacagcaccttgaccactctgcacgatatgcgataccagaagctgatcgtgcagatcctgatcgagaacgaagacgtccttttttag

SEQ ID NO: 182717 - DNA, 975 bp, synthetic construct
  misc_feature 1..975: note = Description of Artificial Sequence: Synthetic coding sequence
  source 1..975: mol_type = other DNA
atggccgccagcagcaacagcagcctgagcggcagcagcgtgagcagcgatgcagaggaataccaaccaccaatttggaagtcgtacctgtaccaacttcagcaggaagcccccagacccaaacgaatcatatgcccaagggagatctcttctctagtgcggagggcggccctcactcacaacgacaaccacttcaactatgaaaagacgcacaattttaaagttcacacttttaggggacctcactggtgcgagtactgtgcgaacttcatgtgggggctgatcgcccagggagtgcgttgcagcgactgtggactgaacgtacacaagcagtgcagcaagcatgtgcctaacgactgtcagcccgacctcaagcgcatcaaaaaggtgtactgctgtgaccttaccaccctcgttaaagctcacaacacccagcggccaatggtggtggacatttgcatccgggagatcgaggcccggggacttaagtctgagggcctctacagggtttctggatttacagagcatatagaggacgtcaaaatggcttttgacagggatggagaaaaagccgatatcagtgctaatgtctaccccgacatcaacattattactggcgccctcaagttgtacttccgggatctacccattccggtgattacttacgacacgtactccaaattcatagacgctgcaaaaatcagtaatgccgatgagaggctcgaggccgtgcacgaagtgctcatgttgctgccccctgcccattatgagacccttagatacttgatgatccatctgaaaaaggtgacaatgaacgaaaaggacaattttatgaatgcagagaacttgggaattgtatttggtccaaccctcatgcggcctcctgaggattccacacttactacccttcatgacatgcgttatcagaaacttatcgtgcagattctcattgagaatgaggacgtccttttctag

SEQ ID NO: 182718 - DNA, 1632 bp, synthetic construct
  misc_feature 1..1632: note = Description of Artificial Sequence: Synthetic coding sequence
  source 1..1632: mol_type = other DNA
atgacccagacccaccgggccaagagcgccagcagctgccccaaccttttggttccagagacctggccccatcaggtctccgcctcacacgctgggagatctaaacagccgcagggtggcattctaaagatcaatgaggagcatcgtcggggtgccattcaggatctgttagccagtcccgggtttacttttggtaaaagggttgtgttcgattcccactgtctgaaacgccaacacacatttgctgacgggttacattcctcttgtacttctaacgccgaagagtaccagccccccatttggaagagttacctgtaccagctgcagcaagaggctccgaggccgaagaggatcatatgccctagagaggtcgagaaccggccgaagtactatggcagggagtttcacggcattattagccgggagcaagccgatgagctcctcggcggagtagaaggtgcttacatcctccgcgagtcgcagcggcagcctggctgttacactttggctctgcgattcgggaaccagacactaaattaccgcttattccatgacggaaaacatttcgtgggagaaaagcgatttgaatccatccatgatctggtgaccgacggcctcatcacactctacattgagacaaaagccgctgagtatattagcaaaatgaccactaatcctatctatgagcatatcggctacgccacgctgttacgggagaaggtctctcgcagactgtcacgtagcaagaacgagcctcgcaaaactaatgtcacacacgaagaacacacagcagtcgaaaagatatcctcgctggttagaagggcagctctgactcataacgacaaccactttaattacgaaaagacacacaactttaaagtccatacattccggggcccacattggtgtgagtattgtgctaatttcatgtggggattgatcgcccagggcgttcgttgctcagactgcggcttgaatgtgcacaagcagtgtagcaagcacgttccgaatgattgtcagcctgacctgaagcgcataaaaaaggtgtattgttgtgatctgaccactctggtgaaagcccataacacccaacgccctatggtggtcgatatttgcattagggaaatcgaagcaaggggtctaaaatccgagggcttataccgggtgagtggtttcacagagcatatcgaggacgtcaagatggcattcgaccgcgacggtgaaaaggcggacattagtgctaacgtgtacccagacatcaacattattacgggggccctaaaactctatttccgggacctgccgatacctgtgatcacttacgacacctacagcaagtttatcgacgccgccaaaatcagcaatgcggacgagcgcctggaagccgtgcacgaagtcctcatgctactaccaccagcccattatgagacactcaggtacttgatgattcacttgaaaaaggtgactatgaacgagaaagataattttatgaatgcagagaatcttggtatcgtttttggaccaacactgatgaggccccctgaagattccacgctcaccactttgcacgatatgcggtatcagaaactaatagtgcagattctgattgaaaatgaggatgtgctgttttag

SEQ ID NO: 182719 - DNA, 1362 bp, synthetic construct
  misc_feature 1..1362: note = Description of Artificial Sequence: Synthetic coding sequence
  source 1..1362: mol_type = other DNA
atggacgccgaggagtaccagccccccatctggaagagctacctgtaccagctgcagcaagaggccccccggcccaaacgcatcatctgcccgagggaggtcgaaaacaggcctaaatactatggccgagaattccatggcataataagcagggaacaggccgacgagctgctagggggagtcgaaggagcatacatcctgagggaatcacagaggcaacctgggtgctacacactggccctccgctttggaaaccagacccttaattaccggctctttcacgacggcaaacacttcgtcggggagaagcgattcgagtctatccacgatctggttactgatggtttaatcaccctgtacatcgaaactaaggccgcagaatatatttccaagatgacgaccaacccgatctacgaacacatcggctacgcaacattacttcgcgagaaagtttccaggcgcctctcccgatccaagaacgaaccacgaaagacgaatgtgactcatgaggaacataccgcagtggagaaaatcagtagtctggtgcgccgcgctgccctcactcacaacgataatcactttaactacgagaagacccacaactttaaagtgcacacgtttcgaggtccgcactggtgcgagtactgtgccaacttcatgtgggggctgatcgctcagggcgtacggtgctcagactgtggacttaacgtgcacaagcagtgctccaagcatgtccccaatgattgtcaacccgatctcaagaggataaagaaggtctattgctgtgatttaaccaccctagtgaaagcccacaatacccagcggcctatggtcgtggacatctgtattcgtgaaattgaggcccggggcctcaagagcgagggcctctaccgtgtctcaggatttaccgaacatattgaggatgtgaaaatggccttcgacagggatggcgaaaaagcggatatctcagctaacgtctatcctgacattaacatcatcaccggtgccctcaaactgtattttcgggacctgcccatcccggttattacatacgatacctattctaaattcattgatgccgcaaagatctcaaatgctgatgaaagactcgaggccgtgcacgaagtcctcatgctgctccccccggcccactacgagacactaagatacctgatgattcaccttaagaaggtgactatgaatgaaaaagacaactttatgaatgccgaaaacttggggatcgtgttcgggcccacactgatgcgaccccccgaagacagtacgctcacaactcttcacgacatgcgttaccagaagctgattgtgcagattctgatcgagaacgaagatgttttgttctag

SEQ ID NO: 182720 - DNA, 1152 bp, synthetic construct
  misc_feature 1..1152: note = Description of Artificial Sequence: Synthetic coding sequence
  source 1..1152: mol_type = other DNA
atgggcgtgaaggccagccagaccggcttcgtggtgctggtgctgctgcaatgctgtagcgcctacaagctggtatgttactacacatcttggagtcagtaccgggagggtgatggtagctgcttcccagacgctctggatcgctttctatgcacccacatcatatacagttttgccaacatctcaaacgaccacattgacacatgggagtggaatgatgtgactctctatgggatgcttaacacgctgaagaacagaaatcccaatttaaaaactttactgtctgtcggcggctggaacttcggatcccagaggttttccaaaattgcctccaatacccagagtagaagaactttcattaagtccgtccctcctttcctgcgtactcacggtttcgatggcctggatcttgcgtggctctatcccgggaggcgggacaagcaacactttaccacactcattaaggaaatgaaggcggaattcatcaaggaggctcaacccggcaaaaagcagctgctgctctcagccgcgctgtcagctgggaaagttactattgattcctcttatgacatcgctaaaatctctcagcacctcgactttattagcattatgacctacgactttcatggggcgtggagaggtactactgggcatcacagccccctttttagaggacaggaagacgcctcacccgacaggtttagtaacactgattatgcggtgggttatatgttgcgcctgggagcacccgccagcaagctcgtcatgggcatcccgacattcggccggtctttcactcttgccagctccgagactggagtcggagcaccgatctccggacccggaatccctggacgctttacgaaggaggctgggactctggcatactatgagatctgcgacttcctgaggggagctacagtgcatcgcatactagggcaacaagtcccgtatgctaccaaaggaaatcagtgggtggggtacgatgatcaggagagcgtgaagtccaaggtacagtacttaaaagatcggcagcttgcaggagccatggtgtgggccttggatctggatgattttcagggaagtttttgtggccaggacttaagattccctctgactaacgcaattaaagacgcattagcggctacctag

SEQ ID NO: 182721 - DNA, 459 bp, synthetic construct
  misc_feature 1..459: note = Description of Artificial Sequence: Synthetic coding sequence
  source 1..459: mol_type = other DNA
tgactgctgctgagcgccgccctgagcgccggcaaggtgaccatcgactcgagctatgacatcgcaaagatctcacagcacctggatttcatcagcattatgacctacgatttccacggtgcatggcgtgggaccacgggccaccacagcccccttttccggggacaagaggacgcatctccggatcggttctcaaatacaatatgcgattttctccggggcgccacagtgcatcgcattctcgggcaacaggttccctatgctacaaaaggcaaccagtgggtggggtacgatgaccaggaatcagttaagagtaaggtacagtatctcaaagacaggcagctggcaggggccatggtttgggctctagacttagatgactttcaagggtccttttgtgggcaagatttaaggtttcccttaacaaatgcaattaaagacgccttagcggcaacctag

SEQ ID NO: 182722 - DNA, 306 bp, synthetic construct
  misc_feature 1..306: note = Description of Artificial Sequence: Synthetic coding sequence
  source 1..306: mol_type = other DNA
atggtgagcacccccgagaaccggcagaccttcatcaccagcgtgataaaattcctgcgacagtatgaatttgatgggctggatttcgactgggaatatcccggatcacggggctctcccccccaggacaaacacctgttcacagtgctggtccagatgcgcaaactaaaatacagggaggatttgagtaacctgccaaagatcacccagctcgtcggcatcatcacatcaagcgctgtctggcctcagtctcccctcctcctcagcatcacgctggggtgtcctctgctccttcgtaacgcctag

SEQ ID NO: 182723 - DNA, 1431 bp, synthetic construct
  misc_feature 1..1431: note = Description of Artificial Sequence: Synthetic coding sequence
  source 1..1431: mol_type = other DNA
atgaccaagctgatcctgctgaccggcctggtgctgatcctgaacttgcagctgggctccgcctaccaactcacttgttactttacgaactgggcccagtatagaccagggctgggcaggttcatgcccgataatatcgatccatgtctctgcactcatttgatctatgcctttgcaggtcgacagaataatgaaatcaccacaatcgagtggaatgacgtaactctgtatcaggccttcaatggcctgaaaaataagaactcacagctgaagaccttgctggcaatcggaggctggaatttcggaaccgcacccttcacggcaatggtgtcaacccctgagaacaggcagaccttcatcacgtctgttatcaaattcctcaggcagtatgaattcgacggactggatttcgattgggaataccctgggtccaggggctctcctccacaagataagcacctgtttaccgtcctcgtacaggagatgcgcgaagcctttgagcaggaagccaagcagatcaataagccccgactgatggtcacagccgctgtggcagcaggcatctccaatatacaatccggttacgaaatcccccagctgtcgcagtatctagactatatacacgtaatgacgtatgacttgcacggtagctgggagggatatacaggggagaatagtcccctgtacaaataccccaccgacaccgggagtaatgcctacctgaatgtcgactatgttatgaactattggaaggataatggggcccctgccgagaaactgattgtcggcttccccacctatggacataactttatcctcagtaatccctccaacaccggcattggtgcacccacttccggcgccggtccagcaggcccctacgctaaagagagcggtatatgggcatactatgagatctgcacgttcttgaaaaacggagcgacccagggatgggacgctcctcaagaagtgccttacgcgtaccagggcaacgtgtgggtcggctatgacaacatcaaaagctttgatatcaaagcccagtggctgaagcacaataagttcggcggagccatggtctgggccatcgacctagacgatttcacagggacattttgcaaccagggaaagttcccgctcatatctaccctgaaaaaagcgttgggcttacaatccgccagttgcactgcacccgcacaaccgatcgagccaatcaccgccgcacccagcgggagcggcaatggttcagggtcatccagttcagggggcagctctggaggtagcggcttttgcgctgtgcgggcaaatggcctctatcccgtcgctaataaccggaatgctttttggcactgtgtgaacggggtgacttatcagcagaactgccaggccgggctcgtcttcgatacctcttgcgactgctgtaactgggcctag

SEQ ID NO: 182724 - DNA, 948 bp, synthetic construct
  misc_feature 1..948: note = Description of Artificial Sequence: Synthetic coding sequence
  source 1..948: mol_type = other DNA
atgcgggaggccttcgagcaggaggccaagcagatcaacaagcccagactgatggtgaccgctgcagttgctgccggcatttctaacattcaatccgggtatgagataccccagttgtcccagtacctggattacattcacgtgatgacttatgatcttcacgggagctgggaaggatatactggggagaactcaccactgtacaaatatcctacagacaccggcagcaacgcctacctgaacgtggactacgttatgaattattggaaagataacggcgcccccgctgagaaactaattgtcggcttccccacttatggtcacaacttcatactctcgaacccctcaaatactgggatcggtgctccaacatctggggcagggcctgctggtccctacgccaaagagagcggcatttgggcttactatgagatctgcacgtttctaaagaatggtgcaacccaggggtgggacgctccccaagaggtgccttacgcctatcagggcaacgtttgggtcggctacgacaatatcaaaagtttcgacatcaaggcccagtggcttaaacacaacaagtttggtggggccatggtgtgggcaatagacctggacgacttcaccggtacattctgtaaccagggtaagttccctcttatctcaaccttgaaaaaggcactaggattacaaagtgcctcctgcacagctccggcacagcctatcgagccaatcaccgcggcaccctccggcagtggaaatgggagcggttcttcctctagcggaggctcaagcggtgggtccggcttctgtgctgtgagagctaacggcttatatccggtggctaacaaccgcaacgcgttttggcactgcgtcaacggggttacatatcaacagaactgccaagctgggctagtatttgacacctcctgtgattgctgtaattgggcgtag

SEQ ID NO: 182725 - DNA, 1431 bp, synthetic construct
  misc_feature 1..1431: note = Description of Artificial Sequence: Synthetic coding sequence
  source 1..1431: mol_type = other DNA
atgaccaagctgatcctgctgaccggcctggtgctgatcctgaacctgcagctcggttccgcctatcagctgacgtgctactttaccaattgggctcagtaccgcccaggactgggacgctttatgcccgataacatcgacccatgtctgtgtacacatttgatttacgcttttgctggccggcagaacaatgaaatcactacaattgagtggaatgacgtgacattataccaagctttcaatgggctcaaaaacaagaatagccagctgaagactttgctggccattggaggctggaattttggcaccgcccctttcaccgccatggtttcaacgcccgagaataggcagacttttattacttctgtgattaagttcctacgccagtacgaattcgacggtctggatttcgattgggaataccccggaagccggggcagcccacctcaggacaaacacttgttcactgtgctggtccaagaaatgcgcgaagcctttgaacaggaagcgaaacaaatcaacaagccacgactcatggtgaccgctgccgtggccgccggcataagtaacatccagtcagggtatgagattcctcagctgagtcagtatttggactatatacacgtgatgacctacgaccttcatggaagttgggagggttatacaggcgaaaattcccccttatacaaataccctacggatacgggctctaacgcatacctcaacgtcgactacgtgatgaactactggaaggacaacggagcccctgctgagaagctaatagttggctttcccacttacggacataacttcatattgtctaaccccagcaatacaggaatcggcgcgcctacttctggcgcgggccctgcagggccatacgccaaagagtcgggcatttgggcatattatgaaatttgcacgttcctgaaaaacggggccacgcagggttgggatgcccctcaggaggtcccatatgcttaccaaggaaacgtctgggttgggtacgacaacatcaagagctttgatattaaagcccagtggctaaagcataataaatttggtggggcgatggtatgggctattgacctggacgatttcacaggcaccttctgcaaccagggaaaatttccccttatcagcacattgaagaaggcgcttggcctacagtctgcatcttgcactgcccccgcacaaccaattgagccgatcaccgccgcaccttccggaagcggtaacgggagtggctcctcctccagcggtggttctagcggggggtctggattctgcgcggtcagggccaatggattataccctgtggccaataacaggaacgcattctggcactgtgttaacggcgtcacttaccagcagaattgccaggctggtctggtctttgacacaagttgcgattgctgcaattgggcatag

SEQ ID NO: 182726 - DNA, 1263 bp, synthetic construct
  misc_feature 1..1263: note = Description of Artificial Sequence: Synthetic coding sequence
  source 1..1263: mol_type = other DNA
gagaccagcagcagcgtgcacgagcaggtggccgacagcggcgcccaagccgttgccttccaaagcggaggtgaatccagtatagtgtggaacagccagctgaaaacactgctagccataggcggctggaatttcggcactgctccctttacagcgatggtatctacaccggagaacaggcagacattcattacttcagtaattaagttcctgcgccagtacgaattcgacggattggacttcgattgggagtaccccgggtcacgcgggagccccccccaggacaagcatctgtttaccgtcctggtccaggagatgagggaggcctttgaacaggaagctaaacaaatcaataagcccagactaatggtgacagccgccgttgctgcaggaatatccaacattcaaagtgggtacgagattccacaactgtcacaatacctggactatattcacgttatgacgtatgatcttcatgggtcctgggagggctacaccggcgagaattcccctttgtataaataccctaccgacacagggtctaacgcgtatctgaacgtcgactatgtcatgaactactggaaagataacggagcgcccgccgaaaagttaattgtgggctttccaacctatggacacaatttcatactgtccaatccgagcaataccggcattggggctcccacctccggcgccggccccgccggcccttatgcaaaagaatcgggcatctgggcgtattacgaaatttgcacattcctgaaaaatggcgcaacacaagggtgggatgccccccaagaagtgccatatgcataccaggggaacgtctgggttggatatgacaacatcaagagctttgacattaaggctcaatggttaaaacataataagttcgggggggcaatggtgtgggccatcgacttagatgatttcactggcacgttttgtaaccagggcaagttccctctcatctctactctcaagaaggccctcggtctgcagtcagctagctgtacagcccccgcacagccaatagaacccattacagctgctccttctggcagcgggaatggatctggctcctcctcttccggtggatccagcggaggatctggcttctgcgccgttcgagctaatggcctgtaccccgtggctaataatcgcaacgcgttttggcactgtgtgaatggggtgacatatcagcagaactgccaagcaggactggtctttgataccagttgcgattgctgtaattgggcctag

SEQ ID NO: 182727 - DNA, 1107 bp, synthetic construct
  misc_feature 1..1107: note = Description of Artificial Sequence: Synthetic coding sequence
  source 1..1107: mol_type = other DNA
atggtgagcacccccgagaaccggcagaccttcatcaccagcgtgattaagttcttaaggcaatacgaattcgacggtctcgatttcgactgggagtaccccggttctcgcggatctccacctcaggataaacatctgttcacagtacttgttcaggaaatgagagaagccttcgagcaggaagccaagcagatcaacaaaccgcgactcatggtgacggcagccgtggccgctggtatctccaatatccagagcggctacgaaatcccccagctgtcacagtatctggactatatccatgttatgacgtacgacttgcatggaagctgggagggctacactggtgaaaacagccccctttataagtatccgactgacacagggtcaaacgcttatctgaatgtggattatgtgatgaattattggaaagacaatggcgcgcctgccgaaaaactgattgtcggcttccccacctacgggcataattttatcctttctaatccgtctaacaccggtataggggctccaacctccggagccggtccagcaggaccttacgcaaaagagagcggcatttgggcatattacgagatttgtacttttctgaaaaatggagccacacagggctgggacgctccacaggaagtgccttatgcttaccaggggaacgtctgggtgggatacgataatattaaaagctttgacatcaaagcgcagtggctgaaacataacaaattcgggggtgccatggtgtgggccatcgacctggatgacttcaccggcacattctgcaaccagggcaaatttcctctgatctctacactgaagaaggcactggggcttcaaagcgcttcctgtacagcaccagcccagccgattgagccaataactgccgcaccgtctggcagcgggaacggatctgggtcctcgtcctccggaggctcttcaggcggcagcggcttctgtgcagttcgagcaaatgggctttacccagtggcaaataataggaacgcgttctggcactgcgtgaatggagtgacataccagcaaaactgtcaagcaggcctggtcttcgatacatcatgtgactgctgcaactgggcttag

SEQ ID NO: 182728 - DNA, 948 bp, synthetic construct
  misc_feature 1..948: note = Description of Artificial Sequence: Synthetic coding sequence
  source 1..948: mol_type = other DNA
atgcgggaggccttcgagcaggaggccaagcagatcaacaagccccgcctaatggttactgcagccgtcgccgcagggatcagtaacattcaaagcggatatgagatccctcagctgagccaatatctggactacattcacgtgatgacttatgatctgcacggctcttgggaaggctacaccggcgagaatagcccactgtacaagtacccaaccgataccggatcaaatgcctatctgaacgttgattacgtcatgaattattggaaggataacggcgcacctgccgagaagttgatcgtcggatttcccacttatggccacaacttcatcctgagcaacccctccaatactgggataggtgcccccactagcggagccggacctgcggggccatacgcgaaggaaagtggaatctgggcatattatgagatttgcacctttttgaaaaacggagcaacccagggatgggacgcgccccaggaggttccctacgcctaccaggggaacgtgtgggtgggttacgacaacatcaagtcattcgatatcaaggcacagtggctgaagcacaacaagtttggaggcgctatggtatgggcaatcgatctggacgatttcacaggaaccttttgcaaccagggaaagtttccgttgatatccaccctgaagaaagctttggggctacagtctgcttcctgcaccgctcccgcccagccaattgaacccatcaccgccgctccgagcggatccggtaacggcagcggcagctccagcagcggtggcagttccggcggttctgggttctgcgcagtgcgcgctaacgggttgtaccccgtcgctaataatcgcaatgcattctggcattgtgtaaatggggttacctatcagcagaattgtcaggcaggacttgtcttcgataccagctgtgactgttgtaactgggcttag

SEQ ID NO: 182729 - DNA, 948 bp, synthetic construct
  misc_feature 1..948: note = Description of Artificial Sequence: Synthetic coding sequence
  source 1..948: mol_type = other DNA
atgcgggaggccttcgagcaggaggccaagcagatcaacaagcccaggcttatggtcaccgccgccgtggccgccggcataagtaacatccagtcaggctacgagatcccccaactttcccagtatctggactacattcacgtgatgacatacgacctacatggtagttgggagggctacacaggggagaattcgcctctctataagtatccgaccgatacaggatctaatgcctacctgaacgtggactacgttatgaactattggaaggacaacggggctcctgccgaaaaactgattgttgggttcccaacctacgggcataatttcatactaagcaacccctctaatacggggatcggcgcgcctacgtcaggcgccgggcccgctggaccctacgcaaaggagtctggaatttgggcttattacgaaatttgtacgtttctaaagaatggtgcaacacagggatgggatgccccccaggaggtcccgtacgcctaccaggggaacgtgtgggtgggctatgataatattaagtcttttgatatcaaagcccagtggctcaagcataacaagttcggaggggcaatggtctgggcaatcgatttggatgatttcacggggactttttgtaaccagggaaaattcccgctcatcagtacccttaaaaaagctctggggctgcagagtgcgagttgtacagctcctgcgcagccaatcgagcctatcaccgccgccccaagcggctctggcaacggctctggaagcagttcttccgggggatcatccggagggtcaggattctgcgccgtgcgggccaacggactgtatccagtggctaataaccggaatgcattctggcattgtgtaaacggcgttacctaccaacaaaactgtcaagccggtctcgtattcgatacgtcctgtgattgctgcaattgggcctag

SEQ ID NO: 182730 - DNA, 864 bp, synthetic construct
  misc_feature 1..864: note = Description of Artificial Sequence: Synthetic coding sequence
  source 1..864: mol_type = other DNA
atgcgggaggccttcgagcaggaggccaagcagatcaacaagccccggctgatggtcactgctgcagtggctgccgggatctccaacatccaatctgggtatgaaataccacagctgagccagtacttggattacatacatgtcatgacatatgatcttcatggatcttgggagggctacaccggcgaaaatagccccctatataagtaccctacggacactggcagcaacgcctaccttaacgtagattatgtcatgaactactggaaggataatggagccccagctgaaaagttgatcgtgggcttcccaacctatggtcacaacttcattctctctaatccaagtaataccgggatcggcgctcccacatccggtgcgggacctgccggcccttatgcaaaagaaagcggcatctgggcatactacgagatatgtactttcctcaaaaatggtgctacccagggctgggatgccccccaggaggtgccttatgcttaccagggaaacgtgtgggtgggctacgataacatcaagagcttcgacattaaggctcaatggctaaagcacaacaagtttgggggggctatggtctgggctattgatttggacgattttacgggcaccttctgcaaccaaggcaagtttcctcttatctccacgctgaaaaaggcattggggctgcagagtgcttcctgcactgccccagcgcagccgatcgagccaatcacggctgctccatctggaagtggcaacggctccggctccagttcttctggagggagcagcggcggatcagggttctgcgctgttcgtgccaacggattgtaccccgtagccaataatcgcaacgctttttggtag

SEQ ID NO: 182731 - DNA, 1158 bp, synthetic construct
  misc_feature 1..1158: note = Description of Artificial Sequence: Synthetic coding sequence
  source 1..1158: mol_type = other DNA
atgagccggccccagctgcggcggtggcggctggtgagcagccccccatcaggcgtgcctgggttagccctcctcgctctgctggcactgctcgctctcagactggctgccggcaccgattgtccttgtcccgaacccgaactctgtcggcccatccgtcaccatcctgacttcgaggtcttcgtgttcgatgtgggtcagaagacctggaaatcctatgactggtcgcaaatcactaccgtggctacctttggaaagtatgacagcgaacttatgtgctacgctcacagcaagggagctcgggtggtgttaaagggtgatgtctccctgaaagatataatcgatccggctttcagagcaagctggattgctcagaaactgaaccttgcaaagacccaatacatggacggaatcaacatcgacatcgaacaggaagtaaattgtctctcacctgagtacgatgcgctaaccgccctagttaaggagacgaccgatagctttcaccgggaaatcgaaggcagccaggtgacttttgacgtggcctggtcgccaaaaaatattgaccgtaggtgttacaattatacggggatcgccgatgcatgcgacttcctatttgtgatgagctacgacgagcagagccagatctggagcgaatgtatcgcagctgcgaacgccccttacaatcagactctgaccggctacaacgactatatcaagatgtccatcaatccaaaaaagttagtcatgggtgtgccctggtacggatatgattacacttgcctgaacctctctgaagaccacgtgtgcaccattgctaaggttcccttccgcggtgctccttgctctgacgctgcggggcgtcaagtgccttacaaaacgattatgaaacaaattaactcatcaatctccggcaacctgtgggataaggatcagcgcgcgccttattacaattacaaagatccagctggacactttcaccaggtgtggtacgataatcctcagtctatatctcttaaagctacttacatccagaattatcggctccgtgggatcggaatgtggaatgccaattgcctggattattctggcgacgccgtggcaaagcaacagacggaagaaatgtgggaggtcctgaagcccaaactgctgcagcgatag

SEQ ID NO: 182732 - DNA, 2967 bp, synthetic construct
  misc_feature 1..2967: note = Description of Artificial Sequence: Synthetic coding sequence
  source 1..2967: mol_type = other DNA
atggagcagagccggagccagcagcggggcggcgagcagagctggtggggctccgatccccaatatcagtatatgcctttcgaacactgcactagttatggtttaccgtccgagaatggagggctacagcataggcttcgcaaggatgccggtccccggcataacgttcacccaacacagatctatggtcaccacaaagagcaattcagtgaccgcgaacaggatatcggcatgcccaagaagacgggttccagtagtacagttgacagcaaagatgaggatcattattcaaagtgtcaggattgcatccatcgcttgggtcaagtggtgcggcgcaaattgggagaggacggcatattcctagttctcctcggcctgctaatggctctggtttcctggagcatggactacgttagcgcaaagtctctccaggcctacaaatggtcatatgcacagatgcagccaagcctgcctctgcagttccttgtttgggtgacgtttccgctagttcttatactgttttcagctctgttttgtcacctgattagtccacaggctgtgggctccggcatccctgaaatgaagactatcctgaggggggtggttctcaaggagtacctgaccatgaaagcgtttgtcgccaaggtggtggccttaaccgcaggactaggaagcggaatccccgtgggcaaggaaggcccatttgtgcatatcgcatctatctgtgccgctgtccttagtaaattcatgtcagttttttgcggcgtgtacgaacagccgtattactattccgatatcttaacggtgggatgtgctgtcggcgtgggatgctgctttgggacgcctctcggaggggtgctgtttagtatcgaggtgaccagtacgtacttcgcagtgaggaactattggcgcgggttcttcgcagcaacattttccgccttcgtatttagagtgttggcggtctggaacaaggatgccgtgactataactgcattgtttagaactaattttcgcatggacttcccgttcgacttgaaggaactgcctgcattcgccgcaatcggaatttgctgcgggcttctgggagccgtctttgtatatcttcatagacaggtgatgctcggcgtcagaaaacataaggccctgagccaattcctagccaaacaccgattgctctaccccggaatcgtcacctttgtcatcgcctcatttacgtttccccccggcatgggccagttcatggccggcgagttgatgccaagggaagctatctcaaccctttttgacaataatacatgggtcaagcacgccggtgaccccgaatccctgggtcagagcgccgtgtggatccacccccgggtgaacgtcgttatcatcatcttcctgttcttcgtgatgaaattctggatgtctatcgtcgcaacaactatgcccattccatgtggcgggtttatgccagtgtttgtcctgggggcggcttttgggcggctggtgggggaaatcatggccatgctgttcccagatggaattctgtttgatgacatcatttacaagatcctgccaggaggttacgcagtcattggcgccgctgctcttacaggagctgtgagccataccgtctcaactgcagtaatatgctttgaactgaccggtcagattgcccatattttgccaatgatggtggcggtgatcctggccaatatggtagcccaatctctgcagccctcgctctacgatagcatcatccaggtgaaaaaactgccgtatctgcctgacctggggtggaatcagctgagcaaatataccattttcgttgaggacatcatggtgcgagatgtcaaatttgtaagtgcttcatacacctacggggagttgaggacgttgctgcaaacgaccacagttaagaccctgcccttggtagatagcaaggattcaatgatcctactgggcagtgtggagagatccgaactgcaggctcttctccagaggcatctgtgccccgagcgtaggctgcgggccgcacaggagatggcaagaaagctgtccgagctaccctacgatggcaaggcccggctggctggggagggtctgccaggcgctccacccgggcggcctgagagctttgcatttgtcgacgaagacgaagatgaggacctgagcggcaagtccgaactcccaccgagtctggccttgcaccccagtacaacagcccccctgtcccctgaggagcccaatggtcccctgcctggacacaaacagcagccagaagccccagagccagctgggcagagacctagtatttttcagtcactcttgcactgtctgctgggaagggctcggcctaccaagaagaagacaactcaggactccacggatcttgtcgacaacatgtccccagaggagatagaagcatgggaacaggagcagctttcccaacctgtgtgctttgattcttgctgcatcgatcagagcccatttcaattggtggagcagaccacactgcacaagactcatactcttttctcactgctgggtttacacctagcctacgtaacctctatgggaaagctgcgcggtgtcctggcactggaggagctgcagaaggctatcgagggtcacacgaaatctggcgttcaactgcggccacccttagcctcgttccgtaacacaaccagcacacgtaagagtaccggcgcacctcccagttccgccgagaattggaatttaccagaggataggcccggggcgacaggtactggcgacgtgatcgctgcaagccccgagacgccagtgccatcaccaagtcctgaaccacctctgtctcttgctccaggaaaagttgagggggagctggaagaacttgaactggtggagtctcccggcctcgaggaagagctagccgacattttgcagggaccgtcccttcgatctactgacgaagaagacgaagatgagctgatcctgtag

SEQ ID NO: 182733 - DNA, 2697 bp, synthetic construct
  misc_feature 1..2697: note = Description of Artificial Sequence: Synthetic coding sequence
  source 1..2697: mol_type = other DNA
atggccgccgccgccgccgaggagggcatggagccccgggccctgcagtacgaacagacactgatgtacgggcgctacacccaggacttgggcgcttttgcaaaagaagaggcagcacgtattaggctgggcggccctgaaccctggaaaggaccaccctcaagccgtgctgcccctgagctgctagaatatggacggtcaagatgcgcccgttgtcgcgtgtgctcggtcagatgccacaagtttttggtgagccgtgtgggggaagattggatcttcttggtgctgctgggcttgctaatggctcttgtgtcttgggtcatggactacgcgatagctgcctgccttcaggcccaacagtggatgagcagggggcttaacacttccatcctcctgcagtacctggcgtgggttacttacccggtggtactgatcacattctcagccggattcacccaaatcctcgccccccaggctgtcgggtccggcatcccagaaatgaaaaccattctccgcggtgtggtacttaaggaatatttaacccttaagactttcatcgccaaggtgattgggttgacctgcgcactgggatccggtatgcctttagggaaggagggcccttttgtgcatattgcatctatgtgtgccgcacttctctctaaattcctgtccctgtttggtggcatttacgaaaatgaaagcagaaacaccgagatgttggcagctgcctgtgcggtgggagtcggctgctgtttcgcggccccaatcggcggtgttctgttctccatcgaggtcaccagcacattttttgctgtcagaaactattggcgaggctttttcgctgccacatttagtgcctttatttttagggtgctcgcagtatggaacagggatgaggagacaattactgcccttttcaagaccagatttcgactcgattttccgttcgacctccaggagctgccagcattcgccgttatcggcattgcttccggttttggcggtgctcttttcgtctacctgaatcggaagatcgtgcaagtgatgcgaaagcagaaaacaatcaacagattcctgatgagaaagcggctgttgttccccgccctggttaccctgctgattagcactctcacgttcccacccggtttcggacagttcatggcagggcaactgtcccagaaggagacgcttgtgaccctgttcgataatcgaacttgggttaggcagggcctggtagaagagcttgaaccaccatcaacctcacaggcctggaatccgccaagggccaacgtgttcctgacactggtaatatttattttgatgaaattttggatgtccgctctcgctactacaatcccggtgccctgtggtgcatttatgcctgttttcgtgatcggagccgccttcggccgcctcgtgggtgagtcgatggccgcctggttcccagacggcatccacacagatagttccacttataggatagtaccaggagggtatgccgttgtgggggctgcagctctagctggagcagtcacccacaccgtctctaccgcggtcatcgtgttcgagctaacaggccagatagcccatattctgccagtgatgatcgccgtgatcctggccaacgctgtcgctcaaagcctccagccttccctatatgatagcattataagaattaagaaactgccttacctgccagaactcggctggggacgccaccaacagtacagggttcgcgtagaggacattatggtcagagatgtgccccacgtcgctctgtcctgcacgtttcgggacctcaggttagcactccaccgaaccaagggacggatgctagcccttgtcgagagccccgaatctatgatcctgctcggcagcatcgagaggtctcaggtggttgctctgctgggagctcagctgtcccccgctcggcgacgtcagcatatgcaagaacgaagggccacccagaccagccctctgtctgaccaggagggcccgcccactcccgaggctagcgtgtgtttccaagtgaacactgaagatagtgcctttcccgccgcccgcggcgaaacgcataagccactgaaacctgctctgaaacggggtccatcagttacgaggaatctaggcgaaagccctactgggagcgctgagagcgctgggatcgctttgaggagtctgttctgcgggtcaccccctcccgaagctgctagtgagaaacttgagagctgtgaaaagaggaagcttaagcgagtgcggatttccctggcctctgacgcagatcttgaaggggaaatgtcacccgaggaaattcttgagtgggaggaacaacaactcgacgagccagtgaacttctccgattgtaagatcgatcctgcgccgtttcagttagtggagcgcacgtcccttcataagactcatactatttttagtttgttgggagtcgaccacgcatacgtgacctccatcggtcgcctgataggaatcgtgacgctaaaggagctgcgcaaggctatcgagggctctgtaaccgcccaaggggtgaaggttcgcccacctctagcaagttttagggactcggctacatcatcgagcgacacagaaaccacagaggtgcatgccctgtgggggcctcatagccgtcacggacttccacgggaagggagccctagcgattcagacgacaagtgccagtag

SEQ ID NO: 182734 - DNA, 381 bp, synthetic construct
  misc_feature 1..381: note = Description of Artificial Sequence: Synthetic coding sequence
  source 1..381: mol_type = other DNA
atgcggaagcggctgctgttccccgccctggtgaccctgctgatcagtactctgaccttcccccccggcttcgggcagttcatggctgggcagcttagtcagaaggagacattagttaccctgttcgacaacaggacgtgggtccggcagggccttgtcgaagagctcgagccaccctccacatctcaagcgtggaatccacccagggccaatgttttccttaccttggtgatcttcattctcatgaaacatttgggagtttggtgggtgaaggcatggttgcccggatcgcagatggagttcatccgaacggcggcgcctacaggtttatgtctgggagcaacactgtggtctggccagctgcggtggcaggagaggtag

SEQ ID NO: 182735 - DNA, 2601 bp, synthetic construct
  misc_feature 1..2601: note = Description of Artificial Sequence: Synthetic coding sequence
  source 1..2601: mol_type = other DNA
atggagagcgagcagctgttccaccggggctactaccggaacagctacaatagtatcacatcagcctctagcgatgaagagctgctggatggcgccggggttatcatggattttcagacttctgaggatgacaacctgcttgacggcgataccgctgtgggcacccactatacgatgacaaatggaggcagcatcaattcctcaacccatctgctggatctgcttgacgagccaatacccggcgtagggacctacgacgacttccatacaatcgattgggtgagggagaaatgcaaggatcgcgaaagacaccgaagaatcaacagcaaaaagaaggagtccgcgtgggagatgaccaaatctctgtatgacgcttggtctggatggttagtggtcaccctgacggggttggctagtggggcacttgctgggttgatagacattgcggcagactggatgacggacctgaaagagggtatctgcctttctgctttatggtataaccatgagcagtgttgctggggctccaacgaaacaacttttgaggaaagggataagtgtccgcagtggaagacctgggcagaactgatcattggtcaagccgagggcccggggagctatatcatgaattacattatgtatatattttgggctctgtcctttgccttcctggctgtgagtcttgtcaaggttttcgccccatacgcatgcggatctgggatccccgaaattaagactatcttgagtgggtttatcatccgcggctatctgggtaaatggactctcatgatcaaaaccataactctggtcctggctgtggcctcaggcttgtctcttggcaaggaggggcccttagtgcacgttgcttgttgctgcggtaatattttcagctacttattccccaaatacagtaccaatgaagcaaagaaacgcgaggtcctttcagccgcttccgccgcaggagtgagcgtcgcttttggcgcacctatcggaggagtgctgttttctctagaggaagtaagctactactttccactgaagactctttggcggagtttctttgccgcactggtcgccgcttttgtgctacggtcaatcaatccattcggaaatagccgccttgtgctgttttacgtggaataccacactccgtggtatctgtttgaactattcccattcatcctcctgggcgtattcggagggttgtggggagcttttttcattcgggctaatatcgcatggtgtaggagaagaaagtccacgaaattcggcaaataccccgtgcttgaagtgattatcgtggccgccataactgcagtgatcgcattccctaacccgtatacacgcctcaacacctcggagttaataaaagagctattcactgattgcggacctctggaaagctcatcattatgcgattatcgaaatgacatgaatgcctcaaaaatcgtggatgacatccccgatcggcccgcaggaataggcgtgtacagcgctatttggcaactgtgtctcgcccttatcttcaagatcattatgacggtatttacatttgggataaaagtaccttctggcctgtttataccctcgatggctatcggcgctatagcgggccggattgttgggattgccgttgagcagcttgcatattatcaccatgattggtttatttttaaggagtggtgtgaggtgggcgctgactgcattacacccgggctctacgctatggtgggagcagcggcctgtctgggaggcgtaaccagaatgactgtttcactcgtggtaatagtgttcgagctgaccggaggactggaatatattgtgccactgatggcagccgtgatgaccagcaaatgggtgggggacgcctttgggagagagggaatctacgaagctcacatccgcctgaatggatacccctttctcgatgctaaagaggagtttacgcacaccacgctggccgctgatgtgatgcggcctaggcgcaacgacccacctctggcagtgctcacacaggataacatgacagtagatgacattgaaaatatgatcaatgagacaagctataatggatttccggtgatcatgagcaaagagtcccagagactggttggctttgccttacgcagggatttgactattgccattgagtctgccaggaagaagcaagaggggatcgtgggctccagccgcgtgtgtttcgcacagcataccccatctttaccggccgaatcccctaggcctctaaagcttaggtcgatacttgatatgtcaccttttacagtgactgatcatacaccgatggaaattgtagtcgacattttccgcaaactcggactacgccagtgtcttgtgacccacaacggcatcgttttgggcatcattacaaaaaaaaatattcttgaacatctcgaacagctgaaacaacatgtcgagccattagctcctccctggcactacaacaagaagcgttatccccctgcctatggcccggatggtaagcccagaccccggtttaataacgtccagttaaacctcaccgatgaggagagggaagagacggaagaagaagtgtatctgttaaatagcactactctctag

SEQ ID NO: 182736 - DNA, 2376 bp, synthetic construct
  misc_feature 1..2376: note = Description of Artificial Sequence: Synthetic coding sequence
  source 1..2376: mol_type = other DNA
atggagagcgagcagctgttccaccggggctactaccggaacagctataattccattacttcagcgtcatctgatgaggaactgttagacggcgccggggtgattatggattttcaaacgtcagaagacgataacctacttgatggcgacacagccgtgggtacacattacacaatgactaatgggggcagcattaattccagtacccacctgctggacctgctggatgagcctattccaggagtgggaacatatgacgattttcataccattgactgggtgcgggagaagtgcaaggatagggagagacaccgcagaatcaattcaaaaaaaaaagagtccgcttgggaaatgactaagagcttgtacgacgcctggagtggatggctggtagtaaccctgactggactggcttcaggagcactcgccggactcattgacatagccgctgattggatgacggacctgaaggaagggatctgtctgtcagctctatggtataaccatgaacagtgctgctggggctcaaacgaaacaaccttcgaggaaagagataaatgccctcagtggaaaacgtgggctgagctgatcattggccaagccgaaggacccggatcttacattatgaactacatcatgtatattttttgggccttaagctttgcatttctggccgtgtccctggtaaaggttttcgctccttatgcctgcggctctggcatccctgaaataaagaccattctgagcggctttattattcgtggatacctgggcaaatggaccctgatgataaaaaccataactctcgtcctcgctgtggctagcggactgtctctgggaaaggaggggccccttgttcacgtcgcgtgttgctgtggcaatatattcagctatttattccctaagtattccacaaatgaagcgaaaaagcgggaggtgtcatactatttccctctgaaaaccctctggcggtcgttcttcgccgcgctcgtggccgcatttgtgttgcgcagtattaatcctttcggaaattcccgcctcgtactgttctatgtggagtaccacacgccctggtacctatttgaactctttccctttattctgctcggtgtttttggagggctgtggggtgccttctttatccgggccaacatcgcgtggtgccgcagacggaagagtacaaaatttggtaagtacccggttctggaggtcatcatcgtggcagctatcacggctgtaatcgccttccctaatccgtacactcggcttaacacaagtgagctgattaaggaactctttaccgactgtgggcctcttgaatccagctcgctgtgcgactatcgaaatgacatgaatgcaagcaaaattgtcgatgatatcccggaccggccagccgggatcggcgtgtactctgccatctggcagctgtgcctggccctgatcttcaagattatcatgacggtattcacatttggcattaaagtacctagcggattgtttatccccagcatggccattggtgccatcgccggaaggattgtggggattgcagtggaacagcttgcttattatcaccacgactggtttatattcaaagaatggtgtgaggttggagccgactgcattacccccggattgtacgccatggtgggagcggccgcctgcttaggcggcgtgacccgaatgaccgtgtccctagttgtgattgtgtttgaacttacggggggcctggagtatattgtacccctgatggccgccgtcatgacttcaaaatgggtgggtgatgcctttggccgggagggcatatatgaggctcatatcagactgaatggttaccccttcttagacgccaaggaagagttcacccacaccactcttgccgccgacgtgatgagacctaggcgaaatgacccacccctggccgtactgacgcaggacaatatgaccgtggatgatatcgagaacatgatcaatgagactagctacaacggcttcccagtcatcatgtcaaaggagagtcaaagactggtgggtttcgcactgcgaagggacctgacaatcgctattgagtcggcaaggaaaaaacaggaggggatcgtcggatcgagccgagtctgtttcgctcagcacaccccatcactgccagcggaatcaccccgcccccttaagttgcgatctattctcgacatgtcccctttcacagtcactgatcacacacctatggagatagtggtggatatctttcgcaagctggggcttcggcaatgtctggtgactcataatggacgccttctcgggataatcaccaagaaagacatcctgagacatatggcccagaccgctaatcaggatccagcatccataatgttcaattag

SEQ ID NO: 182737 - DNA, 2406 bp, synthetic construct
  misc_feature 1..2406: note = Description of Artificial Sequence: Synthetic coding sequence
  source 1..2406: mol_type = other DNA
atggtgaccctgcagctgggcgagagccactacgtggtgcaggccggtctgcagctgttaggctcaagcaacccaccagcactcgcttcacaggtcgcagagataacaggcacccattacactatgactaatggcggtagtatcaatagctctacccacctgctggatttactcgacgaacccatacccggggtgggcacttacgatgactttcacaccattgactgggtgagagagaagtgcaaagatcgcgaaagacacagacggatcaatagcaaaaagaaggaatcagcatgggaaatgaccaagagcctgtatgatgcttggtccggctggttagtagtgacactgaccgggctggccagtggagcattggccggcttaatcgacattgccgctgattggatgacagatcttaaggaaggcatttgtctgagcgctctgtggtacaaccatgaacaatgttgctgggggtcaaacgaaactacatttgaggaaagagacaaatgcccccaatggaaaacttgggccgaactgatcatcggacaggctgagggccccggctcttacattatgaattacatcatgtatattttctgggccctctcatttgcattcctcgcagtcagcctcgtaaaagtgtttgccccgtatgcctgcggcagtgggatcccagaaatcaaaacaatcctgtccggtttcataattaggggatatttgggcaagtggaccctgatgatcaaaaccatcaccctggtacttgctgtagcctcggggttgtccctcggcaaagaggggccgctcgtccacgtggcctgctgttgcgggaatattttcagctacctgttccccaagtattccacaaacgaggctaagaaaagggaggttctgtctgccgccagtgctgccggagtatccgtggccttcggtgcccccatcgggggcgtcctgtttagtctcgaagaggtgagttattacttcccactgaaaaccctgtggaggagttttttcgccgccctggtggcagcttttgtcctccgctccattaacccttttgggaactcgcggctggtgcttttctacgtcgaatatcatacaccttggtatctgtttgaactctttcccttcatcctcctgggagtgtttggtggattatggggcgccttcttcatcagggcaaatatcgcatggtgcaggcggagaaagtcaacgaagtttggtaagtatccggttctggaggtgataattgttgctgccatcacggccgtaatcgcattcccgaacccctacaccaggctgaatactagcgagctgattaaggaactcttcaccgactgcgggccactggaatccagtagtctgtgtgattatcgcaacgacatgaacgcctccaagattgtggatgacattcccgatcgtcccgcaggaattggcgtttactcagctatctggcaactgtgtctggcgctgatctttaaaattatcatgacggtttttacatttggcataaaagtgcctagtggactgtttattcccagtatggccattggcgccattgcagggcggatcgtcggaatcgccgtggaacaactcgcttactaccaccacgattggtttatctttaaggaatggtgtgaggtgggggctgactgcatcacccctggtctgtatgccatggttggagcagccgcttgtttgggaggagttactcggatgactgtcagtcttgtggtgatcgttttcgaactaactggaggcctcgagtacattgtgccgctcatggcggccgtgatgacttcaaaatgggtcggggacgcattcggacgggaaggtatttacgaagctcacatcaggcttaatggataccccttccttgacgctaaagaagagttcactcacaccacacttgcagctgacgtcatgaggcccagacgaaatgacccaccccttgcagtcttgacccaggataatatgaccgtggatgatattgagaacatgatcaatgagacatcatataatggtttccctgttataatgtccaaagagtcacagagactggtgggctttgccctaaggcgggatctgactatagccatcgaaagtgcccgcaagaagcaggagggaattgttgggtccagcagggtctgcttcgcgcagcatacgccatctttgccagcagaatctcccaggccacttaaactccgatcaatactagacatgagcccctttactgtgacagatcacaccccaatggaaatagtggtggatatttttagaaagctgggcttgcgacagtgtctcgtaactcacaacggcaggctgctcggcatcattactaagaaagatattctgagacacatggctcagacggcaaaccaggatcccgcatctatcatgtttaactag

SEQ ID NO: 182738 - DNA, 522 bp, synthetic construct
  misc_feature 1..522: note = Description of Artificial Sequence: Synthetic coding sequence
  source 1..522: mol_type = other DNA
atggagagcgagcagctgttccaccggggctactaccggaacagctacaacagcataacaagcgcgtcctctgatgaagagttgttggatggcgctggcgttataatggattttcagaccagtgaggacgataacttactggatggtgatacagccgtgggtacacactacactatgaccaacggcgggagtatcaactcttccacacacctgctggatctgctcgatgaaccaataccaggagtgggcacgtatgatgatttccatactattgattgggtgcgcgagaaatgcaaggacagggagcggcacaggcgaatcaattcaaagaaaaaagaatcagcttgggagatgaccaagtccttatatgacgcctggagtggatggcttgtcgtcacgctgacgggtctggcgtcaggagcactggccgggctcatcgatattgcagccgactggatgacggacctgaaagaagggatctgcctgagcgccctttggtacaaccatgaacaatgttgctag

SEQ ID NO: 182739 - DNA, 420 bp, synthetic construct
  misc_feature 1..420: note = Description of Artificial Sequence: Synthetic coding sequence
  source 1..420: mol_type = other DNA
atggagagcgagcagctgttccaccggggctactaccggaacagctacaattctatcacgagcgcttccagcgacgaggagttgcttgacggcgccggcgtaatcatggactttcagactagcgaagatgacaatctcctggacggggataccgctgtgggaacgcactacacaatgaccaacggaggtagcataaactcttccacccatctccttgatttgcttgatgaaccaataccaggagtgggcacctatgatgatttccatactattgattgggttagggagaaatgcaaggatcgcgaaagacacaggcgaattaattccaagaagaaagaaagtgcatgggaaatgacaaaaagcttgtacgatgcctggtctggctggctggtggttaccctcactgggttggccagttag

SEQ ID NO: 182740 - DNA, 2457 bp, synthetic construct
  misc_feature 1..2457: note = Description of Artificial Sequence: Synthetic coding sequence
  source 1..2457: mol_type = other DNA
atggagagcgagcagctgttccaccggggctactaccggaacagctataactcaataacatctgccagctccgatgaggagctcctcgacggggcaggagtgataatggattttcagacctccgaagacgataatctgctcgacggagacacggctgtgggaacacattatactatgaccaatgggggaagtattaacagttcaacacacttactcgatctgctcgacgaacccattccaggtgttggcacctatgacgacttccacaccattgactgggtgcgcgagaaatgtaaagatagggaaaggcacagaaggatcaactctaagaagaaagagtcggcatgggagatgacgaagtcactgtatgatgcctggtctggatggttagtggttacccttaccggtctggcatcaggagctttggcggggctgattgacatcgccgcagactggatgacggatctgaaagagggcatctgcttgtccgcattgtggtataaccacgagcagtgctgctggggatccaacgaaaccaccttcgaagaaagggacaagtgcccgcagtggaagacgtgggcagagttgatcattggccaggccgaaggaccgggctcttacatcatgaactacattatgtatattttctgggcactgtcctttgctttcctggctgtgtcattagtcaaggtattcgcaccgtacgcctgtggctccgggatcccagagatcaaaaccatcttaagcggattcatcatacgtggctacctcggaaagtggacgcttatgatcaagacaataacgctagttttagctgtggccagtggactaagtctgggaaaggaaggacctctcgtccacgtggcgtgctgctgcggaaatatattctcctacctctttccaaaatactcaaccaacgaagccaaaaagagggaggtactgtctgcggccagtgctgccggagtgtctgtggcgtttggcgcaccaatcggtggggtactgtttagtttggaggaggtttcctactattttcccttaaaaactctgtggcggtccttttttgcagctctggtggcagctttcgttctgagaagcatcaaccctttcggaaatagccgcctggtgctgttctacgtggagtatcataccccatggtacctgttcgaactctttccattcatccttcttggggtgttcggcggcctatggggagctttcttcatcagagcaaacatcgcttggtgccgacggcgaaagtccactaaattcggaaaataccctgtacttgaggtcattatcgtggctgccattactgccgtgatcgcgtttccaaacccctacacaaggttaaacaccagcgagctcattaaggaactgtttaccgactgcggtcccctggaatctagtagtctctgtgattaccgcaacgatatgaacgcttccaaaattgtcgacgatatccccgacagaccggccggcataggtgtatattcagcgatctggcaactctgtctcgccctgatcttcaaaatcatcatgactgtgtttacatttggcatcaaagtacctagcggcttgttcatcccttctatggcaatcggcgccatcgcaggccgcatcgtggggatcgccgttgagcagctggcctactaccatcacgactggtttatatttaaggaatggtgcgaagtgggtgcagattgtatcacccctggattgtatgctatggtcggagctgcagcctgcctgggcggtgtgactagaatgaccgtgtcgttagtggtgatagtatttgagctgactggaggattagaatacatcgttccattgatggcagctgttatgacctctaagtgggtaggtgatgcctttggacgggaagggatttacgaagcccacattcgacttaacggatatccctttcttgacgcaaaggaagagtttacacacacaactctggctgccgatgtgatgagacctcggcgaaatgatccaccactggccgttctgacccaggataacatgaccgttgatgatattgagaacatgattaatgagacatcctacaacggattccctgttattatgtctaaagagtctcaacgtctggtggggttcgccctgaggagagatctgactattgcaatcgaatctgccaggaagaaacaggaaggaattgtcggcagttcacgggtgtgcttcgcgcagcacactccaagcttgcccgccgaatcccccaggcctctgaaacttaggtctatattggacatgtctccattcaccgtcaccgatcacacacccatggagattgtggtggacatcttcagaaaactgggtctccggcaatgtctggtcacccataacggacgtttgctgggcatcatcacaaaaaaagacatactgagacatatggcacagacagccaaccaggaccctgccagtatcatgtttaattag

SEQ ID NO: 182741 - DNA, 576 bp, synthetic construct
  misc_feature 1..576: note = Description of Artificial Sequence: Synthetic coding sequence
  source 1..576: mol_type = other DNA
atggagagcgagcagctgttccaccggggctactaccggaacagctataacagtattacgtcagcctcctccgatgaggagttgctggacggagccggggtaatcatggacttccagacatctgaggacgacaacctacttgacggtgatacagcagtcggaactcactatactatgaccaatggcggctccattaacagttcaacccacttactagacttactcgatgaacccatccctggggtcgggacctatgacgattttcacacaattgattgggttcgagaaaagtgcaaagacagggagcggcataggcggattaacagtaagaaaaaagaatccgcttgggagatgacaaagagtctgtacgacgcttggtccggatggctggtggttaccttgaccggcctcgcctcgggcgcactggctggtcttattgatattgcggccgattggatgacagacctgaaagagggaatttgcctgagcgccctgtggtataatcatgagcagtgttgttggggaagcaacgaaacgacttttgaaaagaagaaaaagaagaaaaagaaagcctag

SEQ ID NO: 182742 - DNA, 2190 bp, synthetic construct
  misc_feature 1..2190: note = Description of Artificial Sequence: Synthetic coding sequence
  source 1..2190: mol_type = other DNA
atggtgaacgccggcgccatgagcggcagcggcaacctgatggactttctggacgagccattccccgacgttggcacttacgaagattttcatacgatagactggcttagagagaagtcacgggacacggaccggcacagaaagattaccagcaaaagcaaggaatctatttgggaattcatcaagtctctactcgatgcctggtcaggctgggtggtgatgttgctgatcggacttcttgctggaacccttgcgggagtaatcgatctcgccgtcgactggatgaccgatctgaaggagggggtatgtttgagcgccttctggtattcccatgagcagtgttgttggacttctaacgagacaacattcgaggaccgcgataaatgcccactgtggcagaagtggagtgagttattagtcaatcagtctgaaggagcaagtgcatacatcctaaactatctgatgtacattctttgggctctgctgttcgcctttctggcggtctccctagtgcgggtgttcgccccttacgcatgtggatcaggaattccagaaatcaagaccattttgagtggatttatcattagaggctacctcggcaagtggaccctgcttatcaaaacagtgactcttgtcctcgttgtgtcctccggtctgagtctcggtaaggagggtcccctggttcacgtcgcctgttgctgcgggaactttttcagctcactcttttctaagtatagcaagaacgaaggaaaacgccgggaggtcttgagcgcagccgcagctgcaggcgtgagcgtagcattcggggccccgattggcggggtgcttttctcgctggaagaggtcagctattacttcccgttaaagaccctgtggaggtccttctttgcagccttagtggccgcttttactttacggtctattaatccctttgggaatagcaggcttgtgctcttctatgttgagtaccacactccctggcgaaggaaaactacacggctgggaaaatatcctgtgcttgaggtcatcgtggtaactgccatcaccgccatcatcgcttaccccaatccgtatacaaggcaatccacatcagaactgattagcgaactgttcaatgactgtggcgccttggagtcctctcaactgtgtgattatattaacgaccctaacatgactcgcccagtagacgatatcccggatagaccagcaggggttggagtgtacactgccatgtggcagttagcactagccctgatctttaagattgtggtgacgatttttacattcggaatgaagataccatccggtttatttatcccaagcatggccgtgggtgctatagccggccgaatggtggggatcggcgttgagcagctagcttatcaccaccacgattggataatcttccgcaattggtgtcgccccggggccgattgtgttaccccaggcctctacgctatggtgggcgccgcagcctgcttaggaggcgtcacgaggatgaccgtgtcactggtggtaatcatgttcgaattgacaggtggtttagagtatattgtaccactgatggcggcagctgtaaccagtaaatgggttgctgacgccttcggcaaggagggcatttacgaggctcacattcacttgaacggatatccatttctggacgtgaaggacgaattcacccaccgtactttggccacagatgtgatgcgtccaaggagaggtgagcctccgctttctgtgctgactcaagactccatgaccgtagaggatgtggaaacgctgatcaaagaaacagactataacgggttcccagtcgtggtctcacgcgacagcgagcgactgatcggcttcgctcagaggagggagttaatcctcgcgattaaaaatgcaaggcagcgacaggaagggatagtaagtaattccattatgtacttcaccgaagagcctccagagttgccagccaattccccccacccgctcaagctgcgtagaatccttaatctgtcaccgttcaccgtcaccgatcatacccccatggagacggtggtggatattttcaggaagctcgggctgcgccagtgcttggtaacgaggtcagggcggctcctaggcatcatcaccaagaaagacgtgctgcgtcacatggcacagatggccaaccaagatccggagagcatcatgtttaactag

SEQ ID NO: 182743 - DNA, 2283 bp, synthetic construct
  misc_feature 1..2283: note = Description of Artificial Sequence: Synthetic coding sequence
  source 1..2283: mol_type = other DNA
atggtgaacgccggcgccatgagcggcagcggcaacctgatggacttcctagatgagccttttcctgatgtgggcacctacgaagacttccataccatcgattggcttagggagaagagtcgggatactgaccggcataggaaaataacatccaagagcaaggagagtatctgggaattcatcaagtcgctgctggacgcttggtccggctgggtggtaatgcttcttattgggctgctggccgggacgcttgcaggagtaatcgacctggctgtggattggatgacagatttaaaagaaggagtttgtttgagcgctttttggtacagccatgagcagtgctgttggacctcgaatgagactacgtttgaagacagagacaaatgcccattgtggcaaaagtggagtgagcttctggttaatcagagtgagggcgccagcgcttacattctgaattatcttatgtatatactatgggcgctgctctttgcctttctggccgtgagcctggttcgggtgttcgcgccttacgcatgcggctccggcattccagagattaagaccatcttatctggcttcattatccggggttacctgggtaagtggaccctcctcattaagactgtaaccctggtgctcgttgtctctagtggtctgtcactgggaaaggaagggcctctagtccatgtggcgtgttgttgtggcaacttcttttcatcattatttagcaaatacagcaagaacgagggtaaaaggagagaggtgctgtcagctgccgctgccgccggggtcagtgtggctttcggggcccctatcggtggggtcctctttagcctcgaagaagtctcctactacttccccctcaagaccctgtggagatcttttttcgctgcgctggtggccgcctttacactgcgttccatcaacccctttggaaattcaagactggtccttttttacgtggagtatcacaccccatggtacatggcagagctcttccccttcattttactgggcgtcttcggcggtctttgggggactttgttcatcaggtgcaatatcgcttggtgtcggcgcaggaaaacaacacggctcggcaaatatcctgtgctcgaggtaatagtggtgacggctatcactgctatcatcgcttacccaaatccgtatacacggcaaagcacatccgagctcatttccgagctctttaacgactgtggcgcactcgaatcttcccagctgtgtgactacatcaatgatcccaacatgacacggcctgtggatgacataccggatcgaccagccggagttggggtctatactgccatgtggcagcttgccctggctttgattttcaaaatagtagttacaatcttcacatttggcatgaagatccctagtggcctttttataccaagtatggccgtgggggccattgccggtcggatggtagggatcggcgtggagcaactggcctatcaccaccatgactggatcatctttcggaattggtgcaggcctggcgcagactgcgttacgccaggtctttatgctatggtgggcgcagccgcgtgtttgggcggtgtgacaaggatgacagtttccctcgtcgtgattatgtttgaacttacaggcgggctcgagtatatcgtgccccttatggcagccgcagtgaccagcaagtgggtcgcggacgcttttggcaaggaggggatttacgaggcgcacattcacttaaatgggtatccttttctcgacgtgaaggacgaattcacccatcgtacactggcaaccgacgtgatgaggcccaggagaggggaaccccctctcagcgtcctcacacaggactccatgacggtggaggacgtcgagactttgatcaaagagacggactacaacggcttcccagtcgtggtgtcccgagattctgagcggctcatcgggttcgcccaaaggagggagctgatcctcgctatcaagaatgcgaggcaaaggcaggagggtatcgtgtcaaattctatcatgtactttaccgaggagcctcccgagctccccgcaaattctccgcacccgctgaaactgagacggatcctcaacctgtcccctttcaccgttaccgaccatacccctatggagacagtggtggacattttccgaaagcttgggctgagacagtgtcttgtgactcgaagtggccgcctcctgggcattattactaagaaagacgtgctccgccacatggctcaaatggccaaccaggaccccgagtcaattatgttcaactag

SEQ ID NO: 182744 - DNA, 2001 bp, synthetic construct
  misc_feature 1..2001: note = Description of Artificial Sequence: Synthetic coding sequence
  source 1..2001: mol_type = other DNA
atgaccgacctgaaggagggcgtgtgcctgagcgccttctggtacagccacgagcaatgctgctggacgagcaacgaaactacatttgaggatcgcgacaaatgcccgctctggcagaagtggtccgagctattggttaatcaatccgaaggcgcatcggcatatatcctcaactatcttatgtacatcctctgggcgttgctttttgcctttctggccgtctccttggtgagggtgttcgctccatatgcttgcggctctggcatccccgagattaaaacgatcctctccggctttatcatcagggggtatctcggaaaatggacgctgctgatcaagactgtgactctagttcttgtcgtgtccagtggattgtccctcggcaaggagggcccattggttcatgtcgcttgttgctgcgggaattttttttcgagcctgttttcaaaatactccaagaatgagggcaagcgcagagaagtgcttagcgccgccgcagcagccggcgtttctgtagcattcggcgctcctattgggggtgtgcttttcagcctggaggaggtgagctactattttccgctcaagaccctgtggagatcctttttcgcggcacttgtagctgcattcacactcaggagcatcaatccgttcggcaattcaagattagttcttttttatgtcgagtatcacaccccctggtatatggcagagctgttccctttcatcttgctgggagtgttcggcggtctctggggtacactattcatccgatgtaatatagcatggtgccggaggcggaagaccactaggcttggcaaatatcccgtgttagaggtcatcgtggttacagccatcacagccatcatcgcataccctaacccttacacccgacaatcaacttccgagctgatctccgaattgttcaacgactgtggtgcactcgagagctcccaactctgtgactacatcaatgatcccaacatgacccggcctgtggacgacattccggaccgacctgctggtgtgggcgtctacactgccatgtggcagttggcactcgccttgatattcaaaattgttgttaccattttcacattcggaatgaaaataccgtctgggctgttcattccatcaatggccgtcggagcaattgcaggccggatggtggggatcggggtcgagcaactggcttaccatcatcatgattggattatctttaggaactggtgcagacccggagctgattgcgtgacccctggcctgtatgccatggtgggcgctgccgcttgtctgggcggagttacacggatgacagtctcactggttgtcatcatgttcgaattaacgggcggattggaatacatcgtaccgctgatggcagcagccgtgacgagcaagtgggtcgctgatgcatttggtaaggagggaatttatgaggcgcacatccacctcaatggctaccctttcctggatgtgaaagatgagtttacacacaggaccctcgccactgacgtcatgagacctagacgaggagaaccacctcttagcgtcctgacccaagatagcatgactgtggaggatgtggagacccttattaaagaaaccgactacaacgggttccccgtggtggtgtccagagactccgagcggctaatcggtttcgcccagcgacgcgagctcattctggcaatcaaaaacgccaggcaaaggcaagagggaattgtttctaatagcatcatgtacttcaccgaggaaccacctgagttgccagccaattccccccatccacttaaactgcgccgcatcttgaacctaagcccatttaccgtgacagatcacaccccaatggaaaccgtagtggatatattccgaaaactcggattgcggcagtgcctggtgacaagaagtggtcggcttctggggatcatcactaaaaaagatgtactcaggcacatggcgcagatggcaaaccaagaccccgaaagcatcatgttcaactag

SEQ ID NO: 182745 - DNA, 459 bp, synthetic construct
  misc_feature 1..459: note = Description of Artificial Sequence: Synthetic coding sequence
  source 1..459: mol_type = other DNA
atggtgaacgccggcgccatgagcggcagcggcaacctgatggacttcctggacgagcccttccctgacgtgggcacttacgaggattttcataccatcgactggctcagagagaaaagcagagatacagatcggcatagaaaaatcacaagtaaatccaaagagtctatttgggaattcataaagagccttctggacgcctggtccgggtgggtagtgatgctgctgatcggcctgctggcagggaccctggccggagtcattgatctggctgttgattggatgaccgacctgaaagagggggtgtgtctcagcgccttttggtactcccatgaacagtgttgttggacgtccaacgaaaccacctttgaggaccgcgataaatgccctttatggcagaagtggtctgagttactggttaaccagagtgaagttctgtctgcagccgcagctgcttag

SEQ ID NO: 182746 - DNA, 2241 bp, synthetic construct
  misc_feature 1..2241: note = Description of Artificial Sequence: Synthetic coding sequence
  source 1..2241: mol_type = other DNA
atggacttcctggaggagcccatccccggcgtgggcacctacgacgatttcaatacaattgattgggtgagggaaaagagtcgcgaccgggaccgccatagggagattaccaataaaagcaaagagtccacgtgggccctgatacacagtgtgtctgacgcttttagcggctggctcctgatgctgctgatcggcctgctgagcggctcgctcgccggcctaattgacatctctgcgcactggatgactgatctgaaggaaggcatctgcacgggagggttctggttcaatcacgaacattgttgttggaacagtgagcacgtgacattcgaggagcgcgacaagtgtcccgaatggaacagctggagtcaactcatcattagcactgatgaaggagcctttgcttacatcgtgaattatttcatgtacgttctgtgggccttactcttcgcattcctggctgtgagcctcgtcaaggtcttcgcaccctacgcctgcggcagtggaatcccggagataaaaacaatcctgtcaggctttataattagaggttatctcggtaagtggaccctggttatcaagacaatcacactagtgctcgccgtaagctccggactcagcttgggtaaggagggccccttagtacacgtggcttgctgctgtggcaatattttgtgccattgtttcaacaagtacaggaaaaacgaggccaagcgacgggaagtgctctccgccgcggcagcggctggagtgagcgttgcgttcggcgcgccaataggcggagtattgttctctctagaggaagtttcttattactttcccctgaaaactctatggcgctcttttttcgccgctctggtggctgcttttacactgcggtcaataaaccccttcgggaattcacggctggtgctcttttacgtagagtttcatacaccttggcacctttttgaactagtcccctttatcctgttggggatttttggagggctctggggtgccctgttcattcggactaacattgcgtggtgccggaaacgcaagaccactcagctcggcaagtatcccgtaatcgaagtgctcgtcgtgactgcgatcaccgcaatcctggccttccccaacgaatacacgcgaatgtcaacttctgagcttatttccgaactgtttaatgattgcggtctgctggactcatcaaagctctgcgactatgagaacaggttcaacacctcaaagggtggggaattgcctgaccggcccgctggtgtgggtgtctattcagccatgtggcagctagcgctgactctgatccttaagatcgtgattactattttcacttttgggatgaaaatcccttctggcttatttatcccatctatggctgtcggcgcaatcgccggccgactgctgggcgtgggcatggaacagctggcctactatcaccaagaatggactgtattcaatagctggtgctcccagggagcagattgcattacaccggggttgtatgccatggtcggcgctgccgcctgtcttggcggagtgactagaatgaccgtttcccttgtcgttataatgtttgagctaactggcggattagagtatatcgtgcctttaatggcagctgcaatgaccagcaaatgggtcgcggatgcattggggagagaaggtatttacgatgctcatattcggcttaatggataccccttcttggaggctaaagaagagtttgcgcacaagaccttggctatggacgtgatgaagcctcgcaggaatgacccgctgcttacagtgttgactcaggatagcatgactgtggaagatgtggagacgatcatctctgaaacgacctattccggattccctgtggtcgtgagtcgcgagagccaaaggctggtcggctttgttttgaggcgagacctgattatttcgatagagaacgccagaaagaaacaagacggtgtagtgagcaccagtattatctattttactgagcacagccctcccctgccgccttacactcccccaacactcaagctgcgcaacatcctggatctcagccccttcaccgtgaccgatctgacccccatggagattgtggtagatatttttcggaaattgggcctgagacagtgtctggtgacgcataacgggagattgctgggcattattaccaagaaggatgtgctgaaacatattgcacaaatggccaaccaggaccccgatagtatccttttcaattag

SEQ ID NO: 182747 - DNA, 2451 bp, synthetic construct
  misc_feature 1..2451: note = Description of Artificial Sequence: Synthetic coding sequence
  source 1..2451: mol_type = other DNA
atggccatgtggcagggcgccatggacaaccggggcttccagcagggatctttttcaagcttccaaaactctagcagcgatgaagacttgatggacatacccgcgactgccatggatttcagcatgcgggacgatgtgcccccattagaccgggaggtgggggaagataaatcatataatgggggtggtattggaagttccaatcgaattatggatttcttggaggagccaatcccgggtgtgggcacatatgatgactttaacaccatcgattgggtccgggaaaagtcccgtgaccgtgatcgacatagagaaattactaataagtccaaagagtcaacgtgggcattgatccacagtgtgagtgacgctttctccggctggctgttaatgctgctcataggtctccttagtgggagcctcgctggcttgatcgacatttccgcccattggatgactgacttgaaagagggcatttgtacgggcggtttctggtttaaccacgaacactgctgttggaattccgagcacgtcacattcgaggagagggataagtgtcctgaatggaactcttggtcccaactgataatctctaccgacgagggagccttcgcatatattgtgaattattttatgtatgtcctgtgggctctgctgtttgctttcctggccgtctcgttggtcaaggtgttcgcgccatacgcatgcggatctggtataccagaaatcaaaacaatcctttctggttttatcattcgaggatacctgggcaagtggaccctggtgattaaaaccatcaccctcgtgctggccgtctcctccggtttgtcactgggaaaagagggcccattagtccacgttgcgtgctgctgcggaaacattctgtgtcattgcttcaacaagtacaggaagaacgaagcaaaaaggagagaggttctatctgcagctgccgccgccggtgtgagcgtggccttcggggcaccgatcggcggggtgctcttctcattggaagaagtgagctattattttcctctcaagacattgtggagatcttttttcgcggcattggtcgccgcttttaccttgagaagcatcaatccattcggaaatagcagactggtactgttttatgtggaattccacacaccctggcatctattcgaattggttccattcatcttgcttggaatttttggtggcctgtggggagcattgtttatcaggacaaacattgcttggtgccgcaaacgaaaaactacacagctcgggaagtaccctgtgattgaagtactggtggtcaccgcaataacagctattctagctttccctaatgaatatacgcggatgagcacatctgagctcatctcagagctgttcaacgactgcggactcctggatagctccaagctttgcgattacgaaaataggtttaacacaagtaaaggcggtgagttacctgacagacctgccggagttggcgtgtacagtgccatgtggcagctggccctgaccctgattttaaaaatcgtgatcacaatcttcaccttcggcatgaaaatcccgtctgggctcttcatcccatcaatggcggtcggagctatcgctgggcgcctgctcggcgtggggatggagcaactggcctattatcaccaggagtggacggtgtttaatagctggtgctcacaaggagccgactgtatcacaccagggctctacgcaatggttggggccgctgcctgccttgggggcgtgactaggatgaccgtatcactcgtagtgatcatgttcgagctaaccggcgggctggagtatatcgtgccactcatggccgccgcgatgacaagcaagtgggtcgcagacgctcttggccgagaaggaatatatgatgctcacattcgactaaacggttacccgttcctcgaggccaaggaggaatttgctcacaagaccctcgctatggatgtaatgaaacctagaagaaacgaccccctcctgacggtccttacccaagattccatgaccgtagaagacgtggagacgatcatttcagagactacatacagcgggttcccagtggtcgtctccagggaaagtcaacggctggtgggctttgtgttaaggcgcgacttgattatttcgattgagaacgctagaaagaagcaggacggggtggtgtccacatccattatctacttcaccgagcattctcctccactcccaccttatactcctccaacgctaaagcttcgtaacatcctggatctgtctccgtttaccgtgacagatttgaccccaatggagatagtggtcgacattttccggaagctgggtctgcgtcagtgtttggtcacccataacggcaggctactgggcatcatcaccaagaaagatgtccttaaacatatcgcgcagatggcaaatcaggacccagacagtatcctgttcaattag

SEQ ID NO: 182748 - DNA, 2451 bp, synthetic construct
  misc_feature 1..2451: note = Description of Artificial Sequence: Synthetic coding sequence
  source 1..2451: mol_type = other DNA
atggccatgtggcagggcgccatggacaaccggggcttccagcagggatcattcagcagctttcaaaattcgtcttcagacgaggatcttatggacattccagctacagcaatggatttttctatgcgggatgacgtcccaccactcgatcgggaagtaggagaggacaaatcttacaatggcggaggcatcggtagctcaaaccgcattatggatttcctggaagaacccatcccaggagtcggaacatatgacgatttcaatacaatcgattgggtgcgggaaaaaagcagagaccgcgataggcatcgcgaaataactaataaatctaaggagtcaacttgggctcttatccactcagtttctgatgcttttagcggctggttactcatgctgttgataggactgctgagtggcagcctggccggcttgatcgatatcagcgcccactggatgaccgatctgaaagagggaatatgtacaggggggttctggtttaatcacgagcactgctgctggaactccgaacacgtgacttttgaagagcgagataaatgccctgagtggaactcatggtctcagttgattattagcacagatgagggcgcatttgcctacatcgttaactattttatgtacgtactgtgggctctgctcttcgccttcctcgccgtgtcgctggtcaaggtttttgccccctacgcctgcggctcagggatccccgagattaagaccatactttcaggttttattatcagaggttatttgggtaaatggactctcgtcatcaagacgataaccctggtgctggccgtttcatccggtctgtctctgggcaaggaaggacctctggtacacgttgcctgctgctgcggaaatattctttgccattgctttaataagtaccgtaagaatgaggctaaaagacgcgaagtgttatccgctgcagccgccgccggggtgtcggttgctttcggcgccccaattggcggtgtcctgtttagtttggaggaggtgagttattatttccctcttaaaacactttggcggtcatttttcgccgccctggttgcggctttcaccttgcgaagcattaaccccttcggcaacagcaggttggtcttattctacgtggagtttcatacaccctggcacttgtttgaactggtgcccttcatcctgctgggaattttcggtggcctctggggtgcactgttcatccgcacaaacatagcctggtgccgcaaaagaaaaactacacagcttggcaagtatcctgtgatcgaggtactggtggtgaccgctattaccgcaatcctggccttcccaaacgaatacacacgcatgagcacttctgagttgatatcagaactgtttaacgactgcggcctgctcgattccagcaaattgtgcgactacgagaaccggttcaacacttccaaaggaggtgaactgccagatcgcccagcgggagtcggggtctatagcgccatgtggcagctggccctgaccctgattttgaagatcgtaattaccatttttacttttggcatgaagatcccatccggcctgtttattcccagcatggcagtgggcgccatcgctggccgtctcctgggcgtgggcatggaacagttggcctactaccaccaggaatggactgtgttcaattcctggtgcagccagggcgcagactgtataaccccaggtctttacgcaatggttggcgcggctgcctgtctgggcggagtgacccgcatgaccgtaagccttgtcgtaattatgtttgagctcacaggtggcctggagtatatcgtaccattgatggccgctgcaatgacctcgaaatgggttgctgacgcacttgggcgggaggggatatatgacgctcatatcaggctcaacggatacccctttctggaggcaaaggaagaatttgctcacaaaaccctggcaatggacgtgatgaaaccgcgccggaatgatcccctgttgactgtgctgacccaggactctatgaccgtcgaagatgtcgagactattatcagtgagactacatatagtgggttccccgtagtcgttagcagggagtctcaaagactggtcggttttgttctgcggcgggacctcataatctccattgaaaatgctagaaaaaagcaagacggagtcgtgtccacgtctatcatttacttcacagagcactcacctcctctcccaccttacactccccccacactgaagctcaggaacattttagacctgtccccctttacagtgactgatctgacccccatggaaattgttgttgatatatttcgcaagcttgggttgcgacaatgcctggtgacacacaacgggcgattactgggcataattactaagaaagacgtgttgaagcacatagctcaaatggctaaccaggatcccgactctatcctatttaactag

SEQ ID NO: 182749 - DNA, 2241 bp, synthetic construct
  misc_feature 1..2241: note = Description of Artificial Sequence: Synthetic coding sequence
  source 1..2241: mol_type = other DNA
atggacttcctggaggagcccatccccggcgtgggcacctacgacgattttaatacgatcgactgggttcgggaaaagtctcgggatagggatagacaccgggagatcaccaataagtcgaaagagtccacctgggctcttattcatagtgtatctgatgctttctctggatggttgcttatgcttttgatcggattactgagtggaagtctggccggattgattgacattagtgcccactggatgaccgaccttaaagaggggatatgtacgggcggcttttggtttaaccatgagcattgttgctggaattctgaacatgttaccttcgaggagcgagataaatgccctgagtggaattcttggtcacaactcatcatctccacggatgagggcgctttcgcttacatagttaactatttcatgtacgtgctgtgggcacttctgtttgctttcctggcagtctcattggttaaggtattcgcaccatacgcatgtggcagcggaatacccgaaattaagactatcctgtcgggattcatcatcaggggttatttagggaaatggactttagttattaaaacaattaccctagtccttgccgttagcagtggcctgtcccttggcaaggagggccctctcgtacacgtagcctgctgctgcggcaatatattgtgtcactgcttcaataagtatcgaaaaaatgaggcaaagagacgcgaggtgctgtcagccgcagccgcagcaggggtaagcgtggcattcggcgctcctatagggggcgtccttttcagtctcgaagaggtgtcctattactttccgctaaagactctttggagatctttttttgctgccttggtggcagccttcactcttagatccatcaatccattcgggaattctcggcttgtgctgttttacgtcgaattccatactccatggcacctctttgagctcgtgcccttcatcctgctgggaatcttcgggggcctgtggggcgccttattcatccgtactaatatcgcatggtgcagaaagaggaagaccacccagcttggaaagtatcctgtaattgaggtcttagtggtgactgctatcacggcgatccttgcgtttccaaatgaatacacaagaatgtctacaagcgaactgattagcgaactatttaatgattgcgggttgttagactcaagtaaactctgtgactatgagaataggttcaacacttcaaaagggggcgaactgccagatcggccagctggggttggtgtgtatagcgctatgtggcagttggcacttacgttgatcctcaagatagtgataaccatcttcacttttggaatgaagatcccatcaggactgtttatccccagtatggcggttggagcaatcgctggcaggctgctgggcgtcggcatggagcaactggcctattatcatcaggaatggacggtcttcaactcgtggtgctcccagggagctgactgtatcactcccgggctatacgcaatggtgggcgccgccgcatgtctcggtggggtgacaagaatgaccgtgtccctggtcgtaattatgtttgagcttacaggaggactcgagtacatagtcccccttatggcagcagccatgacttccaagtgggtggctgatgccctcggccgggaaggcatatacgatgcccacatccgcctgaatgggtatcctttcctcgaggcaaaggaggagttcgcacacaagacgctagccatggatgtcatgaagcccaggcgcaatgacccacttctcactgtcttaacacaagattccatgacagtggaggatgtcgagaccatcataagtgaaacaacatatagcggtttccctgtcgtcgtgtcaagagagagtcagagactcgtgggatttgtgctgaggcgcgatctgattatcagcatcgagaacgcccgtaagaagcaagacggagtggtgtcgacctctattatctacttcactgaacatagtcctcctctccccccctacacaccccctaccctcaaacttagaaacatcttggacctgtcaccattcactgtgaccgatctcactccaatggagatcgtggtggatattttccgcaaactgggactgaggcaatgccttgtgacccacaatgggcgcctgcttggcatcatcaccaaaaaagacgttttgaagcatatcgcacagatggccaaccaggaccccgacagcatcttgtttaactag

SEQ ID NO: 182750 - DNA, 1947 bp, synthetic construct
  misc_feature 1..1947: note = Description of Artificial Sequence: Synthetic coding sequence
  source 1..1947: mol_type = other DNA
atgaacatcgtggccggcaccctgagcatgagccccctgaagcgggataaatgcccggagtggaacagctggtcacagctcattatctccacggacgagggagcatttgcgtatattgtgaactactttatgtacgtgctctgggcccttctttttgctttcctcgctgttagtctggtcaaggttttcgcaccttacgcgtgcggctccggcatccctgaaataaaaactattttatccgggttcattatccgtgggtatctcggtaaatggactttagttatcaagacaatcacgttggtcctcgctgtaagtagcggcctgagtctcggcaaggagggaccactcgtccacgtcgcctgctgttgcggtaatatactgtgccactgctttaacaagtataggaagaatgaggcaaaacgtagggaagtgctaagcgccgctgctgccgctggcgtctcagtggccttcggggcaccgatcgggggagtgctgttcagcctggaggaggtgtcctactatttccctttgaaaactttgtggcggagcttttttgctgccctggttgctgcctttacgctcagatcaataaacccgtttggaaatagtcgcctggttctgttttatgttgaattccacacaccttggcaccttttcgaactggtcccatttattctgttagggatatttggcggactgtggggtgcactctttattaggactaatattgcctggtgccggaaacgcaaaacaacacagcttggcaaatatcccgtgattgaggtgctggtggttactgccattactgcaattttagccttcccaaatgagtacacccggatgtcaacttcagagctgatctccgaactctttaatgactgtgggctcctggatagttcaaaactctgcgactatgaaaatagatttaacacgagtaagggcggagaactccctgatcgccctgcaggggtgggtgtttacagtgccatgtggcagctggctttaaccctaatcctgaagatcgtgatcacgatatttacatttggaatgaaaattcccagtgggctgtttatacccagcatggccgttggtgcaattgccggcaggctgctcggcgtgggaatggaacagcttgcctattaccaccaggaatggacagttttcaactcctggtgctctcagggcgccgactgcatcacccctggcctttatgccatggttggcgccgcagcatgtttgggaggggtaacaaggatgaccgtcagcctggttgtcattatgttcgaactgaccggaggccttgagtacatcgttccactcatggcagctgccatgacatccaaatgggtggcagacgctctgggccgggaggggatttacgatgcccatatacggcttaatggctaccctttcctggaggccaaagaggagttcgcacataaaaccttagccatggatgtaatgaagcctagaaggaatgaccctcttctgactgtcctgacgcaggactcaatgacggtagaagatgtagagactataataagtgaaacaacttacagcggatttccagtggtggtcagtcgggagtcacaaagacttgtgggatttgtgctgcggcgcgacctgataatcagcatcgaaaatgctcggaaaaaacaggatggagtggtttctacaagtatcatctactttacagagcactcccctccactgcccccttatactcctccgacattgaaactcaggaatatcctggatctgtccccctttacagtgactgatctgactcctatggagattgtggtggacattttccgcaagctgggtctgcggcagtgcctggtcacccacaacggccgcctactgggcataataacgaaaaaggatgtgctgaaacacatcgcacaaatggccaaccaagatccggactctatcctgttcaattag

SEQ ID NO: 182751 - DNA, 1062 bp, synthetic construct
  misc_feature 1..1062: note = Description of Artificial Sequence: Synthetic coding sequence
  source 1..1062: mol_type = other DNA
atggccggctgccggggcagcctgtgctgctgctgccggtggtgctgctgttgcggggaacgcgaaacccgcacacccgaggaactgaccatccttggggaaacccaggaagaagaggatgagatactgccgcggaaggactatgagtccctcgattacgatcgatgcattaatgatccctatctcgaagtattggagactatggataacaagaagggaagacggtacgaggccgtaaaatggatggtcgtgtttgccattggagtgtgtactggcctagtgggcctcttcgtcgacttcttcgtgagactgtttactcagctgaaattcggagtggtgcaaacatctgtggaggagtgcagccagaagggatgccttgcgctcagcctgctagagttactcggtttcaacctgacatttgtttttctcgcctcgctgctggttcttatcgagcctgtggcagccgggagcggcatccctgaggtcaagtgctacctgaatggagtgaaagtaccgggcattgtgcggctcagaaccctcttgtgcaaggtcctgggggtgctcttcagcgttgcaggcggactcttcgtcgaaaaagaagggcctatgattcactctggttctgtcgttggcgccgggctacctcaattccagagtatatcactccgaaaaatccagttcaacttcccttactttagatccgacagagacaagcgtgattttgtatctgctggagcagctgccggggtcgccgccgccttcggtgctcccataggtggcactttattttcgctcgaagaggggtctagcttttggaatcaggggctcacatggaaagttttattctgctcaatgagcgccaccttcacacttaatttctttcggtccgggatccaattcggcagctggggttcttttcagctccccggactgctgaacttcggggaattcaaatcactgcgcgagccaccatgtgttagtggaaatcatcggggtggggtgtgcgggttagatggagtgcgccgaatgcctacagacgtgctttttgagagtaacagatag

SEQ ID NO: 182752 - DNA, 2610 bp, synthetic construct
  misc_feature 1..2610: note = Description of Artificial Sequence: Synthetic coding sequence
  source 1..2610: mol_type = other DNA
atggccggctgccggggcagcctgtgctgctgctgccggtggtgctgttgttgtggcgaaagggaaacgcggactcccgaggagttgaccattctgggcgaaacacaagaggaggaagatgagattctcccacggaaggattacgagtcccttgattatgaccgctgtataaacgacccctatctcgaggttctggagacgatggataataaaaagggcagacgctacgaggcggtgaagtggatggtagtctttgcgattggggtttgtactggactggtgggattgttcgttgatttctttgtcagactgttcacacagttgaagtttggagtcgtccagactagtgtggaggagtgttctcagaaggggtgtctcgccctgagtctgcttgagctccttggcttcaatctgacatttgtctttctagcatctttgctggtcctgattgaacccgttgcagcagggtcaggaatccccgaggttaaatgctacttaaacggggtgaaggtgccaggaattgttaggttgagaacactgctgtgcaaagttttaggcgtgttattttctgtcgctgggggtctgtttgtggagaaggagggccctatgattcacagcggttctgtcgttggggccggcttgccacagttccaatctatatcactgaggaagatccagttcaattttccttacttccggagcgatcgggacaagcgcgacttcgtgagtgctggcgccgctgctggcgtggccgccgcgtttggtgccccaattggaggcacactcttctcattggaagagggcagttctttctggaatcagggtctgacatggaaagtgcttttctgctcaatgtccgcaacattcaccctgaactttttccgatcaggaatacagtttggaagctggggaagttttcagcttccaggtctgttgaactttggtgagtttaagtgttccgactccgacaaaaagtgtcatctgtggactgcaatggatctgggttttttcgttgtgatgggggtgatcgggggactgctcggggccaccttcaactgcctaaacaagagactcgccaaatacaggatgagaaacgtgcacccaaagccaaaactggtcagggttctcgagagcctcctggtatcactggtgacaactgttgtggtgtttgtcgcatcaatggtgttgggggagtgccgacagatgtctagctcctcgcaaatcggcaatgacagtttccaactgcaagtcacagaggatgtgaattcctcaataaagacattcttttgtcctaacgatacctataacgacatggcgaccctgtttttcaatccccaggagagcgccattctgcagctgttccatcaggatgggacatttagcccggtcacactggcccttttctttgttctatactttttactcgcttgttggacatacgggatctccgtgccttccggcctgttcgtgccctccctgctgtgtggcgcggcctttggcaggttagtcgcgaacgtgctcaagagctacatcggtctcgggcacatctactcaggcactttcgcgttaatcggcgccgcagcgtttctgggaggtgtggtgaggatgactatctcactcacagtcatcctaatcgaatccactaacgaaatcacatacggactgcctataatggtgacgcttatggtggccaaatggactggtgatttctttaataagggaatctacgatatccacgtgggcctacggggggtgcctttgctcgagtgggaaactgaagttgaaatggacaaactccgagcgagtgatataatggagcccaacctgacatatgtatatcctcacactaggattcagtcccttgtctcaatcttaaggactactgtgcaccacgcgttccctgtcgttactgagaataggggtaatgaaaaggaatttatgaagggaaaccagctgattagcaacaacattaaatttaagaaaagcagcattcttactcgagccggtgagcagcgcaagcgaagtcaatccatgaaatcttacccgtccagtgagctgaggaacatgtgcgatgagcatatcgccagtgaagaaccagccgaaaaagaagacttacttcagcaaatgctagagagacgctacaccccatatccaaacttgtacccggatcagagcccctcagaagactggactatggaggagaggtttcgcccattgaccttccacggcctgattctaagatcacagcttgtgaccctcctggtaaggggtgtctgttatagcgagtcccaatcttccgctagccagccccggttgtcttacgcggaaatggctgaggattaccccaggtaccccgatatacatgacctggacctgactttgcttaacccacggatgatcgtcgatgtgacaccttatatgaatcccagccctttcaccgtaagtcctaatacccatgtaagccaggtcttcaatctctttcggacgatgggtcttcggcacctccctgttgtgaacgccgttggcgaaattgtcggaattatcacacgacacaatttaacctatgagttcctacaggctaggctgcggcagcattatcagaccatttag

SEQ ID NO: 182753 - DNA, 2544 bp, synthetic construct
  misc_feature 1..2544: note = Description of Artificial Sequence: Synthetic coding sequence
  source 1..2544: mol_type = other DNA
atggccggctgccggggcagcctgtgctgctgctgccggtggtgctgttgctgcggtgagcgagagactaggacccccgaggagttaacgatattaggggagacgcaagaagaggaggatgagatcctgcctagaaaggattacgaaaaaggccggaggtatgaggcggttaagtggatggtcgtcttcgccattggtgtctgtaccgggcttgtgggacttttcgtggacttcttcgtgcgcctgttcacccagctcaagtttggggtggtccaaacctcagtggaagagtgcagtcagaagggttgccttgccttgtccctgctggagcttcttgggtttaacctgacctttgtgtttttagcctctctgttggtccttatagagcccgttgccgcaggctcaggaattcccgaggttaaatgttatcttaatggcgttaaagtgcctggaatcgttcgtcttcgtaccctgttgtgcaaagtactgggagtgttatttagtgtcgctggcggtttgttcgtggagaaggagggtcccatgattcattcagggtccgtcgtgggggctggcctaccacagtttcagagtatttcactgaggaagattcagtttaatttcccgtattttcgcagcgatcgcgacaagagggactttgtctcagcaggtgccgctgctggagtggccgccgctttcggcgcaccaatcggcggcaccctgttcagcttggaggaggggagctccttttggaatcagggcctgacatggaaggtgttgttttgctcgatgtcagccacattcacactgaacttctttaggtccggtatccagttcgggtcatggggctcgttccagctgcctggtctcctaaactttggagagtttaaatgctctgactctgataaaaaatgccacctgtggactgcaatggatctgggctttttcgtggtgatgggggtcatcggcggactgctaggggcaacttttaattgtctcaacaagcgcctcgcaaaatacaggatgcgcaacgtgcatcctaagcccaagctcgtccgagtgttggagtccctactggtgtccctagtgacaacggtggtggtgttcgtggccagcatggttctgggagagtgccggcagatgtcttcaagttctcagattggaaacgattcttttcagttgcaggtcaccgaagatgttaattcttcaattaaaaccttcttttgccctaacgatacttacaatgatatggccacactctttttcaaccctcaggagagcgccatccttcaactatttcatcaggatggtaccttctcgcctgttaccctcgccctttttttcgtgctgtactttttactagcttgctggacgtatggcatatctgtgccttctgggctgttcgtcccaagcctgctttgtggcgctgcctttgggaggctagtcgccaacgtgctaaagtcatatatcggcctcggccatatttatagtggtacattcgcactcattggtgctgcagccttcttaggcggcgtggtccgaatgactattagtctgactgtgatcctgattgagtcaaccaatgagatcacatacggccttcccattatggtgaccctcatggtggccaaatggacgggtgatttctttaacaaaggcatttatgatattcacgtgggcctgaggggcgtccctctgctcgaatgggaaaccgaagtggagatggataagttgcgggcgagcgacattatggagccaaatctgacctacgtgtacccccatacccgaattcagtcgctcgtctctattctccggacgacagtgcaccacgcctttcccgtggttactgagaataggggtaacgaaaaagagtttatgaaaggcaaccagctgatttcaaacaatatcaagtttaagaagtcctcaatcttgacccgggccggcgaacaaagaaagaggagccagtcaatgaagagctacccatccagtgagttgcgcaacatgtgcgatgagcacattgcatcagaggagcctgccgaaaaggaggatctgctgcaacagatgctggaacggcggtacactccctatccaaacctgtatcccgatcagtctccgtcggaggactggaccatggaagagaggtttcgccctctcactttccatggattgatattgcgttcacagttggtcacattgcttgtccgtggtgtgtgctattctgagagtcagtcttccgcgtctcagccgcgtctttcatacgccgagatggcagaagactaccctagatatcccgacattcacgatcttgatctcacccttctcaatccaagaatgatagtcgatgtaacaccctatatgaatccaagcccctttaccgtatctccgaacacacatgtgtcacaggtgttcaacttgttccggacaatggggctgaggcatttgcctgttgtgaacgccgtcggcgagattgtaggcataatcacaagacataatctgacatatgagttcctccaggctcgcttacgccagcactaccagaccatttag

SEQ ID NO: 182754 - DNA, 963 bp, synthetic construct
  misc_feature 1..963: note = Description of Artificial Sequence: Synthetic coding sequence
  source 1..963: mol_type = other DNA
atggccggctgccggggcagcctgtgctgctgctgccggtggtgctgctgctgtggcgaacgggagaccaggacacctgaggaactgacgatcttgggcgagacacaggaagaggaagatgagatcctcccaagaaaagactacgaatccttagattatgaccgatgtataaacgatccttacctagaagtcctcgagactatggacaacaaaaagggccgcagatatgaggcggtgaagtggatggtggtctttgcaatcggcgtctgcaccggattagttggcctcttcgtggatttcttcgtgcgtttgtttacccaattaaagttcggtgtggtgcaaacatctgtggaggaatgcagtcagaagggatgccttgccctgtctttgttagaactgctggggtttaacctcacctttgtcttcctggcgtccctgctggtcctgattgagccggtggccgccggatctgggatccctgaggtgaagtgctacctgaacggcgtgaaggtgccagggattgtgcggctgaggaccttactgtgcaaagtcctgggcgtgctgttcagcgtggctggtggactatttgttgagaaagagggtcctatgattcactccggatcagtggtgggcgccggactgccccaattccagtctattagccttcgaaaaatacagtttaacttcccttactttagatcagatcgctacgggaagcgacaggagaggttgtgcataagccgctccgggtgctggagttgctgctcatttcgaggtgccaatcggggctaccttgttcagtctcggggcgggtttgtgcttctggaacctagagcgcacgtagaaagcgcattactttttcatgtgtgccacctgcatcctcaactgctcccgttctgggactcggtatggaagctggggttcctacccgccccttggatcgccgagctttggcgagtttag

SEQ ID NO: 182755 - DNA, 927 bp, synthetic construct
  misc_feature 1..927: note = Description of Artificial Sequence: Synthetic coding sequence
  source 1..927: mol_type = other DNA
atggccggctgccggggcagcctgtgctgctgctgccggtggtgctgctgctgcggcgagagagagacccggacacctgaagaactgacaattctcggcgaaacacaggaggaagaagacgagatcctgcctaggaaagattacgagagtctggactatgatcgttgcatcaacgacccctacctggaagtactggagaccatggataacaagaaaggccgccgctacgaggcagtgaaatggatggtcgtcttcgccatcggtgtgtgtactgggctggtgggtttgttcgtcgatttctttgtgcgtttgtttactcagctgaagtttggcgtggttcagacatctgtggaggaatgtagccaaaaaggatgcttagccctgtccctcttggagctgcttggattcaacctcacctttgtgtttctagctagccttctggtcctcatcgagcccgtcgccgcggggtccggcatcccagaggtgaaatgttatctgaacggcgtgaaagtacccggcatcgtccggctgagaaccctgctttgtaaggtcctgggggtgctcttttcagtggctgggggcctgtttgttgagaaagagggacctatgatacactctggaagcgtggtgggagctggtctgccgcagtttcagtctattagcctgagaaaaatccagttcaacttcccctacttcagatcagaccgcagcgggtgctggagttgctgctccttcagaggagccaacaggggatacttggtgcaatctagaggcggattcgtgttgttggagccccgagcccatgttgagagcgccctcctgtttcacgtttgtcacttgcatccccaactcttgcctttctgggattccgtgtggaagctaggatttctgccagctccctggatcgccgagctgtggagagtttag

SEQ ID NO: 182756 - DNA, 1062 bp, synthetic construct
  misc_feature 1..1062: note = Description of Artificial Sequence: Synthetic coding sequence
  source 1..1062: mol_type = other DNA
atggccggctgccggggcagcctgtgctgctgctgccggtggtgctgttgctgcggggaacgcgagacccggactcctgaagaactcacaattttgggcgaaacgcaagaagaggaagacgagatccttcctaggaaagattatgagtcacttgattacgacagatgcataaacgacccatacctggaagtcctcgaaaccatggataacaaaaaaggacggaggtacgaagcggtaaagtggatggtggttttcgccataggggtctgcaccggcctggtcggcctgtttgtggacttctttgtgcgcctctttacgcagctaaagtttggagtggtgcaaacatcagtggaagaatgctcccagaaaggctgcctcgccttaagtctgttagagttgttggggtttaacctcaccttcgtatttctggcgagtctactggtgctcatcgagcctgtggctgcaggatcaggcattcctgaggttaagtgctaccttaatggcgtcaaagtgccaggaattgtcaggctgcggactttactctgcaaggtgcttggggttctgttctccgtggctgggggtttgttcgtcgaaaaggagggccccatgatccattcagggagcgtggtgggagctggtctccctcagtttcagagcatatccctgagaaagatccagtttaacttcccatacttccgcagcgacagagacaagagggacttcgtctcagctggagctgcagcaggcgtggccgccgcctttggtgctccgattggcggaacactattttcactcgaggagggctcgtctttttggaaccaaggactcacttggaaagtgttgttctgttctatgtctgccacttttaccctgaatttcttcagaagcggcattcagtttggttcttggggatctttccagctccccggtcttctcaacttcggggaatttaagtcgcttagggaacctccctgtgtgagtggtaatcatcgagggggagtctgtggcctcgatggcgtccgccggatgccaactgatgtgctattcgaaagcaaccgctag

SEQ ID NO: 182757 - DNA, 2862 bp, synthetic construct
  misc_feature 1..2862: note = Description of Artificial Sequence: Synthetic coding sequence
  source 1..2862: mol_type = other DNA
atggccggctgccggggcagcctgtgctgctgctgccggtggtgctgctgctgtggcgagcgagaaacgcggaccccagaggaattaaccatcctcggggagacacaggaggaagaagacgaaatcctgccacgaaaggactatgagtccctggactatgatcgctgtattaacgacccttacctcgaggtgctagagacaatggataacaagaaagggcgcagatacgaggccgtcaagtggatggtcgtattcgcgatcggggtgtgcacggggctcgtgggtctctttgtagactttttcgtgaggctgttcacacagctgaagttcggggttgtgcaaaccagtgtcgaagagtgctcacagaagggctgtcttgctctgtctctgttagagctgttgggcttcaatctgacgttcgtgttcctggcttccttgctcgtattgatcgaaccagtcgcggcaggaagcgggatccctgaagtgaagtgttacctcaacggcgtgaaagtaccaggaatcgtgcggctgagaacactcttatgtaaggtcctcggtgttctgttttctgtggccggggggctctttgtggaaaaagagggacccatgatccatagcggctctgttgtgggcgcaggactgccacagttccagagtatttctctgaggaaaattcaatttaattttccatatttccggagtgaccgagacaaacgggattttgtgagcgctggggccgcagcaggcgttgccgccgccttcggtgccccaatagggggaactctgtttagcctcgaggagggcagcagtttctggaatcaagggctgacctggaaagtgctgttttgctcgatgtcagccacctttacactaaacttcttccgatcaggaatccaatttggaagttgggggtcatttcaattacctgggcttcttaattttggggagttcaagtgtagtgactctgataaaaagtgccacctctggacagccatggacctcggattcttcgttgtcatgggggttatcggcgggttgctcggcgcaaccttcaactgtctgaacaaacgtctcgctaaatacaggatgaggaacgtgcatcccaagcccaagctggtcagagttctggagagcctactggtttcactcgtcacaacagtggtggtttttgtggccagtatggtattgggcgagtgccggcagatgtctagttcctcgcagatcggcaatgactccttccagttacaagtgacagaagacgttaatagttccattaagacctttttttgccccaacgacacatataatgacatggccacactgtttttcaatcctcaggaatccgccatcttgcagctcttccatcaggatggtacgttttcacctgtaacactcgccctgttcttcgtactgtatttcctgctggcctgctggacctacggaattagcgttccatccgggctcttcgttccttctctgctatgcggggcagccttcggccgcctggtggcaaatgtgcttaaatcctacatcgggctgggacatatctattcaggcaccttcgcccttatcggtgcggctgcctttctcggaggagtggttagaatgacaatttcgctgacagttatattaatcgagtcaactaacgagatcacctacgggcttccaattatggtgacattgatggtggccaagtggacaggagacttttttaacaagggaatttatgacatacatgtgggcctccgaggcgtgccattgctggagtgggagacagaggtcgaaatggacaagctgcgggccagtgacatcatggagcccaatctgacttatgtttacccacacacccgcatccagtctctcgtgtccattttgaggactaccgtgcaccatgcctttccagtggttactgaaaaccggggtaacgaaaaggagttcatgaagggcaaccagctgatttccaacaatattaaatttaaaaagtctagcatcctcacgagagctggagagcagcgcaagaggagtcagagcatgaagtcatatccttcatccgaactgcggaatatgtgcgatgagcatattgccagcgaggagcctgccgagaaggaggatctcctccagcagatgttagagagacgctacaccccctacccgaacctgtaccccgatcagagcccttcagaggattggacaatggaggagcggttcagacccctcactttccacgggctaattctgcggagtcagctggtgacattgctggtccgcggtgtctgttacagtgaatcacagtcctctgcctctcagccaagactgagttacgccgagatggctgaggactaccccaggtatcctgacatccacgacctggacctaactctgctgaaccccaggatgattgttgatgtgaccccatacatgaacccctcaccttttactgtgagccccaatacacatgtgtcacaggtttttaatctgttcaggaccatgggactgcgccatctcccagtcgtgaatgccgtcggagaggtgtctgaggcaccggctctgccacctcccttgcgtgaagaccctttggcccgctgttgtttgtgtacccaagcgtcacatcagaagcgccgccacccgacgcgacggggggagtgcgggcctaccctggcactcaacccagcgcggttaccgtgcacacgtgacccattcccctgcctgccggctgacgggacgtcagttcccctggctgtcctgagctcccaatctagggcgagtacacgtttatgtctgcccccggagatgttgcttttcaccccttatcactggtgtagtctcgtgcttcatctccgacgagacctgcgcatacgttag

SEQ ID NO: 182758 - DNA, 369 bp, synthetic construct
  misc_feature 1..369: note = Description of Artificial Sequence: Synthetic coding sequence
  source 1..369: mol_type = other DNA
atggccggctgccggggcagcctgtgctgctgctgccggtggtgctgttgctgcggtgaacgggagaccaggacacctgaggagctgaccatccttggggaaacccaagaagaggaagatgaaatcctgccgcgcaaggattatgaatcgctcgattacgaccgctgtataaacgacccctacctggaagtcctcgagaccatggataacaagaaagggagacgctatgaggcggtcaaatggatggtagtgtttgccattggcgtgtgcaccggacttgtggggctttttgttgatttttttgtgcggctcttcacgcaactaaaatttggagtggtacagacatataagttccagatgaagatgtag

SEQ ID NO: 182759 - DNA, 2277 bp, synthetic construct
  misc_feature 1..2277: note = Description of Artificial Sequence: Synthetic coding sequence
  source 1..2277: mol_type = other DNA
agcccccggagcgccctgttccgggtgggccacatgagcagcgtggagcttgacgatgagctcctggatcctgacatggacccaccccacccattcccgaaggagatcccacataatgagaaactcctgtccctcaaatatgagagcctggactacgacaactccgaaaaccagctgttcctggaggaggaaaggaggatcaaccatacagccttccgcacagtggagatcaagcggtgggtgatttgtgccttgatcgggatcctcactggcctcgtggcctgctttattgacatcgtggtagagaacttggcaggactgaagtaccgggtgataaaggggaacattgataagttcactgagaagggagggctgtccttctcactgctgctttgggccactttgaatgctgcatttgttctagtgggctccgtcatcgtcgcattcatcgagcccgtggcagccggatctggcataccccagatcaagtgttttctaaatggcgtgaaaattccccacgtggtccgcttgaaaacattagtgatcaaggtttccggcgtcattctgtcagtcgtggggggactcgccgtgggaaaggaaggccctatgatccactcgggcagcgtgatcgctgccggtatctctcaggggcgttctacgtccctcaaaagggacttcaagatttttgaatacttccgccgagacacggaaaagagagacttcgtgagtgcgggcgctgcagccggcgtgtctgcagccttcggggccccggtggggggcgtgctgttttccctggaggaaggggctagtttttggaatcagtttttaacttggcggatcttcttcgcatccatgataagcacctttacactgaatttcgtgctgagtatctaccacggtaatatgtgggacctcagcagtccaggactgatcaatttcggtagattcgactctgagaagatggcttatactattcatgaaattccagtcttcatcgcaatgggtgtcgtgggcggggtactcggcgcagttttcaatgcactcaactattggctgaccatgttccgaattcgctatatacaccgaccctgtctacaagttatcgaagcagtgctggtggcggctgtgactgccactgttgcattcgtgttgatatattcaagccgggactgccaacccctgcaggggggatctatgtcctatcccctgcagctgttctgtgccgatggcgaatacaattctatggcagcggctttttttaacactcctgagaaaagcgtcgtgtcactcttccatgacccacctggctcctacaacccactgacacttggcctcttcaccctggtgtattttttccttgcatgttggacatacggcctaaccgtgtcagccggtgtgttcatccctagtctactgattggcgctgcctgggggcgcctgttcgggatttcgctgagttacctgaccggcgctgccatctgggcagatcccggcaagtacgcccttatgggggctgccgcacagctcggaggcatcgtaaggatgacgcttagtctaactgtgatcatgatggaagctacgtctaacgtgacgtacggttttcccatcatgctagtgctgatgacagccaagattgtgggcgatgtttttatcgaagggctgtacgacatgcatatccagttgcagtctgtaccctttctgcattgggaagctccggttacatcacattcattgactgccagagaggtgatgtcgacacccgtcacatgtctgagacgccgggagaaggtgggggtgattgtcgacgtgctgtctgacacagccagcaatcacaacggcttccccgtggtggagcacgccgacgatacccagccagcacgcctgcaggggcttatcctcaggtcacagctgattgtgctcctgaagcacaaggtgttcgtggaacgcagtaacctaggacttgtgcagcggcggctgcggctgaaggactttcgggatgcctatcctagatttcccccgatacagtccattcacgttagccaagatgaacgtgagtgcacaatggatctttccgagtttatgaaccccagcccatataccgtaccacaggaagcaagcctgccaagagtgttcaagctcttccgagccttaggccttcggcaccttgtcgttgtagataaccgaaaccaggtcgtgggccttgttacaaggaaggatcttgcccgctatagacttggcaaacgtggacttgaagaactgtctctggctcagacgtag

SEQ ID NO: 182760 - DNA, 2418 bp, synthetic construct
  misc_feature 1..2418: note = Description of Artificial Sequence: Synthetic coding sequence
  source 1..2418: mol_type = other DNA
atggccaacgtgagcaagaaggtgagctggagcggccgggaccgggacgacgaggaggcagccccactactcaggaggactgccaggcccggaggtgggacaccactgctgaatggcgccgggccaggggccgcacgtcagtctcctaggtccgccctgttccgggtcggccacatgtcctccgtagagcttgatgacgagcttttagaccccgacatggatcccccgcacccttttcctaaggagattcctcataacgaaaaactgctatcacttaaatatgagtcgttggactatgacaactctgagaatcagctgtttctggaggaagagcgacgcattaaccacacggcttttcgaacagtcgaaatcaaacggtgggtgatctgtgctctgattggaatcctgaccgggctcgtggcatgcttcatcgacattgtcgtggagaatcttgcaggtcttaagtatagggtgataaaggggaatatcgataaatttacagagaaaggcgggttgtcgttctctctgctgctgtgggctaccctgaatgccgccttcgtgctggtgggttcagtaatcgtggcgtttattgaacccgtggccgccggatccggaatcccccagataaagtgtttcctgaacggcgtgaaaatcccacatgtggtaagattgaagactctggttattaaagtcagcggcgtgatcctatctgtggtaggggggttggctgtgggcaaggaagggccaatgatacattcagggtctgttattgccgcgggcataagccagggccgaagtacatccttaaaaagggacttcaaaatatttgaatattttaggcgggataccgagaagcgggactttgtgtccgccggagccgccgccggcgtatccgcagccttcggcgcaccggtcggtggcgtcttgttctctctggaggagggcgctagtttttggaatcaattcttgacatggcgcatttttttcgcatcgatgatctccacattcactctcaacttcgtcctctctatttaccacggtaatatgtgggatctcagctcacctggacttattaatttcggcagattcgactctgagaaaatggcatatacaatccacgagatccccgtctttatcgcaatgggggttgtgggcggagtgttgggcgctgttttcaacgccctcaactattggcttactatgttcaggatccgttatattcacagaccctgccttcaagtgatagaagctgtgctcgtggcagcagttaccgctactgtggcttttgtcctgatctattcaagccgcgattgccagcctttgcaaggtggtagtatgtcatacccactccagttgttttgtgccgatggggagtacaattccatggcggcggccttctttaacacaccagagaagagcgtggtgagcctgttccacgacccacccgggtcttacaatccattgactttagggctttttaccctggtgtatttttttttggcctgctggacatacggtttgactgtcagtgccggagttttcataccctctctgctgatcggtgcagcttgggggaggctctttggtatcagtctctcctacctgacaggcgccgctatctgggcggatccaggtaagtacgccctgatgggagctgcagctcagttgggcggcatcgtgcgtatgacactctctctgactgtcataatgatggaggcaacttcgaatgtgacctacgggtttccaattatgttagtactgatgacagcaaagattgttggcgacgtgtttatcgaaggcctgtatgacatgcatatacagctgcagagcgtcccttttctccattgggaggctccggtgacgagtcactctctgactgcgagagaagtgatgtcaacccctgttacttgtctccgcagaagggaaaaagttggtgtgatagtcgatgtcctttctgatacagcgtcaaaccataatggattccccgtagtagaacacgcagacgatacccagccagccagactgcagggcctgattctgaggtcgcagttgattgtgctcttaaagcataaggtgttcgtggagagaagtaacctcgggctggtccagcgcaggctaagactaaaggattttcgagacgcgtaccctcgattccctcctatacaatcaatacatgtgagtcaggacgaacgtgagtgtaccatggacctgtctgagtttatgaacccctccccgtatacagtgccccaggaagcctcccttccccgggtctttaagttattccgggccctgggcctgagacacctggttgtggtcgacaaccgaaaccaggtcgtaggcctagtgactcgtaaggacctcgccagatacagattgggaaagagaggcctcgaggagctttccctggctcagacatag

SEQ ID NO: 182761 - DNA, 2244 bp, synthetic construct
  misc_feature 1..2244: note = Description of Artificial Sequence: Synthetic coding sequence
  source 1..2244: mol_type = other DNA
atgagcagcgtggagctggacgacgagctgctggaccccgacatggaccccccacacccttttcccaaggagattcctcacaatgagaagctccttagcctgaaatacgagagcctggattatgataattctgaaaatcagttgtttcttgaggaagagcgccgcattaatcacacagcattccgaacggtagaaatcaagcggtgggttatttgcgctttgatcggcatcttgaccggactggtggcgtgtttcatcgatatcgtagttgaaaacctggccggcctcaaatatcgggtaattaagggcaacattgataagttcaccgaaaaaggggggttgtcattttctctactgttatgggcgaccttgaatgcagcttttgtcctagttggaagtgttattgtcgcctttatcgaacccgtggcggccgggagcggtattccccagatcaaatgtttcctgaacggggttaaaatccctcacgtggtgcgcctcaaaactttggttatcaaagtcagtggagtcatcttaagtgtagtgggaggtttagcagtcggcaaggaggggcctatgattcactctgggagcgtgattgccgccggcatttcccagggcaggagcacatccttgaagcgggactttaaaattttcgagtacttcagacgcgacaccgagaagcgcgatttcgtgagcgctggggcagccgcaggagtctccgcagctttcggcgctcccgttggcggcgtgctattcagccttgaggaaggggcctctttttggaatcagtttctaacctggcgtatcttttttgcatctatgatcagtaccttcaccctcaactttgtgctatccatctatcatggtaatatgtgggacttgtcttctcccggactgatcaactttggaagattcgatagtgaaaagatggcttacacaatacatgaaattccagttttcatcgccatgggggtggtgggaggtgtgctgggggccgtgttcaatgctctgaactactggcttacaatgttccgtattagatatatacatagaccgtgtctgcaggtaatagaagcagtgctggttgcagcggttaccgccacagtagcgttcgtgctaatttactcgtcccgcgattgccaaccactgcagggcggctctatgtcttaccccctacaactgttttgcgccgacggagagtacaatagtatggcggcagcttttttcaatacacctgaaaagagcgtggttagtttatttcatgacccccccggttcttataatcctctaactctgggactgtttaccttggtgtacttctttctagcctgctggacctacggcttgactgtcagtgctggtgtgttcatcccgtccctgttaatcggggcagcttgggggcggctttttggtatatctctgtcctaccttactggcgcggccatctgggctgaccccggcaaatacgccctgatgggggcagccgctcaactcggtggaattgtccgcatgactctctccttgaccgtgattatgatggaggccacctctaatgtgacttacggttttccaattatgctggttctaatgactgctaaaatagtaggcgatgtgtttatagaagggctgtatgacatgcacatccagctgcagtccgttccctttctgcattgggaggctcctgtgacttcgcattcactgacagctcgcgaggtaatgtctaccccagtgacctgtctccgccgaagggaaaaggtgggcgtgatcgtcgatgtgctgagcgatactgcaagcaatcataacggcttccccgtagttgaacatgccgacgatacgcagcccgcccggctgcaggggctaatcctgagatcacaactgatagtactcctcaagcataaggtgtttgtggaaaggtcaaacttgggattagtccagcgtcgactgcgattaaaggacttccgcgatgcatacccgaggttcccccctatccaatcaatacatgtgagccaggacgagagagagtgcacaatggatctatctgaatttatgaacccaagcccttatacagtaccccaggaagccagtctaccccgggtgttcaaactgtttagagctctgggcctacgtcacctggtcgtagtagataatagaaaccaggtggtcggtctggttaccaggaaggacttggcgcgctataggttgggaaagaggggcttggaggagctctctcttgctcagacctag

SEQ ID NO: 182762 - DNA, 2346 bp, synthetic construct
  misc_feature 1..2346: note = Description of Artificial Sequence: Synthetic coding sequence
  source 1..2346: mol_type = other DNA
atggccaacgtgagcaagaaggtgagctggagcggccgggaccgggacgacgaggaagcagccccattactccggaggaccgctcgcccaggcggagggacaccacttcttaatggcgctggacctggggctgcccggcaagacatggatccaccccatccttttcccaaggaaatccctcataatgaaaaactattgtctctgaaatatgagtccctggattacgacaatagcgaaaatcagctgttcctcgaggaggaaaggcgaattaatcacacggcctttcgaaccgtggagattaaaaggtgggtgatctgtgcgcttatcggcatcctgacagggttggtcgcctgcttcatcgatattgtagtggagaatttggctgggcttaaataccgggtgataaaggggaatatagataaatttacagagaaaggaggtctcagcttcagcctcctgctctgggcaaccctgaatgctgctttcgtgctggtgggcagtgtcattgtcgcatttattgagccggtggcagcagggtccgggataccccagataaaatgcttcctaaacggagtcaaaattcctcacgttgttaggctgaaaacgctggtcattaaggtttcgggggtgatcctcagcgtggtgggcggactggccgtaggcaaagaggggcccatgattcactccggaagtgtgatagcagcagggatcagtcaggggcgaagtacttctctgaaaagagattttaagattttcgagtactttaggagggataccgagaagagagacttcgtgagcgcgggggccgcagcgggggtttccgcagccttcggggctcccgtaggtggcgtgctgttttcattagaagaaggagcttccttttggaatcagtttctaacctggcggattttttttgcaagcatgattagcacttttaccttgaattttgttctgagcatctatcatgggaacatgtgggacctgtcctcccccggtctgatcaatttcggacgattcgactctgagaagatggcttatactattcacgagatcccggtctttattgctatgggggtggtcggcggggttcttggagccgtcttcaacgcactgaattattggctaactatgttccgcatccgctatatacatcggccatgtttgcaagtgatcgaggccgtgttagttgctgccgttaccgcaacagtggccttcgtcctgatctattcgagccgtgactgccaacccctgcagggggggtccatgtcttaccctttgcagctgttctgcgccgatggcgagtacaatagcatggcagccgccttctttaacacgccagaaaaatctgtagtgtcgctctttcatgacccacctggttcctacaatcctctgaccctgggcctgtttactctcgtctattttttcctagcctgttggacttatgggctaaccgtgagtgcgggagtcttcattccatctctgcttattggggccgcttggggccgcctcttcggcatttcactgagctacctgactggggccgccatatgggcagaccctggtaaatatgctctgatgggagcggcagcccaacttggcggtatagtgcgcatgactctctccctgacggtcattatgatggaggccacgtcgaatgtcacatacggctttcccataatgttggtgctcatgaccgccaaaatagttggcgacgtattcatcgaaggactttacgacatgcatattcagctgcagtcagtacctttccttcattgggaagctcccgtaacctcgcacagcttgacagcgagagaggtgatgtccacccctgtgacctgcctgagaaggagggaaaaggtcggtgttattgttgatgtgctctctgatacagcatcaaatcacaacgggttccccgtggtggagcatgccgacgacacacagccagcgagactccaggggctcatccttcgcagtcaactaattgtgctactgaaacataaggtcttcgtggagaggagcaatttgggtctggtccagaggcgactgcggctcaaggactttagagacgcatatccacgcttcccacctatacaatctatccacgtatcccaagatgaacgggagtgcaccatggacctctccgagttcatgaatccttcgccctatacggtgccccaagaagcttctctgccacgggtgtttaagctttttcgcgcactcgggttgcggcacctggttgtggtggacaaccgtaatcaagtagttggtttagtcacccggaaagacctggctcgataccgcttgggcaagaggggactggaggagctgtccctagctcagacttag

SEQ ID NO: 182763 - DNA, 1545 bp, synthetic construct
  misc_feature 1..1545: note = Description of Artificial Sequence: Synthetic coding sequence
  source 1..1545: mol_type = other DNA
atggtgctggacctggacctgttccgggtggacaagggcggcgacccagcgttaatcagggaaacccaggaaaaacgattcaaggatcccggtctggtcgaccagcttgtgaaggcagattcagaatggaggaggtgccgatttcgagccgataatctcaataaactgaaaaacctctgctccaagacaataggggagaagatgaaaaaaaaagagcccgttggcgacgatgagtccgtccccgagaatgttctgagctttgatgacttgaccgcagacgcactcgcaaacctgaaggttagccagatcaagaaggtgcggctgttaatagatgaggccattctcaaatgcgatgccgaaagaatcaaacttgaagccgagagattcgaaaatctgagggagataggcaacctcttgcacccgagcgttcctatatccaacgatgaggacgtagacaacaaagtggaacgtatctggggagactgtacagtaagaaagaaatatagtcatgtggacttggtggtaatggtagacggcttcgaaggcgaaaaaggggccgtcgttgctggctctcggggttacttcctgaaaggtgttctggtcttcctggagcaagctcttatccaatacgcacttcgcactttgggttcccgaggatacattccaatctacactccattcttcatgcgtaaagaagtcatgcaagaggtagcccaattatcccagttcgacgaggagttatacaaggtaattggtaagggtagcgaaaagtccgatgataattcctatgatgagaagtacttgattgccacttctgaacagccaattgccgctctgcaccgtgacgagtggttacggccagaagatttgcccatcaaatacgccgggctgagcacatgtttcaggcaagaggtgggttcccacggtagggatacaaggggaatttttagagttcaccagttcgagaaaattgaacagttcgtgtattcctccccccatgataacaagtcctgggagatgttcgaagagatgattacaacggctgaagagttctaccagtcactggggataccatatcatatcgtgaatatcgtcagcggctccttgaaccacgccgcctcgaaaaaactggatctagaggcctggttcccaggaagtggcgcattccgcgaactggtgtcctgttcaaattgcaccgattaccaggcgcgaagactgagaattcgatatgggcagactaaaaagatgatggacaaggtggaattcgtacacatgctgaacgctacaatgtgtgccaccacccggaccatctgcgcaattctcgagaattatcagaccgaaaagggcattacggttccagaaaagctgaaagagtttatgccccctgggttgcaggagctcatccccttcgtcaagcccgcccccatagagcaggaaccttccaaaaagcagaagaaacaacatgagggctctaaaaagaaggcagcagcacgtgacgtgactctcgaaaatagactgcagaacatggaagtgaccgatgcctag

SEQ ID NO: 182764 - DNA, 2745 bp, synthetic construct
  misc_feature 1..2745: note = Description of Artificial Sequence: Synthetic coding sequence
  source 1..2745: mol_type = other DNA
atgggccccttcaagagcagcgtgttcatcctgatcctgcacctgctggagggagccctgtcaaattccctgatccagctaaataacaacggatatgaggggatcgtcgtggccatcgaccccaatgtccccgaagatgagacactgatccagcagatcaaggacatggtgacccaggcctccctttacttacttgaggccaccgggaaaagattctacttcaaaaacgtcgccatcctcattcctgagacatggaagactaaggccgactacgtgaggccaaagttggaaacgtacaagaacgcagacgtgctggttgccgagagtaccccacccgggaacgatgaaccctataccgaacagatgggaaattgcggtgagaagggcgagcggatccatctgacccctgactttattgctggcaagaaactggccgaatatggtcctcaggggcgcgcgtttgtgcatgagtgggcacacctgcggtggggagtgtttgacgaatataataatgacgagaaattctacttgagcaacggaaggatccaggctgtcagatgcagcgccggtatcactgggaccaacgtcgtcaaaaaatgtcagggggggtcttgctacaccaagcgatgcacattcaataaagtgaccggcttatacgaaaaggggtgtgagtttgtgttacagagtagacagactgaaaaggcctctataatgtttgcgcagcacgtggactcgattgtggagttttgtacagagcagaaccacaacaaagaggctcctaacaaacaaaaccaaaagtgtaatctgcgctctacctgggaggtaattagagacagtgaggatttcaagaaaactacccctatgaccactcaacctcccaatcctacattttccctcctgcaaatcggacaacgcatcgtgtgcctggtcctcgacaaatctggcagtatggctaccggaaacaggctgaaccggctgaaccaggccggtcagcttttcttgctgcaaactgtggagttgggaagttgggtgggaatggtcacgtttgatagcgccgcgcatgtgcagaacgagctgatccagatcaactccggaagtgatcgggataccctagcaaaacgactgcccgccgctgcttcagggggcacatctatttgtagcggactgagatctgcttttacggtaattcgcaagaagtaccccacagatggctcagagattgtgcttctcaccgatggagaggataacacaatctctgggtgtttcaacgaggttaagcagagcggggctattattcacacagtggctcttggaccttcagcagctcaagagctggaggagctgagcaaaatgacagggggactgcagacctacgctagcgaccaggtgcagaataatggtttgatcgacgcttttggggccctgtcatccggtaacggtgccgtctcacagagatcaatccagttggagagcaagggcctcacactgcagaactcgcagtggatgaacggtactgtcattgtggattccactgtcgggaaagacactctgttcctcattacttggacaatgcagccccctcaaattctgctctgggacccgtctggacaaaagcagggaggctttgtagtcgataaaaacaccaaaatggcctacttacagatcccgggtatagcaaaggtggggacctggaagtactctttgcaggcatctagtcagaccttaacactcaccgttacttctagggcttccaacgccacccttccccccattaccgtaacctcgaaaaccaataaggacaccagtaagttcccctcacccctcgtcgtgtacgccaatatccggcagggcgcctccccaatcttgagagcatccgtcactgccctgattgagagcgttaacggcaagacggtcacgctggaactcctcgacaatggagctggagcagacgctactaaagacgatggcgtttatagcaggtacttcacaacctatgataccaatgggcggtattcagtgaaagtccgggccttaggtggagtgaacgcagcccggcgacgtgtgataccccagcagtcaggtgccctgtatatcccaggctggattgaaaatgacgagattcagtggaatcctcctcgccctgagatcaataaagatgatgttcagcacaaacaggtatgcttcagcagaactagtagcggcgggtccttcgtggcatctgatgtcccaaacgcccctattccagacctcttccctcctggccagatcactgatctaaaagctgagatacacggcggcagtttaataaatctcacctggaccgcccccggtgatgactacgaccatgggaccgcccacaaatatattattagaatttccacgagcatactcgatctgagagataaattcaacgaaagtcttcaagttaatacaaccgcgctgattcccaaagaagcaaattctgaagaagtgttccttttcaaacctgaaaatataactttcgagaacggcacggacctgttcatagccatccaagccgttgataaggtggacttaaagagtgagatctctaacatcgcgcgagtgagtttgtttattcccccacagacaccccctgagacgcccagcccagacgaaacaagcgcaccgtgtcccaacattcatattaattccactattcccgggattcatatcttaaagatcatgtggaaatggatcggcgagctgcagctgagcatcgcatag

SEQ ID NO: 182765 - DNA, 987 bp, synthetic construct
  misc_feature 1..987: note = Description of Artificial Sequence: Synthetic coding sequence
  source 1..987: mol_type = other DNA
atgaccacccagccccccaaccccaccttcagcctgctgcagatcgggcagcggattgtttgtttggtgctcgacaaaagcggaagcatggcaaccgggaaccgactgaatcggctgaaccaagccggccaactatttctccttcagaccgtagaactgggtagctgggttgggatggtcactttcgactccgcagcacatgtgcagaatgagctcattcagattaactccggcagtgaccgcgacaccctggccaaacggctcccagccgccgcttccggtggaacctcgatctgctccggcctccgatcggctttcaccgtaattagaaaaaagtatcctacggacggatccgagatagtgctcctcaccgacggcgaagacaatacaatctcaggatgctttaacgaagttaaacagtctggcgcaataatccatacagtggctttgggtccgagcgccgctcaggagctggaggagctgtcaaaaatgacaggagggctgcaaacttatgccagcgaccaggtgcaaaacaacggcctgatcgacgctttcggcgctctgagcagtggtaatggcgcggtgagccagcgcagtatacagctggagtccaagggactcacgctacagaatagtcagtggatgaacggtacagttatcgttgacagcacagtcggaaaggacaccctctttctgatcacctggaccatgcagcctccgcagatcctgctctgggaccctagcggacagaagcagggtggatttgttgttgacaagaataccaagatggcctacctgcagatccccggaattgcaaaagtcggaacctggaagtattcgctccaagccagttcccagactttgacactgaccgttacgagtagagcttccaatgcaaccctgccacctataacagtgaccagcaaaaccaataaggacaccagcaacctgcccaattcgcagggacaatgccattctccagattag

SEQ ID NO: 182766 - DNA, 2064 bp, synthetic construct
  misc_feature 1..2064: note = Description of Artificial Sequence: Synthetic coding sequence
  source 1..2064: mol_type = other DNA
atggaggagctggtgggcctgcgggagggcttcagcggcgaccccgtgacactccaggaattatggggcccttgcccccatatcagacgggctattcagggagggctggagtggttgaagcagaaagtgttccgactgggagaagattggtactttttaatgacccttggagtgctgatggcgctggtgagctacgccatgaattttgccattggttgcgtcgtgcgggcacaccagtggctctaccgagagattggcgattcgcacctgttacggtaccttagctggaccgtttaccctgtggcccttgtctcattcagctccggattttcccagagtattaccccatcatcaggcgggagcggaattcctgagctcaaaaccatgctggccggcgtaattctggaagattatttagatataaagaacttcggagcaaaagtagtgggactctcatgcaccctagcgaccggtagtaccctctttctggggaaggtcggcccttttgtgcatctgtcagtaatgatcgcagcctatcttggaagagtacgaacaaccactattggcgagccggaaaataaaagcaaacagaacgaaatgcttgtcgcagccgccgccgtcggggtcgccacagtgtttgccgcacctttttcgggtgtcttatttagcatcgaggtaatgtcttcgcacttctccgtacgggactactggcggggcttttttgcagcaacctgtggagcctttatttttagactcttggccgtgtttaactccgaacaggagaccataacttctttgtataagacttcattccgcgtagacgttccattcgatctccccgagattttttttttcgtcgccttagggggcatttgcggcgtacttagctgcgcctatctattctgccagcggactttcctgtcttttattaagacaaatagatattctagcaaactgctggcaacgtctaaaccggtgtactctgctcttgcaacccttttgctagcgtctatcacctaccctcccggcgtgggccatttcttggccagtcggctcagcatgaaacaacaccttgatagcctgttcgacaaccactcgtgggctctaatgacgcagaattcctcccctccctggcccgaagaattagacccccaacatctgtggtgggagtggtaccatccgagatttactatttttggcactctggcgtttttcctcgtcatgaagttttggatgctgatccttgcgacgacaatcccaatgcccgccggatacttcatgcccatcttcatcctgggcgcagccattggcagactcttaggagaagcactcgctgtcgcattccctgaaggaattgtgacagggggtgtgaccaacccaattatgccagggggctatgctctcgcaggcgccgccgcattttccggtgcggtgacccacaccatcagcacagctctgctagcattcgaactgacgggccaaatcgtgcatgccctgccagtacttatggccgttctcgccgcaaacgcgatcgcacagagctgccagccaagcttctacgacgggaccattatagttaagaaactgccatatctacctcggatccttggcagaaatataggctctcaccacgtgagggtggagcattttatgaatcattcaattaccaccctggccaaggacacaccgctggaagaggttgtgaaggtggtgactagtaccgatgtcacagagtatccactggtggagagcaccgagtcccagatcttggtcggaatcgtgcaaagggcgcagctagtgcaggccctgcaggcggagcctccctcgcgagcacctgggcaccagcagtgtcttcaggatatactcgcacgggggtgtccgacagagccagtgaccctgacactatttagtgagacaaccctacaccaagctcaaaatctttttaagctgctaaatctgcagagcctgtttgtcacatcccgcggaagggcagtcggctgcgtttcctgggtagagatgaaaaaagccatctccaacctaaccaatccccccgcccctaagtag

SEQ ID NO: 182767 - DNA, 2061 bp, synthetic construct
  misc_feature 1..2061: note = Description of Artificial Sequence: Synthetic coding sequence
  source 1..2061: mol_type = other DNA
atggaggagctggtgggcctgcgggagggcttcagcggcgaccccgttaccctgcaagagctttggggcccatgtccccacatccgtcgcgccatccagggcggtctggagtggttgaagcagaaggtgtttaggctaggcgaggattggtattttctgatgactctgggcgtcctgatggctctcgtgtcttacgctatgaactttgccatcggatgcgtcgtaagagctcatcagtggctttaccgcgagattggggacagtcacctgctgcgatacctcagctggactgtatatcctgttgccctcgtcagctttagctctggcttcagccagagcataactcctagtagtggaggaagcggaattccggaactcaaaactatgctcgctggcgtgattctggaagactatctggatatcaagaatttcggggctaaggtggtgggcctctcatgtaccctggctactggaagcacactatttctcggcaaagttggcccattcgttcatctgagtgtcatgattgcagcctatctcggacgcgtcaggaccaccacaatcggggaaccagagaacaagtctaaacaaaatgaaatgcttgtggccgccgcagctgtgggcgtggccactgtgtttgcggcacccttcagcggcgtccttttctctatcgaggttatgagctctcatttcagcgtgcgagactactggcgtggcttcttcgccgctacctgcggcgccttcatcttcagattgttggctgtctttaatagtgagcaggaaaccattaccagcctgtataaaacgtcattccgggtggacgtcccctttgacctcccagagatcttttttttcgtggcactagggggaatctgcggggtgctcagctgcgcatacctgttctgtcaacggaccttcctctcattcattaagacaaatcgatactcgtcgaaacttctcgcaaccagtaagccagtgtatagtgctctcgctaccctgttactggcatccattacatacccaccaggggtcggacattttctcgcaagtcggctttccatgaaacagcacctagattctctgttcgacaaccattcatgggctttgatgactcagaatagcagtcctccctggccggaagagctggatccacagcacctgtggtgggagtggtaccatccacgtttcactatttttggcacattagcttttttcctcgttatgaaattttggatgcttatccttgccacgacgattcctatgccagcaggatattttatgcccatttttattctgggagctgcaattgggaggttgttgggcgaggcactggctgtagcttttcccgaaggcattgtaaccggaggggtgaccaacccaatcatgccaggagggtacgccctggccggcgccgcagcattctccggggctgtgacacacaccataagcacagccctactcgccttcgagttgaccgggcagatcgtccacgccctcccagtgctcatggcggttcttgcagcaaacgcaatcgcacagtcttgccagccctccttttacgatgggaccatcatcgtaaagaagttgccctatctccccaggatactgggacgaaacatcggatcgcaccacgtgagggtcgagcacttcatgaaccactctattactacattggccaaagacacccctttggaagaggtggtgaaagtggtgactagcacggatgtgactgaataccccctagttgaatccacagaatctcagattttagtgggtatcgtgcagcgggcccagctggtgcaggcgctccaggcggagccgcccagccgagccccgggccaccagtgtctgcaggacatcctcgcccggggctgtccaacagagccagtcacgctaaccctattttccgagacgactctgcatcaggctcaaaacttattcaagctgctgaacctgcaatcccttttcgtcacatcacgggggcgagctgtgggctgtgtaagctgggtggaaatgaaaaaagcgatttctaatctgaccaacccccccgctccaaaatag

SEQ ID NO: 182768 - DNA, 2061 bp, synthetic construct
  misc_feature 1..2061: note = Description of Artificial Sequence: Synthetic coding sequence
  source 1..2061: mol_type = other DNA
atggaggagctggtgggcctgcgggagggcttcagcggcgaccccgtgacacttcaagagttatggggtccatgtcctcacatccgaagagctatccaaggcggtctggaatggttgaaacagaaggtgttccgactgggtgaggattggtactttttgatgaccctgggagtattgatggccttggtcagctacgcaatgaacttcgcgatcggttgtgtggtgagagcccaccagtggctgtatagagaaatcggcgacagccacctgctcaggtatctgtcatggaccgtctacccagtggcactcgtgagcttcagcagtgggtttagccagtccattaccccatcctcgggcggctccggaatccctgagctcaagacaatgctggccggtgtcattctggaggactacttagacataaaaaactttggtgccaaggttgttggactgagctgtacgcttgctactggaagcaccctttttctcgggaaggtgggcccattcgtacacttgtccgtgatgattgccgcatacctgggccgggtgcgaaccaccacaatcggggaaccagaaaataagagcaaacaaaacgaaatgctagtagccgcagccgccgtaggagtagcaacggtgttcgctgccccgttttctggtgtgctcttttccattgaggtgatgtccagccacttcagcgtccgggattactggcgtggattctttgcagccacgtgtggagccttcatttttaggctgctggccgtattcaatagtgagcaggagactatcacgtcactgtataagactagcttccgtgtggatgtgccgttcgaccttccagaaattttttttttcgttgcactcggcggcatctgcggggtgcttagctgcgcgtacctattctgccagcgtacctttctgtcattcattaagactaataggtatagcagcaagctcctcgctacttccaagccggtgtactcagctcttgcgacgttactgctggcaagtatcacctacccgccaggagtggggcactttcttgctagccggctctccatgaagcagcacctcgatagcctttttgacaaccattcatgggctttaatgacccagaactcctcaccaccctggcctgaggaactggacccacagcatttatggtgggagtggtatcatccccgattcacaatatttgggacattagcatttttccttgtgatgaaattctggatgctgatcctagcaactaccattcccatgcccgccgggtacttcatgcctattttcatactgggtgctgctattggcaggctgttaggcgaggcgctggccgtggcatttccagaaggaatcgtgacaggtggagtcaccaaccccattatgcctggcgggtatgccttggctggcgccgccgcctttagcggggctgtgacccacacaatctcgacggccttactggcttttgaactgactggccaaatagtccacgccttacctgtcctgatggcagtgctcgcggctaatgccattgctcagtcttgtcagccaagcttctacgacgggaccatcatcgtgaaaaaacttccttacctgccccgtatcctgggaaggaatatcggatcccaccatgtccgggtagagcacttcatgaatcattctattaccactctggcaaaggacacaccactcgaagaagtggtcaaggtggtgacctccacggacgtgactgaatacccactggtggagagtacagaatcacagatcctggttggcatcgtacagagagctcagctggtgcaagccctgcaggcagagcccccatcaagggccccaggacaccagtgcctgcaggacatcctggccagggggtgtcctactgagcctgtgaccctgaccctcttttcagagaccactctccaccaggcccaaaatcttttcaagctcctgaaccttcagtcccttttcgtgacatctcgagggcgggccgtgggatgtgtgtcttgggttgagatgaaaaaggcaatttccaatctgaccaatccgcccgcccctaagtag

SEQ ID NO: 182769 - DNA, 1935 bp, synthetic construct
  misc_feature 1..1935: note = Description of Artificial Sequence: Synthetic coding sequence
  source 1..1935: mol_type = other DNA
atggaggagctggtgggcctgcgggagggcttcagcggcgaccccgtgacactccaggagctgtggggcccctgtccccatattaggcgggctatccagggcggtctcgaatggctgaaacaaaaggtgtttcgtcttggggaagactggtactttctcatgaccctgggcgtgctgatggccctggtgtcgtacgctatgaatttcgccatcggatgcgtcgtacgaggatccgggatcccagagcttaagactatgctggccggtgtgatactggaggactatctggacattaagaactttggggccaaggtagtgggtctctcgtgcactctggcaacgggctcgactctgttcttaggcaaggtgggcccgttcgtgcatctctctgtgatgatagccgcatatctcggccgcgtgagaacaactaccataggagaaccagagaataaatccaaacagaatgaaatgttagtagctgccgcagccgttggcgtggccaccgtgtttgcagcaccattcagtggggttttgtttagtatagaggtcatgtcctcgcacttttcagtaagagactattggcgcggttttttcgcggctacgtgcggtgcctttattttcagacttctggccgtttttaattccgaacaagaaaccatcacctctctatacaaaacaagtttcagagttgatgttccatttgacctgccggaaatttttttctttgtagcacttgggggcatctgcggcgtgctctcctgtgcttacttgttctgccagagaacattcctgtcattcatcaaaacaaaccggtactctagcaagctcctggctacctctaagcctgtgtacagtgccctcgcgacactcttactggctagtattacctatccaccaggcgtgggccacttcttagcgtcacgactgtccatgaagcagcacctcgattccctctttgataatcacagctgggccctcatgacacagaacagctcccctccgtggcccgaggagctcgatccgcagcacctgtggtgggagtggtatcacccccggttcacaatcttcggcacccttgctttttttctcgtgatgaaattctggatgttgatactggccactactattccaatgccggccggttacttcatgcccatcttcatcctaggggcagctataggcagactcctcggtgaagcactcgccgtggcttttcccgaaggcatcgtgactggcggagtcactaatcccatcatgcctgggggttatgccctcgccggggccgccgctttcagcggagccgtaacccacaccatctcaacagcactccttgccttcgagcttacaggccagattgtgcatgccttgcctgttctgatggctgtgctcgccgctaatgcgattgctcagtcctgccagccctcattctacgatggtacaataattgtgaagaaactaccctatctgccgaggattctaggcaggaatattggctcccaccatgtccgcgttgaacactttatgaatcactcaattaccaccctggcaaaggatactccactcgaagaggtggttaaggtcgtgacttctacagatgttaccgagtaccctcttgtggagagtaccgagtcccagattctggttggaatcgtccagcgcgcgcaactggtacaggcattgcaagcagagcctccctccagggctcctggacaccagcagtgcctccaagatatattggcccggggctgtcctactgagcctgttaccttgacactgttttctgaaactaccctccaccaggcccagaacctgttcaagctgctcaatctgcaatccttatttgttacttcaaggggccgggccgtgggatgcgtttcatgggtggaaatgaagaaagcaatctccaatcttacaaatccacccgcacctaagtag

SEQ ID NO: 182770 - DNA, 1389 bp, synthetic construct
  misc_feature 1..1389: note = Description of Artificial Sequence: Synthetic coding sequence
  source 1..1389: mol_type = other DNA
atggaggagttcgtgggcctgcgggagggcagcagcggcaaccccgtcacgctgcaagaactctggggtccatgtccacgcatacgccgtggaatcagaggcgggcttgagtggctgaagcaaaaactgttcaggctgggggaggattggtatttcctaatgaccctgggcgtcctaatggctttagtctcttgcgcgatggacctcgccgtggaatccgtcgtgagggcgcatcagtggctctaccgcgagatcggggattctcacctgctcaggtatctttcgtggaccgtctatcccgtcgcactcgtcagtttttccagcggtttctctcaatcaattactccgtctagcgggggttctggcatccccgaggtcaagaccatgctcgccggagtggtgttggaagattacctggatatcaagaactttggcgccaaagtggttgggttatcctgtacattggcctgtggctcgaccctgttcttgggcaaggtcggcccttttgttcacttatcagttatgatggccgcctacttgggaagagtgagaactacaaccattggagaacctgagaacaaatccaagcccgtgtattccgcacttgctactctggtcttagcttctatcacttaccccccttcagccggccgtttcctcgcctcccgacttagcatgaagcagcatctggattccctattcgataatcacagctgggccttgatgacacagaatagtagccctccttggcctgaggaactagacccccagcacctgtggtgggagtggtaccaccccaggttcacaatatttggaactcttgccttctttcttgtgatgaagttctggatgcttatcttggccaccacaatcccaatgcctgcagggtacttcatgccgattttcgtttacggtgctgccattgggaggctgttcggagaaaccctttcttttattttccctgaggggatcgtggcaggtgggatcacaaatcccattatgcccgggggttatgcgttggcgggtgccgcagctttcagcggggctgtaactcacaccatctccactgctcttttagctttcgaggtcaccggtcaaatcgtacacgcactcccagtcttgatggccgtgttggctgccaacgccatagctcagtcatgccagccaagtttctacgatggtaccgtgatcgtaaagaaactgccgtatctccctaggatcctcggtcggaatattgggtcccatagggtaagggtggagcactttatgaaccactccataaccactttggcaataacactgatgaacgatgagatcggtgtgcactgccatcagggccaggcccaaatgccaagtggcgtggtttggtttccagttcgtgggtcttag

SEQ ID NO: 182771 - DNA, 1554 bp, synthetic construct
  misc_feature 1..1554: note = Description of Artificial Sequence: Synthetic coding sequence
  source 1..1554: mol_type = other DNA
atgccctgcccccccctgctgagcgtgcccgtgcgggccgccggcgagcaagacaggtgggtgagagaggaggtgacctggggcggtggccctacagtgactgggggatggggatggagagcccacttgcgtagtgtatcccctcccggagtgctgttctctattgaagtgatgagctcacatttctcagtatgggactattggagagggttcttcgccgccacctgcggagcctttatgttcaggctgcttgcagtgttcaatagcgaacaagagaccatcacctcattgtacaagactagttttagagtagatgtccctttcgaccttcctgagatcttcttttttgtcgccctggggggcctgtgtgggatccttggatctgcctacctgttctgccagagaattttcttcggatttattcgaaacaatcgcttttctagcaaactgttggccacctctaagccggtatattccgccctggccaccctcgtgctggccagcatcacctaccccccctctgccggaaggttccttgcctccagattgagtatgaagcaacatttagattctctgtttgacaatcattcttgggccctgatgacacaaaatagcagtccaccctggcctgaggagctagacccccaacatctgtggtgggagtggtatcatcccaggttcactatcttcggtacactggcctttttcctggtcatgaagttctggatgctgatcctcgcaaccacaattccaatgcctgcaggctacttcatgcctatttttgtctacggcgcggctattgggagacttttcggggaaacactgagttttatttttcctgagggaatagtggccggaggcattacaaaccccataatgcccggaggctatgccctggctggcgcggccgccttttcaggcgcagtgactcacaccatctctacggccctactcgcattcgaggtcacagggcagatcgtgcacgccctccctgttctgatggcagttctcgcagcaaatgctatcgcacagagctgccagccatcattctacgatgggacagtgattgtcaagaagctgccctacttgcctaggattttgggaaggaacatcgggtcacatcgagtacgagtggaacattttatgaaccacagcattaccactctggcgaaggacatgcctttagaggaagtggtcaaggtggtgacctccacggacgtggccaagtaccccctggtcgagagcacggaatcccaaatccttgttgggattgtgaggcgggcccagctggtccaagctctgaaagccgaacctccatcgtgggctccaggccatcagtgccttcaggatattctggcggccggctgcccaacggaacctgtgacgcttaaactctcacctgagacatcgctgcacgaggcccataatctctttgaattgctgaacctgcattccctgtttgtgaccagtcgtgggcgggcagtggggtgcgttagctgggtagagatgaagaaggcaatctcaaacctcacgaaccctcctgctcctaagtag

SEQ ID NO: 182772 - DNA, 468 bp, synthetic construct
  misc_feature 1..468: note = Description of Artificial Sequence: Synthetic coding sequence
  source 1..468: mol_type = other DNA
atggccgtgctggccgccaacgccatcgcccagagctgccagccctcattttacgacgggactgtgattgtgaagaaactcccctacctgccccgaattctgggccggaatataggctcgcaccgcgttagagtggagcatttcatgaaccactctatcaccaccctcgccaaagatatgccactagaagaagtagtcaaggtcgtgacatctaccgacgtggctaaataccctttagtagagtcgacagagagccagattctagtgggtatagtgcgccgtgcccaactggtgcaggctttgaaagccgagccgccgtcctgggcacctggtcatcagtgtctgcaggacatcttagccgcaggatgtcctacagaaccagtgactctaaagcttagtcccgaaacaagcctgcacgaagcacagatgccctctggtgtcgtgtggtttcctgttcgcggcagttag

SEQ ID NO: 182773 - DNA, 2064 bp, synthetic construct
  misc_feature 1..2064: note = Description of Artificial Sequence: Synthetic coding sequence
  source 1..2064: mol_type = other DNA
atggaggagttcgtgggcctgcgggagggcagcagcggcaaccccgtcacattgcaagagctctgggggccttgtccgagaatcagacgggggatccgaggagggctagagtggttgaagcagaagctgtttaggctgggggaggactggtatttccttatgacactgggcgtgctcatggccttggtttcgtgtgctatggatctggcagtggagtctgtcgtccgagctcatcaatggctgtaccgggagatcggcgacagccatctcctccgttacctatcttggacggtgtaccccgtcgcccttgtgagtttttccagtggattttctcagtccattaccccgagtagtggcgggagtggtatacctgaggtgaaaacaatgctggccggcgtagttctggaggattacctggatattaagaactttggtgccaaagtagttggtctgagctgtaccctcgcctgtggaagtacactcttcttgggaaaagtaggaccgttcgtgcatctgtcagtgatgatggctgcttacctagggcgcgtgagaactaccaccattggggaacccgaaaataagtctaaacagaatgaaatgcttgttgcagccgcggcggtgggcgtagcgacagtgtttgctgcccccttctccggtgtcctcttctccattgaggtcatgagctctcatttcagtgtgtgggattactggcggggcttttttgccgcgacctgcggggcgtttatgtttagactgctggccgtctttaattccgagcaggaaaccatcacctcactttacaaaactagtttccgggttgatgttccatttgacctacctgagatatttttttttgttgcgctgggaggtctgtgcggtattctcgggagtgcctatcttttttgccaacgcatcttcttcggattcattagaaacaacagattctcaagtaagttactggcaacaagcaagcccgtgtacagtgcgcttgccaccctagtactggcatcaattacctatccgccttctgctggcaggtttctggcaagcaggctgagtatgaaacagcacctcgacagcttattcgacaaccacagctgggcactgatgactcagaactcctcacctccatggcccgaagagcttgaccctcagcacctgtggtgggaatggtatcatccccgctttaccatctttggaacactggccttcttcctcgtgatgaagttttggatgctgatactggccaccacaatcccaatgcctgccggttacttcatgcccatctttgtctatggcgccgccatcggacgcctgttcggtgagaccctctcatttatatttcccgaggggattgtagcggggggcatcacgaatcctattatgcctggcggctacgcgttagctggagccgccgcgttctctggcgccgtaacacacaccatttccacggccctgctggctttcgaagtgacaggccaaatcgtgcatgctctgccagtactaatggccgttctcgccgccaacgcgatagcccaatcctgccaaccatctttttacgacggaacagtgatagtgaagaagctgccctacctgccgagaattttaggccggaacatcggttctcaccgggttcgggtggaacactttatgaaccattcaataactaccctggcgaaggatatgcccctcgaagaggtcgttaaagtggtgacttccacggacgtggccaaatacccactggtggagtccacagagtcccagatactggtgggaattgtccgaagagcccagcttgtccaggcacttaaagctgagccccctagttgggcacctggccatcagcaatgccttcaagatatactggccgcaggctgcccaaccgagcctgtgactctgaagctcagtccagaaactagcctgcatgaagcccacaatctctttgaactgctaaacttacacagcctgtttgtgacatctaggggccgcgccgttgggtgcgtttcatgggtggagatgaagaaagcgatctcaaaccttacaaatcccccagcacccaaatag

SEQ ID NO: 182774 - DNA, 441 bp, synthetic construct
  misc_feature 1..441: note = Description of Artificial Sequence: Synthetic coding sequence
  source 1..441: mol_type = other DNA
gcccagagctgccagcccagcttctacgacggcaccgtgatcgtgaagaaattaccctacctgccgcgaatccttggacgcaatattggttcccatcgggtgcgggtggagcattttatgaatcatagcattaccacactcgctaaggacatgcctctcgaggaggtggttaaagtagtaactagtacagacgttgcaaagtatcccctggtggagtccacggaaagtcagatcctcgtaggaattgtgagacgcgctcaacttgtgcaggcactgaaagctgaaccaccatcatgggctccaggacaccagtgcctacaggacattctcgccgccgggtgtcccactgagcctgtgacactgaagctgagtcctgaaacctcacttcatgaggcccagatgccgtccggagtcgtgtggtttccagtccgaggatcatag

SEQ ID NO: 182775 - DNA, 2646 bp, synthetic construct
  misc_feature 1..2646: note = Description of Artificial Sequence: Synthetic coding sequence
  source 1..2646: mol_type = other DNA
atggccgccgccgccgccgaggagggcatggagccccgggccctgcagtacgagcagacattgatgtatggtagatatactcaggatttgggcgcttttgccaaagaagaggcagctcgaatccgactgggcgggcccgaaccttggaagggacctcccagcagccgtgctgcccccgaactgctggaatacggtcgttctcgttgtgctcggtgtagagtgtgttcggtgaggtgccataaatttctggtaagcagggttggagaggactggattttccttgtcctcctcggcttgctaatggctttggtgagctgggttatggattatgccatcgccgcctgcctccaggctcaacaatggatgagccggggcctgaacactagtatcctgctacaatatctcgcgtgggttacttacccagtggtgctgattactttcagcgctggtttcacccaaatcctggcgccacaggccgtgggcagcggcatcccagaaatgaagactatcctccgaggtgtggtcctcaaagagtacctcacccttaagacattcatcgccaaagtgatagggcttacctgtgcactcggaagcggaatgcctctagggaaagagggacccttcgttcacatcgccagtatgtgtgccgcactcctgtcaaagttcctttccctgtttggtggtatctacgaaaacgaaagtagaaatacagaaatgctggccgccgcttgcgccgtcggcgttggctgttgcttcgccgcaccaattggaggagtactgttcagcattgaagtaacttcaactttttttgccgtgcgcaactattggagaggattttttgctgcgacctttagtgccttcatcttccgagtgctcgcagtctggaacagagacgaggagaccatcactgccctatttaaaacacggttccgattggattttccctttgatctgcaggagttgccagcatttgcggtcatcggcatagcctcgggttttgggggggccctgtttgtctacctcaatcgaaaaattgtgcaagttatgagaaagcagaaaactataaatcgcttcctgatgagaaaacgcctgctgtttccggccctggtgactctgctgattagtacacttaccttccccccagggttcggacagttcatggctggacaattatcacagaaagagaccctcgtgaccctttttgataatagaacttgggttaggcagggactggtggaagagctggagcctcccagtacctcccaggcctggaatcccccacgcgctaacgtgttcctgactctcgtgatcttcatcctgatgaaattttggatgtccgcccttgccaccaccatacccgtcccatgcggagctttcatgcctgtgtttgtcatcgatggaatccacactgactccagcacctaccgcatagttcctggtggctacgccgtagtgggagcggccgcactggcgggtgctgttactcatactgtgagtaccgctgttatcgtgttcgagttaactggccagatcgcacatattctgccggttatgatcgcagtaatcttggccaacgccgtcgctcagagccttcagccatcactgtacgattcaataatcagaattaaaaagctgccctacctgcctgagctgggctggggccgacatcagcagtatagggtccgcgtggaagatatcatggtgagggacgttcctcatgtggcgttgagctgcacttttagggacctccggctggcactgcataggacaaaggggcggatgcttgctttggttgagtcacccgagagcatgatcctcctcggctccattgaaaggagccaggtggtggccctgctgggggcccaattgagccccgcaaggagacggcaacatatgcaggaaagacgtgctacacagacatccccattgagtgaccaggagggtccacccaccccagaggctagtgtgtgttttcaggtcaatactgaggactccgcctttccagctgcccggggggagacacacaagccactgaagcccgcattgaaaaggggacccagtgttactcgaaatttaggtgagagtccgacaggatctgcagagagcgctgggattgccttaaggtctctgttttgtggatcccccccacccgaggctgcctccgaaaaacttgaaagctgcgaaaaacgaaaactgaaaagggtacggatctctctggctagcgatgctgacttggagggcgaaatgtcacccgaagagatacttgaatgggaagaacaacagttagatgagccagttaacttcagcgactgtaagattgacccagctccgttccaacttgtggagcgcacctctctgcacaagacacacacaatattttccttgctgggcgttgatcatgcatacgttacatcaatcggccgcctgataggaatagtcaccctaaaagaactgcggaaagctatcgaaggctccgtgacagctcagggggttaaggttcggccacctctggcaagcttcagagattctgccacctcttcttcagatactgagaccaccgaggtccacgcgttatggggccctcattcgcggcatggcctcccacgcgaaggatcacctagcgattccgatgacaagtgccagtag

SEQ ID NO: 182776 - DNA, 2565 bp, synthetic construct
  misc_feature 1..2565: note = Description of Artificial Sequence: Synthetic coding sequence
  source 1..2565: mol_type = other DNA
atggccgccgccgccgccgaggagggcatggagccccgggccctgcagtatgaacagacgctgatgtatgggagatatacgcaggatctgggagcattcgcaaaagaggaagccgccagaattaggctcgggggaccagagccttggaaaggcccaccatcttcaagagccgcacccgagctgctcgagtacgggcgatcccggtgcgcgcgatgtcgcgctcagcaatggatgtcgaggggcctgaatacctctatcctgctgcaatacctggcctgggttacttatccagtggtgctgataacattctctgccggcttcactcagattctagctccacaggctgtggggtcgggaatcccagagatgaaaaccatactgcggggagtcgttttgaaagaatatctcacccttaagacgttcattgccaaggtgatcggtctgacatgtgcgctgggttctggaatgccccttggaaaagagggaccgtttgtccacatcgccagcatgtgcgcagcccttctgagtaagttcctgagtttgttcggggggatttacgagaatgagagtaggaacaccgaaatgctggccgccgcctgcgcagtgggcgtgggctgttgcttcgcagcccctattggtggcgtgctgttttcaatcgaggtaacctcaacattttttgcagtacgaaactactggagaggcttttttgctgccacattctcagcgtttatatttcgcgtgcttgcagtgtggaacagggacgaggagacaatcactgctctcttcaagacccgctttcgtcttgattttcccttcgacctacaggagctccctgccttcgctgtgatcgggattgcaagtgggttcggaggcgcactatttgtctacctgaacagaaaaatcgttcaagtcatgaggaaacagaagaccatcaacagatttctcatgcgcaagcgcttattgtttcccgcgttagttacactgctgatcagcactctgaccttcccccccggcttcggacagtttatggcaggacaattgtcacagaaggagacgctcgtgacccttttcgacaataggacgtgggttagacaggggttagtggaagagctggagccgccttccacctcgcaggcatggaaccctccacgcgcgaatgtcttcctgaccctggttatattcatcctgatgaagttctggatgtcagctttggctaccaccatacctgtgccttgcggtgccttcatgcctgtctttgtgattggagctgcgttcgggcggcttgtaggagagagcatggccgcctggtttcctgatggtattcacaccgactcctcaacgtaccggatcgtgcccggaggctacgccgtggtgggggctgccgcactggcgggagcagttacgcatacggtgtcaacagccgttattgtgtttgagctaacaggtcagatagcccacatcctgcctgtgatgatagccgtcatcctggcaaatgctgtggcccagtctctgcaaccttcgctctatgattctataatccgaattaaaaagctgccctacctgcctgagctcgggtgggggcgtcaccaacagtaccgggtcagagtagaagatattatggtgagagacgtcccccatgtagctttgtcctgcacctttcgcgacctgcgtctcgctctacaccgaacaaaggggagaatgcttgcactggttgaaagccccgagagcatgattttacttggaagtatcgagcggtcccaggttgtggcactccttggtgcccagctatcaccagccaggcgccgccaacatatgcaagagaggcgggccacacagacgagcccgctgtccgaccaggagggccctcctacccccgaagcgtcagtgtgttttcaggtaaacaccgaggattccgccttcccagccgccagaggtgaaactcacaagcccttaaaaccagccctgaagcgcgggccaagtgtgacaaggaacctgggggagtctcccaccgggtctgcggagtctgctgggatcgccctgcggtctttgttttgcggctctccccctccggaagcggcatcagagaagttggaaagctgcgagaaaaggaagctcaagcgggtgagaattagtcttgcctctgatgcagatctggaaggcgaaatgagtcccgaggagattcttgaatgggaggagcaacagctggatgagccggtgaatttcagcgactgcaagatcgaccctgcccccttccagttggtcgagcgaacctccctgcacaagacacatacaattttttctttgctgggcgtcgatcatgcatacgtaacctccatcgggcggcttatagggatcgtaacactgaaggaattacgcaaggcaatcgagggatccgtgacagcccagggtgtcaaagtccgacctccgctcgcctcgttccgcgacagcgccacaagttcatccgacaccgagaccaccgaggttcatgccctgtgggggcctcacagccgtcacggactccccagggaggggtctccgtccgactctgacgacaaatgtcagtag

SEQ ID NO: 182777 - DNA, 2610 bp, synthetic construct
  misc_feature 1..2610: note = Description of Artificial Sequence: Synthetic coding sequence
  source 1..2610: mol_type = other DNA
atggccgccgccgccgccgaggagggcatggagccccgggccctgcagtatgagcaaacactcatgtacggacgctatacacaggatcttggtgcctttgccaaggaagaggccgctcggatcaggctgggtggccccgaaccttggaagggacctccctcatccagagcggcacctgagcttctggagtatggtcggagcagatgtgcccgctgccgagtgtgctctgtgcgatgccacaaatttttggtgtcacgcgtaggcgaggattggatttttctggtgctgctgggattattaatggcgctggtgtcctgggtgatggattacgccatcgctgcttgcttgcaggctcaacagtggatgtctagaggcctcaacaccagtatcctgctgcaatatctcgcttgggtcacttatcctgtggtactgattactttctcagccggatttacacagatcctggctccccaagctgtcggctctgggatcccagagatgaaaactatactacggggggtggttctgaaggaatacctcaccctgaaaaccttcatcgccaaggtcattgggctgacctgtgccctgggatcgggaatgcccctgggcaaagaggggccattcgttcacattgcttccatgtgtgccgccctgttatcaaaatttctctccctctttggtggcatctacgagaatgaaagccgcaatacagagatgctggctgccgcgtgcgccgtgggcgtgggctgttgctttgccgcgcccataggtggagtgttgttctccatcgaggtgacaagcacattctttgcagtaagaaattactggcggggattcttcgctgccacgttcagcgctttcatcttcagagtgttggcagtatggaacagggacgaagagacaataacagctctcttcaagaccaggttccgactcgactttccatttgacctacaagagttgcccgccttcgccgtgattggtatcgcttccggctttggcggagctctgtttgtttacttgaataggaaaattgtccaggtgatgcggaagcagaagactattaatcgcttcctgatgagaaagcggcttttatttccagctttggtgaccctactgatcagtacactcacttttccacccggcttcgggcagttcatggccggtcaactgtcacagaaggaaacactggtgaccctgtttgacaatcgcacttgggtcagacagggtctggtcgaagaactcgagcctccctcaacatcccaagcgtggaatcctcctagggcaaacgtttttctgactctggtgatcttcattctgatgaagttctggatgtcagcactcgcgacgaccatccccgtcccatgcggggcgtttatgccggtatttgttatcggcgctgcttttggtcgtctagttggcgagagcatggcagcatggttccctgatggtatccacacggactccagtacgtatcgaattgtgcccggcgggtatgccgtggtcggtgcagccgcgcttgcgggtgctgtaacacacacagtttcgactgcagtcattgtgttcgagttgacaggccaaatagcccatattctacctgtgatgattgcggtgattctcgccaatgccgtcgcacagagtcttcagccctctctgtatgacagtattatacgcatcaagaaactgccatatctgcctgaactcgggtggggtagacaccagcaatatagggtgagggtcgaagacatcatggtgcgtgatgtgccacacgtggcgctcagctgcacgttccgggacctgagattggctctacaccggacaaagggcagaatgctagctcttgtggagagccctgagtccatgatattgctgggatcaattgagcgatcccaggtagtcgcgttattgggggcacagctctcaccagctaggcgcaggcaacacatgcaggagaggagagccactcagacctctccactgtctgatcaggaaggccccccgacacctgaggcctctgtgtgtttccaggtgaataccgaagatagcgcctttccagcagcgcggggggagacccacaagccccttaaacccgccctgaagagaggtcccagcgtgacgcgcaacctgggggagtcccctaccgggtccgccgagtcagccgggattgccctgagatctctgttttgtggatcgcctcctcccgaagccgcatcagagaaactagagagctgcgaaaaacggaaactgaagcgtgtaaggatttcacttgctagcgatgcagatttggaaggtgaaatgtcccccgaggagatcctcgagtgggaagagcagcagctcgatgagcccgtgaattttagcgactgcaaaatcgacccagcacccttccagctggtggaacggactagccttcataagcttcggaaggcgatagaaggcagcgtgacggcccagggcgtaaaggtaagaccacccctggcttctttccgcgactccgctacctctagctctgacactgagactactgaagtgcatgcattgtggggaccccattctaggcacggtctcccacgtgaaggtagcccctccgactcagatgacaagtgtcagtag

SEQ ID NO: 182778 - DNA, 714 bp, synthetic construct
  misc_feature 1..714: note = Description of Artificial Sequence: Synthetic coding sequence
  source 1..714: mol_type = other DNA
atgagcttcctgaagagcttccccccccccggccccgccgagggcctgctgcgccagcagccagacaccgaagccgtgctaaatggcaaaggattgggcaccggaactctatatattgcagaatcccgcctgtcttggctggacggcagtggattgggattcagcttggagtatccgaccatcagcctacacgcattgagtcgggatcgttcagactgtctcggcgagcatctgtatgtcatggtgaacgccaaattcgaggaagagtccaaagagccggttgcagatgaggaagaggaggacagcgacgacgacgtggagccaatcactgagtttaggttcgttccttctgacaaatccgcgctggaggccatgttcaccgccatgtgtgagtgccaagctttgcaccctgatccagaagacgaggattcggatgactatgatggcgaggaatacgatgtggaggcccacgaacaaggacagggcgacatcccaaccttctacacctatgaggaggggctttcccacttaaccgcagaaggacaggcaaccctggagcgcttggagggcatgttgtcacaatccgtgtccagccaatacaatatggccggcgttaggaccgaagacagtatcagagattacgaggatggaatggaggtcgatactactcccaccgtggctggtcagtttgaagatgccgatgtggatcactag

SEQ ID NO: 182779 - DNA, 714 bp, synthetic construct
  misc_feature 1..714: note = Description of Artificial Sequence: Synthetic coding sequence
  source 1..714: mol_type = other DNA
atgagcttcctgaagagcttccccccccccggccccgccgagggcctgcttaggcagcagcccgatacggaagccgtgctcaatggtaaaggcctgggaacagggacactgtacatcgcagagtccagactttcctggcttgatggatcaggactgggcttttcactcgaatacccgacaatttcattgcatgccctatcccgggacaggagtgactgtctaggggagcacctctatgtgatggtgaacgctaaatttgaagaggaatccaaggaaccagttgcggacgaggaggaggaggacagcgatgacgacgtggagccaattactgagtttcgatttgtcccaagcgacaaatccgcgcttgaggcaatgtttacagccatgtgtgaatgccaggcactgcatccagatcccgaagacgaagattccgatgactatgacggcgaggagtacgatgtggaggcccatgagcagggacagggggatattcctactttttacacatacgaagaaggcctcagtcatcttacggctgaaggacaggctacgcttgaacggcttgagggcatgcttagtcaatcagttagctcgcagtacaatatggccggtgtccggacggaggactccattcgggactacgaggatggaatggaggtggacaccacgccgacagttgccgggcaatttgaagacgctgatgtggaccattag

SEQ ID NO: 182780 - DNA, 504 bp, synthetic construct
  misc_feature 1..504: note = Description of Artificial Sequence: Synthetic coding sequence
  source 1..504: mol_type = other DNA
atggtgctgctgctgaagggcgtgcccttcaccctgaccaccgtggatactcgcagatcacctgacgtgcttaaagactttgctcccggatcacaactgcccattctgctatatgacagtgacgctaagacagataccctccagatcgaagactttctggaggaaaccctagggcctccagacttcccgtccctcgccccaaggtatagggaatccaataccgcaggaaacgatgtcttccacaagttcagcgctttcattaaaaatcctgtgcctgcacaagatgaagcactgtatcaacagctccttagagctctggccaggcttgattcataccttagagcccctctggaacacgagctcgctggggaacctcaattgcgggagtcacgccggcgctttttagatggagacagactgacacttgctgactgctcgctactgcctaaattgcatattgtggataccgtgtgtgctcacttccgacaggcgccgatcccttag

SEQ ID NO: 182781 - DNA, 711 bp, synthetic construct
  misc_feature 1..711: note = Description of Artificial Sequence: Synthetic coding sequence
  source 1..711: mol_type = other DNA
atggccgagaccaagctgcagctgttcgtgaaggccagcgaggacggcgagtcagtgggtcattgtccctcttgtcagaggttgttcatggtgttactgcttaaaggcgtcccgttcacgctcactactgtcgacactaggagatctcctgatgtgcttaaagattttgctccaggaagccagttgccgattctgctttacgacagcgatgccaaaacagatactctccagattgaagacttcctggaagagactctgggtccacccgactttcccagcctggcaccacgataccgcgaaagtaataccgctggcaacgacgtttttcataagttttccgccttcattaaaaatcccgtgccagcccaagacgaggctctttaccagcagctgctgagagctctggctcgtctcgactcttatttgcgcgctcccctggaacacgaactggcaggcgagcctcagctcagggagtcccgtcggcggtttctggatggcgaccgcctgactctggcagattgctcactccttccaaagctccatatcgtggacaccgtatgcgcccacttccgccaggctccaatccctgcagaattacgcggtgttcgacggtatctcgactctgctatgcaggagaaagaatttaagtacacatgtccccattcagctgaaatcttagctgcgtaccgtccagctgtgcacccccggtag

SEQ ID NO: 182782 - DNA, 348 bp, synthetic construct
  misc_feature 1..348: note = Description of Artificial Sequence: Synthetic coding sequence
  source 1..348: mol_type = other DNA
atgaacagcggcgtgtgcctgtgcgtgctgatggccgtgctggccgcaggggcactcacgcagcccgtgcctccagccgacccggccggcagtgggcttcagagagcagaagaggctcccaggagacagctcagggtctctcagagaacggatggcgagagccgggcacatctgggggccctccttgcacgttatatccagcaggctaggaaggctccaagcggccggatgtcaatcgtgaaaaatttgcaaaacttggacccctcccatcgtatttccgatcgtgactatatgggctggatggacttcggcagaaggtcagccgaagagtatgaataccccagctag

SEQ ID NO: 182783 - DNA, 348 bp, synthetic construct
  misc_feature 1..348: note = Description of Artificial Sequence: Synthetic coding sequence
  source 1..348: mol_type = other DNA
atgaacagcggcgtgtgcctgtgcgtgctgatggccgtgctggccgctggcgcactgacacagcctgtgcccccagccgatccggctggttcaggtttgcaacgggccgaagaggctccgaggaggcaattgagagtaagccaacggacagacggagaatccagggcgcacctaggcgccctgctcgccagatatatacagcaggcgcggaaggcaccaagcggcagaatgagcatcgtgaagaacctgcagaatcttgaccctagccacagaataagcgatcgtgattatatgggatggatggattttggccggaggagcgccgaagagtatgagtatcctagttag

SEQ ID NO: 182784 - DNA, 348 bp, synthetic construct
  misc_feature 1..348: note = Description of Artificial Sequence: Synthetic coding sequence
  source 1..348: mol_type = other DNA
atgaacagcggcgtgtgcctgtgcgtgctgatggccgtgctggccgccggcgccctcacccagccggttcctccagcagatcccgcaggatccggactgcagcgcgcagaagaggctcctagacggcagctgagggtatctcagcgtacagatggtgaaagtcgtgcccatttgggagctctcttggccagatacatccagcaggccagaaaggcaccctctggcaggatgagcattgtcaagaacctgcagaaccttgatcctagtcacaggatctcggacagggattacatgggttggatggactttggccgacgtagtgcggaagagtacgaatacccgagctag

SEQ ID NO: 182785 - DNA, 1287 bp, synthetic construct
  misc_feature 1..1287: note = Description of Artificial Sequence: Synthetic coding sequence
  source 1..1287: mol_type = other DNA
atggacgtggtggacagcctgctggtgaacggcagcaacatcaccccaccatgtgagctgggcctggaaaatgagacattgttctgcctagatcagcctcgcccctccaaagaatggcagcccgctgtccagatcttactgtattccctgattttcctcctgtctgtgctgggcaacaccctcgtgatcacagtgctgattcgcaataaaaggatgcgaactgtgactaatatcttcctgctctctctggccgtgtccgatttaatgctttgcttgttttgcatgcctttcaaccttattcctaacttgttgaaagacttcatctttggctccgccgtgtgcaagaccactacatacttcatgggcacgagtgtgtcagtgagtaccttcaacctagtagcaatctcattggagcggtacggagctatttgcaaacctcttcagtcgcgcgtgtggcagacaaagagccacgctctgaaggtgattgccgccacttggtgcctgagtttcacgattatgacgccttatcccatctatagtaatctagtcccattcacaaagaacaacaatcagacagctaacatgtgtcgatttcttctccccaatgatgtgatgcagcaatcatggcacacatttcttctgttgatcctgttcctgattccaggtatagtgatgatggtcgcctatggcctgatttcgttagagttgtaccaaggcataaaatttgaagcctcacaaaagaagagcgcaaaggaaaggaagccctcgacaacaagcagtggcaagtatgaggactcagatggctgctacctccaaaaaacccggccccccaggaagctggaactgagacagctgtccacaggaagcagctcccgcgccaacaggatcaggtccaattcttctgccgctaatcttatggctaagaagagagttataaggatgttgattgtgattgtggtcctcttcttcctgtgctggatgcctatcttcagtgcaaatgcgtggagagcatacgataccgcatcagccgaaaggcgcttgtcggggactccaatcagctttatcctgttgctgtcttacacttcctcctgcgtgaatcctattatttattgcttcatgaacaagcgcttccggctgggcttcatggcaacatttccatgctgtcctaatccagggcctccaggcgccagaggtgaggtcggggaggaggaagaaggtgggaccacaggcgcctctctgtcaagattcagttactcccacatgtcagcgtccgtgccacctcaatag

SEQ ID NO: 182786 - DNA, 1344 bp, synthetic construct
  misc_feature 1..1344: note = Description of Artificial Sequence: Synthetic coding sequence
  source 1..1344: mol_type = other DNA
atggagctgctgaagctgaaccggagcgtgcagggcaccggccccggtcccggagccagtttgtgcaggcccggagcaccattgctgaactctagcagcgtaggcaacctgagctgtgagccaccgcggatccgaggggcagggacaagagaactggagcttgccatccgaattaccctgtatgccgtgatatttctcatgtcagtgggtggcaacatgctcatcattgtggtgctcgggctgagccggagattacgcaccgtaacgaatgcatttctcctctcactggctgtgtctgacctgctgctcgccgtggcatgcatgcctttcacacttctgcccaacttgatggggacattcattttcggcacggtgatctgcaaagccgttagctacctgatgggggtatcagtgtccgtgtccaccctgagcttggtggccatcgcactggagcgttattcagcgatctgtcggcctctgcaggcccgggtatggcaaacccgtagccacgcggccagggttatcgtggccacatggctgctgtcaggtttgctgatggtcccctacccggtgtacactgtggtgcagcctgtcgggcctcgagtactgcagtgcgtccacaggtggccaagcgccagagtgcgacaaacgtggagcgtcctgttattgctgcttttgttcttcattccaggtgtcgtcatggccgtggcatatgggttaatttctcgagaactgtacctcggcctgagatttgacggtgattcggattcggactcccagagcagagtgaggaaccaaggtggtctccctggcgctgttcatcagaatggacggtgtcggcccgaaacgggcgctgtaggtgaggattctgatgggtgctatgtgcagctacctcggtctagacccgctttggagctaactgctctgactgctcctgggcccggcagtgggtcgagaccgacgcaggcaaaactgctagctaagaagcgggtggttagaatgttgttagtcatagtggtgctcttttttctgtgctggttgccagtgtattcagccaatacttggcgcgcatttgacggaccaggggctcacagggccctaagtggagccccaatatcgtttatccacctcctgtcatatgcttcagcgtgtgtaaacccgctggtctattgtttcatgcaccgtcgttttcggcaggcctgcctggagacctgtgccagatgctgcccacgaccccctagagcccgtcccagggccctgccagacgaggacccccctacaccatctatagccagtctctcacggttgtcatacactactatttcaaccctggggccgggttag

SEQ ID NO: 182787 - DNA, 1551 bp, synthetic construct
  misc_feature 1..1551: note = Description of Artificial Sequence: Synthetic coding sequence
  source 1..1551: mol_type = other DNA
atggagctgctgaagctgaaccggagcgtgcagggcaccggccccggacctggtgcaagtctgtgcaggccaggcgctcctcttttgaattccagtagcgtgggcaacctgagctgtgagccaccacggattcggggagccgggactcgtgaactcgagttagcaatcagaattacgctctacgccgtgatcttcctgatgtctgtgggtggcaacatgctgattatcgtagtgctcggcctctcccgacggctgcgcactgtcacaaatgctttcctgttgtctctggccgtgtccgacctcctcctggcagtggcttgcatgccattcacacttctacctaatttaatgggcacttttatcttcggaaccgtcatttgtaaggccgttagctatttgatgggggtgtccgtgagcgtctccacactatcactggtcgccatcgcccttgagcgctactcagcgatctgtcgtcctcttcaggccagagtttggcagacccgatcccacgcagctagggtgatcgtcgcaacctggttgctgagcggccttcttatggtgccctatccggtgtacacggtggtgcaaccagtggggccccgtgtacttcagtgcgtgcatcgatggccctccgcgagagtacgacagacatggagtgttctactcctactattattattttttattcccggagtggtgatggccgtggcatacgggttgatcagccgcgagctgtacctgggcctcagatttgacggcgactctgactctgactcccagtcccgtgtgcggaatcaaggcgggctccctggcggcgctggtcctagggaacagaacctgggagaggccgaattatggagagcaaccgggcccgccggtgtgggcgggactgaaatgaaggttcgcgtgagaaggaagcttgagatggagctcagctgggagaggaggagcggcggtgattgggccggagactggggagacagccctttttcgcttaccgcgcatcccctatgttccggagcagtccatcaaaacgggcgatgcagaccggagacgggtgccgtgggagaggacagcgatggatgctacgtacaacttcctcgatccaggcccgcccttgagctcaccgctctcaccgctcctggccccggttccggcagccgcccaacccaagctaaactgctggctaagaagcgggtggtacgcatgctcctggtgatcgtggtgctctttttcttgtgctggctgcccgtctatagcgcgaatacttggcgggcattcgatgggccaggagcccatcgggccctgtctggcgcccctatatcttttatccacctgctctcctatgccagcgcctgcgtgaaccccctcgtgtactgctttatgcacaggcgcttccgacaggcatgcctagagacttgtgcccgctgttgccccagacctccgagggccaggcccagggcactgcccgacgaagaccctcccacaccatccatagcgtctctcagtaggttgtcctatacgactataagcacactgggtcccggatag

SEQ ID NO: 182788 - DNA, 819 bp, synthetic construct
  misc_feature 1..819: note = Description of Artificial Sequence: Synthetic coding sequence
  source 1..819: mol_type = other DNA
atgagctgccacaactgcagcgacccccaggtgctgtgcagcagcggccagctgtttctacagcccctgtgggaccacctgcggagctgggaggccctcctccagtcccctttcttcccggttatattcagtatcaccacatacgtgggattctgcctgccgtttgtggtgttggatattctttgcagttgggtgcccgctcttcggaggtacaagattcaccctgatttcagcccctccgcacagcagctcctgccctgcttgggccaaacattatatcagcacgtcatgtttgtgtttccggtcacacttctgcactgggcccgatctccagctctgcttccccacgaggctcccgaactcctgcttctcctccatcatatcttattctgtctcctcctctttgacatggaattttttgtgtggcacttgctacatcacaaggttccatggctctaccggacattccacaaggttcatcaccagaattcaagttccttcgccctggccacacagtatatgagtgtgtgggaactgttttctctggggttcttcgacatgatgaacgtgacactccttggatgccaccctctcacgaccttgacttttcacgttgtaaatatctggctttctgtggaagaccatagtgggtacaattttccttggtccacacaccgcctggtgccattcggatggtatggcggcgtggtccaccatgatctgcatcatagccacttcaactgtaacttcgcgccctatttcacccactgggacaagatattaggaaccctgaggaccgcctctgttccagctaggtag

SEQ ID NO: 182789 - DNA, 1482 bp, synthetic construct
  misc_feature 1..1482: note = Description of Artificial Sequence: Synthetic coding sequence
  source 1..1482: mol_type = other DNA
atgctggccgccaccgtgctgaccctggccctgctgggcaacgcccatgcatgctccaagggcacctcgcatgaagccggtattgtgtgtcgaattaccaaaccggcactgctcgttctgaatcacgagaccgctaaggtcattcagaccgcttttcagagagcatcatatcccgacatcacgggcgagaaagctatgatgctcttaggtcaagtaaagtatggcctgcataacatccagattagccacctaagtattgcttcttctcaggtcgaactggtggaggctaaatcgatcgacgtgtcaattcaaaatgtgtctgtcgtttttaaagggactctgaagtatggctataccacggcctggtggttagggatcgaccaatcaatcgatttcgagatagactcagccatagaccttcaaataaacacacagttgacctgcgattctggccgggttagaactgacgccccagattgttacttgtcttttcacaagctcctgttacacttgcaaggtgaacgagagcctggatggataaaacagctctttactaactttatttcgtttaccctgaagttggtgctaaaggggcagatatgtaaagagattaacgtcatcagcaatattatggctgacttcgtgcagaccagggctgcatccatactctcagacggggacatcggggtcgatataagtctgacgggggatcccgtgatcaccgcgtcgtatctggagtcccaccataagggacacttcatctacaaaaatgtgtccgaagatctaccgctacccaccttttctcccacgctgttaggggactcgcgcatgctgtatttctggtttagtgagcgcgtattccacagccttgctaaagtggcatttcaggatggtaggcttatgttaagcctaatgggtgatgaatttaaagcggtactggaaacgtggggttttaacaccaaccaggagatctttcaagaagtggtgggagggtttcctagccaggcccaggttacagtccactgcctcaaaatgcctaaaatcagctgccagaacaaaggtgtggttgtaaatagttcagtgatggtgaagtttctcttccccaggccagatcagcaacacagcgtcgcttacactttcgaagaggacatagtcactactgtccaggcgagctacagcaagaaaaaattgttcctgagtctcttggacttccagatcacaccaaaaactgtttccaatttaaccgaatcctcttccgaatcagtgcagtcattcctccaatccatgataaccgccgtgggaatacctgaagtgatgtcacggcttgaagtggtgtttaccgctcttatgaacagcaagggagtcagtctctttgatatcattaaccccgagattatcacgagggatgggtttcttctgctccaaatggatttcggattccctgaacatctcttggttgatttcctccaatctttgagctag

SEQ ID NO: 182790 - DNA, 1302 bp, synthetic construct
  misc_feature 1..1302: note = Description of Artificial Sequence: Synthetic coding sequence
  source 1..1302: mol_type = other DNA
atgctggccgccaccgtgctgaccctggccctgctgggcaacgcccacgcctgttctaaaggcaccagccacgaagcagggatcgtgtgcagaatcactaagcctgccctccttgtgctcaatcatgagaccgcaaaagtgattcagaccgcctttcaacgggcctcctaccctgatataacgggcgagaaggcgatgatgttgctgggccaggtgaaatacggcctgcataacatacagatctcccatctgagtatcgcttcctctcaggtggagcttgtggaagcaaaatcaatcgacgtgagtatccagaatgtatctgtagtcttcaagggcactcttaagtacggttacactactgcctggtggcttggcattgaccagtccatcgactttgagatagattctgccatcgatctccagatcaacacacagcttacctgcgacagcggtagagttcgcaccgacgcccctgactgctatctgtccttccacaagctgctcctgcaccttcagggtgagagagaacccggttggatcaagcaacttttcactaacttcatttcatttactctcaagctggtgctgaaaggacagatttgcaaggagatcaatgtgattagcaacattatggcagattttgtgcaaactcgggcagcaagcatactgtccgatggggacatcggagttgatatcagtctcaccggggatccagtcataacagccagttacttagagtcccaccacaaggccgttttagaaacctgggggttcaatactaatcaagaaattttccaggaggtcgttggaggctttccctcccaggcccaggtgacagtgcactgtctcaaaatgccaaaaatctcatgccagaataaaggcgtcgtcgtgaatagttctgtgatggtcaaatttctgtttccgcgacctgaccaacagcatagcgtggcctacacatttgaagaagacattgtcacgaccgtccaggcatcttattctaagaaaaaactttttctaagtctcttggacttccaaatcactccaaaaaccgtgagcaatctaacggaaagctccagcgaatcagttcaaagtttccttcagtccatgatcactgccgtgggaataccagaggtgatgagtagattggaagtggtattcacagctctaatgaactcaaagggggtatccctgtttgacatcatcaatccagaaattatcactagggacggattcctgcttttacagatggacttcggctttcccgagcacctgctcgttgacttcttgcagtctctatcctag

SEQ ID NO: 182791 - DNA, 1374 bp, synthetic construct
  misc_feature 1..1374: note = Description of Artificial Sequence: Synthetic coding sequence
  source 1..1374: mol_type = other DNA
atgaagaccaagttctgcaccggcggcgaggccgagcccagccccctggggttactgttgagctgtggctccggcagcgctgcccccgcccccggcgtcggtcagcaacgcgatgccgccagtgatttggaatccaaacagctcgggggtcaacagcctccactggccctccctcctccacctcctctacctctgcctctccccctgccacagccaccgccccctcagcctccagccgacgagcagcctgagcctaggaccaggcgcagagcttacctatggtgcaaggagtttcttcccggagcatggcgggggctgagggaggacgagtttcacatctcagttattcggggaggcctgagtaatatgcttttccagtgctccctaccggataccacagcaacgctcggcgatgagcctcgaaaagtgctgctccgcctgtacggggccattctgcaaatgagatcctgtaataaagaaggcagtgagcaggctcaaaaggagaatgaattccagggagctgaggcgatggtactggagtctgtgatgttcgctatactcgcagagcgctcacttggaccgaagctgtatggaatttttccccagggccgcctggagcagttcattccatctcggcggctggacacagaggaactttcgctaccggatattagcgccgagatcgctgaaaagatggccactttccacggcatgaagatgcccttcaataaagagccaaaatggttgttcggaactatggagaagtatctaaaggaggtgctccgtatcaagttcacagaggagtccagaattaagaaattacacaagctcctcagctacaacctcccgcttgagctggagaacctcaggagccttttagaatccaccccctcccccgtagtattctgtcataatgattgccaggaaggcaacatccttttgctggagggtagggaaaattccgaaaaacagaaattaatgctgatagatttcgaatatagctcctataactatcgcgggtttgacatcggtaaccacttttgcgaatggatgtacgactactcttacgagaaatacccattttttcgggctaacatccgcaaatacccaaccaagaaacaacaattgcattttatttcctcctatttgccagcctttcagaacgactttgagaatctgagcacagaggagaagtccatcattaaggaggagatgctgctggaagtaaacagattcgcactagcatcacatttcctgtggggcctttggagcatcgtgcaagcaaagatatcctcaatagaattcgggtatatggattatgcgcaggccaggtttgacgcatattttcaccagaagagaaagctcggggtgtag

SEQ ID NO: 182792 - DNA, 1320 bp, synthetic construct
  misc_feature 1..1320: note = Description of Artificial Sequence: Synthetic coding sequence
  source 1..1320: mol_type = other DNA
atgaagaccaagttctgcaccggcggcgaggccgagcccagccccttaggactgttactgtcctgcggcagtggatctgcagcccctgctcctggcgttggccaacaaagggacgctgccagcgacctcgagtcgaaacaattgggcggccaacaaccccctttggccctgccaccgccacctcctctcccactgcctctgcctttaccacaaccaccgcctccccaaccacctgcagatgagcagcccgagccacggactcgacgcagggcctatctgtggtgcaaggaattcttaccaggggcttggagaggacttagagaggacgaattccacattagcgtaatccgaggtggactgtcaaacatgctctttcagtgctctttgccggacacaacagcgacattaggtgatgaaccacggaaggtgctcctgcggctctacggagcgattttgcaaatgggcgcagaagcaatggtgctggaaagtgtaatgttcgccatcctggctgagaggagccttgggcccaaattgtacggaattttccctcaagggaggctggaacagtttattcccagcagacgactggatactgaagaactcagtttacctgatataagcgctgaaatcgcggagaagatggcaactttccacggaatgaaaatgccttttaataaagagcctaagtggctctttggaacaatggaaaaatatcttaaggaagtgctacgcataaagtttacggaggaaagcagaattaaaaaactacataagttactctcttacaatctaccgctggagctggaaaaccttcgcagcctccttgagtccacccctagtccagtggtgttctgtcacaacgattgtcaagagggtaacatattgcttctggaagggcgagagaatagcgaaaagcagaagctgatgctcatagattttgaatatagcagttataattatcgcggatttgatatcggaaatcacttttgtgagtggatgtacgattactcctacgaaaagtatccattcttcagagccaatatccgaaaataccccacaaagaagcagcagctgcatttcatctcttcgtacctccccgctttccagaacgacttcgagaatctcagcactgaggagaaatcaatcatcaaggaagagatgctgctcgaggttaaccggttcgccttggcaagccacttcctgtgggggttgtggagcattgtgcaggccaagatctctagtatcgaatttggttatatggactatgcgcaagccagatttgacgcgtatttccatcagaaacgcaaactcggagtctag

SEQ ID NO: 182793 - DNA, 1188 bp, synthetic construct
  misc_feature 1..1188: note = Description of Artificial Sequence: Synthetic coding sequence
  source 1..1188: mol_type = other DNA
atggccgccgaggccaccgccgtggccggcagcggcgccgtgggcggctgtctggccaaggacggcctccaacagtccaagtgccccgacactacccctaaacgcaggcgggctagctcgttaagtcgggatgcggagcgcagggcataccaatggtgtcgggagtatctaggtggagcctggcgaagagttcagcccgaagagctgcgggtgtatcctgtctctggtgggctttcaaacctgctcttcaggtgtagcctcccagaccatctccctagtgtgggcgaggaaccgagagaagttctgctgaggctgtacggagctatcttgcagggtgtggacagtctggtactggaaagcgtgatgttcgccattctcgcggagcgttcactgggtccccagctgtacggagtcttccccgagggaaggctggagcaatacatcccaagccgccctcttaaaacgcaagagctgcgggaacccgttttaagtgccgccatcgccaccaaaatggcgcagtttcacggcatggaaatgccctttacaaaggagcctcattggctgttcgggacaatggagcgatacctgaagcagatccaggaccttccccctaccgggcttccagaaatgaatttactcgagatgtattccttgaaagacgagatgggtaatctacgcaagctgctggagagtaccccatcacccgtggttttttgccataacgacatccaggaaggtaacatactccttttgtccgagcccgagaacgccgactcacttatgcttgtggacttcgaatacagttcctacaactacagaggctttgatatagggaaccacttctgtgagtgggtatacgactacacccatgaggagtggcccttttataaggccaggccgacggactatcctacacaagaacagcaattgcactttatccgacattacctggccgaagccaaaaagggcgaaaccttgagtcaggaggagcagagaaagctcgaagaggatctactcgttgaggtctcaagatacgcactcgcctcccacttcttttggggactgtggagtattctgcaggcctctatgagcactattgaatttggttacctcgattacgctcagtctcgtttccaattctactttcagcagaagggccaacttactagtgtacatagcagctcttag

SEQ ID NO: 182794 - DNA, 2247 bp, synthetic construct
  misc_feature 1..2247: note = Description of Artificial Sequence: Synthetic coding sequence
  source 1..2247: mol_type = other DNA
atgggcctgcggaccgccaagaagcggggcctgggcggcggcggcaagtggaagcgtgaggaaggaggcggaacacgagggcggagggaggttcggcctgcttgcttcttgcagagcggcggccggggggatcccggagacgtgggtggccctgccggcaacccgggctgctctccccatcccagggccgccacaagacctccccctctgcctgctcatacacctgcacacacccctgaatggtgtggagcagcttctgctgaggcagctgagccgcgaagagccggaccacatctatgcatccccgctcctgggttgacgaaaacccctatcctcgagaaggttccacgaaagatggccgcaaagacaccttcttccgaagagtcgggccttccgaaactcccggtccctcccctgcagcagaccttggccacttatctccaatgcatgaggcatctggtgtcagaggagcagttcaggaaaagccaggccattgtccagcagtttggcgctcctggtggactcggggagacgctgcagcagaagctcctcgagcgccaagagaagaccgccaactgggtgtcagagtactggctgaacgacatgtacctgaacaacaggttggcgctaccagttaactcttccccagccgtgatttttgcgcggcagcattttccagggaccgacgatcagttacgcttcgcagcatccctgatttctggtgtgctgagttacaaggccctgctggacagccatagtatccctaccgactgtgctaaagggcagctgagcggccagccgctgtgcatgaagcagtattacggcctcttctccagctatcgattgcctggccatacccaggacaccctcgtagcccagaactccagtataatgcctgaacccgaacacgtaatagtcgcatgttgcaaccagttctttgtgttggatgtcgtcatcaacttccgcaggctctctgaaggtgacctatttactcagctgcgcaaaatcgtgaaaatggctagcaatgaggatgagaggctcccacctataggattgctcacttctgacggcaggtcagagtgggcggaggcccgcactgtattggtgaaggattcgacaaatagggactccctggatatgatagagagatgcatttgcttggtttgcctggacgccccgggcggggtggaactgagcgacacgcaccgggccctccaactccttcacgggggagggtattctaaaaacggggccaacaggtggtatgacaagagcctccagtttgtcgttgggcgagacggcacctgtggggtcgtgtgcgaacattctccttttgacggaatcgtgctggtccagtgtactgagcatctgcttaaacacgttacccagtccagccggaaattgattagagccgactcagtttccgagctgcccgccccgaggcggctgagatggaaatgcagtcctgagattcaagggcacctcgcgtcttccgccgagaaactacaacggatcgtgaagaacttagatttcatcgtgtataagttcgacaattacgggaaaacatttatcaaaaagcaaaagtgtagcccagatgcttttattcaagtagcgctgcaacttgccttctataggctgcataggcgactcgtacccacctacgaatctgcctccattcgtagattccaggagggaagagtagataatatccggagcgcgacacctgaagccctggccttcgtacgcgccgttaccgaccacaaggccgctgtccccgcctccgaaaaactccttcttttgaaggacgccatcagagctcagactgcatataccgtgatggccatcactggcatggccattgataatcatctgctggccttgcgcgagcttgcccgtgcaatgtgcaaagaattgccagagatgttcatggacgagacgtatctaatgagcaatcgtttcgtactatctacttcacaggtacccactaccacagagatgttttgttgctacgggcctgttgtaccaaacggctatggagcctgttacaatccccagcctgagaccatacttttctgcatctcaagcttccactcttgtaaggagacaagctcctcaaaattcgctaaagcagttgaagagtctctgattgacatgcgcgacctgtgcagcctgctgcctcccaccgaatcaaaacctctcgcaactaaagaaaaagcgactagaccttcccagggacaccagccatag

SEQ ID NO: 182795 - DNA, 1893 bp, synthetic construct
  misc_feature 1..1893: note = Description of Artificial Sequence: Synthetic coding sequence
  source 1..1893: mol_type = other DNA
atggccgccaagacccccagcagcgaggagagcggcctgcccaagctccccgtgcctccacttcagcaaacgcttgccacctatctccaatgcatgcgccatcttgtgagcgaagagcaattccgcaaaagccaggcaatagtccaacaatttggcgctcccggtggactcggtgaaacactgcaacagaagctgctggaaaggcaggagaagacagcaaattgggtgtctgaatactggcttaatgacatgtatctgaataatcggcttgcccttcctgttaattcgtctccggccgtaatttttgctaggcagcacttccccggcactgacgaccagttgcgattcgcagctagcctgatttccggcgtgctgtcctacaaggctctgcttgactcacactccatcccaaccgattgcgctaagggacagctgtcgggccaacccctgtgcatgaaacagtattatggcctgttctcttcttaccgattgccaggacacacgcaggacacactcgtcgcacaaaattcctcgatcatgcctgaaccagaacacgttattgtcgcatgctgcaatcagtttttcgtgctggacgtggtgatcaactttcgtcggttatccgagggtgatctctttactcagctgaggaaaatcgtgaaaatggccagcaacgaggatgagcggctgcctccaatcgggttgctgacaagcgacgggagaagcgaatgggctgaggcgcggacggttctcgtcaaggacagtaccaaccgtgactcgctcgacatgatagagcgatgcatctgtcttgtgtgtctcgatgctcctggtggagtggagctgagtgatacacatcgtgctcttcagctgctccatggtgggggatattctaagaacggcgcgaatcggtggtatgacaagtccctgcagttcgtggtgggccgagatggcacatgcggcgttgtctgtgagcatagccctttcgacgggatagtactagtgcagtgtactgagcacctactgaaacacgtgacacagtcttcacggaaactcatccgcgctgacagcgtgtctgagcttcccgccccgcgacggcttaggtggaagtgtagcccagagatccagggccaccttgcttctagtgctgagaagctccagcgaatcgtgaagaaccttgatttcatcgtctataaatttgataattatgggaaaacttttattaagaagcagaaatgctctcccgacgcctttatccaggtggcgctgcagctcgccttttatcgactgcacagacgactggttcctacatatgaaagtgcctcaatccgtagatttcaggagggccgggtggataacataaggtccgctactcccgaggcactggcatttgtgcgcgccgtgactgaccataaggcagcagtgcccgccagtgaaaagttgcttcttctgaaggatgccatccgggcgcagaccgcatatactgttatggcaatcacgggcatggccattgacaaccatctgctagccctccgcgaattagcaagagcaatgtgcaaggagctgccggaaatgttcatggatgaaacctatctgatgtccaatcgctttgtgctctccaccagccaggtccctaccaccacagaaatgttttgctgttatggaccagtcgtccctaatggctatggtgcctgctacaatccacagcctgaaaccatactcttttgtatatcctcgttccacagctgcaaagaaacctcgtctagcaaatttgccaaagcggttgaagaaagtttaattgatatgagagacctgtgcagcctgctcccccccaccgagtccaaaccgctggcaacaaaagagaaagcaacacggccttcccagggacaccagccttag

SEQ ID NO: 182796 - DNA, 1893 bp, synthetic construct
  misc_feature 1..1893: note = Description of Artificial Sequence: Synthetic coding sequence
  source 1..1893: mol_type = other DNA
atggccgccaagacccccagcagcgaggagagcggcctgcccaagctgccagtgccacctctgcagcaaacccttgccacctacctacagtgcatgaggcatctggtgagcgaggaacagttcagaaagtcacaggccatagtacagcagtttggtgctcctgggggcttgggcgaaaccttgcaacagaagcttttagagcggcaggagaagaccgctaattgggtgtccgaatactggcttaatgacatgtatctgaacaatcgtttagctcttccggtgaatagtagtccagccgtgatcttcgctagacagcattttcccggcacagatgaccagcttcgcttcgcagcctcacttatcagcggagtccttagctataaagctttgctcgattctcactccatcccaactgactgtgcaaagggccagctttccggccaaccactgtgtatgaagcagtactacgggctctttagctcttatcgccttcctggacacacccaggatacactggtggctcagaatagtagcattatgcctgaacctgaacacgtgatcgtggcctgctgtaatcagttcttcgtgctggacgtagtgattaactttagacgattatccgaaggcgatttatttacccaactgcggaagatagtgaagatggctagcaacgaggacgaacggctccctccaattggccttctgactagcgacggtcgcagcgaatgggccgaagctaggactgtacttgttaaggattctactaatagggactcgctcgatatgattgagcgatgcatttgtctagtgtgcttggatgcccccggcggcgtcgagttatcggacacgcaccgcgccttacagctgttgcacggcggagggtatagcaaaaatggcgccaacaggtggtacgacaagtccttgcagttcgttgtaggtcgcgatggaacctgtggggttgtgtgtgagcacagtccgtttgatggcatcgtgcttgtacagtgcactgaacaccttctgaaacatgttactcagtcgtctcggaagctcattagagcggacagtgtcagcgagttacccgcccctagacggctgagatggaagtgctcccccgaaatccaggggcatttagcttcttccgcggagaaactacagcggattgtgaaaaatcttgatttcatcgtctacaaatttgacaattacggaaagaccttcataaagaagcagaaatgctcaccagatgcatttattcaggtggccctacagctagctttctataggctccacagaagactcgtgcccacatatgaatcggccagtatccggcggtttcaggagggccgtgtggacaacattcggagtgcaacccctgaggctcttgcatttgtgagggccgttaccgaccacaaagcagcagtgcctgcctcagagaagctgttgctgctcaaggacgctatacgggcccagacagcctacaccgtgatggcaataacaggtatggcaattgacaaccacttgctggctctacgcgagttagcccgcgccatgtgtaaagagcttcctgaaatgtttatggatgagacttacctgatgtctaatagattcgtgctatcaaccagccaggtgcctaccaccaccgagatgttctgttgttatggtccggttgtgcccaacggttatggcgcttgctacaacccacagcccgaaaccatccttttttgcatttctagtttccattcctgtaaagagacaagttcttctaagtttgccaaggctgttgaagagagcctcatcgatatgcgcgacttatgtagtctgttacccccaacggagtcaaagccactggccaccaaggaaaaagccaccagaccctctcaggggcatcagccctag

SEQ ID NO: 182797 - DNA, 1893 bp, synthetic construct
  misc_feature 1..1893: note = Description of Artificial Sequence: Synthetic coding sequence
  source 1..1893: mol_type = other DNA
atggccgccaagacccccagcagcgaggagagcggcctgcccaagctccctgtcccaccacttcaacaaacgctggccacatacctgcagtgtatgcgtcacctggtgagcgaggaacaatttcggaagagtcaggcgattgtacagcagttcggcgctccaggtggcctgggagaaacccttcagcagaaactgttggagagacaggagaagaccgcaaactgggttagcgagtattggctaaatgacatgtatttaaataacaggctagctcttcctgtgaattctagcccggccgtgatctttgcccgccagcattttccaggcacagatgatcagcttagattcgctgcatccctgatttctggtgtgctttcctacaaagctttactggactcccacagtattcctactgattgtgctaagggccagctgtcaggacagcctctgtgcatgaaacaatactacggactcttctcttcatatagacttcccgggcatacacaagatacactggttgctcagaatagctcaattatgcctgagcccgagcatgtgatcgtcgcctgctgtaatcaatttttcgtcctggatgtcgtcatcaatttccgtcgattgtcggagggagatttgtttacacagctaagaaagatcgttaagatggcctccaatgaagatgagcgactccctccgattggcttgctgaccagcgatggccggagtgagtgggccgaagcccggacagtactggtcaaggatagtacgaacagagacagcctcgacatgattgaacgctgcatctgtctcgtttgtcttgatgcccctgggggtgtggaactctccgacactcatagggcactccagctgttacacggaggcggttattcaaaaaacggagcaaacaggtggtatgacaagtccctccagttcgtggttgggagggacgggacttgtggtgtggtgtgtgaacattccccatttgatgggatcgtgcttgtgcagtgcaccgaacacctcctcaaacacgtgacccagtcaagtaggaagctcatccgggctgattccgtttcagagcttcccgcaccgaggagactcaggtggaagtgttccccagaaatccagggccacctggccagcagtgcagagaagctccagaggatagtgaagaacttggatttcattgtgtacaagttcgacaattacggaaaaacctttataaaaaagcagaaatgctctcccgacgcttttatacaagtggcacttcagttggctttttaccggcttcaccgacgactggtccctacgtatgagtctgcttcaatccggcgctttcaggaaggaagagtcgataatatccgctccgcaacacccgaagcactggcattcgttcgcgctgtaacggatcacaaggccgctgtgcccgcctcagagaaacttctgctgctgaaggacgccatcagggcccaaacggcttataccgtcatggccatcaccggcatggccatcgacaatcacctcctggctttgcgagagctggcccgggcaatgtgcaaggagctgcccgaaatgtttatggacgagacgtatctcatgtctaatcggttcgttttgtccacaagccaggtcccaaccacgacggagatgttctgttgctatggacctgtggtacctaatggctacggcgcctgttataatccgcagccggaaaccatattgttttgtatcagcagtttccattcttgcaaggagacctccagcagcaagtttgccaaggctgtggaggaaagtctgattgatatgcgggatctgtgcagtctgctgcccccaaccgagtccaagcctttggccactaaagaaaaggctacaaggccttcccagggtcaccaaccgtag

SEQ ID NO: 182798 - DNA, 2001 bp, synthetic construct
  misc_feature 1..2001: note = Description of Artificial Sequence: Synthetic coding sequence
  source 1..2001: mol_type = other DNA
atgtggcccgagtgccgggacgaggccctgagcaccgtgggcccccatctctgtatcccagccccaggcctcacaaagaccccaatcctggaaaaggttccacggaaaatggctgctaaaaccccatcctccgaagagtccggcctgcctaaactccccgtgcccccactacagcagaccctagcaacctatttgcagtgtatgagacatctggtctccgaggagcagttccgcaaatcacaggcgatcgttcagcaattcggagcccccggcgggttgggagagactttgcagcagaagcttctcgagcggcaggagaaaactgctaactgggtgtctgaatactggctgaacgatatgtatttaaataataggctggccctgccagtgaactcctccccagcagtaatatttgcgagacaacactttccaggtactgacgatcagctacggtttgccgccagccttatctctggagtccttagttacaaagcccttctcgactcacactctatacctactgattgtgcaaaaggccagctttccggccagcccctctgcatgaaacagtactatggcctcttttcgagctaccgacttccgggacatacgcaggataccttggtagcccagaattcctccattatgccagaacctgagcacgtcatcgtggcatgttgcaaccagttcttcgttctcgacgtcgtcatcaatttcaggaggctctccgaaggtgatctctttactcagctccggaaaattgttaaaatggcatctaacgaagacgagagacttccacctatcggacttctcacctcggacggacgaagcgagtgggctgaggctagaacggttttggtgaaagacagtactaaccgcgactccctcgacatgatcgaaaggtgtatatgtctggtgtgcttagacgctccaggaggcgttgaactgagcgacacacatagagccttacagcttctgcacgggggaggatactcaaaaaatggggccaatagatggtatgacaagtctctgcagtttgtcgtcggcagagatgggacatgtggagtcgtatgtgaacactccccatttgacggaatcgtcctggttcagtgcacagagcatttgctgaaacatgtgacgcagtctagccggaagctgatccgtgcagacagcgtaagtgaactccctgccccccgtcgcctgcggtggaagtgtagccctgaaatacagggccatttggctagctcagcggagaaactgcaacggatcgttaaaaatctggatttcatcgtgtataagtttgataattacgggaaaaccttcattaaaaagcagaaatgttcacccgatgcctttatccaggtggctttgcagctggccttttatcgtctacaccgaagacttgtgccaacctatgaatccgcttcaattcggcggttccaggagggacgagtcgataatatcaggagtgctacaccagaggctctggccttcgtgcgcgcagtcaccgaccacaaagcggctgtgcctgctagcgagaagctgttactactgaaagatgctattagggcccagaccgcatacacagtgatggccattaccgggatggctattgataaccatctgctggccttacgcgagttggcccgtgctatgtgcaaggagttaccagaaatgttcatggacgaaacctatttgatgagtaacagattcgttctcagtacttctcaggtacccacaaccacagaaatgttttgttgttacggtccagtcgttcctaatgggtatggcgcatgctacaaccctcagcctgagacaatacttttctgtatttctagcttccactcatgcaaggagacgtctagttcgaagtttgccaaagctgtggaagaaagcctgatcgatatgagggatttatgtagtctgctgcccccgaccgagtcgaagccgttagcaactaaagaaaaagccactcggccatcccaggggcaccaaccctag

SEQ ID NO: 182799 - DNA, 1638 bp, synthetic construct
  misc_feature 1..1638: note = Description of Artificial Sequence: Synthetic coding sequence
  source 1..1638: mol_type = other DNA
atggccgccaagacccccagcagcgaggagagcggcctgcccaagctcccggtgccgccactccaacagacgttagcgacctaccttcaatgcatgcgccacctggtctctgaggagcaatttcgtaaatctcaggcaatcgttcaacagttcggagcccccggcgggctgggagaaaccttgcaacaaaagctgctggagaggcaggaaaaaaccgcgaactgggtgagtgagtattggctaaacgatatgtatttaaacaatagactagctttgccagtgaactcgtctcctgctgtcatatttgctaggcaacacttccctggcactgacgatcagttgagatttgccgcaagtttgatctctggcgtgcttagctataaggccctgttagactctcattcaataccaaccgattgcgccaagggccaactgagcggacagccactgtgcatgaagcagtactacggcctgtttagcagttatcgtctgccaggtcatacacaagacacgctggtggcccagaactccagcatcatgcccgagcccgagcatgtgatagtggcctgctgcaatcagttctttgtcctggatgttgttatcaactttcgtcgactgtctgagggtgacctgttcacgcagctccgcaaaattgtcaaaatggcctccaatgaagacgaacggctgcctcctatagggcttttaacatctgatggccgatctgaatgggcagaggctcgcacggtgttggtaaaagactcaaccaacagggacagtcttgacatgatcgagaggtgtatttgcctggtgtgccttgacgcacctggaggcgtggaactaagtgacacccacagagccctccagctcctgcacggtggtggctacagtaaaaatggcgccaatcgttggtacgacaagagtctgcagttcgtggtgggccgcgacggaacatgtggagtggtttgcgaacactcaccctttgatgggattgtccttgtgcagtgtacagagcacctgctgaagcacgtgactcagtccagcaggaagcttataagagccgacagtgtttcggaactgcccgcaccgagaagactccgatggaagtgtagtccagagatccagggtcacctcgcttcaagcgcggaaaaactacaaagaatcgttaaaaatctggatttcatcgtttataagttcgataactacgggaagacattcattaagaaacagaagtgctctcctgacgcctttattcaagttgccctgcagctcgcattctaccgccttcataggagactggtgccaacctatgagagtgcctcaattagacgattccaggagggccgcgtggataacatacgcagtgcgactccagaggctctcgcattcgttcgcgcagtcaccgatcataaagccgccgtgcctgcctctgagaagctcctactgttgaaggacgcaattcgcgctcagaccgcctataccgtgatggcaattacagggatggcaatcgacaatcatctcctcgccctccgcgagctggcaagggcaatgtgcaaagagctgccagagatgttcatggacgagacatacctcatgagcaatcggtttgtcctcagcactagccagttgtgctggccgtag

SEQ ID NO: 182800 - DNA, 1383 bp, synthetic construct
  misc_feature 1..1383: note = Description of Artificial Sequence: Synthetic coding sequence
  source 1..1383: mol_type = other DNA
atgaacaccagcgccccccccgccgtgagccccaacatcaccgtgctggcgccaggaaagggaccctggcaggtcgcatttataggaataacaacgggccttttaagcctcgcaaccgttaccggaaacctgctcgtgctgatcagtttcaaggttaataccgagttgaagactgtgaacaactacttcttgcttagcctggcatgcgctgatctgattatcggtaccttttctatgaacctgtacacaacctacctcctgatggggcactgggcgctcggtaccctggcctgtgatctgtggcttgcgctcgattacgtggcgtcaaatgcttctgtgatgaatctccttctgatttcatttgaccggtacttcagtgtgacgaggccactcagttaccgcgctaagaggaccccccgccgagcagcactgatgattggcttagcttggctagtttcattcgtgttgtgggcaccagccattcttttttggcagtaccttgtgggtgaacgcacagtactagctggacagtgctacatccagtttttgtctcaacccattatcacctttgggaccgctatggctgcgttttatctgccagtaactgtgatgtgcaccctatattggagaatttaccgagagaccgagaaccgcgccagagagcttgctgcactccaaggcagcgaaacacctggaaaggggggcggcagcagcagtagtagcgaacgctcccaacccggggctgagggtagcccagagacaccaccagggaggtgctgccgttgttgcagagcccctcggctgctgcaggcttactcttggaaagaagaggaggaagaagatgaggggtcaatggagagcttgacaagctcagaaggggaggaacctggatctgaggtagtcatcaagatgccaatggtagatcccgaggctcaggcgcccacgaagcagccgccacgctcatcacctaataccgtgaaaaggccaactaagaagggccgggatcgcgccggtaagggtcaaaaaccgcgcggaaaggaacagctggctaaacgcaaaaccttctccctcgtgaaggagaaaaaagcagctaggacactctctgcaattctgttggcatttatcttaacttggacaccctacaacatcatggtcctggtgtcaaccttctgcaaggattgtgtaccggaaacattgtgggaactcggctactggttgtgttatgtgaattccactatcaaccctatgtgttatgccttgtgcaacaaagcatttcgggacacattccgactgctgttgctgtgccgatgggacaaacgccgatggagaaagatcccaaagaggcccgggtctgtgcaccgcactcccagcagacagtgttag

SEQ ID NO: 182801 - DNA, 405 bp, synthetic construct
  misc_feature 1..405: note = Description of Artificial Sequence: Synthetic coding sequence
  source 1..405: mol_type = other DNA
atgaacaccagcgccccccccgccgtgagccccaacatcaccgtgctagcaccaggcaagggcccctggcaggtcgctttcataggcataaccaccgggttgctgagtcttgccacagtgacaggcaacctgttggttctaatctcttttaaagtgaacactgaactaaaaacagtgaacaattacttcctgctctccctcgcctgcgctgacctcattattggtactttctctatgaatctgtatacaacctaccttctgatggggcactgggcattggggacactggcatgcgacttatggcttgctctggattatgtggccagtaacgcatccgtcatgaacttactgctgatttctttcgatagatacttcagcgtgactaggccactgtcatatcgttag

SEQ ID NO: 182802 - DNA, 1365 bp, synthetic construct
  misc_feature 1..1365: note = Description of Artificial Sequence: Synthetic coding sequence
  source 1..1365: mol_type = other DNA
atgaacaccagcgccccccccgccgtgagccccaacatcaccgtgttggcacccggcaagggtccatggcaggttgccttcatcggaataactactggtctgctgagcctcgccacggtcaccgggaatctgctggtccttatcagtttcaaagtgaacacagaacttaaaacagttaataactactttttactctccctggcctgtgcagatctaattatcgggacctttagtatgaatctgtatactacatatctgctcatggggcactgggccctgggaactctggcttgtgacctgtggctggccctggattacgtcgcatccaacgcctcggtaatgaatttactgctcatctctttcgataggtacttctcagtgactagacccctgtcttatcgcgctaagcgcacacccagaagagcggctctgatgattggcctcgcttggctggtttcgttcgtgctatgggcccccgccatactattctggcaatacctagtgggcgagcgcaccgtgctggctggacaatgctacatccagttcctctcccagccgatcataacattcgggaccgccatggccgctttctatctccccgtaacagtgatgtgcaccctgtactggcgcatctaccgggagactgaaaatcgagcccgcgaactggctgccctccagggaagtgaaactcctggaaagggaggcggctcttctagcagtagtgagagatctcagccaggggccgaaggaagtccagaaacccccccggggaggtgctgccgctgttgccgagcaccaagactcctccaggcatactcctggaaggaggaagaagaggaagacgaaggaagcatggagagtttgacatcttcggaaggcgaagaacctggctctgaggtcgtcatcaaaatgcccatggtggaccctgaagcacaggcccccactaaacaaccgcctcgttcttctcccaatactgtgaagcgccctactaagaaaggccgggacagagccggaaaaggccagaaaccaaggggaaaggagcagttagctaaaagaaagactttttctctggtcaaagaaaaaaaggcagccagaacgttgtcggcaatcctgcttgcttttatcctgacatggaccccttacaatatcatggtgctggtgtccacgttctgcaaagattgcgtgcccgagacgctgtgggagctgggttactggctatgttacgtgaactctaccataaatcccatgtgctatgcactctgcaacaaggccttcagagatacctttagactacttctcttatgtagatgggacaaacgacgctggcggaagatccccaaacgccccggatctgtgcataggtag

SEQ ID NO: 182803 - DNA, 1401 bp, synthetic construct
  misc_feature 1..1401: note = Description of Artificial Sequence: Synthetic coding sequence
  source 1..1401: mol_type = other DNA
atgaacaacagcaccaacagcagcaacaacagcctggccctgacctccccttataaaaccttcgaggtcgtcttcatcgtgctggttgctgggtctctgtcgctcgtgacaatcatcggcaacattctggtaatggtttccatcaaagttaacagacacctccagacggtgaacaattacttcttgttctctctggcatgtgccgaccttattataggagtgttttcaatgaatctgtacacactgtacacagtaataggctactggccactgggccctgtggtgtgtgatttatggttggctcttgattacgtggtctcaaacgctagcgttatgaatctacttataattagcttcgaccgttacttctgcgtaacaaaacctttaacttatccagtgaaaaggactacgaagatggcagggatgatgattgcagccgcctgggttctttcctttatcctgtgggcccccgcgatcctattctggcagttcattgtgggagtgagaaccgtggaagatggtgagtgttacatccagttttttagcaacgccgccgtcactttcggtaccgcgattgccgctttttacctacccgtcatcattatgacggttctgtactggcacatcagtcgagcctccaaatctaggattaagaaagacaagaaggaacctgtagctaaccaggatcctgtgagcccctcactggttcagggcaggatagtgaagcccaacaacaataatatgcccagtagcgacgacggcctggaacacaacaagatccagaacgggaaggctccccgggaccccgtgacagagaactgtgtgcagggcgaagagaaggagtcaagcaatgatagtacatccgtctcagctgtggcttctaatatgcgcgacgatgagataactcaagacgaaaacactgtgtcaacaagtctcgggcactctaaagacgagaacagtaagcagacctgcatccggataggcacgaagacacccaaatccgatagttgtacacccacaaacaccactgtggaggtggtggggtccagtgggcagaacggtgatgagaagcagaatatcgtggcaaggaaaattgtaaagatgaccaagcagccagctaagaagaaacccccaccatcacgtgaaaagaaagtcaccagaactatcctggccatcctgcttgcttttataattacttgggctccctataacgtcatggtgctgataaataccttctgcgctccttgtattccaaataccgtgtggactatcggctattggctgtgctacatcaactccaccatcaatcccgcctgctacgcactttgcaatgcaacattcaaaaaaacgttcaaacatctgctgatgtgtcactacaagaacattggcgccacacggtag

SEQ ID NO: 182804 - DNA, 1401 bp, synthetic construct
  misc_feature 1..1401: note = Description of Artificial Sequence: Synthetic coding sequence
  source 1..1401: mol_type = other DNA
atgaacaacagcaccaacagcagcaacaacagcctggccctgacctctccgtacaagacattcgaggtggtgttcatcgtgctggtggcgggatcactgtcgctcgttaccataataggaaacatcctggtcatggtctcaatcaaggtgaatcgacacctccagacggtcaataactacttccttttttccctcgcctgcgccgatcttatcattggagtcttttcaatgaacctatacacgctctacaccgtgatcggatactggccacttgggcctgtcgtctgcgacctatggctggctttagactatgtggtatcgaatgccagcgtgatgaatctgcttattataagtttcgacaggtacttctgtgttactaagccactgacctacccagttaagagaaccacaaaaatggcaggtatgatgatcgccgcggcatgggttctctcttttatactctgggcacccgctattttattttggcagttcattgtgggagtccggacagtggaagatggagagtgctacatccagttcttcagtaacgccgccgttacatttggtacagcaattgccgctttttaccttcccgtgatcatcatgacggtcctgtattggcatatctctcgagcttccaagagtcgcatcaagaaagacaagaaggagcctgtggcgaaccaggacccggtcagtccctccttagtccagggccgcatcgttaaacccaacaacaataatatgcccagttctgatgatgggctagagcataacaagatccaaaacgggaaggccccccgggacccagtgactgagaactgcgtgcaaggggaagagaaggagtcttccaacgactccacctccgtgtccgcggtggcatctaacatgcgggatgacgagatcactcaagatgaaaatactgtttccacatcactgggacacagcaaggacgaaaatagtaagcaaacttgtatcagaatcgggaccaaaacccctaagtctgattcctgcacaccaacgaatacaaccgtcgaagtggtaggctcttctgggcagaatggtgacgaaaagcagaacattgttgcgcggaagatagtaaagatgacaaagcagccagctaagaagaagccccctcccagccgtgagaagaaggtaacgaggactattctggctatccttctagccttcatcatcacatgggccccttacaacgttatggtccttattaatactttttgtgctccgtgcatccctaatacggtttggacaatcggttactggttgtgctacattaattcgacaattaacccagcctgttatgcgctgtgcaatgccacctttaaaaagacatttaagcacctgttgatgtgtcactacaaaaacataggtgccacaaggtag

SEQ ID NO: 182805 - DNA, 1401 bp, synthetic construct
  misc_feature 1..1401: note = Description of Artificial Sequence: Synthetic coding sequence
  source 1..1401: mol_type = other DNA
atgaacaacagcaccaacagcagcaacaacagcctggccctgacctcaccctacaaaacctttgaggtggtgttcatcgttctggtggccggatcacttagcttggtcacgattattggcaatattctcgtgatggtttcgattaaggttaaccggcacctgcagactgtgaacaactacttccttttcagccttgcctgtgccgacttgatcattggtgtgttttctatgaacctctacacgctttacactgttatcggatactggcccctgggaccggtcgtttgcgatttgtggctggccctggactacgtggttagcaatgcttctgtcatgaacctcctgataatctccttcgaccgctatttttgtgtgactaagccgcttacatatccggttaaacgcactacaaagatggcagggatgatgatcgctgctgcctgggtgctttcctttatcctgtgggctcctgctatactgttctggcagttcattgtcggtgtgcggactgtggaggatggcgagtgctacatccaattttttagcaacgccgctgtaacctttggaaccgctattgccgctttctacttaccagtgatcataatgacagtgctgtactggcatattagccgggccagcaagagcaggatcaagaaggacaaaaaagagcccgttgctaaccaggatccggtgagcccatctctcgttcagggacgtatcgtgaagcccaataacaacaacatgcccagcagtgatgatggcctcgaacataacaaaattcaaaatggtaaagcgccccgtgaccctgtgactgagaactgcgtccagggggaagaaaaagaaagttctaacgatagtacgagtgtgagcgcagttgcgtccaacatgcgagatgacgaaatcactcaggatgaaaatacagtgtcaacttcgttaggccacagtaaggatgagaacagcaagcagacgtgtattcggatcgggacgaagacgcctaagtccgactcgtgtaccccaaccaacactacagttgaagtcgtcggctcgagcgggcaaaacggtgatgagaaacagaatatcgtcgccaggaaaatcgtgaaaatgaccaagcaaccggccaaaaagaagccacctccatctagagagaagaaagtgacccggaccatcctcgctattttgctggcctttattattacatgggccccctacaacgttatggtgctgattaatactttttgcgccccctgtataccaaataccgtttggactattggatactggctgtgttacataaactccaccatcaatcctgcctgctatgccctgtgtaacgcaacgtttaagaaaaccttcaagcatctcttaatgtgtcactacaaaaacattggtgcaacgaggtag

SEQ ID NO: 182806 - DNA, 1401 bp, synthetic construct
  misc_feature 1..1401: note = Description of Artificial Sequence: Synthetic coding sequence
  source 1..1401: mol_type = other DNA
atgaacaacagcaccaacagcagcaacaacagcctggccctgacctcaccctataaaacatttgaggtcgtgtttattgtgttagtagccgggtccctctccctggtgactattatcggtaatatacttgtaatggtgtccattaaagtgaatagacacctgcaaactgttaacaattacttcctctttagcttagcttgtgccgaccttatcatcggcgtcttcagtatgaacctctacactctgtacactgtaattggctattggcccttgggaccagtcgtttgcgatctctggctcgccctcgactacgtcgtgagcaacgcaagcgttatgaacctgctgatcatttctttcgacagatacttttgtgtaactaagcccctaacgtatccagtaaagaggaccaccaaaatggctgggatgatgattgctgccgcctgggttctgagctttatcctttgggcacctgccatcctgttttggcagttcatcgttggggtccgaaccgtagaagacggcgagtgctacatccaatttttctcaaatgcggcggtgaccttcggcacagctatcgccgcattctacttgcccgtgataatcatgacagtgctctattggcacatctccagagcatccaagagccgcatcaaaaaggacaagaaggagcccgtggccaaccaggaccccgtcagcccctctttagttcagggcaggatcgtcaagcccaataacaacaacatgccctcttcagacgatggccttgagcataacaaaatacagaacggcaaggctccccgtgaccccgtgacggaaaactgtgtgcagggggaagagaaagaaagctcgaacgacagcacctcagtttctgccgtcgcatccaatatgcgagacgacgagatcacccaggacgaaaacacagtgagcactagccttggccattcaaaggacgagaatagtaagcagacatgcattcggattggcactaagaccccaaagtcggattcctgcacgcctactaatacaaccgtcgaagtggtgggaagttccggccaaaatggggacgaaaagcagaacatcgtggcccgcaaaatcgtgaagatgacaaaacaacctgcaaaaaagaagccgcctccctctcgggagaagaaggtgacaagaactatcctggcgatcctgctagccttcatcatcacttgggccccttacaacgtcatggtgttgatcaatactttttgcgcaccgtgcatccccaacactgtttggaccataggctactggctgtgttatatcaactccaccataaacccagcgtgttatgccctgtgcaacgccacttttaagaagacctttaagcacctcctgatgtgccactataaaaacatcggagcaacacgctag

SEQ ID NO: 182807 - DNA, 1401 bp, synthetic construct
  misc_feature 1..1401: note = Description of Artificial Sequence: Synthetic coding sequence
  source 1..1401: mol_type = other DNA
atgaacaacagcaccaacagcagcaacaacagcctggccctgaccagtccttacaaaacctttgaggttgtgttcattgtgctggtcgccgggagcttgagtctagtaaccatcatcggaaacatattagtgatggtttctatcaaggttaaccggcacctccaaaccgttaataactattttctcttctctctggcatgcgcagacctgatcattggagtgttctctatgaacttatatactctatacactgtcatcggctactggccgctagggcctgtagtttgcgacctctggttggctctcgactatgtcgtcagtaatgcgagcgttatgaaccttctgatcataagtttcgaccgctatttctgtgttacaaaaccactgacttaccccgtgaagcgaaccacaaaaatggcagggatgatgatcgccgcagcttgggtcctgtctttcatactgtgggcccccgcgattctgttctggcaattcatcgttggtgttcgcacagtggaagacggcgaatgctatatacagttcttctccaacgcggcagtgacctttggaaccgccattgccgccttttacttgcccgttatcattatgactgtcctgtattggcacatctcccgggctagtaagagccgcataaagaaggacaagaaagaaccggtggctaatcaagaccccgtgagcccatctctggtgcaaggtagaattgttaaacctaataacaacaacatgcctagtagcgacgatggcctcgaacacaacaaaattcagaatgggaaggcccccagagatccagtgaccgaaaactgcgttcagggggaggagaaagaatcttcaaatgattcaaccagtgtttcagccgtcgctagcaatatgagggacgatgagatcacccaggatgaaaacaccgtctccacgtcactcgggcactccaaagatgagaacagcaaacaaacttgcatccggattggcactaaaacccctaaatctgactcttgcaccccgacaaataccaccgtggaggtcgtcggaagtagcggccagaacggggatgagaagcaaaatatcgtagctaggaagatcgtgaaaatgactaagcagcctgcgaagaagaaaccacctccatcaagggaaaagaaagtaacacgaaccatcctggcgatcctgctggcttttatcattacttgggccccatacaacgttatggtgctaatcaatactttctgcgcaccttgcatccccaacaccgtctggacgatcgggtattggttgtgctacattaattcaaccataaaccctgcgtgttacgcactgtgcaatgccacgtttaagaagacctttaagcaccttctgatgtgccattataagaatataggggccacacggtag

SEQ ID NO: 182808 - DNA, 1401 bp, synthetic construct
  misc_feature 1..1401: note = Description of Artificial Sequence: Synthetic coding sequence
  source 1..1401: mol_type = other DNA
atgaacaacagcaccaacagcagcaacaacagcctggccctgaccagtccatacaagactttcgaggtcgtgtttatagtgctcgtggctggttcattgtctctcgttaccatcatcggaaatatactggttatggtcagcattaaagtcaaccgccacctccaaacagtcaataattacttcctattcagcctggcctgtgcggacctgatcatcggcgtcttctccatgaacctgtatacactctataccgtaatcggatactggcctctgggaccagtggtttgtgacctgtggttggcccttgattacgttgtcagtaatgcatctgttatgaatctacttattatcagcttcgaccgctacttctgcgtaaccaagcctctaacatatcctgtgaaacgtaccactaagatggccggcatgatgattgcggccgcttgggtattaagtttcatcctttgggcaccggccatcctgttttggcagttcatcgtcggcgttagaaccgtagaggacggtgaatgctacattcagttcttcagcaatgcagctgtaaccttcggcactgctattgccgccttttatctgccagtgatcattatgactgtgctgtattggcacatcagtcgggcaagcaaatccaggatcaagaaagataagaaggaaccggtggccaaccaggaccccgtcagccctagtctagtgcaaggcagaatcgttaagccaaataacaataatatgcccagttctgatgacggcctggagcacaataaaatacagaacggaaaagcaccaagagatcctgtgaccgagaattgtgtccagggcgaagagaaggagtcatccaacgatagcacttctgtgagcgctgttgcatccaatatgagagacgatgagattactcaggacgaaaatactgtctctaccagcctcggacattccaaagatgaaaattcaaagcagacgtgtatcagaattggcactaagacacccaagtcggacagttgcacccctactaatactacagtcgaggtagtgggctcctccggccaaaacggcgatgaaaagcaaaatattgtcgcccggaagatagtgaagatgactaaacagcccgcaaaaaagaagccccctccatctcgggagaagaaggttacacgaaccatactcgccatcctcttagcctttatcattacttgggctccatacaacgtaatggtgctgatcaacacattctgcgcgccatgcatccctaataccgtgtggaccataggatactggctatgctacatcaacagtaccatcaatcctgcctgttatgcgctgtgcaacgccactttcaaaaagactttcaagcacctgttgatgtgtcattataagaatattggcgcgactcggtag

SEQ ID NO: 182809 - DNA, 1773 bp, synthetic construct
  misc_feature 1..1773: note = Description of Artificial Sequence: Synthetic coding sequence
  source 1..1773: mol_type = other DNA
atgaccctgcacaacaacagcaccaccagccccctgttccccaacataagctcatcctggatccactctccctcagatgccggcctcccaccagggactgtaacgcacttcggtagctacaacgtgtcaagggcagccggaaacttttctagtccggacgggacgacagatgatccactgggaggacacactgtgtggcaagtggtgtttatcgcattcttgacaggcatcctggcccttgtcacaattattggaaacatcttagttatcgtcagcttcaaagtgaacaaacagctgaagacagtgaataattactttctgttaagcctcgcttgtgccgatctcatcatcggagtgatttccatgaacctctttaccacctacatcattatgaaccgatgggctctgggtaaccttgcgtgcgacctctggcttgctatagattatgtggcctcgaacgccagcgtgatgaatctccttgtcatcagtttcgatagatactttagcatcactcgacccctaacttaccgggcgaagagaacaacaaagcgggctggggttatgatcggcctcgcttgggtaatcagcttcgttctgtgggcaccagccattttattctggcagtacttcgttggaaaacgcaccgtgccgcccggggagtgttttatccagttcttaagcgaaccaactatcacattcggtaccgcaattgcagcattctacatgcctgtaactatcatgaccattctctactggaggatttacaaggagacagagaagagaaccaaggaactcgcgggtctgcaggcctcagggactgaagctgagacagagaacttcgtgcaccccactggcagcagccgtagctgttcctcctatgagctgcagcagcagtccatgaagcggtccaatagacgcaaatatggacggtgccacttctggttcacgaccaaatcttggaagccatcttcagagcagatggaccaggaccattcttcttcagatagctggaacaacaatgacgctgctgccagcctcgagaattccgctagctctgacgaagaggatattggctcagagactcgcgccatctattctatcgtgctgaagctgcccggacactctactattttaaactcaaccaagctccctagcagtgataatctccaagtgccagaggaagaactaggaatggtggaccttgagcgcaaagccgataaattacaggcccagaagagcgtggacgacggaggcagcttccctaaatccttcagcaaactgcctatccagttggagtccgcggtggacactgccaaaaccagcgatgtgaacagcagcgtgggaaagtccacagccacccttcccctgtctttcaaggaggccacactagcaaagaggtttgcactgaaaacccgttcacaaatcacaaaacggaaacgaatgtctctggtgaaggaaaaaaaagccgcccagaccctttccgctatcctcttggcgttcattattacttggaccccttataacatcatggtgctcgtcaataccttttgcgatagctgtatacctaagacgttttggaacctggggtattggttatgttatatcaacagcactgtgaatcccgtgtgctatgcgctgtgtaacaagacatttagaaccacatttaaaatgttacttctctgccagtgtgacaagaagaagagaagaaagcaacagtatcagcagaggcaatcagtaatttttcacaagcgggcgcccgaacaggcactgtag

SEQ ID NO: 182810 - DNA, 333 bp, synthetic construct
  misc_feature 1..333: note = Description of Artificial Sequence: Synthetic coding sequence
  source 1..333: mol_type = other DNA
atgaccctgcacaacaacagcaccaccagccccctgttccccaacatttcctcgtcttggatccacagtccatccgacgccggcctcccccctggcactgtgactcacttcgggtcttataatgttagccgagccgcaggaaacttttcttctcctgacggcacaactgacgacccccttggtggccacacggtctggcaggtcgtcttcatcgcatttctgacagggattctggctctggtgacaatcattggcaatatattagtgatcgttagctttaaggtcaataagcaactcaagaccgtgaacaattactttttgcttagcttgtag

SEQ ID NO: 182811 - DNA, 1440 bp, synthetic construct
  misc_feature 1..1440: note = Description of Artificial Sequence: Synthetic coding sequence
  source 1..1440: mol_type = other DNA
atggccaacttcacccccgtgaacggcagcagcggcaaccagagcgtccgcctggttacttcatcctcccacaacagatacgaaaccgtcgagatggtctttatcgcaactgtgaccgggtcactgtccttagtcactgtagtgggcaacatcctggtgatgctgagcataaaggtcaatcgccagttgcagactgtgaacaattacttcctgttttcactggcatgcgctgacttaatcatcggcgcattttcaatgaacctttatacagtatatatcataaaaggctattggcctctgggagctgtcgtgtgtgacctgtggctggctcttgactatgtggtctctaacgcaagcgttatgaacctcctgattattagcttcgacaggtacttctgcgtgacaaaaccgctgacctaccctgcgaggcggacaaccaaaatggccggactcatgatcgcagccgcctgggtgctcagcttcgttctctgggctccagcgatactgttctggcagtttgtagttgggaaacgaacagtgcctgataaccaatgttttatccaatttctgagtaaccctgctgtcacttttggcactgctatcgccgcgttttatctgccagtcgtgatcatgacagtcctgtatatccacatatccctggcctcccgcagccgcgtgcacaaacatcgacccgaaggacccaaggaaaaaaaagccaaaaccctggcatttctgaagtcgccactgatgaagcaatccgtgaagaaaccaccccccggcgaagcagcccgagaggaactgaggaatggcaaacttgaggaggcccctccccctgcccttccacctcccccaagaccagtggcggacaaggacacctccaatgagtctagtagcggctcggcaacacaaaacacaaaggagaggcccgcaacagagttatccacaacggaagccacaacccccgccatgcctgcgccgcctctccagcctagagcgctgaatcctgcctctaggtggtccaagatccaaatcgtgactaagcagacagggaatgaatgcgtcactgccattgagattgtgcccgcgacacccgctggcatgagacctgccgctaatgtggcccggaagtttgcaagtatcgccagaaaccaggttcgaaaaaagcgtcagatggccgccagggaacgtaaagtgacccgcacaatatttgccattttactggcctttattctgacctggaccccttataacgtgatggtgctggtcaacacattctgccagagttgtattcccgatacagtttggagcatcggctactggctctgttacgtgaattctacaatcaatccagcatgctatgcactctgtaatgcgacctttaagaaaacattccgccatttgctcttgtgccagtataggaatattggcacagcacggtag

SEQ ID NO: 182812 - DNA, 1599 bp, synthetic construct
  misc_feature 1..1599: note = Description of Artificial Sequence: Synthetic coding sequence
  source 1..1599: mol_type = other DNA
atggagggcgacagctaccacaacgccaccaccgtgaacggcacccctgtgaatcaccagcccctcgagcgccataggctgtgggaggtcatcaccatagcggccgttaccgctgtcgttagtcttattaccatcgtggggaacgtcttagtgatgatatctttcaaggttaactctcaactgaagactgttaataattattatctcctaagtttagcatgcgctgacctcatcattggaatcttttccatgaacttatataccacctatatccttatgggccggtgggctctcggctctctggcctgcgatctctggttagcgttggactatgtagcttcaaatgcgtccgtgatgaacctcctagtgattagtttcgaccggtatttctctatcacccgaccactgacataccgcgccaaaaggactcccaaaagggctgggatcatgataggacttgcctggctgatctcatttatactgtgggctccggccattctgtgttggcagtacttagtgggcaagaggaccgttcccctagatgaatgccagatacagtttctgtcagaacccacaattacttttggaaccgccatcgccgcgttctacatccctgtgtccgtcatgaccatactttattgcagaatctaccgggaaaccgaaaagagaactaaggacctcgcagacctccaggggtccgattcggtcaccaaagcagagaagagaaagcctgcacatcgagctctttttaggagctgtctccgctgtcctcgacccaccctggctcagcgagagcgcaaccaggcgagctggtctagctcccgaagaagcacttcaacaacaggaaagccttcacaggccactggcccgtccgcgaattgggccaaagccgagcaattaactacttgttctagctacccatccagcgaggacgaagataaacccgctaccgatcccgtgttgcaagttgtttataaaagtcaggggaaagaaagtccaggagaagaattctctgctgaagagacagaagagactttcgttaaggctgaaactgagaagtctgattacgacactccaaactacctgctctcacccgccgcagctcacaggcccaagagtcagaagtgcgtcgcgtacaagttccgacttgtggtgaaagccgatgggaaccaggaaaccaacaacggatgccacaaggttaagatcatgccttgcccatttcccgttgctaaggagccttctacaaagggactcaaccccaaccctagtcaccagatgacgaagcgtaagcgcgtggtccttgtgaaggagcggaaagcagcccaaactttaagcgcaattcttcttgcattcattattacctggaccccctacaacataatggtgttggtgtcaacattctgcgataagtgtgtgcccgtgaccctgtggcatttgggctattggctgtgctacgtaaattcgacagtgaaccccatctgctatgccctttgtaatcgcaccttccggaagactttcaagatgctgctgctttgtcggtggaagaagaagaaggtcgaggagaagttgtattggcaaggcaattcaaagctcccctag

SEQ ID NO: 182813 - DNA, 1599 bp, synthetic construct
  misc_feature 1..1599: note = Description of Artificial Sequence: Synthetic coding sequence
  source 1..1599: mol_type = other DNA
atggagggcgacagctaccacaacgccaccaccgtgaacggcaccccagtgaaccatcagccactcgaaagacaccggctctgggaagttatcacaattgctgctgtgacggccgtagtctctttaattacaatagtcggaaatgtgcttgtcatgatcagctttaaggtgaacagccagctgaagactgttaacaactactacctgctcagcctcgcgtgtgcagacctgataatcggtatcttcagtatgaacctatacactacctatatcctgatgggcagatgggcactaggttcactcgcctgcgacctatggctggcacttgattacgtcgcatctaacgcgagcgtcatgaatctgctggtcatttcatttgataggtatttcagtatcacccgaccactgacctaccgggctaaacggacccccaagcgagccggtatcatgattggtctggcctggctgatcagcttcattttgtgggcgcctgcaatcctgtgctggcagtatttggtgggcaagcgtactgtgccgttggatgaatgccaaatccagttcttgtctgagcccactatcacatttggcacggccatagctgctttctacattcctgtgtcagttatgaccatcctgtactgcaggatttatcgcgaaaccgagaagcgtaccaaagatctggcagatctgcaaggttctgactcagtaaccaaggccgagaagagaaagccagctcatagggccctgttccggtcctgtctgcggtgtccacggcccaccctggcccagcgcgagaggaatcaagcatcctggagctcctcgcgacgttctacgtctaccaccggcaagccttcccaggcgacggggccctctgccaactgggccaaggccgagcagctcaccacttgctcatcttacccttcttcagaagatgaggacaaaccggcaacggacccggttcttcaggtcgtctacaaatctcaggggaaagaaagtcctggtgaggaattcagcgccgaagagaccgaggaaacattcgtaaaagcagaaacggaaaagagcgattatgacacccccaattatttgctttcccccgccgccgcccacagacctaagtcccagaagtgcgtcgcctacaaattccgtctcgtggtgaaggccgacgggaaccaggaaaccaacaacggttgccacaaggtaaagatcatgccgtgtccctttcccgtcgcgaaagagccaagtactaagggtctgaacccaaaccccagccatcagatgactaaacggaagagggtggtactagtgaaggaaaggaaggccgcccaaactctctctgccattctgctggctttcattatcacatggaccccatacaacattatggtcctggtgagcacattttgtgataaatgcgtgcccgtcaccctgtggcacctcggctattggttgtgttatgtcaacagcactgtgaaccctatctgctatgcactatgcaaccggaccttcagaaagacatttaaaatgcttctgctttgtagatggaaaaagaagaaggtggaggaaaagctgtattggcagggaaacagcaagctcccatag

SEQ ID NO: 182814 - DNA, 69 bp, synthetic construct
  misc_feature 1..69: note = Description of Artificial Sequence: Synthetic coding sequence
  source 1..69: mol_type = other DNA
atggagggcgacagctaccacaacgccaccaccgtgaacggcacccccgtaaatcaccaacctctgtag

SEQ ID NO: 182815 - DNA, 1449 bp, synthetic construct
  misc_feature 1..1449: note = Description of Artificial Sequence: Synthetic coding sequence
  source 1..1449: mol_type = other DNA
atggagccctggcccctgctgctgctgttcagcctgtgcagcgccgggttggtccttggctcggaacacgagacccggttagttgctaaacttttcaaagactactctagcgttgtgcgcccagttgaagaccaccgccaggtggtcgaggtgacagttggtctgcagcttattcagttaatcaatgtggatgaggttaatcagatcgtgaccaccaatgttcgattaaagcagggggacatggtcgacctgccccggccctcctgtgtaacccttggagtcccgctctttagccatctgcagaacgaacagtgggttgattataacctgaaatggaaccctgacgactacgggggtgtgaagaaaatccacattccttctgaaaagatttggaggccagacctggtactctataacaatgccgatggtgacttcgcaattgtcaagtttacgaaggtgttactgcagtatacaggccatattacgtggactccacccgccattttcaaatcttattgtgagatcatcgttacgcacttcccatttgacgaacagaactgcagcatgaaacttgggacatggacttatgatggctccgtcgtcgcgattaaccccgagtctgaccaaccggatttgagtaattttatggaaagtggggagtgggtgataaaagaatccaggggctggaaacactcagtgacatactcttgctgtccagataccccgtacctggatatcacctatcattttgttatgcaaaggctgcctctgtactttatcgtaaacgttatcatcccctgtctgcttttttcgtttctgactggtctggtgttctatctgccgacggactcaggagaaaaaatgacactcagcatttccgtcctcctgtctttgacagtcttcctgctcgttattgtcgaactcattccgtccacctcttcggctgtcccactgatcggtaagtatatgcttttcacgatggtttttgtgatcgcttcaatcataatcacggtcatcgtgatcaatactcatcatagaagtccatctacccatgtgatgcccaattgggtgcgcaaggtttttatcgacactatacctaacattatgtttttcagcacaatgaagcgaccaagccgagaaaagcaggacaagaaaattttcacagaggatatcgacatctccgatatttcaggtaagcctggcccacctcctatgggtttccattcgccgttgatcaagcaccccgaagttaagtccgctatagaggggattaaatatattgcggagactatgaagagtgaccaggagagcaacaatgccgcggctgagtggaaatacgtggccatggtgatggaccacatcctgctgggggtctttatgctggtttgcatcattgggaccctagccgtctttgccgggagacttatagagctcaatcagcagggctag

SEQ ID NO: 182816 - DNA, 1374 bp, synthetic construct
  misc_feature 1..1374: note = Description of Artificial Sequence: Synthetic coding sequence
  source 1..1374: mol_type = other DNA
atggagccctggcccctgctgctgctgttcagcctgtgcagcgccggcctcgttctagggagtgagcatgaaacacggctggtggccaagctgttcaaggactacagtagcgtggttcgacccgtggaggatcaccgacaagttgttgaggttaccgtagggcttcagctgatccagctgatcaacgtcgatgaagttaatcaaatcgtcactaccaacgtccgtcttaaacagcagtgggtggactataatctgaaatggaatcctgacgactatggtggggtgaagaagatacacattccatccgaaaaaatttggaggcccgacctggtgctgtataacaacgccgacggcgactttgcaatcgttaaattcacaaaggtccttctccagtacaccggacacatcacatggacccccccagctatctttaaatcctattgtgagatcatagtgacccactttccatttgacgagcagaattgctcaatgaagctcggaacttggacttacgacggtagcgtggtcgccattaatccagaatccgatcagcctgacctgagcaactttatggagtcaggcgagtgggttattaaagaaagccgggggtggaaacattctgtgacatattcatgctgtccagacaccccgtatctcgatatcacttatcactttgtaatgcagcgcctgcctctctatttcatagtgaacgtcattatcccatgtttgctttttagcttcctgactggtctggtcttctacctgcctactgattcaggtgaaaagatgaccctttcgatatccgtcttgcttagcttgaccgtattcctactggtgattgttgaactcattccatccactagcagcgcagtgcccctgatcggcaagtacatgttgtttacgatggtttttgtgatcgcctccatcatcatcacggttattgtgatcaatacacatcatcgcagcccgtcaactcacgtcatgcccaattgggtccgtaaggtatttatcgacaccattccgaatatcatgttcttcagcacgatgaaaagaccttcccgagaaaaacaggataagaagattttcaccgaagacatcgacatcagcgacatttcaggaaaaccaggacctccccccatgggttttcatagtcccctaattaaacaccccgaggtgaaaagtgccatagagggtatcaagtatatagctgagaccatgaaaagcgatcaggagtcaaataacgcagccgccgagtggaaatacgtggcaatggtcatggatcacattcttctgggcgtgtttatgctggtgtgtataatagggacattggccgtttttgcaggacggttgattgagctcaaccagcagggatag

SEQ ID NO: 182817 - DNA, 1353 bp, synthetic construct
  misc_feature 1..1353: note = Description of Artificial Sequence: Synthetic coding sequence
  source 1..1353: mol_type = other DNA
atgggcctgcggagccaccacctgagcctgggcctgctgctgctgttcctcttgccagctgaatgtctgggagccgaagggcggctcgctctcaagctgtttagggacctctttgctaactacaccagtgccctcaggccagtagccgacacagaccagacactgaacgtgacactggaggtcaccttgagtcagattatcgatatggatgaacgcaaccaagtgctgaccctttacctttggatccgacaggagtggaccgacgcatatttgcggtgggaccctaatgcctacggcggtctcgacgctatccgaattccgagctcactagtatggcgaccggatatcgtgctgtataataaagcagacgcccagcccccagggtcagcttctactaatgtggtcctaagacatgatggtgcggtccgatgggatgccccggcgataacccgttctagttgtcgagtggacgttgctgccttcccattcgacgcccaacattgcggtctgactttcggatcctggacccacggtgggcaccaactcgatgtgaggcctagaggggccgccgcgtccttggccgattttgtcgaaaatgtagagtggagggtgctggggatgcctgccaggcgaagggtgctcacatatggctgttgctccgagccctacccagatgttacatttaccttgctcttgaggcgtagggctgccgcctacgtgtgtaacctgctattgccttgcgtcctgattagtctccttgctcccttggcgttccatctaccagctgactcaggcgagaaagtatccctaggtgttaccgtccttctcgcgctgacggtattccaactgctgcttgcagagagcatgccaccggcggaaagcgtccccctcatcggtaagtattacatggccacaatgactatggttacattcagcacagccctgacaattctgatcatgaacctgcactactgcgggccttcagtccgcccagtgcctgcctgggccagggccttgctgcttggccacctagcccgcggattgtgcgttcgggagcggggtgagccatgcggccagagccggcccccagagctgagtccatctccgcagtcccccgagggcggggctggtcctcccgctgggccctgccacgaaccacgatgcctttgtaggcaagaggccctactgcaccacgtggcaaccatcgctaacacattcagatctcaccgagcagctcagcgctgccacgaggactggaaacgattggctagagtgatggaccgattcttcctggccatattcttcagcatggcgcttgtcatgtctcttctcgtcttggttcaggcactgtag

SEQ ID NO: 182818 - DNA, 1590 bp, synthetic construct
  misc_feature 1..1590: note = Description of Artificial Sequence: Synthetic coding sequence
  source 1..1590: mol_type = other DNA
atgggccccagctgccccgtgttcctgagcttcaccaagctgagcctgtggtggctgctgctgacaccggctggcggagaagaggcgaagaggcctcctcctcgtgccccgggcgatcctctctcctctccatcacctaccgctctgccacaggggggtagccatacagaaaccgaggataggttgttcaagcacctctttcgcggctacaatagatgggctcggcccgtgccaaatacttccgatgttgtgatcgtaaggtttggactgtcgatagcacagcttattgacgttgacgaaaagaatcaaatgatgaccactaacgtgtggttaaagcaggagtggtccgactacaaattgcgctggaacccaactgattttggaaacatcacaagccttcgggtaccaagcgagatgatatggatcccggacattgtcctctataacaatgccgacggggaatttgccgtgacccatatgactaaggcccacttattcagcaccggtaccgtgcactgggtccctcccgctatttataagtcgtcttgcagcatcgacgtcactttttttccattcgaccaacagaactgcaagatgaaatttggatcctggacatatgacaaggcaaaaatcgaccttgagcagatggaacagactgtggatctcaaagactattgggagtcaggggaatgggcaattgtgaatgcaacaggaacctacaactcaaaaaaatatgattgttgcgctgagatctaccccgacgttacatacgccttcgtgatcagacgcttgcctttgttctacactatcaacctgatcataccatgcctgttgatttcgtgtctgacagtcctggtcttttatctgccgtccgattgcggcgagaaaattacactgtgcataagcgtacttctttcactgacagtcttcctcctcctaatcactgaaatcattcccagcactagtctggtgattcctctgattggcgagtaccttctttttacaatgatttttgtcacgctatcgatcgtgattacggtgtttgtgctgaatgtccaccaccggtctccatccacacacacaatgccccactgggtccggggagctctgctgggatgtgtcccaaggtggctgttaatgaatagacctcctcctccagtggaactgtgccatccgctcaggctcaaattgagtcctagttatcactggctggagtcaaatgtagatgcagaagagagagaggtggttgtggaagaggaagaccggtgggcctgtgcggggcatgtcgccccgtctgtgggcacactctgttcacatggacacctccactctggagcctctgggcctaaggcagaggcattgctgcaggagggtgaactacttcttagcccccatatgcagaaagcgttggagggtgttcattacattgcagatcatcttcggtccgaggatgcggactcctcagtgaaggaggactggaaatacgtggccatggtgatcgatcggatctttttgtggctatttatcattgtgtgctttcttggtactatcggtctgttcctgccgccatttcttgctggcatgatttag

SEQ ID NO: 182819 - DNA, 1590 bp, synthetic construct
  misc_feature 1..1590: note = Description of Artificial Sequence: Synthetic coding sequence
  source 1..1590: mol_type = other DNA
atgggccccagctgccccgtgttcctgagcttcaccaagctgagcctgtggtggctgctgctgacacctgccggcggcgaggaagctaaaagaccacctccccgagctccgggcgacccgctttcatcccccagccctacagctctcccacaaggcggaagccacactgaaaccgaggataggttatttaaacatctgtttcgcggctacaatcgatgggcccgaccagtgcccaacactagtgacgtggtgatcgttcgcttcgggctgagcatcgcccagctgattgacgtggacgagaagaatcaaatgatgacaacaaacgtatggttaaagcaagaatggtccgactataagctcaggtggaacccaaccgacttcggaaacataaccagccttcgggtcccaagcgaaatgatttggattccagatatcgtgctttataacaacgcagatggcgagttcgccgtgacacacatgaccaaggctcaccttttttccaccgggactgtacattgggtccccccagcaatctacaaatcaagttgtagtatcgacgtgacattcttcccttttgaccagcagaattgtaagatgaagttcggaagctggacctacgataaggccaaaattgacctggagcagatggagcagacagtggatctcaaagactattgggagtccggcgaatgggctattgtcaacgccacagggacgtataactccaagaagtacgattgttgtgccgagatctaccctgacgtgacttacgcctttgtgattaggcgcctgccactgttctatacgatcaacctaattattccctgtctgctgataagctgcctgaccgtgttagtgttttacttacctagcgactgcggagagaagatcactctttgtatttccgtgttactaagtttgacagtctttctgctactgataacggaaatcatcccctctacgagcctcgtgatccctctgatcggagaatatctcctgttcacaatgatctttgtgacattatcgatagtgatcacggtgttcgttttgaacgttcaccatcgtagcccatccactcacactatgccacattgggtgcggggcgcactgctgggctgtgtgccgagatggctcttgatgaaccgaccccccccccctgtcgagctctgtcatccattgcgcttaaaactatcaccatcttatcattggctcgagagcaacgtcgatgccgaggagcgcgaggttgttgtcgaagaagaagacaggtgggcttgcgccggacacgtggcgcccagtgtggggactctgtgtagccacggacacctgcactcaggcgcgtcaggcccaaaagcagaagctctgctgcaggaaggtgagctcctccttagcccgcatatgcagaaggcgttagagggcgtgcattacatcgctgaccacctcagaagtgaagacgccgattcttccgtcaaagaggactggaagtacgtggccatggtcatcgacaggatctttctgtggctgtttattatagtttgcttccttgggacaatcgggctgtttctccccccttttttggctggcatgatttag

SEQ ID NO: 182820 - DNA, 1518 bp, synthetic construct
  misc_feature 1..1518: note = Description of Artificial Sequence: Synthetic coding sequence
  source 1..1518: mol_type = other DNA
atgggcagcggccccctgagcctgcccctggccctgagcccccccaggctgctactcctgcttttgctcagcttgctgcccgtagcgagggcatctgaggctgagcaccgcctctttgaacggctgtttgaggactacaatgagatcattcggcctgtcgccaatgtgtccgaccccgtgataatacacttcgaggtcagcatgtcccagctagtcaaggtggacgaggtcaaccagataatggaaactaatctgtggctgaagcaaatctggaatgattataagctgaaatggaacccgtctgactacggcggggccgagtttatgagggtgccggcgcagaagatatggaaaccggacatagtcctgtataacaacgccgttggagacttccaggtggatgacaaaaccaaggccctgcttaaatatacaggcgaggtgacttggatccctcctgcgattttcaagagtagctgtaagatcgatgtgacgtatttcccattcgattaccagaattgcacgatgaagtttgggtcttggtcttacgataaggccaagatcgatttagtcttaatcggctcatccatgaacttgaaggattattgggagtccggcgagtgggccattatcaaggctcctggatataagcacgatatcaaatacaactgttgcgaggagatctaccccgacataacttatagtctgtatattcggcggctgcccctattctatacaattaacctgattatcccatgcttgctgatctcgttccttaccgtactggttttttatttaccctctgactgtggcgagaaagtgaccttgtgtatcagcgtgcttctgtccttgacagtttttctgctggtgattaccgaaacaattcccagtacttccctcgtaatccccctgatcggcgagtatctcctgttcactatgatttttgtgaccttatcaatagtgatcaccgtattcgttttgaacgtccattatcgcacacctactacccacaccatgccatcctgggtgaaaacagtgttcctaaatctactgccaagagttatgttcatgacacgtcctacatcaaatgagggcaacgctcaaaagccacggcccctctatggtgctgagctctccaacctgaactgttttagccgagctgagagcaagggctgtaaagaggggtatccatgtcaggacggtatgtgtggttactgccaccacaggcgtattaagattagcaatttttccgccaatctgacgcggagtagctcttcggagtccgtggacgccgtgttgtcactttcagccctttcaccagaaattaaagaggccatccagagtgtgaagtatatcgccgaaaatatgaaggcccagaatgaagccaaagagattcaggacgactggaagtacgtggccatggtcatcgatagaatattcctgtgggtgtttactttggtttgcatcttgggcaccgcaggactatttctgcagccacttatggctcgggaggacgcttag

SEQ ID NO: 182821 - DNA, 939 bp, synthetic construct
  misc_feature 1..939: note = Description of Artificial Sequence: Synthetic coding sequence
  source 1..939: mol_type = other DNA
accaaggccctgctgaagtacaccggcgaggtgacctggatcccccctgctatatttaagtccagctgcaaaattgacgtaacatatttccctttcgattaccagaactgtactatgaagtttggctcctggtcatatgacaaggcgaagatagatcttgtgttaatcggcagctctatgaaccttaaggattactgggagtcgggggaatgggccatcattaaagcacctgggtacaagcatgacatcaagtataactgctgcgaggagatttacccagatatcacttattctctgtacatccgccggctaccattattctatactataaaccttataataccatgcctgctgatctctttcctcactgtgctggtgttctatctcccatctgattgcggtgaaaaagtgacgctgtgcatctctgttttactcagtttgaccgtgtttctgttagtgatcactgaaacaatcccttcaacaagcctggtgattcccttaattggggagtatctcctgttcactatgatctttgtgacactgtctatagttatcaccgtgtttgtgttgaacgttcactaccgcacacccaccacccatacgatgcccagctgggtgaagacagtcttcctgaatctattgcccagagtgatgttcatgaccagacccactagtaacgagggtaacgcccaaaagccgcgtcctttgtacggcgcgtctccgaaagccgcgagaagggagattaaggaggccatacagagcgtcaaatacatagcagagaatatgaaggcccagaacgaggcgaaagagatccaggacgactggaaatacgttgctatggttattgaccgcatattcctatgggtcttcaccctcgtatgtatccttggcaccgccggattgtttttgcaacccctcatggcccgagaagacgcatag

SEQ ID NO: 182822 - DNA, 1470 bp, synthetic construct
  misc_feature 1..1470: note = Description of Artificial Sequence: Synthetic coding sequence
  source 1..1470: mol_type = other DNA
atgggcagcggccccctgagcctgcccctggccctgagccccccccgtcttctgctgctgttgctgctctccctgctgccagtagcccgtgcaagtgaggccgagcatcggcttttcgagagattattcgaggattacaatgagataatccgcccggtggcaaatgtctctgatcccgtaatcatccactttgaggtctccatgagccaactagtgaaggtggatgaagttaatcagatcatggagaccaacctctggctgaagcagatttggaacgattataagttgaagtggaatccctccgactacgggggcgcggaatttatgcgcgttcctgctcagaagatttggaagcccgatattgtgctgtacaataacgctgtcggtgacttccaggtcgatgacaagactaaggctcttctcaaatacacgggggaagtgacctggataccaccggctatcttcaaatcttcgtgtaaaattgacgtgacatatttcccgttcgattaccagaattgtactatgaaattcggctcttggtcctacgataaggctaagattgatctcgtcctcatcgggagctccatgaatctgaaggattactgggagagtggtgagtgggcgatcatcaaggcccctggctataagcatgacattaagtacaattgttgcgaagagatttaccctgacatcacttacagcctttatatcaggcggttaccactgttctatacgatcaatttgatcattccctgtctactgatttcattcctcaccgtgctagtattctacctgcccagcgactgtggggaaaaagtcaccctgtgcattagcgtgcttcttagtttgaccgtatttctgcttgtgatcaccgagactatcccctccacttccttagtcatcccactgatcggcgaatacctgctgttcaccatgatcttcgtcaccctgtccattgtcatcaccgtattcgttctcaacgttcattacaggaccccaacaactcacaccatgccgtcctgggtcaaaactgtatttctcaatcttctcccccgcgtgatgttcatgactaggcccaccagtaatgaaggcaatgctcaaaagcctcgccctctgtatggggcggagctgtccaatctcaattgtttctcccgagctgagtctaaggggtgtaaagaggggtatccttgtcaggatggtatgtgcgggtactgtcaccacagacgaatcaagatcagcaatttttctgccaacctgaccaggtcctcttcttccgagagtgttgatgcagtcctgagcctgtctgcgctgtctccagagattaaagaggcaatacagtctgtgaagtatattgccgagaatatgaaggcgcaaaacgaggccaaggaagaacagaaggctcaagagattcaacaactgaaacggaaagagaaaagcaccgagacaagtgaccaggagccgggcctgtag

SEQ ID NO: 182823 - DNA, 1518 bp, synthetic construct
  misc_feature 1..1518: note = Description of Artificial Sequence: Synthetic coding sequence
  source 1..1518: mol_type = other DNA
atgggcagcggccccctgagcctgcccctggccctgagcccccccagactgctcttactcctgctcctttccctcctccccgtcgctcgggcttccgaagccgagcatcggttgtttgagagactgttcgaggactataacgaaatcattaggcccgtcgctaacgtatccgatcctgtgattatccattttgaggtcagtatgtcccagttggttaaggtcgatgaggtgaaccaaatcatggaaacaaacctatggctaaaacagatctggaatgactacaaactcaagtggaacccatctgattacggtggagctgagtttatgagggtgcccgctcagaaaatttggaaacctgacatagtgctgtataataacgccgtgggcgatttccaagtcgacgacaaaaccaaggctttacttaaatacactggggaggtcacctggattcccccagcaatttttaagtcatcttgtaagatcgatgttacatactttccctttgattatcaaaattgtacgatgaagttcgggtcatggtcctacgacaaagcaaagattgacttggttctcataggcagcagtatgaacctgaaagattactgggaatcaggggagtgggctattatcaaagctcctgggtacaagcacgacattaagtacaactgttgcgaggaaatctatcccgacatcacctattcactgtatatccggagactgccgctgttctacacaatcaatctgatcataccatgcttgttaatttcttttcttactgtgttggtcttctacctgccttcggattgtggcgaaaaagtgaccctgtgtatctccgtcctgttgagtctcacggtgtttctcctggttattactgaaactattccttccacgtcactggtcattcctttaataggtgagtatcttctttttaccatgatctttgtgacacttagtattgtgatcacggtattcgtgttgaatgtccattatcgcactccaactactcacactatgccaagctgggtcaaaacggtgtttctgaacctgctgcctcgggttatgtttatgactaggcctacctctaacgaggggaacgcacaaaaacccagacccttgtacggcgccgagctctccaatctcaactgtttcagtagagccgagagcaagggttgtaaagaaggatatccctgccaggacggaatgtgcgggtattgtcaccaccgccgaatcaaaatcagcaatttttctgctaatctgacccggtcttcatcgtcagagtccgttgatgccgtactgtctctgtccgcgcttagcccggaaattaaagaggccatccagtccgtcaaatacatcgcagagaatatgaaggcccagaatgaagctaaagaaatacaggatgactggaagtacgtagcgatggtaattgacaggatttttctatgggtgttcactctggtgtgcatcctgggaactgccggcttgtttctgcaaccgctcatggccagagaggacgcctag

SEQ ID NO: 182824 - DNA, 1602 bp, synthetic construct
  misc_feature 1..1602: note = Description of Artificial Sequence: Synthetic coding sequence
  source 1..1602: mol_type = other DNA
gcccccgagcccggcgaggccccccggctggaccgggcccaccccgggtgtgcctgtgcggagctctccctgctgtggctgtgttgctgcacatttacctcagccgatggcgacttcgcagtgacccacttgactaaggcccacctgttccatgacgggagagtccagtggactccccctgctatctacaagtcctcatgcagcatagatgtgacgtttttccccttcgaccagcagaattgtaccatgaagtttggatcctggacttacgataaggctaagattgacttggtcaatatgcacagtcgggttgatcagctcgatttttgggaaagcggagagtgggtgattgtggatgcagttggcacttataacacacggaaatatgagtgttgcgccgagatctatccagacatcacttatgcctttgtgatccgacggctgccacttttctacacaatcaacctgatcattccgtgtttgctcatttcctgccttacagtgctcgtgttctatcttccgtccgagtgcggcgagaagatcacgttgtgcatttctgtgttgctcagtctgaccgtattcctgctgttgattactgagatcatcccaagtacttctcttgtgatccctctgatcggcgagtaccttctgtttaccatgatcttcgtcaccctttctatagttataaccgtcttcgtcctcaacgtccaccacaggtcaccacggactcacaccatgccgacttgggtgagaagggtttttctggacatcgtgccgcgcttgttactaatgaagcgcccctctgtggtaaaagacaactgtagacggttaatcgagtccatgcacaaaatggccagcgcccctcggttttggcctgaacccgagggagagccacccgccacttccggaactcagtctcttcatcccccttctcccagtttctgtgtaccattggatgtacccgcggagcctggcccctcatgtaaatccccttctgatcagctcccaccccagcagcctctggaggctgagaaggcctcccctcacccatcacctggcccttgtagaccccctcacggcactcaggcacccggcctggctaaggcaaggtccctgagtgtgcagcacatgtcctcaccgggagaagcggtagagggtggcgtgcgctgccggtcccgatccatccagtactgtgtgcctcgcgatgatgccgcccccgaagctgatggacaggccgcaggtgcgctagcaagcaggaatacccattcagccgagttacctccccctgaccagcccagtccatgtaaatgcacttgcaaaaaggagcccagctctgtgtcaccctccgctaccgtgaagacaaggtctacgaaagcccctccccctcacctccccctgagccctgcactgacacgcgccgtggagggggtgcaatacattgccgaccaccttaaggccgaggacactgacttctctgtcaaggaggattggaaatacgtcgccatggtcatcgacagaatatttctatggatgtttattatcgtttgtctgttagggactgtcggcctcttcttgcccccgtggctcgcaggtatgatctag

SEQ ID NO: 182825 - DNA, 1884 bp, synthetic construct
  misc_feature 1..1884: note = Description of Artificial Sequence: Synthetic coding sequence
  source 1..1884: mol_type = other DNA
atggagctgggcggccccggcgccccccggctgctgccccccctgctgctgctcctggggacagggcttctgcgcgcctcaagccatgttgagacacgcgcccatgctgaggaaaggctgctgaaaaagctgttttcaggttacaataagtggtccaggcccgtggcaaacataagcgacgtcgtactggtgcggttcggactgagcatagcacagctgattgacgtcgacgagaaaaaccaaatgatgaccactaacgtatgggtgaagcaggagtggcatgattataagctgaggtgggatccagctgattacgaaaacgtcacatccatccgcatcccatcggagctcatttggagaccagacatcgtgttgtacaacaacgctgatggggattttgccgtgacccatctgactaaggcacacctgttccatgatggacgggtgcagtggactccaccggccatctataaatcctcctgcagcatcgatgtgacatttttcccatttgatcaacagaattgtacaatgaaatttgggagctggacttatgacaaggcaaagatcgacctcgtgaacatgcacagccgggtggatcagctggacttttgggagtccggcgagtgggtgatagtcgatgccgtaggtacatacaatacccggaaatatgaatgctgcgctgaaatctaccctgacataacctacgccttcgtcattagaagactgcccctgttttacaccattaatttaatcataccctgcttactcatttcctgtctgacagtcctcgtcttctatctgcctagcgagtgcggtgagaagatcactctgtgtatttcagtcctcctctcactgaccgtcttcttactgctgattacggagattatcccgtccacttcactagttatcccacttatcggcgaatacctgctgtttaccatgatatttgttacactgagcatcgtgataacagtgtttgttctgaatgtccaccatagatctcccagaacccacacaatgcccacttgggtacggcgtgtgttcctggacatcgtgccccggcttctgctcatgaaacgcccaagcgttgtcaaagataattgtcgcaggctcatcgaatcaatgcacaagatggccagcgccccccgcttctggccggagcccgagggagaacccccggccacatccggcacccaatccctgcaccctccctccccctccttctgtgtgcctctagatgtgccggccgaacccgggcccagttgcaagtcccccagcgaccagctgccgccacagcagcctttggaagccgagaaggcatccccccatcctagcccaggaccatgcagaccccctcacggaacccaagcccctggactcgccaaagcacgctccctgtccgtgcaacacatgagttcgcctggagaagccgtggagggcggcgttcgttgcaggagccgctccatccagtactgtgtgcccagagacgacgcggcacccgaagccgatggacaggccgctggggctctggcatctcgcaatacacacagtgcagaactgccgcctcctgatcagccctctccttgtaaatgtacctgtaaaaaagagccctcatccgtctcgcctagcgccaccgttaagacgagatctaccaaggcacctcccccacacttacccttgtctcccgccttaacacgtgcggtggagggcgtccagtatatcgcggatcatttgaaagccgaggatacagacttcagcgtcaaggaagattggaaatacgtggccatggtcatcgatcgcattttcctgtggatgtttataatcgtatgccttttgggcactgtgggcctttttctcccaccctggctggccggaatgatctag

SEQ ID NO: 182826 - DNA, 1671 bp, synthetic construct
  misc_feature 1..1671: note = Description of Artificial Sequence: Synthetic coding sequence
  source 1..1671: mol_type = other DNA
atgcggatgagcccccccagcgccagcccccccagcagcagcggcgggaggacatccagctccacaacaaccgccggcgaaccattttgggcaggagtcctattcgcaattcgacctcatccgggtctgtcaggtcggattgtttggacagccggctgccccggagagggtgccgatggggacttcgcagttacccatctcacaaaggcccatttatttcacgatggtcgggttcagtggactccacccgcgatctataagtcttcttgcagcatcgacgtgacattcttcccattcgaccaacaaaactgcacaatgaagttcggctcatggacctatgataaggctaaaattgacctggtaaatatgcatagtcgagttgatcaacttgacttctgggaatctggggagtgggtaattgtcgatgcggtcggaacatacaacacaagaaaatacgaatgttgcgccgagatttatcctgatatcacctatgcgtttgtaatcagacgtctgccgctcttttacaccattaacctgattatcccttgtctgctgatctcctgcctcactgtcttggtgttttatctgcctagcgaatgtggggagaaaattactctgtgcatttctgttctactcagtctgaccgtgtttctcctgctcattactgaaataattcccagcacctcgctggtcatacccctgatcggtgagtatctcctgttcaccatgatctttgtaaccctgtcaattgtgattaccgtgtttgttcttaacgtacaccatagaagtccacgcacccatacaatgcccacgtgggttagacgggtgttccttgatatagttccacgattactgctgatgaaaaggccatccgtggttaaagataactgtagaagactgatcgaatccatgcataagatggcctccgcacctcggttctggccagaacccgagggagaaccaccagctaccagtggcacgcagtccttgcacccaccatcccccagcttctgcgtgccactggacgtgcccgctgagccagggcccagttgtaaatccccttctgatcaactcccccctcagcaacctctggaggcagaaaaggcaagcccgcaccccagtccaggaccatgtcgtcctccgcatgggacacaagcgcctggattggccaaggcacggtcgctcagtgttcagcacatgtcttccccaggagaggcagtcgaaggcggggttagatgtcgtagcaggagcatccagtactgtgtgccgagagatgacgcggctcccgaagctgacggccaggcagctggagctctggcctctaggaacacacactccgccgagctccctccccccgaccagccgtccccctgcaaatgcacgtgcaagaaagaaccgtcctccgtcagcccaagcgccacagttaagacccggagcacaaaagcacccccgcctcacctacctctctcacccgctctgacccgggccgtggagggggtgcagtatatagcagaccatctgaaagcagaggacacagacttttccgtgaaagaagactggaagtatgttgctatggtaatcgaccgaatattcctgtggatgtttattatagtctgtctgctgggcaccgtgggactctttcttcctccatggttggctgggatgatctag

SEQ ID NO: 182827 - DNA, 1407 bp, synthetic construct
  misc_feature 1..1407: note = Description of Artificial Sequence: Synthetic coding sequence
  source 1..1407: mol_type = other DNA
atggccgcccggggcagcggcccccgggccctgcggctgctgctgctggtccagctggtcgcaggtcgttgcgggctagcaggggccgccggcggtgcccagagggggctgtccgagccgagtagcatcgccaagcacgaggattcattgctcaaagatctttttcaggattatgagaggtgggtacggcctgtggaacatctcaacgacaagataaaaattaaatttggactcgccatctcccagctggttgacgtggacgaaaagaatcagcttatgactaccaacgtgtggctgaagcaggagtggatcgatgttaagttgcgctggaaccctgatgactatggcgggattaaggtgatacgcgtcccatcagatagtgtctggacacctgacatagtgctgttcgataacgccgatggacgctttgaagggacttccacaaagacagtcattcgttataatggtaccgtaacttggactcccccagctaactacaagtccagttgcacgatagacgtcacattcttcccgttcgacctgcagaactgtagcatgaagtttgggagttggacttacgatggttctcaggtagacatcattctggaagaccaggatgtggacaaacgggactttttcgataacggggaatgggagattgtctctgcaaccggaagcaaaggcaaccgcacggatagctgttgttggtacccatacgtcacctacagttttgtgattaaaaggttgcccctcttctatacgctgtttttgatcattccttgcatcggccttagctttctgacggtgctggtcttttacttgcccagcaatgagggggaaaaaatttgtctgtgtacatctgtcctcgtttccctgacagtttttctcctggtgatagaggagattattcctagtagctcaaaagtaatccctctgatcggggagtaccttgttttcacaatgatttttgtgactttgagcattatggttacggtgttcgccattaacattcatcaccgcagctcgtctacacacaatgcaatggcaccattagtgagaaagatcttcctgcacacactgcctaagctactgtgcatgcgcagccacgtggatcgctactttacacagaaggaggaaacagagagtggttcggggccgaagtcatcgcgaaacacactggaagccgcgctcgacagtataagatacattacccggcacataatgaaggagaatgatgtccgagaggtcgtggaggattggaagtttatcgctcaggtcctcgatcggatgttcttgtggacatttctgttcgtgagcattgtgggatccctgggtctctttgtcccagtgatttataagtgggccaatattctcattccagtgcatatagggaacgcgaataagtag

SEQ ID NO: 182828 - DNA, 1485 bp, synthetic construct
  misc_feature 1..1485: note = Description of Artificial Sequence: Synthetic coding sequence
  source 1..1485: mol_type = other DNA
atgctgaccagcaagggccagggcttcctgcacggcggcctgtgcctgtggctctgtgtttttacccccttctttaaaggctgtgtcggctgcgccaccgaggagaggttattccacaagctcttttctcactataatcaatttattcgtcctgtggagaatgtgtccgaccccgtgaccgtgcacttcgaggttgcaatcacacaattggcgaatgttgacgaggtgaatcagatcatggagacaaacctgtggctccgtcacatctggaacgattataaactgaggtgggaccctatggagtatgacggcattgaaactctgcgggtgccggccgacaaaatctggaaaccggatattgtgctgtacaacaatgccgtgggggatttccaggtggagggtaagaccaaggcactcctgaagtataatggcatgattacatggacccctccagcaattttcaagagttcctgccctatggacataactttcttccctttcgatcatcagaattgctcactgaaatttggatcctggacgtacgataaggcagagatcgaccttctgatcataggtagcaaggtcgatatgaacgatttttgggagaactcagaatgggaaattattgacgctagcggatacaagcacgatatcaaatataactgttgcgaagagatttatactgacatcacctattctttttatatccgcaggctaccgatgttttatacgataaatttgatcattccatgcctttttatcagttttctgacggtcctggtattttacctgccgagtgactgtggcgaaaaagtgacattgtgcatctccgtcctcctcagcctgacagtttttttgttggttatcactgaaacaattccctccacttccctcgtggttccactcgtgggggaatacttgctgtttaccatgattttcgttacgctgagcattgtcgtgactgtctttgtgctcaatatacattacagaacacctaccactcataccatgcccagatgggttaagacggtgttccttaaattactccctcaagtcctgctcatgcgatggcctctcgacaagactagaggcaccggtagcgacgcagtgccgcgaggactggcccgaagaccagctaagggaaagttagcatcacacggagaacccaggcacctgaaggagtgcttccactgccataaaagtaacgaactcgccacatcaaagagaaggctctcccaccagccactccagtgggtggtggagaacagcgaacacagtccggaggttgaagacgttattaatagcgtgcagttcatagccgagaatatgaaatcccacaatgagacaaaagaagtagaagacgactggaaatatgtggcaatggtcgtcgatcgtgtgttcctgtgggtgttcataatcgtgtgcgtatttggaactgctggcctcttcctgcagccattgttgggcaatacaggcaaatcttag

SEQ ID NO: 182829 - DNA, 1440 bp, synthetic construct
  misc_feature 1..1440: note = Description of Artificial Sequence: Synthetic coding sequence
  source 1..1440: mol_type = other DNA
atgctgaccagcaagggccagggcttcctgcacggcggcctgtgcctatggttgtgcgtattcaccccattttttaaaggttgcgtggggtgcgctaccgaggagcggctgttccacaagctgttcagccattataaccaattcatccgacccgttgagaacgtctccgatccggtgaccgttcatttcgaggtggccatcacccaactggctaatgtaatctggaatgactataagctccggtgggatccgatggagtatgacgggatcgagacccttcgcgttccagcagataagatctggaagcctgacattgtactctataataatgctgtcggcgacttccaggtcgagggtaaaacaaaagcccttctgaaatataacgggatgataacatggaccccccctgctatattcaaaagtagctgcccaatggatatcaccttctttccgtttgatcaccaaaattgtagcttaaagttcggctcctggacttacgacaaagcggagattgacttgttaattatcggatcaaaagtggacatgaacgatttttgggagaattcggagtgggagatcattgatgcctcgggatataaacatgatataaagtataattgctgtgaggagatttataccgacattacatattccttctatattagacgtctgccaatgttctacacgattaatctcatcatcccctgtctgtttatttcttttctaactgtgcttgttttctatttaccttcagattgtggcgagaaggtcaccctgtgcatctccgtgttgctgtccctgacagtctttttgttggtcatcacagagaccatacctagcacctccttagtggtgccactggtgggggaatacttgttatttacgatgattttcgtaaccctatccattgtggtgaccgttttcgttttgaatatccattacagaacgcctactactcacaccatgcctagatgggtgaagacagtgtttctgaaattactgccgcaagtgctgctcatgcgatggccactggacaagacccggggcaccggatccgacgccgtgccgagaggactcgcccgcagaccagccaaaggtaagctggcgtcacatggcgaacctagacacctcaaagaatgtttccactgtcacaagtctaatgaactcgccacatccaagaggcgactgtcccaccaaccactgcaatgggtagtcgaaaacagcgaacatagccccgaagtggaggacgtgatcaatagtgttcagtttatcgccgaaaacatgaagtcacataatgagacaaaggaagttgaagacgattggaaatatgtggcgatggttgtagaccgggtgttcctgtgggtattcattatcgtgtgcgtgttcggtaccgccgggctgtttctgcagcctctcctgggtaacacaggcaagagctag

SEQ ID NO: 182830 - DNA, 1509 bp, synthetic construct
  misc_feature 1..1509: note = Description of Artificial Sequence: Synthetic coding sequence
  source 1..1509: mol_type = other DNA
atgcggtgcagccccggcggcgtgtggctggccctggccgccagcctgctgcatgttagcctgcagggtgaattccagaggaaactgtataaagaactggtcaagaactacaacccactggaacgaccggtggccaatgattcccagcccctcacggtgtacttttccctgtcgcttctgcaaattatggatgtggacgagaagaaccaggtcctaacaacaaatatttggctgcagatgtcatggacagatcactacctgcagtggaacgtaagcgaataccccggagtcaagaccgtgcgattccctgacggacaaatctggaagcctgatatcctgttgtataactctgccgatgaacggttcgatgcaacctttcacaccaacgtgttagtgaactcctccggacattgtcagtacctgccccccggtatcttcaagtcctcctgctacattgacgtccgttggtttccgtttgatgtccagcactgcaagcttaaatttggatcatggtcctacggcggctggtccttagacctgcaaatgcaggaagccgatatcagcgggtatattcccaacggtgaatgggatttggtgggaattccaggaaaacggagcgaaagattttacgaatgctgtaaggaaccatacccggacgtgacattcaccgtgacgatgagacggcgtactctgtattacggactgaacctccttatcccttgcgtccttattagcgcattggctctgctggtgttcctgctgcccgcggacagcggagagaagatttctttaggtatcaccgtattgctctccctaaccgtgtttatgttactggttgccgaaataatgcccgctaccagtgacagcgtccccctgattgctcagtatttcgccagcacaatgattattgtagggctctctgtcgtggtcaccgtgatagtgctacagtaccaccaccacgatcccgatggcggtaaaatgcctaagtggacccgggtcatactccttaattggtgcgcatggttcctgaggatgaaacgcccaggcgaggataaggtgaggccagcctgtcagcacaaacaaaggagatgtagtctggctagtgtggagatgtcagccgtggccccccccccggcaagcaacggaaatctgctctatatagggttcagggggttagacggggtccactgcgttccaaccccagattccggggttgtttgtgggcggatggcctgctctcccacccacgatgaacacctgctgcacggaggtcaacccccagaaggagacccagatttggctaaaattttggaagaagttcgttacattgcgaatcgatttcgttgtcaggatgagtccgaggccgtgtgttccgaatggaagtttgcggcgtgtgtcgttgaccgtctgtgcctgatggcctttagtgtgtttaccatcatttgcacaattggtattctcatgtccgcacctaactttgtggaggcagtatcaaaagactttgcctag

SEQ ID NO: 182831 - DNA, 210 bp, synthetic construct
  misc_feature 1..210: note = Description of Artificial Sequence: Synthetic coding sequence
  source 1..210: mol_type = other DNA
atgcagaagtactgcatctaccagcacttccagttccagctgctgatccagcacctctggattgccgctaattgtgacatttgggccaaggttgcgcgggtcattggattgctcgccagccacaagaccgacctacaagaaaacacgccagtggtggaggctttcccaaactccccgcgtacgcccacactccccggtgtgcttacatag

SEQ ID NO: 182832 - DNA, 1239 bp, synthetic construct
  misc_feature 1..1239: note = Description of Artificial Sequence: Synthetic coding sequence
  source 1..1239: mol_type = other DNA
atgcagaagtactgcatctaccagcacttccagttccagctgctgatccaacatttatggatcgcagccaactgtgacatcgctgatgagagatttgatgccacatttcacactaacgtactggtgaacagcagtggccattgccagtatctacctccgggcatctttaaaagtagttgttacattgacgttcggtggttcccttttgatgtgcagcattgtaaattgaaattcggatcctggagctacggcggatggtctctggacttgcagatgcaggaggctgacatatcaggatacattccgaacggcgagtgggaccttgtgggtatccctggaaagcggagcgaaagattctacgagtgctgtaaggagccttatccagacgtaacatttacagtgactatgcggaggagaacgctgtattatggtctgaacttattgatcccttgtgtactgatctcagccctggcattgcttgtttttttgcttcccgccgacagcggcgagaaaatcagtttggggatcaccgtgctgttgagtctgacagtttttatgctattggtcgcggagatcatgcctgccactagtgatagcgtgccgttaattgcacagtattttgcctcaacaatgattatcgttggcctgtctgtcgtagtgacagtgatagtcctacagtatcatcaccacgatcccgatggaggtaaaatgcccaagtggacgagggtcatactcctaaactggtgcgcctggtttctacgcatgaaacgacccggagaggacaaggtcaggcctgcctgtcagcataaacagagaagatgttcactggccagcgtagagatgagtgccgtggcgccacctcccgcatccaatggcaatctactctatatcggctttcgagggttagacggtgtccattgcgtccctactcccgactccggagtcgtgtgcgggcgcatggcatgttctcccacccacgacgaacatctgttacatggcggccagcctcccgaaggagatcccgatttggccaaaattctagaagaggtgcgctacatcgccaacagattccggtgtcaagatgagagtgaggcggtttgttctgagtggaagttcgccgcatgcgtggtggatcggttgtgtcttatggctttcagtgtcttcacaatcatttgtaccatcggaatcttaatgtcagcacctaatttcgtggaggccgttagtaaggatttcgcctag

SEQ ID NO: 182833 - DNA, 447 bp, synthetic construct
  misc_feature 1..447: note = Description of Artificial Sequence: Synthetic coding sequence
  source 1..447: mol_type = other DNA
atgcggtgcagccccggcggcgtgtggctggccctggccgccagcctgctgcatgtgagcctgcaaggcgagttccagcgcaaactatataaggaactcgttaaaaattacaacccactggagcgccccgttgccaacgatagccagccattaacagtgtattttagcctgagccttctccagatcatggatgttgacgaaaagaaccaggtattgactacgaacatttggctgcaaatgtcatggacagatcattacctgcaatggaacgtgtccgagtatccgggcgtgaaaacagttaggttccccgatggtcaaatctggaaaccagatatactgttgtacaattctagttacgaccagcagcaggaagttttggcctatgggatgcactgctggagcccacagttcggcccaaccagtagttcgatgttccctgtcgtctag

SEQ ID NO: 182834 - DNA, 600 bp, synthetic construct
  misc_feature 1..600: note = Description of Artificial Sequence: Synthetic coding sequence
  source 1..600: mol_type = other DNA
atgaccaacagccggaagtgctggcccatgggctgcaccgccggcgcccattccctggatccccacccccggctgtgctctctactgtgcattggggagttctgtggtagagacggttgtagtgcagacgaacggtttgatgctaccttccataccaatgttttggtgaactcttcaggacactgccagtacctacctcctggaatttttaaatcttcctgctatattgacgtgcgttggtttccatttgatgtgcagcactgtaagctgaaattcggttcttggtcttatggcgggtggtctttggacctccagatgcaagaggcagatattagtggctacatccccaatggcgagtgggacttggtgggaatacccggcaaaaggagcgagcgtttttatgagtgctgcaaggaaccctatccagatgtaaccttcacagtcacgatgcgccggcggaccctgtactatggcctgaacctgctcattccctgtgtgttgatctctgcgttagccctgctcgtgtttctgctgccagcggactctggcgagaaaatatcccttggaataaccgtgctgctatctttgaccgtattttag

SEQ ID NO: 182835 - DNA, 1596 bp, synthetic construct
  misc_feature 1..1596: note = Description of Artificial Sequence: Synthetic coding sequence
  source 1..1596: mol_type = other DNA
atgcggtgcagccccggcggcgtgtggctggccctggccgccagcctgttgcacggaaaggccactgcaagtcctccatctacacctccatgggatcctggccatatacccggcgcctccgtgagaccagctccgggaccggtctcacttcagggggagttccagcgcaagctgtacaaggagctcgtgaagaattacaatcctctggaacggccagtcgcgaacgatagccagcctctgactgtctatttctctctcagcttattgcaaattatggatgtagacgaaaaaaaccaagttctcactacgaacatttggctgcagatgtcgtggactgatcattatctccagtggaatgtgtccgaatatcctggagtaaaaaccgtacgcttccctgatgggcagatctggaagccagatatacttctctacaacagtgccgacgagcgtttcgatgctacgttccatactaatgtgctggtcaattcttccggacattgccagtatctgcctccagggatatttaagtcctcatgttatattgatgttaggtggttccccttcgacgtgcagcactgtaaattaaaatttggatcatggtcctacggaggctggagcctcgacctgcagatgcaggaagccgacatctccgggtatatccccaatggcgaatgggatctggtggggattcctggtaagagatccgagcgattctacgaatgttgtaaggaaccctaccctgatgtcacattcaccgtgactatgaggagaagaacactgtattacggcttaaatctgttaataccttgtgtacttatcagcgcccttgccctgctggtattcctgctccccgcggacagtggggaaaaaatatcactcgggatcactgttctcctctcattgacagtttttatgctgctggtggccgagatcatgcctgctacctcagattccgtgccactaatcgcccagtattttgccagtactatgatcatcgtagggctcagcgtggtcgtgactgtgatcgttcttcagtatcaccaccacgatcccgacggtggcaaaatgcctaagtggactagagtgatactcctaaactggtgtgcctggttcttgagaatgaaaagaccaggggaggacaaggtccgccccgcttgtcagcacaaacagagacgctgttctctcgcttctgttgaaatgtccgccgttgctcctcctcccgcctccaacggtaatctgttgtatattggctttagaggcctcgacggagttcactgtgtgccaacccctgattcaggcgttgtgtgcggcagaatggcatgtagtccaacccacgatgaacatctgctacacggtggacagcccccagaaggtgacccagacttggctaagattttagaggaggttcgctatatcgccaatcggtttaggtgccaggacgaatcagaggccgtctgtagcgaatggaagtttgcagcctgtgtggtggaccgtttatgcctgatggcgttttcggtcttcaccatcatttgtactattggtatcctgatgagtgcacccaactttgttgaagctgtgtccaaagacttcgcctag

SEQ ID NO: 182836 - DNA, 966 bp, synthetic construct
  misc_feature 1..966: note = Description of Artificial Sequence: Synthetic coding sequence
  source 1..966: mol_type = other DNA
atgcaggaggccgacatcagcggctacatccccaacggcgagtgggatcttgttggaatcccgggcaaacgctccgagcgcttttatgagtgctgcaaggagccatatccggacgtgacctttaccgtgaccatgcgcagaagaactctatactacgggctgaatttactgattccttgtgtattgattagtgctttggccctcctggtcttcctcctcccagctgactcaggcgagaagatcagcttggggatcacagtgctcctttcattaaccgtatttatgctgctggtggccgagattatgcccgccaccagtgactccgtaccgctgatagcccagtactttgccagcactatgatcatcgtgggcctgagtgttgtggtaactgtgatcgtgttacagtaccaccaccatgatccagatgggggaaagatgcctaaatggacacgcgtaattctgctcaactggtgtgcttggttcctgaggatgaagagaccaggcgaggacaaagtgcgtcctgcctgtcagcataaacagcgaaggtgctccctggcgtcagtggaaatgtccgcggttgccccaccccccgcatccaatggtaatctgctgtatatcggtttcagaggcctggacggggttcactgtgttcctactcctgactccggcgtagtatgtggacggatggcctgctcaccaacccatgatgagcacctcctgcatgggggccaaccaccagaaggtgatcccgacctagcaaagatcctggaagaagtgcggtacatagcaaacaggtttaggtgtcaggatgaaagcgaagctgtctgcagtgaatggaaattcgctgcgtgcgtggttgataggttatgcctgatggccttcagcgtgtttactattatctgtaccatcgggatccttatgagcgcgccaaatttcgttgaggccgtctctaaggactttgcatag

SEQ ID NO: 182837 - DNA, 1440 bp, synthetic construct
  misc_feature 1..1440: note = Description of Artificial Sequence: Synthetic coding sequence
  source 1..1440: mol_type = other DNA
atgaactggagccacagctgcatcagcttctgctggatctacttcgcagctagcagactccgcgcagctgagactgccgacgggaagtatgcacagaagctctttaacgatctgttcgaggattactcgaacgctctgcggccagtggaagacacagacaaagtccttaatgtgaccctgcaaatcacgctctcacagattaaagatatggatgagcggaatcaaattctgactgcatacttatggatcagacagatatggcatgatgcatacttgacctgggaccgcgatcagtacgacggtctggacagtattagaatcccctctgacctcgtttggcgaccagacatagtgctctataataaagcggacgacgagtcatccgagcccgtgaacactaatgtggtgctgcggtatgatggactgatcacttgggacgcgcctgcaattacaaaatcatcctgcgtggtggacgtgacctacttcccttttgataaccagcagtgcaatttaacgtttgggtcatggacttacaacgggaatcaggttgatattttcaatgcattggattccggcgaccttagcgatttcattgaagatgtcgagtgggaagtgcacgggatgcccgccgtgaaaaatgtgatctcctatggatgctgttctgagccctaccctgacgttacattcactttacttctcaaacgccgatccagcttttacattgtaaatttgctgatcccctgcgtgctaatatcctttctagcaccgttgtcgttttatttgcccgctgccagtggagaaaaggtttcacttggagtgactattttactggccatgacagtgtttcagctgatggtggccgaaattatgcccgcatccgaaaacgtgcctcttataggaaaatactatatagccaccatggccctgataaccgcttccacagctttgaccatcatggttatgaacattcatttttgtggtgctgaggcacggcccgtgccgcattgggctcgcgttgttatcctaaaatacatgtccagggtgctgtttgtgtacgatgttggcgaaagctgtctgtccccacaccactcgcgagaacgcgatcacctgacaaaggtttactcaaagctcccagagtcaaacttaaaagccgcccggaacaaagacctgagccgaaagaaagatatgaacaaacgtcttaagaacgatctcggctgtcagggcaaaaacccacaagaagccgaaagttattgcgcccaatataaagtcttaacaagaaatatcgagtacatagccaaatgcttgaaagatcataaggccacaaattcaaaaggctctgagtggaagaaggtggcaaaagtgatagatagattttttatgtggatcttctttatcatggtgttcgttatgaccatcctgataattgctagagcggactag

SEQ ID NO: 182838 - DNA, 1506 bp, synthetic construct
  misc_feature 1..1506: note = Description of Artificial Sequence: Synthetic coding sequence
  source 1..1506: mol_type = other DNA
atgacccccggcgccctgctgatgctgctgggcgccctgggcgccccactcgcgcccggggtgcgtggcagcgaggctgagggcagactgcgagaaaagttatttagtgggtatgactcatccgtacgcccggctcgggaggtcggggaccgcgtgagggtgagtgtgggcctcatccttgctcagttaatatctcttaacgagaaggacgaggaaatgagcacaaaagtgtacctggatttggagtggaccgattaccgcctgtcctgggaccccgccgagcacgacggaatagatagcctccgcattactgcggaaagtgtgtggctgccggacgtggtgctgttgaataataatgatgggaatttcgatgtcgccctggacataagcgtcgtagtcagcagcgacggctccgttcggtggcagccacccgggatctacagatcctcgtgttcaatccaagttacgtactttcccttcgactggcagaactgcaccatggtgttcagcagctacagttacgactcttccgaagtgagtctccagacagggctggggcctgacggtcagggtcaccaggaaattcacatccatgagggtaccttcatagagaatgggcagtgggagattattcataagccaagccgcctcattcagccaccaggcgaccccagaggaggcagagagggacagaggcaggaagtcattttttatctgattataaggaggaaacctctcttttacctggtgaatgttatcgcaccttgcattctgattacactgctggccatttttgtgttttacctgccacctgacgccggtgagaagatgggattaagtatcttcgcactgttgacccttaccgttttccttctgctgttggctgataaggtgccagaaactagtttaagtgtccccataattataaaatacttgatgtttaccatggtgctcgttacattttccgttatcctaagcgtggtggtgcttaacctccatcatcgatcccctcacactcaccaaatgccactgtgggtgcggcagatcttcatccataagctacccctctacctgcggctgaagcggccaaagcctgaaagggacttaatgcccgaaccgccacactgctctagccctggcagcggctggggaaggggcactgacgagtactttattcgcaaaccaccctctgacttcctctttccgaaacccaatcgattccaacccgagctgagcgctccagatctgcggcggttcatcgatggaccaaaccgtgctgtggctctcctccccgagctcagagaagtagtgtcctcaattagctacattgcaagacagttacaggaacaggaagatcacgacgctctgaaggaggactggcaattcgtggccatggtggtggacaggcttttcctctggacctttattattttcacaagtgttggaacactggtgatcttcttggatgcgacctatcacttaccacccccagacccgtttccatag

SEQ ID NO: 182839 - DNA, 1290 bp, synthetic construct
  misc_feature 1..1290: note = Description of Artificial Sequence: Synthetic coding sequence
  source 1..1290: mol_type = other DNA
atgagcaccaaggtgtacctggacctggagtggaccgactaccggcttagctgggaccccgccgagcatgatggtatcgacagccttcgcatcacagccgaaagcgtgtggctgcctgatgtggtcctgctgaataataacgacgggaactttgatgtcgcactggacatatccgtggttgtctcttcagacgggagtgtaaggtggcagccacctggaatttaccggtcatcttgctcgatccaggtgacatacttcccctttgactggcagaattgtacaatggttttcagttcttattcctacgattcgtctgaggtttctctgcagacaggcttgggtcccgacggccaagggcatcaggaaattcacattcacgagggcactttcatcgaaaatggtcagtgggagatcatccacaaaccgtctagacttatccagccacccggcgatccaagaggtggccgcgagggccagcgacaggaggtgatcttctacctgatcatccgccgaaagcctctgttttacctggttaacgtgatcgctccatgcatcctcatcacattgctggccatatttgttttttacctgccgcccgacgccggagaaaagatgggactgtccatctttgctctgctgaccctgacagtcttcctgctgttgctcgcagacaaggtgccagagacctcactgagtgtccccataatcatcaaatatttaatgtttacaatggttctggtgaccttcagtgtcatcctgtcagtcgtagtactgaatctccatcatcggtctccccacacccaccagatgcccctttgggtacgccagatctttattcacaaactgcccctctatcttagactgaagaggcccaagcccgagcgcgacctgatgccggaaccgccccactgctcgagccctgggtccggctggggcaggggaacggacgaatatttcataaggaagccaccctctgacttcctatttcctaaacccaatcggttccaaccagagctgtccgcacctgacctccgacgctttatcgatgggcccaatagagctgtcgcgcttctgccagagcttagagaggttgtgtcctcaatttcctatattgctcggcagctccaggaacaagaagatcatgatgctcttaaagaggattggcagtttgtagccatggtcgtggaccggctgttcctgtggacatttatcatctttactagtgtgggcacacttgtgatattccttgacgccacataccacttaccccccccagacccttttccttag

SEQ ID NO: 182840 - DNA, 1509 bp, synthetic construct
  misc_feature 1..1509: note = Description of Artificial Sequence: Synthetic coding sequence
  source 1..1509: mol_type = other DNA
atggcccggcggtgcggccccgtggccctgctgctgggcttcggccttctccggctgtgctctggcgtgtggggaactgatacagaggaaaggttggtggaacacttgctcgatcccagtaggtacaataaactgatccgcccggctacaaacggcagcgagctggtcactgtccagctaatggtgagtctggcccagctgatttcagtgcacgagagagaacagatcatgactacaaacgtgtggctgactcaggagtgggaggattatagactgacgtggaagcctgaagagttcgacaatatgaagaaggtcaggctgccatccaagcacatctggctaccagatgtggtcctttataacaacgcagatggcatgtatgaagtcagcttttattccaacgcggttgttagctacgatggctccatcttctggctcccgcctgcaatctacaagagcgcctgcaagatcgaggtgaaacatttcccgtttgaccagcagaactgcactatgaagttcagaagctggacctatgaccgtactgagattgacctggttttaaaatctgaggtagcgagtctggacgattttacgcccagtggcgagtgggacatagtggccctccccggccggagaaatgagaaccccgatgactctacgtatgtggacattacctacgatttcatcatccgtcgtaagcctctgttctacaccatcaacttgattattccctgcgtgttgatcacatcactagccatactcgtcttctacctgccctcagattgtggggaaaagatgactttatgtatctctgttctgctggctctcacagtgtttctgctgttgattagtaagatagtaccccccactagcctggacgtacctctcgtggggaagtacctgatgtttactatggttcttgtaacgttttctattgtcacatccgtttgcgtgctgaacgtacaccatcggagcccaaccactcacactatggcaccgtgggtgaaagtggttttcttggagaagctgccggccctcctctttatgcagcagccaagacaccattgtgctcgacaacgcctcaggcttcggcggcggcaaagggaacgggagggcgcaggggcacttttttttcgtgaggctccaggggcagatagctgcacgtgcttcgttaatagggcatccgttcaagggctcgcaggagccttcggggcggagcctgcccccgttgctggacctggccgctcgggtgaaccgtgtggatgcggcctcagagaggctgtcgacggggtgcgctttatcgctgatcatatgcgatcggaggatgacgatcaatccgtctcagaggattggaagtacgttgcgatggtgattgatcgtctcttcctctggattttcgtctttgtatgtgttttcgggaccatcggcatgttcctgcaaccccttttccagaattataccactactacattcctgcacagcgatcacagcgcaccgtcatccaagtag

SEQ ID NO: 182841 - DNA, 1377 bp, synthetic construct
  misc_feature 1..1377: note = Description of Artificial Sequence: Synthetic coding sequence
  source 1..1377: mol_type = other DNA
atgctgcccgacttcatgctggtgctgatcgtgctgggcatcccctcttcagccactactggctttaatagtattgccgagaatgaggacgcgctcttgcgacacttgttccagggttaccagaaatgggtgcgccctgtgctccactctaacgatactatcaaagtctactttggattgaagataagccagctggtggacgtagatgagaagaaccaattgatgacgaccaacgtttggctgaaacaggagtggacggaccacaagctgcgttggaacccagacgattatggcggaatccactctatcaaagtcccatctgagagtctgtggcttcctgacatcgtgctatttgagaacgctgacggacgcttcgagggatccctgatgactaaagtgatagttaagagtaacggcactgtggtgtggactcccccggcttcttataaatcatcctgcactatggacgtgacattttttccatttgatagacagaattgcagcatgaaattcgggtcctggacatatgatggaactatggttgatctgatactcatcaacgaaaacgtagacaggaaggatttctttgacaacggagaatgggagatactgaatgcgaagggtatgaaagggaatagaagagacggtgtatacagctaccctttcattacatattcattcgtgcttaggagactgcccctgttctatacattgttcctgatcataccctgccttgggttaagcttcctgaccgtgcttgtgttctacctcccctcagacgagggggagaaactgtcactctctacatcagtgctggtcagccttaccgttttcctgctggtgatagaggagattattcccagttcctcaaaggtgattccgcttatcggcgaatatctgctcttcatcatgatcttcgtgaccctgagcattatcgtgacagtgttcgtaattaacgtccatcataggagctcctccacctaccaccccatggccccatgggtgaagcgcttgttcttgcagaagttacccaagttgttatgcatgaaagatcacgtggatagatatagctccccagagaaggaggagtcacaaccagtggtgaaaggcaaggtgttagaaaaaaagaagcagaaacagttgtcagacggcgagaaggtgctggttgccttcttggagaaggctgcggactctatcagatatatatcccgccatgtgaagaaggagcatttcatttcccaagttgttcaggattggaaattcgtggcacaggtgttggacagaatttttttatggctcttcctaatagtcagcgtgactgggtcagtcttaatttttacccctgctctgaaaatgtggctacacagctatcactag

SEQ ID NO: 182842 - DNA, 1497 bp, synthetic construct
  misc_feature 1..1497: note = Description of Artificial Sequence: Synthetic coding sequence
  source 1..1497: mol_type = other DNA
atgcggcgggcccccagcctggtgctgttcttcctggtggccctgtgtggtaggggcaactgcagggtcgcaaatgcagaggagaagttaatggatgacttgcttaataaaacacgttacaacaatctgattcggccagccaccagcagcagccagcttatctcaatcaagctgcagctcagcctagcacaactcatctccgtgaatgaacgggagcaaatcatgacaaccaatgtgtggctcaagcaagaatggaccgattacaggctcacttggaattcgagcaggtacgagggagtaaacatactgaggatcccagcaaagagaatctggcttcctgatatcgttctttataataacgcagacggcacatatgaggtgagcgtctacaccaatctcattgtccggtctaacgggtcggtgttgtggctccctcctgccatctacaagagtgcgtgcaagatcgaggtaaaatacttccccttcgatcagcagaattgtactctgaagttccgaagctggacctacgaccacaccgagattgacatggttttgatgactccaaccgcatcaatggatgacttcactccaagtggtgaatgggatatcgtcgcgctgccagggcgccgcactgtgaatccccaggacccaagctatgtggacgtgacgtacgactttataataaagcggaagcccctcttctacactattaatctgatcataccgtgcgtgctgacaacgctgctcgcaattcttgtgttttacctgccctctgactgcggagaaaagatgacactctgtatctccgttctgctggcactaactttctttttgctcttaattagcaagatcgtgccacctacctccctcgatgtgccactgattggcaagtatttgatgttcactatggtgttggtgacgttttcaatcgtaacttccgtatgtgtgcttaacgttcaccaccggtcccctagcacccacactatggcgccttgggtgaagagatgcttccttcacaagctccctacctttctgtttatgaagcggcctggaccggattcaagccctgcgcgggccttccccccgagcaaaagctgcgttaccaagcccgaagctactgctacttccactagcccatcaaatttttatggcaactctatgtattttgttaatccagcttccgctgcgtccaagtcgccggccggatctacgccagtggctatacccagggatttttggctccgcagctccggtcggtttcgccaggatgtccaggaggccctcgaaggcgtttctttcatagcccagcatatgaagaatgatgacgaagatcagtccgtggttgaggactggaagtatgttgccatggtcgtggaccgtttgtttctgtgggtgttcatgttcgtttgtgtgctcggcaccgtcggcctcttcttgcccccactatttcagacacatgcagcttcagaaggaccctacgctgcgcaacgcgattag

SEQ ID NO: 182843 - DNA, 696 bp, synthetic construct
  misc_feature 1..696: note = Description of Artificial Sequence: Synthetic coding sequence
  source 1..696: mol_type = other DNA
atgcggcgggcccccagcctggtgctgttcttcctggtggccctgtgcggaaggggcaactgtagagtagcgaatgctgaggagaaactcatggatgacctgctgaataagactcgctataataacctgatccggccggcgactagttctagccagctgatctctatcaaactgcagttgtcactagcgcagcttattagtgtgaatgaacgcgagcagatcatgaccacgaacgtgtggttgaaacaggagtggacagactatagactgacctggaattcctctaggtacgaaggagtgaacatcttgaggatccccgctaagaggatctggctcccagacatagtcctctacaataagagcctaagaacagggtctacctggctatggtggtggaccgggtgctcatgtggttgtagctgcctctgtgcttcttgggcactgtgggggtcttcctacagaccctcctctaggccgatgcaactgcttaggggccccacactgccatccgtgaccgaaggtccactgggctgtggagtgcggggctgtgaatggcccggcggccattttgcagcctctttttgggtggttgcagatgaggctctttcaaagtacgtttctattgggcatcagccacatcagactagtcactcgaggggcacagggaaggatggaggactaggctgccctttgtag

SEQ ID NO: 182844 - DNA, 1554 bp, synthetic construct
  misc_feature 1..1554: note = Description of Artificial Sequence: Synthetic coding sequence
  source 1..1554: mol_type = other DNA
atggagggccccgtgctgaccctgggcctgctggccgccctggccgtatgtggtagttggggcctgaatgaggaggaaagattgatccgccatctttttcaggagaagggctacaataaagagctgagacccgtcgcgcacaaggaggaatcagtggatgtcgccctcgccctcacactgtctaatctgatctctctgaaggaagtcgaagagacactcaccaccaatgtttggattgaacacggctggacagacaatagactgaagtggaatgccgaagaatttggcaacatttcagtactcaggctgccccccgacatggtttggctaccagaaatcgttttagaaaacaacaatgacggctcattccagatttcctactcatgtaacgtgctggtttatcattacgggttcgtgtattggctccctcccgctatctttcgctcttcctgtcctatttcagtgacgtactttccctttgattggcagaattgttccctcaaattctcctctttgaaatataccgcaaaggagattactttgagcctaaagcaggatgccaaggagaatagaacctacccagtggaatggatcatcattgacccggagggattcaccgaaaatggtgagtgggagattgtacataggccagcccgggtgaatgtcgaccctagggctcccctggattccccttctcgccaggacatcacattctatcttatcatccggaggaagcccttgttctacatcattaacattctggtaccctgtgtcctgatcagttttatggtcaacctagtgttttatctgcccgcagactccggtgagaaaacatccgtagccatctctgtgctgttggcccaatcagtatttctgctgctaatttctaagcgtcttcctgctacgagcatggccattcctctcattggaaaatttctcctattcggtatggtgctcgtgaccatggtcgtcgtcatctgcgtaattgttctgaacatccacttcagaacccctagcacccacgtgctgagtgaaggagttaagaaactgtttcttgaaactctgccagaattactccacatgagtcgcccagctgaggacgggcccagtcccggtgcccttgttcgcagatctagtagcctgggctatatcagtaaggccgaggagtacttcctcctcaagagcagatcagacctgatgtttgagaagcagagcgagagacacggactggcccggcggctgaccacggctcgcaggcccccagcgtccagcgaacaagcccagcaagaactgtttaatgagctaaaacccgcggtcgacggggctaatttcatagttaatcacatgcgcgatcagaacaactataacgaggaaaaggacagttggaatagggttgctcgaactgtcgatagactctgcctttttgtggttaccccggtcatggttgtcggaacagcctggatatttctacagggggtttacaatcagccaccaccccagcccttccctggagatccctactcctacaacgttcaagataaaagatttatttag

SEQ ID NO: 182845 - DNA, 708 bp, synthetic construct
  misc_feature 1..708: note = Description of Artificial Sequence: Synthetic coding sequence
  source 1..708: mol_type = other DNA
atggagggccccgtgctgaccctgggcctgctggccgccctggccgtgtgcgggagttggggactcaatgaggaggagcgtttaatccggcacctcttccaggaaaaagggtacaataaggagctgaggcctgtggcgcacaaggaggagtctgttgatgttgctctggcactcacattgtcgaatctcatatcgctaaaagaggtggaagaaaccttgacaacgaatgtctggatcgagcacgggtggacagataacaggctgaaatggaacgctgaagagtttgggaacatttccgtgcttagactgccccctgatatggtgtggttgcctgagatcgttctcgagaataacaatgacggcagcttccagattagttactcttgcaatgttctggtgtaccactatggattcgtgtactggctgccacccgccattttccgctctagttgtcctataagtgtgacctatttcccttttgactggcagaactgctctctcaaatttagggaaagaggtgtaggtgactccccacccgcagggcaaggccagcgagggccgcaaagccccagcggccaaccgcagcccccagggcaccacctgctgccacaccaccccccccaggcgcctctgcttcatcaccagcaccctggggcccttcgtgcacatcttctacacggtcagcctggcctcctccctactggatag

SEQ ID NO: 182846 - DNA, 972 bp, synthetic construct
  misc_feature 1..972: note = Description of Artificial Sequence: Synthetic coding sequence
  source 1..972: mol_type = other DNA
atgctgaagaacctggagaccagcgtgagctgcgccagcccccggacctggtgcggctcgcagcgactctgttggcgaaccacaatgacggccccttctagaagtcctacccctgcaacctgcctgtccactaccacagctagctgcactggatgtcacctgccctcttccgcacctcccgctccttcattatcacctattagcccatctactggaaggactgcgccctcgtctagtggcggtgaaaaaacatcggtggctatctcggttctcttagcccagagcgtgttcctcctgctcattagcaagcgcctgcctgccaccagcatggccatcccacttatcgggaaattcctgctgttcggaatggtgctggtgacaatggttgttgtgatctgcgtcatcgtcttgaatatccactttaggacgccgtccacccacgtactgtccgaaggagtcaagaagctgtttctggaaactcttcctgaactcctccacatgtctaggcccgctgaggacgggccttcacctggcgctctcgttcggagatcttcgtccctaggatacataagcaaggcggaagagtactttcttttgaagagtaggtcggatttaatgttcgagaaacagtctgaacgacatggactcgctagaagattgactacagccagaaggccgcccgcgagttcagaacaggcccaacaggagttgtttaatgaactaaagccagccgttgatggagctaattttatcgtcaatcacatgcgagaccagaataactacaatgaggagaaagattcgtggaatcgagtggctaggacagtggatcggctgtgtctgttcgtggtcactccagtgatggttgtgggaacggcttggattttccttcagggagtgtacaaccagcctcccccccagccctttcccggcgacccctacagttacaacgtgcaggacaaacggttcatctag

SEQ ID NO: 182847 - DNA, 708 bp, synthetic construct
  misc_feature 1..708: note = Description of Artificial Sequence: Synthetic coding sequence
  source 1..708: mol_type = other DNA
atggagggccccgtgctgaccctgggcctgctggccgccctggccgtctgtggcagctggggcctgaacgaagaagagagacttatcaggcacctatttcaggaaaagggttataataaggagcttcgccccgtggcacataaggaggaaagtgtggacgtcgctctcgctttgacactgtccaatctaatctctctcaaggaggtggaagagacattgaccaccaatgtttggattgaacacggatggaccgacaatcgacttaagtggaatgccgaggagtttggtaatatcagtgttctgcggttgccccccgatatggtgtggcttccagagattgttctggagaataacaatgacggatcattccagatctcctactcttgcaatgtgctggtttatcattatggattcgtgtactggctccctcctgcaatttttaggagctcttgccccatcagcgtcacgtatttcccctttgactggcagaattgttcattgaaattccgggaaagaggagtgggcgattccccacccgcaggccaagggcagcggggcccacaatccccctctggccagcctcagccacctggacatcacctgctgccccaccaccccccacaggccccgcttctacatcaccaacacccaggagcccttcgggcgcacttgctgcacggacagcccggtctgctgcccacaggttag

SEQ ID NO: 182848 - DNA, 1509 bp, synthetic construct
  misc_feature 1..1509: note = Description of Artificial Sequence: Synthetic coding sequence
  source 1..1509: mol_type = other DNA
atggagggccccgtgctgaccctgggcctgctggccgccctggccgtgtgcggatcttggggccttaatgaggaggaacgactgatcaggcacttgtttcaggaaaaaggctacaataaggaactgcgcccagtcgcccacaaggaagaaagcgtggacgtcgccctcgctctcaccctgagtaacctcatttcccttgggtggaccgataacagacttaagtggaacgcagaggagtttgggaacatatcagtgcttagactacccccggacatggtgtggctgcccgaaatcgtcctggaaaacaataacgacggatccttccagatttcatactcatgtaacgttctggtctatcactatggatttgtctactggctgccgccagctatctttagatcatcttgccctatttctgtgacctatttcccctttgactggcagaactgctcacttaagtttagcagcttgaaatacactgccaaggaaattactcttagcctaaagcaggatgctaaggagaatcgcacttacccggttgagtggattattatcgacccggaaggcttcacagaaaatggcgaatgggagattgtccaccgacctgcgcgggtgaatgtggatccaagggcccctctcgactcacctagtcgccaggacattactttctatctgattatcaggcggaagccactgttctatatcattaatatccttgttccctgcgtactgatttcttttatggtaaacctcgtgttctacctgccggctgacagtggtgagaagacgtccgtggccatcagcgtgttactggctcagtccgtattcctgctgctgatttccaagaggttacccgccacgagcatggcaataccactcattggcaaattcctgctgttcgggatggtgttagtgacaatggtcgtggtgatctgcgtcatcgttctgaatattcactttcggactccatcgacacatgtcctgtccgagggggtgaagaagctgttcctggaaactctcccagaacttcttcacatgagcagaccagcggaggacgggccttcccctggcgctttggtgagaaggagcagtagcctcggctacatttccaaggcggaagagtacttccttctgaagtcccgatctgacctcatgttcgaaaagcagtctgaacgccatggccttgccagacgcctgactaccgcaagacgccctcccgcctcttctgaacaggctcagcaggagttgttcaatgagttaaaaccggccgtcgatggagctaacttcatcgtgaaccacatgcgcgaccagaacaattataatgaagagaaggattcttggaaccgggtggctcggactgtggatagactctgcttattcgttgttacacctgttatggtagtggggacggcttggatttttttacaaggcgtgtataaccagccaccacctcaacctttccctggtgatccttattcttataacgtgcaggacaaacgatttatctag

SEQ ID NO: 182849 - DNA, 1482 bp, synthetic construct
  misc_feature 1..1482: note = Description of Artificial Sequence: Synthetic coding sequence
  source 1..1482: mol_type = other DNA
atggcccgggcccccctgggcgtgctgctgctgctgggcctgctgggccgcggcgttgggaaaaatgaggagctccgcctgtaccaccaccttttcaataattatgatccaggcagccggccagtccgggaacctgaggacacagtcaccatttcactgaaagtgactctgaccaatcttattagcctgaacgagaaagaggaaaccttaactacttcagtctggatcggcattgattggcaggattatcggctgaattattccaaggatgatttcgggggcattgaaacgctccgcgtgccttctgagcttgtctggctccctgaaatcgttcttgagaataatattgacggtcagttcggagtggcttacgatgcgaacgtactggtgtatgagggcggctctgtgacatggttaccgcccgcaatatatcgaagcgtttgcgcagtagaggtgacctatttccctttcgactggcagaattgcagcctgatttttagatcccagacctataatgccgaggaagtggagttcaccttcgcagtcgataatgatggtaagacaattaacaagatcgacatcgataccgaggcttacactgagaacggcgagtgggccatcgacttctgcccaggtgtcattagacgacaccatggaggggcaacagatggcccaggcgagaccgatgtcatttattccctcatcatcaggagaaagcctctcttttacgtgattaacatcattgttccttgtgtactgatctccggcctggtgttgctagcctactttctacccgcccaggccggaggacagaaatgcaccgtgagcatcaacgtccttctggcgcagacagtttttcttttcttgattgcccaaaagataccagaaacaagcttgtcggtgcctctcctggggcgcttcctgatctttgtcatggttgtggctactctgatcgttatgaactgtgtgattgttctcaacgtgtcccagcgcacaccaacaactcatgccatgtctccacgacttcgacacgtcctgctggagctactgccacggttgctgggatctcctcctcctcctgaggcccctcgagccgctagtccaccacgccgcgctagttcggtcgggttgctgctgcgcgcggaagagcttatcctcaagaagcctcggtctgaattagtctttgagggtcaacggcataggcaggggacatggaccgctgctttctgccagagcctgggcgctgctgcccctgaggttagatgttgcgtcgatgccgttaactttgtagcagaatcgacccgcgatcaagaggcaactggagaggaagtctcggactgggttcgcatgggcaacgccctggataacatttgtttctgggctgcactggtcctgttctccgtggggagctctctcattttcctgggcgcttacttcaacagagttcccgacttgccatacgcgccttgtatccaaccgtag

SEQ ID NO: 182850 - DNA, 1554 bp, synthetic construct
  misc_feature 1..1554: note = Description of Artificial Sequence: Synthetic coding sequence
  source 1..1554: mol_type = other DNA
atgcacggcggccagggccccctgctgctgctgctgctgctggccgtgtgtctgggggctcagggacgaaatcaagaggagcggctgctagcagatctcatgcaaaattacgacccaaacctgcgtcctgccgaacgagattctgacgtagtaaacgtgagcctcaaactgacccttactaacctcataagcttgaacgaaagagaggaagcccttaccactaatgtgtggattgaaatgcagtggtgtgattaccgtttacggtgggatccccgtgattacgaggggctatgggtgctacgggtcccgtccacaatggtgtggcggcccgacattgtcctggagaacaacgtggatggggtttttgaagtcgcgctgtattgtaatgtgttggttagccctgacgggtgtatatattggctgcctccagccatctttaggtccgcttgttcaatttcagtgacatattttccgttcgattggcaaaactgcagtctcattttccaaagccaaacatattccacgaacgaaattgatctacagctgagccaggaagacggacagacaatcgaatggatttttatagatccagaagctttcactgagaacggggagtgggcaattcaacaccggcccgctaagatgctgctcgatcctgccgcccccgcacaggaggccgggcaccagaaggtggtgttttatctattaatccagagaaagcctctgttctatgttataaacattattgcaccctgtgtgctgatttcctcagttgctattcttatccacttcctccccgccaaagcaggagggcagaagtgtactgtggccattaacgtcttgcttgcccagactgtgttcctttttttggtcgccaagaaggttccagagacgtcccaggccgtgccgctaatctctaaatacctgacattcctattggtagttaccattctaatagtcgtgaacgcggtggtggttctaaatgtgagccttcgtagtccccatactcacagcatggccagaggggtgaggaaagtattccttaggctgttgccacagctgcttaggatgcatgttagaccacttgctcctgcagccgtgcaggatacacagagccgactacaaaacggttcaagtggatggagtatcaccacgggcgaagaggtcgctctctgtctcccccgttcggagctactattccaacagtggcagagacaaggactcgttgccgcagcgctggagaagctggaaaagggccccgaactggggctttcacaattctgcggctcccttaagcaggccgccccagctattcaggcctgcgtggaagcgtgcaacctgatcgcctgcgctcgtcatcagcagagtcactttgacaatggaaacgaggagtggtttctggtggggcgcgtgctggatcgcgtttgcttcctcgctatgctgtctctgtttatttgtgggactgccggcatattccttatggctcactataatcgtgttccagccttaccattcccaggggatccacgtccatatttgccctctcccgactag

SEQ ID NO: 182851 - DNA, 1554 bp, synthetic construct
  misc_feature 1..1554: note = Description of Artificial Sequence: Synthetic coding sequence
  source 1..1554: mol_type = other DNA
atgcacggcggccagggccccctgctgctgctgctgctgctggccgtttgtctgggcgctcaggggcgcaaccaggaggagcgactgcttgccgatctcatgcagaattacgacccaaacctgcgtccagcagagcgggatagcgatgttgttaacgtcagtctgaaactgactctcactaacctgataagcctgaatgagagagaggaggcactgactaccaacgtgtggattgagatgcagtggtgtgactataggctgcgctgggatcccagagactatgagggcttgtgggtactaagggtgcccagtactatggtgtggcgtcctgacattgtgctcgagaacaatgtggatggtgtgttcgaggtcgctctgtactgtaatgttctcgtttctcccgacggctgtatctattggcttcctccagcaattttccgatcagcttgttccatttcggtgacctattttccctttgattggcagaactgtagcttaatcttccagagccaaacctattccacgaacgaaatcgacctgcagttgtcgcaggaagacggtcagaccattgaatggatctttatagaccctgaagccttcactgagaatggagaatgggcgatccagcaccgaccggccaaaatgctcctggaccccgcagcccctgcccaagaggccggccaccagaaagtcgtcttctatctgctgattcagagaaagccgctgttttatgtgatcaatattatagccccatgcgtgctcattagctccgttgctattcttatacatttcttgcccgccaaagctgggggacaaaaatgtactgtggccattaacgtcctgctcgcccaaaccgtatttctgttcttagttgccaagaaggtaccagagacaagccaggcggtgcctttgatttccaagtatctcacgttccttctcgtggtcacgattctgatagtggtcaatgcagtagttgttctgaatgtgagcttaaggtcaccacatacgcactctatggcacggggcgttcggaaggtattcctccgattactgccacagctgctgcgcatgcatgtcagaccacttgcgccagctgcggttcaggacacccagagcaggctccagaacggctcttctggctggtcgatcactactggggaggaggttgctctttgtctgccccgctcagaactgctgttccagcagtggcagcggcaagggctggtggccgccgccttagagaagcttgagaagggccccgagctcggtctgtcgcaattctgtgggtcgcttaagcaggctgcacctgcaatccaagcatgtgtcgaggcatgcaatctgatagcatgtgccaggcaccagcagtcacactttgataacggtaacgaagaatggttcctggtcggccgggtcctggatcgggtatgtttcctggctatgctcagtttatttatctgtggtaccgcgggcattttccttatggcccactacaatagggtgcctgcacttcctttccctggcgaccctcgcccttatcttccctcacccgattag

SEQ ID NO: 182852 - DNA, 1080 bp, synthetic construct
  misc_feature 1..1080: note = Description of Artificial Sequence: Synthetic coding sequence
  source 1..1080: mol_type = other DNA
atggtgcggcccatgctgctgctgagcctgggcctgctggccggcctattaccagcactcgccgcttgccctcaaaattgtcattgccattccgacctccagcatgtgatttgcgataaggtcggcctgcagaagattcccaaggttagcgaaaagactaagctcctcaatttgcagcgtaataacttcccggttctggctgcaaattcatttagagccatgcccaacctcgtctctctgcacctgcagcattgtcagatacgcgaggtggccgccggcgctttcagaggcctcaagcaactgatctacctgtacctgagtcataacgacataagggtcttacgggccggcgcattcgacgatctgaccgaattgacctacctttacctggaccataataaggtgactgagctcccaagaggcctcctgagcccactagtaaacttgtttattctccagctcaataacaacaagataagggaactccgcgcaggagctttccagggggctaaggacctccggtggctttatctcagtgagaatgcactgtcgtcactgcaaccaggcgctctggacgacgtggagaatttggccaaattccatgtcgaccgtaaccagctgagcagctacccttccgcagctctctccaaattaagagtggtggaggagctgaagctgagtcacaatcctctgaaatccatccccgacaacgcctttcagagcttcgggaggtatctcgagactctgtggctcgacaacactaacctggaaaagtttagcgacggggctttcttgggagtgaccacattgaagcacgtgcacctcgagaacaacagactgaatcagttgccttccaattttcccttcgactccttggagaccctcgctctcactaataatccttggaagtgtacttgtcagctgcgcgggttgcgccgctggctggaggctaaagccagtcgcccagatgcgacctgcgcctccccggctaaattcaagggtcagcatattcgggataccgatgcctttagaagctgtaagtttcctacaaaaagaagcaaaaaagctggtcgccattag

SEQ ID NO: 182853 - DNA, 129 bp, synthetic construct
  misc_feature 1..129: note = Description of Artificial Sequence: Synthetic coding sequence
  source 1..129: mol_type = other DNA
tgagccagccggcccgacgccacctgcgccagccccgccaagttcaaaggacagcacatccgcgataccgacgctttccgcagttgtaagttcccgaccaagcgcagcaaaaaggcaggaaggcactag

SEQ ID NO: 182854 - DNA, 1080 bp, synthetic construct
  misc_feature 1..1080: note = Description of Artificial Sequence: Synthetic coding sequence
  source 1..1080: mol_type = other DNA
atggtgcggcccatgctgctgctgagcctgggcctgctggccggcctgctgcccgccttggccgcctgtcctcagaattgccactgccactccgatcttcagcacgtaatatgcgataaagtcggtctccagaaaattcccaaagtgagtgagaaaaccaaactcctgaatttgcagcgcaacaacttccccgtgctggcagctaatagtttccgtgctatgccgaatttagtgtccctgcatctccagcactgccagattcgagaggtggctgcgggggcctttaggggactgaagcagctgatatacttgtacctgagtcataacgatatcagagtcctgcgcgctggtgcctttgacgacttgactgaactgacgtatctttacctggatcataataaggtgacggagctcccaagagggctgctctcgccattggtgaatcttttcattcttcagttgaacaataataaaatacgcgaactcagggcaggcgcattccagggagcaaaggatctacgatggttgtacctctccgaaaatgcacttagctccctgcagccaggagccctcgatgacgtcgaaaacttggccaaatttcacgtagataggaaccagttgtccagctaccctagtgccgctcttagtaaactgagagttgtcgaagagctgaaactttctcacaacccactgaagtcaattcccgataacgcgttccagagttttggtcgatatctggagacactctggctcgataacacaaatctggagaaattcagtgacggcgcctttcttggtgttactactctgaaacatgtacacttggagaacaatcgcctgaatcaactcccctcaaatttccccttcgattcgcttgagactctcgcgctcaccaataacccctggaaatgtacctgtcagttgcgggggctacgacggtggttggaggcaaaggcatcaaggcccgatgcaacctgtgcatcacctgcgaaatttaagggacagcatattagggacacggatgcatttagatcttgtaaattccctactaaacgctccaagaaagcaggacgccattag

SEQ ID NO: 182855 - DNA, 2328 bp, synthetic construct
  misc_feature 1..2328: note = Description of Artificial Sequence: Synthetic coding sequence
  source 1..2328: mol_type = other DNA
atgcgggccagcctgctgctgagcgtgctgcggcccgccggccccgtggcagtgggcatttccctgggattcaccctctcactcttgtctgtgacatgggtcgaagaaccatgtggtcccggacctccccagccgggggatagcgaattaccccccaggggaaacaccaacgcggcgcggcgccctaacagcgtgcagccaggcgccgaaagagaaaagcctggggctggggagggcgcaggcgagaattgggaaccaagggtgctcccctaccatccagcccagcctggccaggccgcaaagaaggcagtacgcacacgatacatttcaactgagcttggtattcggcagcgactgctcgtggccgtgctcaccagtcaaactacactgccaacacttggagtagcggtaaacaggacactggggcaccggctggagcgagtggtcttccttacgggggcccgcggaaggagggctccgcctggcatggccgtggtcacgctaggagaggagaggccaatcggacacttgcaccttgccttaaggcaccttcttgaacaacatggggatgactttgattggtttttcttggtcccagacacaacctatacagaggcccacggccttgctcggctcacaggacacctgtccttggcctccgctgcacatctgtatctgggacggcctcaagactttatcggcggggaaccgacacctggacgttactgtcacggagggttcggcgtgctactttctcggatgttactccagcagctgcgaccacatctggaaggttgccggaatgatatcgtaagcgcacgtccagacgagtggctgggaagatgtatacttgacgctactggagtgggttgcactggggaccatgagggtgtgcattatagccaccttgagctcagtcctggcgagccagtgcaggagggtgacccacacttccgatccgcccttacggcccaccctgtgagggacccagtgcatatgtaccaactgcataaagccttcgcaagagcagagctggaacgcacataccaggagatacaagaactgcagtgggaaattcagaatacatctcaccttgcagtagatggggaccaggcagctgcgtggcctgtagggattcctgcacctagtaggcccgctagcagatttgaagttcttcgctgggattactttactgaacagcatgctttttcctgcgctgacggctccccacgttgcccactaagaggagccgatcgggccgatgttgcggacgtgctgggaaccgctctggaagagttaaacagacgctatcatcctgccctacggttgcaaaaacagcagctggtcaatggttacagacggttcgatcccgcaaggggcatggagtacactctggatttgcagctggaggccttgacaccgcaggggggccgaaggccactgacaaggagggtccagctcctgagacccctatcgagggtagagattcttcccgtcccgtacgtgacagaggcctctcggctcacggtccttttgcctctggcagccgctgagagggacctggctcccggatttctcgaggcatttgctaccgctgcgttggagccgggagatgcagccgccgctctgaccctcttgctgttgtatgagccacgtcaggcacagcgcgtggctcacgccgacgtttttgctcccgtgaaagctcacgtggctgaactggagagacgattccccggcgccagagtgccttggctctctgttcagaccgctgcacctagtccgctcaggttgatggacctcctctctaaaaagcaccccctcgatacgctgtttctgttagccggtcctgataccgtcctcaccccggatttcttaaatcgttgtcgcatgcacgctatttcgggctggcaggccttttttcccatgcacttccaagcattccatccggctgtcgccccaccccagggcccaggacctccagaacttgggcgagacacaggcaggttcgacaggcaagcagcctccgaggcttgcttttacaatagcgattacgtggctgcacgaggcagactcgccgccgccagcgagcaggaggaggagctcttagaatctctggacgtatacgagttattccttcacttttcatctcttcacgtgctccgcgcagtcgagccagcactactgcagcgatatcgcgctcaaacgtgcagcgccagattgagcgaggacctctatcaccggtgcctgcaaagcgtgttggaaggcctgggaagtcgcacccaactcgcgatgctgctttttgagcaggagcagggcaactccacatag

SEQ ID NO: 182856 - DNA, 1842 bp, synthetic construct
  misc_feature 1..1842: note = Description of Artificial Sequence: Synthetic coding sequence
  source 1..1842: mol_type = other DNA
atggccgtggtgaccctgggcgaggagcggcccatcggccacctgcacctcgcgctcaggcatctactggagcagcacggagatgatttcgattggttctttcttgtgccggacacaacttatacggaagcacatggactcgctcggctgaccgggcacttgagcctcgcatcagccgcccacctgtacctaggacgaccacaagattttattgggggcgagcccactccagggagatactgccacggcgggtttggcgtgcttctctctcgcatgttactccagcagctccgcccgcatcttgagggatgccggaatgacattgtctcagccagaccggacgagtggctcgggcgatgtatcctggacgccacaggcgttgggtgcactggcgatcatgagggagttcattactcccacttagaactgagccccggcgagccagttcaggagggggaccctcactttaggagcgcactcactgcgcaccctgttcgggaccccgtgcacatgtaccagctccacaaagcctttgcaagggccgagttagaaagaacttaccaggagattcaagagctgcagtgggagattcagaataccagccatctcgccgttgacggggatcaagccgctgcatggcctgtgggcatccctgccccctctcgccccgcttctagatttgaagtgctacgctgggactactttacagagcagcatgcgttcagctgtgctgatgggtcccctagatgtccgctgaggggagcagatcgagctgacgtggctgatgttctgggcacagccttggaagaactgaaccgtaggtaccaccccgctcttagactgcaaaagcagcaattagtgaacggttacagacggtttgatcccgccaggggaatggagtataccctcgatttgcagttagaggccctaactccccaggggggccgacggcctttgaccagacgcgtgcagctcctgcgacccctgtcaagggtcgagatcctccccgtgccctatgtgacggaggcgagcagactgaccgttctcctcccattggcagccgcggagcgagatctcgctccagggtttcttgaagcattcgccacagccgccctagaacctggcgacgctgctgctgcactgactcttctgctgttatacgaacctcgccaagcccagagggtggcccacgctgacgtgttcgctccagtcaaggcccacgtggccgagctcgagcgccggtttcccggtgcccgggtcccctggctgtctgttcagaccgccgctccctcccccttgcggttgatggaccttctgagcaaaaagcaccccttggacaccttgtttctgctggccggaccagatacagtccttacgcccgatttcttaaataggtgtcgaatgcacgcgattagtgggtggcaggcattcttcccgatgcactttcaggcctttcaccccgccgtggcccccccgcagggcccgggcccaccagagctgggtagggacacaggccggttcgaccgccaggcagcgtcggaggcatgcttctataactcggactacgtcgctgccaggggaaggctggcagccgccagcgaacaggaggaagagcttttagaatctctggacgtctatgagctgtttctgcatttctccagtctgcatgtcctgagagccgtggaaccggctctccttcagcgctatcgggctcagacctgttccgcccgtctgagcgaagacctttatcacaggtgtctacagtcagttctggaggggttgggcagtcggactcagctggccatgctcttgtttgagcaggaacagggcaacagcacctag

SEQ ID NO: 182857 - DNA, 2319 bp, synthetic construct
  misc_feature 1..2319: note = Description of Artificial Sequence: Synthetic coding sequence
  source 1..2319: mol_type = other DNA
atgcggctgagcagcctgctggccctgctgcggcccgccctgcccttgatcctgggtctgtccctggggtgctccctgagccttcttcgtgtctcatggatacagggcgaaggcgaagacccatgcgtagaagcagtgggagagagaggtggtccgcagaatccggactctagggctcggcttgaccaatccgatgaggattttaaacctcggatcgtcccttactaccgggaccctaacaaaccctacaaaaaggttcttagaacccggtatattcagaccgaactgggaagccgagaacgccttttagtagcggtcttgacgtcaagggccacattgtccacactggccgtggctgtcaatcggacagtggctcaccatttcccacgcttgttgtattttacgggccaaaggggcgcacgcgcaccagccggtatgcaggtcgtgagccacggtgacgagcggcctgcctggctaatgtcagagactttgcgccacctccatactcacttcggcgcagattatgactggttcttcattatgcaagacgacacctacgtccaggctccacgtctcgctgcccttgccgggcacctgtccattaatcaggacctgtatctggggagggccgaggaattcataggcgccggcgagcaggcgcgatattgccatggcgggtttggttatcttctgagtagatcccttttgctccggttacggcctcatctggacggttgtagaggggatattttgagcgccaggccagacgagtggctcggacgctgtcttatcgactcccttggcgtcggttgcgtgagccaacaccaaggtcaacaatataggtcttttgaactggccaaaaatagggatccagagaaggaagggtcttcagccttcctcagtgcatttgcagtgcatccagtgagtgaggggactctgatgtaccgcctgcacaagagattcagtgccctggaactggaacgtgcttatagcgaaattgagcagctgcaggcacagatcagaaacctaactgttttgacaccagagggagaagccgggctgtcatggcccgtgggacttccagcccccttcacaccccattctcgcttcgaggtcctcggctgggattactttaccgaacagcacacattctcatgtgctgacggggccccaaaatgccccttgcaaggagcgtcccgggccgacgtgggcgatgcgctggaaaccgccctcgaacaactcaacagacggtaccagccgcggctccggttccagaaacagagacttctgaacggctaccgacggttcgatcctgccaggggaatggagtatacacttgaccttctcctggaatgtgtcacacaacgcggacataggagagctctcgccagacgagtgtctctcctcaggccgctgtccagagtggagatcttaccaatgccatatgtgaccgaagccacacgggttcagctcgttttacccctcctggttgccgaagccgccgcagccccagcattcttggaagctttcgcggctaatgtcctggaaccccgcgaacacgccctgctcacactgttgcttgtatacggaccaagagaggggggaaggggcgctccagatccttttctgggagtcaaggctgccgcagccgaactggaacggaggtaccccgggactcgactggcatggttagctgtgagagcggaggctccttctcaggtcaggctgatggatgtggtgtccaagaagcaccccgttgatactttgttcttcttgaccaccgtgtggacaaggccgggcccagaggtgttaaacaggtgccgaatgaacgctatctcgggttggcaggcttttttccccgtgcacttccaagaattcaatcccgcccttagcccccagagatcgcccccagggccgcccggcgccggtcccgacccaccgtcacctccaggggctgatccctcaagaggggcgccaatcggaggacgatttgataggcaggcttcagcagagggttgcttttataacgctgactatttggccgcgcgcgcgcgcctagcaggagaactagctggccaggaggaggaggaggctctggagggcctagaagtaatggatgtattcctcagatttagtgggcttcatctgttcagggctgtggagccaggtctggttcagaagttcagtctaagggactgctctcctcgactttcggaagagttgtaccaccgttgtcgactgtctaaccttgagggtttaggtggaagggctcagctcgcgatggcgctctttgagcaagaacaggcaaatagtacatag

SEQ ID NO: 182858 - DNA, 2004 bp, synthetic construct
  misc_feature 1..2004: note = Description of Artificial Sequence: Synthetic coding sequence
  source 1..2004: mol_type = other DNA
atgcggctgagcagcctgctggccctgctgcggcccgccctgcccctgatcttgggcctgtctcttggctgctctctcagcctgttgcgggtcagttggatccagggagagggcgaggatccgtgcgtcgaagccgtcggggagcgaggaggtcctcagaatcccgactccagagcacgtctcgatcagtctgacgaagattttaagccccgcatagtaccttattaccgcgaccctaacaagccctataaaaaggttctgaggacaaggtacatccagacagaactcggatctcgagagcgcctgctcgtggcagtgctcacaagtcgcgcaacactgtctacgttggctgtggccgtcaatcgtacagtagcccatcactttcctcgtcttctgtattttacaggacagcgaggggcacgagccccggctgggatgcaggtggtgtctcatggggatgaacgtccagcctggctcatgtcggagaccctgcggcatctgcacactcatttcggagctgactacgactggttttttatcatgcaggatgatacctacgtacaggctccccggctggccgcactggctggtcacctcagcatcaaccaggacctgtatctggggcgggccgaggaatttattggcgcaggggaacaggctcgctattgtcatggaggttttggttatttactgagccgcagcctgctcttgcgcctgcggccgcatttggatggttgtaggggggacatactcagcgcacggcccgatgagtggctcgggcgctgcttgatagattccctgggagttggatgcgtcagccagcaccagggacagcagtatcggagttttgagctcgccaagaacagagatcctgaaaaagaaggctctagcgccttcctgtccgcgttcgctgtgcatccggtgtccgagggcacactcatgtaccgcttacacaagcgattcagtgcccttgagctcgaacgcgcctattctgaaatagaacaattgcaggcccagatcagaaatctgaccgtcctcacaccggagggagaagccggcttatcttggcccgtgggcctccctgccccctttaccccccactcaaggtttgaagtgctgggatgggactattttaccgaacagcacaccttttcatgcgctgatggagcgcctaagtgcccactgcagggcgcttcacgagctgatgtcggagacgctctcgagacagctctggagcaattaaacaggcggtaccagccaagactccgttttcagaaacaaagacttctcaacggctatcggagatttgacccagctagagggatggaatatacactggatttattgctcgaatgcgtcactcagagagggcatcgtagagcgctggcccgacgtgtgagtttgctgcgcccgctaagcagagtggagattttgccgatgccctacgtgacagaggccactcgggtccagctcgtgctcccactgttggtggcagaggctgccgccgccccagcattcttggaagccttcgccgcaaacgtcctcgaaccacgggagcatgccttgctgacgctgttacttgtatacgggcctagagagggcggccgaggggcccccgatccttttcttggagtgaaggcggctgccgccgaactggagcgcagataccccgggacaaggcttgcctggctggccgtgcgcgccgaggcccccagccaggttcggcttatggacgtggtctcgaagaaacacccagtggatacgctgttctttctgacgaccgtctggacaagaccaggacctgaggtgctcaatcgctgccgaatgaatgctatttccggctggcaggctttctttccagtgcacttccaggagttcaatcctgccctgtccccacagcgttcgcccccaccaaatctgattactttccctcttagcgcgtcagccccaggacgagcaagacaggatgggggccagatagagaattgttgttgcattttctag

SEQ ID NO: 182859 - DNA, 6969 bp, synthetic construct
  misc_feature 1..6969: note = Description of Artificial Sequence: Synthetic coding sequence
  source 1..6969: mol_type = other DNA
atgcagagcggcccccggccccccctgcccgcccccggcctggccctcgctctgacgttaaccatgctcgcacgcttggcttctgctgccagctttttcggtgaaaaccaccttgaagtaccagtggcaactgccctgacagatatcgacctgcaactgcaattctccacgtcccagcccgaggctctcctcctgctggccgcaggacctgctgaccacctactccttcaactttattctggcaggctgcaagtcagactcgtgctcgggcaggaggagctccgattgcaaacaccggccgagaccctcctcagcgactctatcccgcacacagtggtgctgacagtggtcgaagggtgggcaacacttagcgtggatgggttcttgaatgcttcaagtgcggtgcccggggcccctctcgaggtcccttatggactcttcgtgggaggaaccggtacccttggcttgccatatctgcggggcaccagccgccctctccgcggctgcttgcacgctgcaacacttaacgggaggagtctactgaggcctcttacgccagacgtccacgaagggtgcgcggaggaattttccgcttccgacgacgtggcattaggattttccggcccccacagcctggccgcctttcccgcctggggaacacaagacgagggcactttagagttcaccttaaccacccagtcacgccaggcacctttagctttccaagctggaggcagacgaggggattttatatacgtggatatcttcgaaggacatttaagagccgtggttgaaaaaggtcagggcactgttctgctccacaacagcgtccccgtcgccgacggccaaccacacgaggtgagtgttcatattaacgcccatcgattggagatcagcgtggatcaataccctacacacacaagcaatagaggcgtcttgtcatatctcgagcctagaggctctctgttgcttggtggactcgacgcagaggcttcgcggcatctgcaagagcacaggctgggtctgacaccggaagcaacgaatgctagccttctgggatgtatggaagatctctcagtgaacgggcaaagaagaggcctgcgggaagccctgctcacgcgcaacatggcggccggctgccgcctggaggaggaggaatacgaggatgatgcgtacggtcattatgaagcgttcagcacactggctcccgaggcttggccagcaatggagctgccagagccttgtgttccagaacccgggctgccccctgtcttcgcaaattttacacagctgcttaccatctctccccttgtggtcgctgaggggggtactgcatggctggagtggagacatgtccagcctactctcgatctgatggaggcggagctgaggaaatcacaagtcctgttttccgttacccggggtgctagacacggagaactagagcttgacattcctggggcacaggctcgaaaaatgttcactttgctcgacgtggtgaataggaaggccaggtttattcatgacgggtctgaagacacgtccgaccagctggtgttggaggtctccgtgactgcgagggtgcccatgccgtcttgccttcgtagggggcagacctatctgctccctattcaggtcaatccggtgaatgaccccccacatattatttttccacacggctcactgatggtgattctcgagcatacacagaagcccctgggtcctgaagtgttccaggcctatgacccagattccgcgtgcgagggattgacatttcaggtcctgggaactagttctggtttgcctgttgaacgcagagaccagcctggcgaaccagcaacggagttttcttgtagggagctcgaagcgggctcactggtgtatgtccaccgaggggggccagctcaggacttgacctttagggtgtccgatggcctccaggcatctcctcctgctacactaaaagtcgtcgcgatcagaccggctatccaaattcataggagtactggactcagactcgcccagggctcagccatgccaatcttacctgcgaacctgagcgtggagacaaatgctgtcggccaggatgtctcagtgctcttccgcgtgacgggagccctccagtttggggagctgcagaaacagggagcggggggcgttgaaggcgccgagtggtgggcaacccaggctttccaccagagagatgtggagcaagggcgggtgcgctatctctcgacggacccccagcatcacgcatatgatactgtggagaacttagcactggaagtgcaggtgggtcaggagattttatctaatttatcctttccagtcactatccaacgggctacggtgtggatgttaaggcttgagccattgcacactcaaaacacgcagcaggaaacattgactacagctcatcttgaggcaacacttgaggaagccggaccatctccccccacatttcattatgaggttgtccaggccccacggaagggcaatctacaactccaaggtacaagactctcggatggacagggcttcacccaggatgatatccaggctgggagagtgacctacggcgcaacagcccgcgcgagcgaggccgtcgaggatacgttccgcttccgcgtcaccgccccaccttatttctcacctctctacaccttccctatccacattgggggcgatccggatgcacccgtccttactaacgtccttctggttgtgccagaaggtggtgagggtgtgctgagtgcagatcatttgtttgttaagtccctgaattcagcctcctacctctacgaggtgatggagaggcctaggcatggacgtctggcctggagggggacccaggataaaactaccatggttacctcatttacgaacgaggatctgctgaggggcagactggtgtaccaacatgatgactcagaaaccacagaagacgacataccatttgtcgcgacacgccagggcgaatcctccggcgacatggcctgggaagaggttaggggtgtgtttcgcgttgccattcagcctgtgaatgaccatgcgcctgtgcagacgatctctaggatcttccacgtagcacgcggcggacgccgtcttctgacaacagatgacgtagcattcagtgatgcggatagtggttttgcagatgctcagctagtactgactcggaaagacctgctgtttggcagcatcgtggcagttgacgagccaacacggcccatttaccgattcacccaggaggatctgcggaagagacgggtgctgtttgtccactctggagccgaccgtgggtggatccagctgcaggttagcgacggtcagcatcaggcaactgccctgctagaagtgcaagcctccgagccatatctgcgagtcgccaacgggtcatccctggtggtccctcagggtgggcaagggacaatcgatacagctgtgctgcacctcgatacaaacctggacatcagaagcggagatgaagttcactaccatgtgaccgccggtcctagatggggccaactcgtgagagccggccaaccagccacggctttttctcagcaggacctacttgatggcgcagtgctctactctcacaacggttctctgtcccctcgggacacaatggcgttttctgttgaagcaggtccagttcatactgatgccaccctccaagtgacgattgccctcgagggtccattggcccccctgaagctcgtgcgacacaaaaagatctacgtgttccagggcgaggccgctgaaataagaagagatcagctggaggcggcacaagaggccgttccccctgcggatattgtgttcagcgttaagtcacctccaagtgctggatatctggtgatggtgtctcgcggcgcactggcagatgagcctccatccctggatcctgtccagtcgttctcacaggaagccgtagatactggaagagtcctatacctgcacagccgcccagaagcttggagtgacgcattttcgttggacgtggccagtggactgggggctccgttggagggcgtacttgtcgagctggaagttctccctgctgccatccctctggaggctcagaatttctctgttcccgagggcggcagcttgactctggcccctccactgcttagggtcagcggaccctattttcccacattgctgggcttgtcactccaggtcttagagcccccccagcatggggcactccagaaagaagacggcccacaagcacgcacgctgtccgcattttcttggcgcatggtcgaggaacaacttatccgctacgtccacgacggctcagaaactctaaccgattcttttgtactcatggctaatgcttccgagatggatcgacagtcacatcctgtagccttcacagtgaccgtgctcccggtcaacgaccaaccgcccattctaactaccaacaccggccttcagatgtgggagggcgcaaccgcccctatcccggcagaggcattaaggagtacagatggcgattcaggttctgaggatctcgtgtataccatcgagcagccatcaaatggcagagtggtgcttcggggcgctccaggaacggaagtgcgtagcttcactcaggctcagctggacggtgggctggtcctgttcagccacagaggaaccctggatggcgggttcaggttcaggctcagcgacggagagcacacctctcctggacacttctttagggtgaccgctcagaaacaggtgttgcttagtctaaagggatcacagactctcacagtgtgtccaggctccgttcaacctttatcatcacagactcttagggcatccagctccgccgggacagacccacagctgctcctgtatagggttgttcggggtccgcagcttggacggctgttccatgcccaacaggatagtaccggcgaggcattagtgaactttactcaagctgaggtgtatgccggaaacattctgtacgaacacgaaatgcctccagagcctttctgggaggctcacgacactctagaactgcagctgtcgtctcccccagccagagacgtggcggcaacactggcagtggctgtctcgttcgaggccgcctgcccgcagaggcctagccatctctggaagaacaagggcctgtgggtgcctgaggggcagcgcgccagaataaccgttgccgcgctggatgcgtcaaatctgctggcttccgtgccaagccctcaacggtccgaacacgatgtcctctttcaggtcactcagtttccatcacgcggtcagttgctggtgtccgaggagcccctccacgcaggccagccacattttctgcagagccaactcgcagccgggcagctggtgtatgcacacggcggcggcggcactcagcaggacgggtttcatttcagagcacacttacaaggaccagctggcgcctccgtcgcgggccctcagacctccgaagctttcgctatcaccgtgcgggatgtgaatgagcgcccacctcaacctcaggctagcgtgcccttgcggttgactcggggctcaagggctcccatttcaagagcccaactcagcgttgtggaccccgactccgcgccgggcgagatcgaatatgaggttcaaagagcgcctcataacggctttctatccctcgtgggaggaggcctcgggcccgtcactcgctttacacaggcagatgtggatagcggaaggctggcattcgtcgccaacggttcatccgtcgcgggaatctttcagttgtccatgagcgatggcgcatctccaccattacctatgtctctcgctgtggacattctaccgagcgcaatcgaggtacagctgagggctcccctcgaagtccctcaggccctgggtaggagcagcctcagccagcagcaactgcgggtcgtctcagaccgtgaagagcctgaggcagcctaccgcctgatccagggaccccagtacgggcatctccttgttggcggaagacctacttctgccttttcccaatttcagatcgatcaaggcgaggtggtgttcgcctttaccaacttttcatccagccacgatcactttagggtcctcgcactggccagaggggtgaacgcgtccgccgtcgtgaacgtgacagtacgtgctcttctgcatgtgtgggcgggcggtccctggccccagggcgccaccctccgcttggatccgaccgtcctcgatgcaggagagctggccaacagaacaggtagtgtccctcgattccggttgctggaaggcccaaggcatggccgcgtggtgagggtgccacgggccagaacggaacccggcggctcccaactggtggagcaattcacccagcaggatttagaggacggcaggctcggtctggaggtaggaagaccagaaggtcgggcccctggcccagctggcgactcattgacactcgagttgtgggcccagggcgtgccaccagcagtggcaagtctagatttcgcaactgaaccctataatgctgcccggccctactcagtcgcgcttctcagtgtgcctgaggcagcaaggactgaagccggaaaaccagagtcctccacacccaccggcgaacctgggccaatggcaagctctcctgagccggccgtagccaaaggcgggttcctgtcctttctggaagcgaacatgttctccgtgatcattcccatgtgtctggtgttgctcctgctcgcgctgattttgcctctgcttttttaccttcgcaaaagaaacaagaccgggaaacatgacgttcaagtgttaacggcaaagcctagaaatggtctagcgggcgacacagagaccttccggaaagtggagcctggccaggcgatcccccttaccgccgtaccgggccagggtccccctcccggagggcaaccggatcccgaactgctgcagttttgtaggaccccaaacccagccctgaagaatgggcaatactgggtttag

SEQ ID NO: 182860 - DNA, 984 bp, synthetic construct
  misc_feature 1..984: note = Description of Artificial Sequence: Synthetic coding sequence
  source 1..984: mol_type = other DNA
gagcagcaccgggaggagcccgaggccgcctaccggctgatccagggcccacagtacggccatctgctggttgggggacggcccactagtgctttttcccagtttcagattgaccagggagaagtggtgtttgccttcacgaatttttccagcagtcatgaccacttcagggtcctggctctagcccgcggtgttaatgcctctgctgtagtcaatgtcactgtgcgagcactcctacacgtttgggccggcgggccctggcctcagggggccactctcagactggacccaacggtgctggatgctggagaactggctaacagaaccggttccgtcccacgatttcgtttactggagggaccccggcatggacgggtggtgcgggtccccagagcccgcaccgagcctggcggttcccagttagtggaacagttcacccaacaggaccttgaggatggcaggctcggactggaggtcggccggccagaaggaagggcaccaggacccgccggcgatagcctcacattggagctgtgggcccagggagtgccccccgccgtggccagcctggactttgcaaccgaaccttataacgccgcacggccttatagcgtggccctgctgtccgtgcctgaagccgcccggacagaggctggcaagccagagtcttcaactccaaccggggagcctggaccgatggcaagctctccagagcctgccgtcgccaagggtgggttcctcagtttcctggaggccaacatgtttagcgtaatcattcctatgtgtctggttcttctactgttggcattaatcctccctctgctgttctacctgcgaaaacgtaacaagaccggcaaacatgatgtgcaggtgttaacggcaaaacctagaaacggtctggccggtgatacagaaaccttcaggaaggtggagccaggacaggcgatacccttgaccgccgtgccgggccagggcccaccgtag

SEQ ID NO: 182861 - DNA, 2409 bp, synthetic construct
  misc_feature 1..2409: note = Description of Artificial Sequence: Synthetic coding sequence
  source 1..2409: mol_type = other DNA
atggccgcccggggccggcgggcctggctgagcgtgctgctgggcctggttctcggcttcgtgctagcctctaggttagtgctgccacgagcatctgaactaaaacgcgccgggccacggaggcgagcatctccagagggatgtcgcagtggacaggccgctgcatcccaggcaggaggtgctcgcggagatgcccggggtgcccagttgtggcctcctgggtcagacccagatggcggaccccgtgacagaaacttcctgttcgtcggtgtcatgacggcacagaagtacttgcaaaccagggcagtggccgcataccgaacctggtcaaagaccatacccggtaaggtccagttcttctctagcgaaggttccgatactagcgtgcccataccggtggtacctctccgcggagtggatgatagctatccgccccaaaaaaaaagttttatgatgctaaagtacatgcacgatcactacctggacaagtatgaatggttcatgcgggccgatgatgatgtttacattaagggggaccgtctggagaatttcctgcggagtctgaatagttctgaaccattgttcttagggcagaccggcctcgggactaccgaagaaatgggaaagctagcactggaacctggcgaaaatttctgtatgggcgggcctggggtcattatgtctcgtgaagtgctgagaaggatggttcctcatatcggcaaatgtctccgagagatgtacactactcatgaggatgtggaggtgggacgttgtgtgcgccggtttgcgggggtccagtgcgtgtggtcatatgaaatgcagcagttattctacgaaaattatgagcagaacaaaaaggggtacatccgtgatctgcataactctaaaatccaccaggcgattactcttcaccccaacaagaatcccccctaccagtatcgacttcactcttatatgctgtctcggaagatttccgaactcagacataggaccattcagctgcacagggaaatcgtcctgatgtccaaatattctaataccgagatccataaggaagatttacaactcgggattcctccaagctttatgcgcttccagcctcgccagcgcgaggaaatcctcgaatgggagttcttgactgggaagtacctgtattctgccgtggacggccagccacccagaaggggaatggattccgcacagagggaagcactggacgacatcgtaatgcaggttatggagatgatcaatgctaatgccaagacccgtggtcgcattatcgactttaaagagatccagtatggctacagacgtgtcaatcccatgtacggggcagagtatatcctggatttgcttcttctgtacaaaaaacataaagggaagaagatgactgtcccagtcagaaggcatgcatacctgcaacagactttcagcaaaatccagtttgtagagcacgaggagttagacgcacaagagctggccaaacgtatcaatcaggagtccggctccttatcttttctgagcaactccctgaagaagcttgtcccatttcagctaccagggagtaagtctgaacataaagagccaaaagataagaagattaatatacttattccattaagcggccgcttcgatatgttcgtgcgattcatgggtaattttgaaaagacgtgccttatccctaaccagaatgttaaattggtggtgctccttttcaattccgattccaatccagacaaagctaagcaggttgagctgatgcgggattatcgaattaagtatccgaaggccgatatgcagatcctgcctgttagcggagagttcagcagggcccttgcccttgaggtcggaagttcccagtttaataacgaatctttactatttttttgtgatgtggatctggtgttcacaacagagttcctgcagaggtgcagggccaacacagtccttggtcaacagatctatttcccaatcatcttctctcagtacgacccgaagattgtttatagcggcaaagtaccgtctgacaaccatttcgcgttcacccagaaaacaggcttctggcgcaactacggattcgggatcacctgtatttataaaggcgatctggtccgagtgggaggattcgatgtgtctatccagggttggggactggaggacgtggacctcttcaataaagtggtacaggctggacttaagacctttagatcccaggaggtaggggttgtgcacgtccaccaccccgtgttttgtgatcccaacctggacccaaagcaatataaaatgtgtctgggaagcaaagcctctacctacgggtctacccaacagttagcggaaatgtggcttgagaaaaacgacccttcctatagcaaaagcagcaataacaacggcagtgtacgcactgcctag

SEQ ID NO: 182862 - DNA, 2649 bp, synthetic construct
  misc_feature 1..2649: note = Description of Artificial Sequence: Synthetic coding sequence
  source 1..2649: mol_type = other DNA
atggccgtgcggagccggcggccctggatgagcgtggccctgggcctggtgctggggttcacagcagcctcgtggctcattgcaccaagagtggccgagctaagcgaaagaaagaggcgagggagttctctttgctcgtattatggccgctctgctgctgggcccagggccggggctcagcagcctctcccccaacctcagagtcgacccaggcaggaacagagccccccgcccgctcgccaggatctgcaggggcctcccctgcccgaggctgcccctggaattacaagtttccgcagcagtccatggcagcaacctccacccctgcagcagcggcgtagggggcgcgagcctgaaggtgcaaccggactgcctggtgcccctgccgccgagggagaacccgaagaggaagatggtggcgctgcagggcagaggcgtgacggaagacccggatcttctcacaacggctccggagacggaggggctgctgcaccgagtgctaggccccgagacttcctctacgtgggcgtgatgaccgcgcagaaatacctggggagcagggccctcgccgcccagagaacctgggcccggttcatccctgggagggtcgagtttttctccagccagcagccaccaaacgcaggccaacctccccctcctctgcctgtgatcgcactgcccggagtggacgacagttaccccccacaaaaaaaatcattcatgatgatcaagtatatgcacgaccactacctggacaagtacgagtggtttatgcgggcagacgatgatgtttacattaaaggcgacaaattggaggagtttctgcgaagccttaactcatccaaacctctgtacttaggacagacaggcctaggcaatatcgaggagctgggcaaattggggttagagcccggggaaaatttctgcatgggcggaccgggtatgatttttagtcgggaggtgttgcgacgcatggtcccccacataggcgaatgtctgcgtgaaatgtacaccactcacgaagacgtagaggtaggcaggtgcgtcaggagattcgggggtacgcagtgtgtctggagttatgaaatgcaacagctgttccacgagaattatgaacacaatcgcaaagggtacattcaggacctccataactccaaaatccatgcagctatcacccttcaccctaacaaacggcccgcctatcaataccggctgcataattacatgctcagccgaaaaatctcagaactcaggtaccgcacaattcagctgcatcgcgaatctgcactgatgagcaagctctcaaacacggaggtgagcaaggaagaccaacagctcggggtgataccgagctttaatcactttcagccccgggagcgcaatgaggttatcgaatgggagttcttgaccggcaaattactgtactccgccgcagaaaaccagcccccacgccagagtttgtcatccattctgaggacggctctcgatgacacagtgcttcaggtgatggagatgatcaatgagaatgcaaagagccggggccgcctaatagatttcaaagaaattcagtatggatatcgacgagttaaccctatgcacggggttgaatatatactcgacctgctgttactgtacaaacggcacaaaggaagaaaactcactgttcctgtgagacgccacgcgtatctgcaacaactattctccaagccattctttagggagacggaagaactcgacgtaaatagcttggtcgaaagtatcaatagcgaaacacagagtttctcttttatctcgaatagcttgaaaatcctctcctcattccagggagccaaagagatggggggccataacgaaaagaaagtgcacatcctcgtgcccctcatcggacggtacgacatctttcttcgctttatggagaacttcgagaatatgtgtctaattccgaagcagaatgtgaaactggtgatcatcctcttcagccgagacagcggccaggatagttcaaagcatattgagctgatcaaagggtatcaaaataaatatcccaaagccgaaatgactctgatcccaatgaagggcgagttttcacgcggactgggtctggagatggccagcgcccaattcgacaacgacaccctgctcctgttctgtgatgttgacctgatcttcagggaggatttcctgcaaaggtgccgagataataccatccaaggacagcaggtgtactacccgataattttctctcaatacgatcccaaggtcaccaatggcggcaaccccccaaccgatgactactttattttctccaagaagaccgggttctggcgcgactacggatacggtatcacatgtatctacaaatctgaccttttgggcgctggcggattcgacaccagcatccagggttggggactcgaggacgtggacctgtacaataaagtgatcttgtccggtctaagacccttccggtctcaagaggtgggcgtggtgcatatctttcatcccgtgcactgtgaccctaatctggatcccaagcaatacaaaatgtgtctaggcagcaaggcttctacattcgcttcaacaatgcagctagccgaactctggcttgaaaaacacttgggcgtaagatacaatcggacactgtcctag

SEQ ID NO: 182863 - DNA, 2868 bp, synthetic construct
  misc_feature 1..2868: note = Description of Artificial Sequence: Synthetic coding sequence
  source 1..2868: mol_type = other DNA
atgcccagcctgcccgccccccccgcccccctgctgctgctgggcctactgctccttgggtctcggccagcccgcggagcaggtccagagcctcctgtcctgcccataaggtcagagaaagagccacttcctgttaggggggccgctgggtgcactttcggtgggaaggtatatgcgttggacgagacttggcaccctgacctgggtgaaccgttcggggttatgcgctgcgtgctgtgtgcctgcgaggcaccccagtggggacgacgaacacggggacccgggcgcgtatcgtgtaagaatattaagcctgaatgtccaactccagcttgcggccagccacgacaacttcccgggcactgttgccagacctgtccccaagagagaagctctagcgaacgccagccctccggcctgagttttgaataccctcgtgatcctgagcataggtcatattccgacaggggcgagccaggtgcggaggagagagcaaggggagatgggcacaccgacttcgtagccttattgacaggcccccgatcccaggccgttgccagggcccgagtatctcttttgagatcttccctaaggttctcgattagttaccggcgtctcgaccggccaacaagaatacgtttctccgattccaatggttctgttctgttcgagcaccccgccgcccctacgcaggatggtttggtctgtggcgtctggagggctgtcccacgcctaagccttcgcctcttgagagcagagcagcttcatgttgccctcgtcacccttacgcacccatctggcgaagtgtgggggcccctgatacgacatcgcgcactcgctgccgaaacgttcagtgctattttaacacttgaaggccctccccagcaaggagtagggggcatcacgctgcttactctgtccgatacagaggattctctacattttctcttattgtttagaggcctgttagagccacgcagcggcgggttaacacaggtgccgctgaggctgcaaatcctccaccagggtcagctgctgcgcgagcttcaggcaaatgtctccgctcaggagcccggattcgccgaggtgctgccaaatctaacagtgcaagaaatggattggcttgtgctaggtgaattacagatggccctggaatgggcagggagacccggtctgcgcatatctgggcacatcgccgccagaaaatcctgcgacgtgctccagtccgtgctatgtggcgcagacgccctcataccagtccagactggagccgccggctcagctagcctgacactgctgggaaatggaagtctgatttaccaggtccaggtggtaggcaccagttccgaggttgtcgctatgactctggagacaaaaccacagagaagggaccaacgcaccgttctttgtcatatggcaggtctgcagcccggtggccacaccgcggtgggcatctgtcccggactgggcgcacgcggcgcccatatgctgctgcaaaatgaattgtttctcaacgtaggcacgaaggattttccagacggggaactgcggggacatgtagccgctctgccctattgtgggcactcagcccggcatgacacattacctgtgcctctggcaggagccctagtgctgccaccagtcaaatctcaggccgccgggcatgcctggctctcactcgacactcattgtcacctgcactatgaagtccttctggctgggctgggtggctccgagcaaggaacagtgaccgcccatctgcttgggccacccggaacccccggtcctcggcgcctgctcaaaggcttctatggctccgaggcccagggcgtcgtaaaagatctcgaaccagaattgctgcggcacctcgccaagggaatggcttctttgatgatcactactaaaggatcccctcggggggagttgcggggccaggttcatatcgccaatcagtgtgaagttggaggtctccgcctcgaagctgccggtgctgaaggcgtccgagccctgggagcacccgacactgcttcagcagccccccctgtggtgcccggcctccctgcgcttgccccggctaagcctggcgggcccggtagaccccgcgatcccaatacctgcttcttcgaaggacaacaacgtcctcacggcgcacgatgggcacccaactacgatccactttgctcactgtgcacctgtcagagaaggaccgtgatatgtgatcctgtggtctgcccgcccccatcttgtccgcaccccgtgcaggcaccagatcaatgctgtcctgtgtgccctgagaagcaggatgttcgagatctcccggggctccctagaagcagagatcctggagagggatgctatttcgatggagataggtcttggagggcggccggtactcggtggcaccccgtggtgcctccttttggtttgataaagtgcgctgtgtgcacctgtaaaggaggcactggagaggtccattgcgagaaggtgcagtgtccaagactggcctgcgcccagccggttcgggtcaatccaactgactgttgcaagcagtgcccggtcggaagtggagcccatccacagctgggggacccgatgcaggccgacggtcccagggggtgccgctttgccgggcagtggtttccagagtcccaatcctggcacccctctgtgcccccctttggggagatgagctgcatcacgtgtaggtgcggcgctggagtgccgcattgcgagagagacgactgcagtctgccccttagttgcggaagtggcaaggagagccgatgctgctctcgctgcacggcccacagaagacctgcccccgagactcggacagaccccgagctggagaaagaggccgagggcagctag

SEQ ID NO: 182864 - DNA, 285 bp, synthetic construct
  misc_feature 1..285: note = Description of Artificial Sequence: Synthetic coding sequence
  source 1..285: mol_type = other DNA
atgcccagcctgcccgccccccccgcccccctgctgctgctgggcctgttgttgctggggtcgagacctgcccggggcgctggaccagaaccacccgtgctccctattcgtagcgagaaggagcccctacctgtgaggggggctgccgggtgcacgttcggggggaaagtttatgctttagacgagacatggcacccagatctgggagagccctttggggtcatgcgctgcgtcctgtgtgcctgcgaggcaaccggtacactcaggccaagagagatgaagtag

SEQ ID NO: 182865 - DNA, 1512 bp, synthetic construct
  misc_feature 1..1512: note = Description of Artificial Sequence: Synthetic coding sequence
  source 1..1512: mol_type = other DNA
ggcgagcacctgagccagaagggcccccacgtgcggccctgccggacaaaccctgggagcctggaggcccccgattccacgcctggcgcagccacagcacgcactagcgggcagtgcctaagccccggcgaatgggggagtggctcgagatgccatctgtcttggcctctggctatcgcccatcacacgctgttgtgtccacaggagccaggtttcgctgaggtgcttccaaacctcaccgtccaggaaatggattggctggtccttggggagttgcagatggctctggaatgggccgggcggcccggactgaggatctctgggcacattgcagcccgtaagtcttgtgacgtccttcagagcgttttgtgtggcgctgacgccctaatccccgtgcaaaccggtgcagccggctcggcttcacttacgctgctaggtaacggtagccttatctaccaggttcaagtggtgggaacttcttctgaggtggtggcaatgactttagaaacaaagccccagaggagggatcagcgtacagtgctgtgccatatggccggccttcagcccggaggacacacggccgtaggcatttgtcctggattaggagcaagaggagctcacatgcttctgcagaatgaactgttcctcaacgtgggaactaaagatttcccggacggcgaactacgtggtcacgtggccgccctgccatattgtggtcacagcgctcgccacgatacattgcccgtcccactggcaggagctttagtgctccccccagtgaagtcccaggccgccggtcacgcctggctttccctggacacccactgtcatttacattatgaggtgctcctcgctggattggggggctcagagcagggcacagtaacagcccatcttttaggcccacccggaactcccggtccacgaaggctgctcaaagggttttacggatcggaagcccaaggggtggtgaaggatctggagcctgaactgctcagacacctggctaagggcatggcttctttgatgattacgaccaaaggctctcccagaggcgagctgagagggcaggtgcacatcgcgaatcagtgtgaagttggggggctgcgactcgaagcagcaggcgcagagggtgtgcgcgcattgggtgccccggatacagccagcgcagcgccgcctgtcgtgcccggccttccagccctggcgcccgcaaagccgggtggacccggccgtcccagagatccaaatacctgcttcttcgaaggtcagcagcggccacacggcgcccgctgggctccgaattatgacccactgtgctctctgtgtacatgtcaaagaagaacagttatctgcgaccctgtggtgtgccccccaccaagctgcccacaccctgtgcaggcccctgatcaatgctgccctgtgtgccctgaaaaacaggacgtgcgggacctaccagggttaccaaggtcgcgtgaccctggtgaaggtggccattggcggggcgcactctag

SEQ ID NO: 182866 - DNA, 2748 bp, synthetic construct
  misc_feature 1..2748: note = Description of Artificial Sequence: Synthetic coding sequence
  source 1..2748: mol_type = other DNA
atgcccagcctgcccgccccccccgcccccctgctgctgctgggcttgttactactggggtctaggccagcgcggggagccggtccggagccccctgtcctcccgatccgcagcgagaaggagcctctacctgtgcgcggggccgccggctgcaccttcggcgggaaagtctacgccctagacgagacttggcatcccgatcttggagaaccttttggggtcatgcgatgtgttctgtgtgcttgtgaggccccccagtgggggaggcggactcgaggccccggccgtgtaagttgcaaaaatattaaacctgagtgcccaacacctgcctgcggccagccacgtcagctgccaggtcactgttgccagacctgtcctcaggagagatcaagttccgagcgccaacccagcggactctctttcgagtaccccagggatcccgagcatcgttcatattctgaccggggggagccaggcgctgaggaacgtgcgagaggcgacggccatactgacttcgtagctctcttaacaggcccacgatctcaggcggtggctagagcccgcgtttccctcctgcggtcctccttacgcttcagcatctcctatcggaggttggacagaccgacacggattagatttagcgatagtaatgggtccgtgctcttcgaacatccagctgctccaacccaggatggattggtatgtggggtttggagggccgtgcctcgcctgagtctcagattactacgcgcagaacagcttcacgtggccttggtcacactgactcatcccagcggtgaagtgtgggggccactgataaggcaccgggcactggctgcggaaaccttctccgctattcttacacttgagggaccacctcagcagggcgtaggcggcatcaccttgctcacactgtcagatacggaggatagtctacatttcctccttctatttcgtggcctgctcgaaccgcggtccggcgggttgactcaggtacccttacgtctgcagattttgcatcagggtcagctccttagggaactgcaggcaaacgtctccgcgcaggagccaggctttgctgaagttcttcccaatcttacagtgcaggaaatggactggctggtccttggtgagctgcagatggccctggaatgggccggcaggccaggactgcgcatttctggccacattgccgcgaggaagagctgcgacgtattgcagagtgtcttgtgcggcgcagacgctctgatccctgtacagaccggcgccgcagggtctgctagcctgacattgttgggcaacggttccctaatctaccaggcagtcgggatttgccctggtctgggcgcccgaggagctcacatgctgttgcagaacgagttgtttctcaacgtggggacaaaagactttccagacggtgaactccgtggtcatgtggctgctctgccatactgcggtcactctgcacgtcacgataccctgcctgtgccactggccggcgctctggttctccctcccgtgaaatcccaggccgcgggacatgcctggttgagcctggacacacattgccacctgcactatgaggtcctgctggccgggttgggaggtagcgagcaaggtaccgttactgctcacctattaggtccccccgggaccccagggccgcggcgcttgcttaaaggcttttatgggagcgaggcacagggagtggtcaaggatcttgaacctgagctcctgcgccacctggccaagggtatggcctcgctcatgataaccactaagggaagccctcgaggggaactccgaggacaggtgcacatcgccaatcagtgcgaggtgggtggtcttaggctggaggctgccggagccgagggcgtcagggctctcggcgccccagacaccgcctcagcagcaccaccggtggtacctggcctgccagctctcgcacctgccaagccagggggcccgggtaggccaagggatcctaacacctgtttctttgagggtcagcagcgacctcacggtgccagatgggctcccaattacgatccattatgttccctctgcacgtgccagcgccggacagtgatctgtgaccccgttgtttgccccccccctagttgcccccaccccgtccaggctccagaccagtgctgcccagtctgcccagagaagcaagacgttcgggatctgcctggcctaccacgttcacgggacccaggggagggctgttacttcgatggagatcggagctggagagctgctggcacaagatggcatcctgtcgtgcccccatttgggctaataaagtgcgcggtctgcacttgcaaaggtggtaccggggaggtgcattgtgaaaaagtgcagtgcccacgcctggcctgcgcacagcccgtaagggtgaaccccacagattgctgcaagcaatgcccggtggggagcggcgctcaccctcaactcggagaccctatgcaggctgatggccctcgcggttgtcggtttgctggtcagtggtttcctgagagccagtcctggcacccatccgtgcctccatttggtgaaatgagctgcattacgtgccgttgtggcgcaggggtgccccattgcgaaagggacgactgctcactgcctctctcgtgcggatcaggaaaggagtcccgatgttgtagcagatgcacagcacaccgccgccctgcccctgaaactaggacagatcccgagttagaaaaggaagctgagggatcctag

SEQ ID NO: 182867 - DNA, 1494 bp, synthetic construct
  misc_feature 1..1494: note = Description of Artificial Sequence: Synthetic coding sequence
  source 1..1494: mol_type = other DNA
atggactggctggtgctgggcgagctgcagatggccctggagtgggctggacgccctggactccgcatctctggccatatcgcagctagaaagtcatgcgatgtgttacagtccgtactgtgtggagccgatgccctgatcccagtgcaaaccggcgccgcgggatcagccagcctgaccctacttggaaatgggtcactgatctatcaggttcaggtcgtggggacttccagcgaggtcgtagcaatgacactggaaacaaaaccccagagacgggaccagcggaccgtactgtgccacatggccggcctgcagcccggtggccacactgctgtgggcatttgtcctggactgggggcccggggcgcccacatgctgttacagaacgaactgtttctgaacgtcggaaccaaggatttccccgatggagaacttcgtggccacgtggccgctctgccttattgcggtcacagcgccagacacgatacgcttccagtgccattggccggcgcacttgtccttcctcccgtaaaaagtcaagccgcaggccacgcatggctgtcactcgacactcactgccatttgcactatgaggtgctcctcgctggcctgggcggttctgagcagggcacggttactgctcatctcttggggccgcctggcacaccgggacctcgccggctgctaaaggggttctatgggtccgaggcacagggcgttgtcaaggacctcgagcctgagctgctgcggcatctcgccaagggcatggcaagcctcatgatcacaactaaggggagtcctagaggcgaactgcgaggccaacgccgtacggtgatctgtgaccctgtagtgtgcccaccgcccagctgcccacaccctgtacaggccccggatcagtgctgccccgtttgccccgaaaagcaggatgtccgtgatctccctggcctgcccaggtcaagggatcctggtgaaggttgctattttgacggagatcgcagttggcgcgccgccgggactcgctggcacccagtggtcccaccgtttgggctgatcaaatgcgccgtgtgtacgtgtaagggcgggacaggcgaggtgcattgcgagaaagttcagtgtcccagacttgcatgcgcacagccagtacgggtgaacccaactgattgttgtaagcaatgccccgtggggtcaggagcgcacccccaactgggggaccccatgcaggccgatggcccccgcggctgcagatttgccgggcaatggttccctgaaagtcagtcctggcatccttccgttccaccctttggcgaaatgagttgtattacctgtcgctgtggcgctggggtacctcactgtgagagggatgattgcagtctgcctctctcctgtgggtcgggaaaggagagccgatgctgctccaggtgcaccgcacacagaagacccgctccggagacacggaccgaccccgagctggaaaaagaggctgagggatcatag

SEQ ID NO: 182868 - DNA, 3126 bp, synthetic construct
  misc_feature 1..3126: note = Description of Artificial Sequence: Synthetic coding sequence
  source 1..3126: mol_type = other DNA
atggagaacatgttcctgcagagcagcatgctgacctgcatcttcctgctcatcagcggcagttgcgaattatgcgcagaagagaatttttcaaggtcatatccctgcgatgaaaaaaaacagaacgatagtgtcatcgctgagtgttccaacaggcggcttcaagaagtcccccaaacggtcggtaagtatgtgacagagctggacttatctgacaacttcatcacccacatcactaatgaatctttccaaggtctccagaatctcacaaaaattaacctgaaccataaccctaacgttcagcaccagaacgggaatcccgggatccagtccaatgggctgaacatcaccgacggcgcctttctcaacctgaagaacttaagagaactgctcctcgaagacaaccagctgccccaaatcccgtccgggctgcccgaatccttaaccgaactgtctctgattcagaataacatctataatatcaccaaggaagggatcagcaggcttattaaccttaagaacctctatctggcttggaactgttacttcaataaagtctgcgagaaaaccaacattgaggatggcgtgtttgagacccttaccaatcttgagctgctgtccctcagttttaactctctcagccacgtcccccctaaacttccctcttctctgcgtaaattattcctttccaacacacagattaaatatatctctgaggaggacttcaaaggcctcataaatctgacgctgctcgaccttagcggaaactgtccccgctgctttaacgctccatttccctgcgttccttgtgatggaggcgcatcgatcaacatcgacagattcgcctttcaaaatctcacacagctgagatacctcaatctgtccagtacgagtctgaggaagatcaacgcagcttggttcaagaatatgccacatctcaaagttctcgatctggagtttaactatctcgtcggcgagatcgcttccggcgctttcctgacaatgctgcctaggctagaaatcttagacctttcattcaactatatcaagggtagttaccctcagcacataaatatctccaggaatttctccaagctgctgtctctccgggccctgcacctccgcggctacgtgttccaggaacttagagaggacgactttcagcccctcatgcagctgccgaacttgtccacaataaatctgggtataaacttcattaagcagatagactttaagctgttccagaattttagtaatttagaaatcatttatctgagtgagaataggatctcaccgctagtcaaagacacaagacagagctatgccaattcctctagttttcagagacacatacgaaagcgacgctcaactgactttgaatttgacccgcacagcaatttttatcactttactagacccctgatcaagccccaatgtgccgcctacggcaaagctcttgacctgtctttgaacagtatcttctttattggtcctaaccagttcgagaatctccctgatattgcctgcctcaatctgtcagctaatagcaatgcccaggtgctgtccggaaccgaatttagcgccatcccacacgtgaaatacctagatctgacgaacaatagactggatttcgacaatgcctcggccctgacggaactgtctgatcttgaagtgctggatttatcctacaactctcattacttccggatcgctggggtcacacaccatctggagtttatacagaatttcactaacctcaaggtgctcaatctgagccacaataatatctacacactgacagacaagtataacctcgaatcaaaatcactggtcgagctcgtattcagtggcaatcgattggatatcctatggaacgatgacgacaaccgctatattagcatattcaaaggcttgaaaaacctgacaaggcttgatctgtccttaaaccggctgaaacatatcccgaatgaagcgttcctgaacctgcctgcctctctgaccgagctgcatattaacgacaacatgctaaagttttttaactggaccttattgcagcagttccccagattggaactgcttgatctgcgcgggaataaactgctgttcttaactgatagtctgagtgacttcacgtcttccttgcgcacactgttattgtcccacaaccgcataagccatctcccctcaggtttcttgagtgaagtctcttccttgaagcatttggacctttcctctaacctgctcaagacgatcaataagtcagccctcgaaacgaaaactacaactaaactatccatgctggagctgcacggcaatcccttcgagtgcacctgcgacattggcgattttcgacgttggatggacgaacacctcaatgtgaagatcccccgactggtggacgtgatctgcgctagccccggggaccagagaggcaaatctatagtttcccttgaactgaccacgtgcgtgtctgacgtgacggctgtcattttgttcttctttaccttcttcatcaccaccatggtgatgctagccgccctcgctcaccaccttttctattgggacgtttggtttatatacaatgtctgccttgccaaggtcaaagggtatcgctcattatcaacctctcaaaccttttatgatgcctatatcagctacgataccaaggacgcgagcgtgactgattgggtgatcaacgaactacggtaccacctagaagagtcccgggataagaacgtgctgttgtgtctcgaagaaagggattgggaccccggactggccattatcgacaatcttatgcagagcatcaaccagtccaagaagacagtgtttgtgctgaccaaaaagtacgctaagtcttggaactttaagaccgccttttatctcgcacttcagcgtcttatggacgagaacatggatgtcataatctttatcctgctggagccggttctgcagcacagtcagtacctccggctgaggcagcggatctgcaagtcttcgatccttcagtggcctgacaaccccaaagccgaggggctgttctggcagaccctgaggaacgtcgtgttgacggaaaacgatagtcgctataataacatgtatgtggatagcatcaaacagtattag

SEQ ID NO: 182869 - DNA, 1377 bp, synthetic construct
  misc_feature 1..1377: note = Description of Artificial Sequence: Synthetic coding sequence
  source 1..1377: mol_type = other DNA
atgcggaagaagtggaagatgggcggcatgaagtacatcttcagcctgctgtttttcttattacttgaggggggtaaaactgaacaggtgaagcactctgaaacatattgcatgtttcaggataagaaatatagggtcggggagcgatggcatccttaccttgagccatacgggctggtgtattgtgtgaattgtatttgtagtgaaaacgggaatgttctttgttccagggtgcgatgccccaacgtccattgcctctcccctgttcacatcccccacctgtgctgtccaagatgtccagaggatagtctgccacctgtgaataataaggtgacctccaaatcctgtgaatataatggaaccacctaccagcatggcgagcttttcgtggctgaaggcttatttcagaaccgacagcctaatcagtgcacccagtgttcttgttccgaggggaacgtttactgcgggctgaagacctgcccaaagcttacttgtgcatttcccgtctcagttcccgactcatgttgtcgcgtgtgccgaggagatggcgagttatcatgggaacactccgacggggatatctttcgtcaaccagcaaatcgggaagccagacatagctaccatagatcacattacgacccacccccaagtaggcaggctggtggtctgtctcgattcccaggggcgaggagccatagaggagccctcatggacagccagcaggcctccggtaccatcgtccagatcgtgataaacaacaaacataagcatggccaagtgtgtgtgtctaatggaaagacttacagtcatggggagagctggcatccaaatctcagagcctttggaatcgtggagtgcgtactttgtacctgcaacgtgacgaagcaggaatgtaaaaaaatccattgtcccaataggtacccttgcaagtaccctcagaaaatcgacggtaagtgttgtaaggtctgtccgggaaagaaggctaaggaagaattaccaggacagagctttgataataaaggctacttttgtggagaagagactatgcccgtgtacgagtctgtgttcatggaggacggcgagacaacccgaaagatagctctggaaaccgaaagaccaccccaagttgaggtgcacgtctggaccattcgcaagggcattctgcaacacttccacatcgaaaaaatcagcaaaagaatgttcgaagagttgccacattttaagctggtgactagaacaactctcagccagtggaagatctttacagagggtgaggcgcagattagccagatgtgtagctcacgcgtgtgccgtacagagctagaggatctggtcaaggttctgtatctggagagatctgagaaaggccactgttag

SEQ ID NO: 182870 - DNA, 1353 bp, synthetic construct
  misc_feature 1..1353: note = Description of Artificial Sequence: Synthetic coding sequence
  source 1..1353: mol_type = other DNA
atgggcggcatgaagtacatcttcagcctgctgttcttcctgctgctggaaggggggaagaccgagcaagtgaagcatagtgagacctactgcatgttccaggacaagaaataccgggtaggcgagcggtggcatccctatcttgagccttatggtctggtgtactgtgtcaactgtatctgcagtgagaatgggaacgtgctctgtagccgggtgcgttgtcctaacgtgcactgcttatcacccgtccatattccccacttgtgttgcccaaggtgcccagacagcctgcctcccgtaaacaataaagttacttctaagtcatgcgagtacaacggcacaacataccagcacggcgagctctttgtcgccgaaggactgttccaaaatcgccaaccaaatcagtgtactcaatgttcctgctccgaaggcaatgtctactgtggcctgaaaacctgtccgaagctgacatgtgcatttcccgtcagtgtaccggattcctgttgccgcgtatgtcggggggacggggagctttcctgggagcattctgacggagatatcttcagacagccggccaatagggaagcgcggcactcctatcaccgctcccactatgatccacctccaagccgccaagccggaggcctgagtcgcttcccaggagcaagaagccatagaggtgccctgatggattctcagcaagcctctgggacaatcgtgcagatcgtaataaataacaagcacaaacatggccaagtctgtgtctctaacgggaagacatatagtcacggcgaaagttggcatccaaatctccgcgcgtttggaatagtagaatgcgtcctgtgtacgtgtaacgtgaccaagcaagaatgtaagaaaattcactgtcccaaccgatatccatgcaagtatccacaaaagatcgatggaaaatgttgtaaagtgtgccccggcaagaaagccaaagaactacccggccagtcgttcgataacaagggatacttttgtggcgaagaaacaatgccggtctatgagagtgtgtttatggaggacggggagaccactagaaaaattgctctggaaacagagcggccccctcaggttgaagttcatgtgtggaccatacggaagggaatccttcagcattttcacattgaaaagatatctaagcggatgttcgaagaattgccgcactttaagctggtcactcgcacaactctgtcacagtggaagatctttacggaaggtgaagcccagatttcccagatgtgctcgagccgcgtgtgtcgtaccgaactcgaggacctggtgaaagtactgtacctggagcgttccgagaagggacattgttag

SEQ ID NO: 182871 - DNA, 1371 bp, synthetic construct
  misc_feature 1..1371: note = Description of Artificial Sequence: Synthetic coding sequence
  source 1..1371: mol_type = other DNA
atgcggaagaagtggaagatgggcggcatgaagtacatcttcagcctcctctttttcttgttgctcgaggggggaaagacagaacaggtgaagcatagtgagacctactgcatgttccaggataaaaaatacagagttggagaaaggtggcatccatatctggaaccatacggattggtgtactgcgtgaactgcatctgcagcgagaatgggaatgtgttatgctcccgggtcaggtgcccaaacgttcactgccttagccccgtgcacattcctcatctgtgttgccctcgctgccctgattctctgccccctgtgaataacaaggtaaccagtaagtcctgcgaatataacggcaccacatatcagcatggagagttgtttgtggccgagggtctgttccagaacagacagcccaaccaatgcactcagtgctcttgttccgagggcaatgtatactgcggcctcaaaacttgcccaaagttgacctgtgcattcccagtcagcgtccctgacagttgctgtagagtgtgtagaggagatggtgaactgtcatgggaacatagcgatggcgacatcttccggcagccagccaatcgcgaggcccggcatagctatcaccggtctcattacgacccccctccctcgagacaggccggtggattgtcccgtttccccggggctcggagtcatcgtggggccctgatggatagccagcaagcttccggaaccatcgtgcagattgttattaacaacaaacacaaacacggccaggtatgtgtctccaacggaaaaacttacagccatggagagagctggcatccaaaccttcgggctttcgggattgtggaatgcgtgctgtgtacatgcaatgtcacgaagcaggaatgcaagaaaattcattgcccaaaccgctacccatgcaagtatccccagaagattgatggcaaatgttgcaaggtttgccctggtaagaaggctaaagagctcccgggtcaatccttcgacaacaaaggatatttctgcggcgaagaaaccatgccagtgtatgagagcgtcttcatggaggacggcgaaacaacgagaaaaattgccttggagactgagcggcccccccaggtagaagtacatgtttggacaattcggaaggggattctgcagcacttccacattgagaagatcagtaaacggatgttcgaggaactcccacactttaagttggtcactaggactaccctctcccaatggaagatttttactgagggtgaggcacagatttcccaaatgtgttcgtcccgcgtatgcagaactgagctggaggaccttgtcaaagtactttacttagaaagatctgagaaaggacactgctag

SEQ ID NO: 182872 - DNA, 1134 bp, synthetic construct
  misc_feature 1..1134: note = Description of Artificial Sequence: Synthetic coding sequence
  source 1..1134: mol_type = other DNA
atgcggaagaagtggaagatgggcggcatgaagtacatcttcagcctcctgtttttcctgctgctcgaaggtggcaagaccgagcaagtcaaacactctgaaacgtattgtatgtttcaggataaaaagtatagggtcggagagaggtggcacccttacttggagccctacgggttggtctactgcgtaaattgtatttgcagcgaaaacggcaacgtcctgtgttctagagtcagatgccctaatgtgcattgcctctcccccgttcacataccacacttgtgctgcccacgatgccccggggacggtgagctcagttgggagcactccgacggagacatcttccggcaaccagcgaaccgggaagctcgtcacagttaccatcgatcgcattacgatccaccacctagtcgtcaggccggaggcctttcccgctttccaggcgccagatcacatagaggggcgctgatggattcacagcaggcgtctggtactatagtacagatagtgattaataataagcacaaacatggccaagtctgcgtgagtaacgggaagacctactcgcacggagaaagctggcaccccaatttacgagccttcggcatcgtcgaatgtgtactttgtacctgcaatgttaccaaacaggaatgtaaaaagatacattgtccgaataggtacccatgcaagtatcctcagaaaatcgacgggaagtgttgtaaggtttgtcccggcaagaaggccaaggagcttccgggacagtcttttgacaataagggttacttctgcggtgaggaaacaatgccagtatacgaatccgtcttcatggaggacggcgagactacgcggaagattgccttggaaacagaacgcccacctcaagtggaagtgcatgtgtggaccataaggaaaggcatcctgcagcacttccatatcgagaagatcagcaagcgcatgttcgaggaacttccccatttcaaacttgttacacggaccactctgagtcagtggaagatctttacagagggagaagcgcagatttcccagatgtgcagtagcagggtctgccgcaccgaattggaggatctggtcaaggtgctgtacctggaaagatccgaaaaggggcactgttag

SEQ ID NO: 182873 - DNA, 1374 bp, synthetic construct
  misc_feature 1..1374: note = Description of Artificial Sequence: Synthetic coding sequence
  source 1..1374: mol_type = other DNA
atgcggaagaagtggaagatgggcggcatgaagtacatcttcagcctcctgttttttctgctgctcgagggagggaaaactgagcaggtgaagcacagcgagacatactgcatgttccaggataagaaataccgggtgggcgagcgctggcacccctatctggagccctatggcctagtgtattgcgtgaattgtatttgctcagaaaatgggaacgtactgtgttcacgcgtccggtgtcctaacgtgcattgtctgtccccagtgcatatccctcacctctgttgcccccgctgccccgattctctacctccagttaacaacaaagtgacctctaaaagctgcgagtacaatggtaccacataccagcacggagaactgtttgtggctgagggcttgtttcagaaccgccagccaaaccagtgcacacagtgctcctgcagcgaaggcaatgtttactgcggtttaaaaacctgccctaagttgacctgcgccttccctgtctccgtgccagacagttgttgtcgggtctgcaggggggacggggaactgtcttgggaacactctgacggagatatttttaggcagccggcaaatcgagaagcgcggcattcgtaccaccgaagccattacgacccgcctcccagtcgtcaagcaggcggcctctcccgcttccccggggccagatctcatcggggcgccctgatggactcccaacaggcctcagggactatcgtgcaaattgttattaacaataagcacaagcatggccaggtgtgtgtttcaaacggtaagacatactctcacggagagtcgtggcatcctaatcttcgagccttcggcattgtggagtgcgttctctgtacctgtaatgtgactaagcaggagtgcaagaagatccactgcccgaatagatacccctgcaagtaccctcagaaaatcgatggaaagtgctgcaaggtctgtcccgggaaaaaggccaaagaggagctcccggggcagagttttgataacaaaggatatttttgcggcgaggaaacaatgccagtctacgagtccgtatttatggaggacggcgaaacaacgaggaagattgctttagaaacagagagaccgccacaggttgaagtgcacgtgtggacaatcaggaaggggatcctgcagcactttcacatcgaaaagatatcaaagcgaatgttcgaagaattgcctcattttaaactcgtgacacggacaacgttgtcgcagtggaaaatcttcaccgaaggtgaggcgcagattagccagatgtgctcatcacgagtgtgcaggacagaattggaggacctggttaaagtcctgtacctggagcgcagcgaaaagggccactgctag

SEQ ID NO: 182874 - DNA, 1137 bp, synthetic construct
  misc_feature 1..1137: note = Description of Artificial Sequence: Synthetic coding sequence
  source 1..1137: mol_type = other DNA
atgcggaagaagtggaagatgggcggcatgaagtacatcttcagcttactgtttttcttacttttggagggcggtaaaaccgagcaagtaaagcattccgagacttactgtatgttccaagataagaagtatagggtgggagaaagatggcacccatatctggagccatatggccttgtctattgcgtaaattgcatttgctcagagaatgggaatgtgctgtgctcaagagttcgctgccctaatgtgcactgcctttcacctgttcatataccccatctctgttgcccgcgctgccctggcgacggagaactcagctgggagcactcagacggggatatcttccgacagccggcaaacagagaggccaggcacagctatcacaggtcccattatgacccaccccctagcagacaagcgggcggtctcagtaggtttcctggggcccggtctcaccgtggggccctgatggattcccagcaagctagcggaacaattgtgcagatagtcattaacaacaagcacaaacacggccaggtctgtgtctccaatgggaagacatactcccacggggaatcctggcatcccaacctgagggcctttgggatcgtggagtgtgtgttgtgcacatgcaatgtgactaaacaggagtgcaagaagattcattgtcctaatcgctatccttgtaaatatccacagaagatcgatggcaaatgctgcaaggtttgcccaggcaagaaagccaaagaggaattaccaggccaatcattcgacaataagggatatttctgtggcgaggagacgatgccagtgtacgaatctgtgttcatggaagacggcgagactaccaggaagatcgcactggagacggagcgacctcctcaggtcgaagtccacgtctggaccatccggaagggcatcctgcagcacttccatatcgagaagattagcaaaagaatgttcgaagaactgccgcactttaagctggtcactaggaccactctttcccagtggaagatttttacagagggtgaggcacagatatcccagatgtgttcttctcgtgtatgtaggacagagcttgaggatctggttaaggtgctctacctggagcgctcagagaagggccattgctag

SEQ ID NO: 182875 - DNA, 1356 bp, synthetic construct
  misc_feature 1..1356: note = Description of Artificial Sequence: Synthetic coding sequence
  source 1..1356: mol_type = other DNA
atggtgcccgaggtgcgggtgctgagcagcctgctgggcctggccttactgtggtttcccctggactcacacgcacgcgcacgcccagacatgttctgtctcttccatggaaagagatactcaccaggagagtcttggcatccatacttggaacctcaaggcctcatgtattgtctgcggtgtacgtgtagcgaaggcgctcatgtgtcttgctataggttgcactgtcctcccgtacactgcccacagccagttacagagcctcagcagtgctgccccaagtgcgtggagccgcacacaccgtcggggttacgcgccccacctaaatcctgtcagcataatgggaccatgtaccagcacggagagattttctcagcgcatgagctgtttccctcacgcctgcctaaccagtgtgtgctctgctcctgtactgaagggcagatttattgtgggctgaccacctgtccagaacccggctgcccggcgcctcttcccctgcccgacagctgttgccaggcatgcaaagacgaggcaagcgaacagtccgatgaagaggactcggtacagtctctccatggcgtccggcatccacaggacccctgtagctcagacgctggccggaaacgtggaccaggcactccagctcctacagggctctctgcgccactttccttcatcccaagacactttcgaccaaagggagccggttccacgacagttaaaatcgtgctgaaagagaaacacaagaaagcctgtgtgcatgggggcaagacttatagtcacggagaagtatggcatccggcattccgggcattcggccccctcccttgtatcctgtgcacatgtgaggatgggaggcaggactgtcaaagggtgacatgtccaaccgaatacccttgccgccacccagaaaaggttgcaggcaaatgttgcaaaatttgtcccgaagacaaggccgaccccgggcattccgaaatcagctctacacgctgtcctaaagcgccagggagagttctggtccacacctcagtttctccaagcccggacaatctgcggcgcttcgctctcgaacatgaggccagcgaccttgtcgagatatatctctggaagctggtgaaagatgaagagactgaggcacagcgcggagaggttccagggccacgtccacactcacagaacctgcccttggatagcgatcaagagtctcaggaggctcgtctgcctgaacggggcaccgcactgcccaccgccagatggcccccaagacggagtttagagaggctgcctagccctgatccaggggctgaggggcacggccagtcacggcagagcgaccaagacattacaaagacatag

SEQ ID NO: 182876 - DNA, 846 bp, synthetic construct
  misc_feature 1..846: note = Description of Artificial Sequence: Synthetic coding sequence
  source 1..846: mol_type = other DNA
atgtaccagcacggcgagatcttcagcgcccacgagctgttccccagccgtctcccaaaccagtgtgttctatgctcctgtacagaaggccaaatctattgcggtttgacgacatgccctgagcctggatgtcctgcaccattgccattgccagatagctgttgtcaggcttgcaaggcgggatccagttggggccttctctgctccgtcagcgactttcacccctcctgccacctgcaaaggcacccgcaggacccatgtagctcagatgcagggcggaagaggggcccaggtacaccggcccctaccggattatcagcaccactttcgttcatcccacggcacttccggcccaaaggcgcaggttcgacaactgttaagatcgtgcttaaagagaagcacaagaaggcttgcgttcatggcggtaagacatactcacatggggaagtctggcatcccgcttttcgagccttcgggcctctaccgtgcatcctgtgcacttgtgaggacggcagacaggactgtcaacgggttacgtgtcccaccgagtacccctgcagacatcccgaaaaggtggcgggaaagtgctgcaagatctgtccagaggacaaggctgaccctggccactccgagatctctagtaccagatgccctaaggcgcctgggcgagtcctcgtgcatacgtcagtttcgcctagtccagacaatctgcgcagattcgctctggagcacgaagcctcagatctcgtggaaatctacctgtggaagctggttaagggggtgtttctcgcacagaccctagagttgaaagtaacggcctcacccgacaaggtgactaagacgtag

SEQ ID NO: 182877 - DNA, 1290 bp, synthetic construct
  misc_feature 1..1290: note = Description of Artificial Sequence: Synthetic coding sequence
  source 1..1290: mol_type = other DNA
atggtgcccgaggtgcgggtgctgagcagcctgctgggcctggccctgctgtggttccccctcgattctcacgcgagggctaggcctgacatgttttgcctgtttcacggcaaaaggtactcgccaggagaaagttggcacccttacttggaacctcaagggcttatgtattgtcttaggtgtacatgtagcgagggggctcacgtctcatgctacaggcttcactgtcctcccgtgcactgtccacagcccgtcaccgagccacagcagtgttgtccaaagtgcgtagagccccatactccctctggactcagggcacctcccaaaagctgccagcataacggtacaatgtaccagcatggagagattttcagtgctcacgagctgtttccttcccgactgcctaatcaatgtgtgctgtgctcttgtaccgaaggacagatttattgcggcctcacaacctgtccagaacctggctgtcccgcacccttaccactccctgacagctgttgtcaggcctgcaaagatgaggcctcagaacaatcagacgaagaggattcggtgcagtccctgcatggagtccgccacccgcaggacccttgctcaagtgacgccgggcgtaaaagaggacctggcacacccgcgcccaccggcctctcagctcccctgtccttcatcccccgacattttcgccctaagggcgcaggctcaaccaccgtgaagattgttttaaaggaaaagcataagaaagcttgcgttcacggcgggaaaacatatagccatggcgaggtgtggcatcccgcttttcgcgcattcggaccgctgccttgtatcctctgcacatgtgaggacggaagacaggactgtcagagagttacatgccccactgagtacccttgtagacatcctgaaaaagtagcggggaagtgctgcaagatctgtccggaagataaagccgaccctggacacagtgaaatatctagcactaggtgccccaaagcacctggacgcgtgctggtgcataccagcgttagcccaagccccgataacctccggcgtttcgccctggagcatgaggcttcggatttagttgagatctacctctggaagctggtgaaaggtatcttccacctgacccagatcaaaaaggtgagaaagcaggacttccaaaaggaggcccagcatttccggcttctggccgggcctcatgaaggccactggaacgtgttcttggcacagacactggagctcaaggtgacagcttcccctgataaagtaaccaaaacctag

SEQ ID NO: 182878 - DNA, 840 bp, synthetic construct
  misc_feature 1..840: note = Description of Artificial Sequence: Synthetic coding sequence
  source 1..840: mol_type = other DNA
atgtaccagcacggcgagatcttcagcgcccacgagctgttccccagccggttacctaatcagtgcgttttatgtagctgtacagagggccagatttactgtggtttgaccacctgcccagagcccggatgtcccgcgcctctgccccttcctgactcatgttgccaggcttgcaaggatgaggcttctgaacagtcggacgaagaggactctgtacagtcccttcacggagtgcggcatcctcaggatccctgctcttcagacgccggaaggaagcggggcccaggtacgccagccccaaccggtctgtccgcgcctctctccttcattcctagacactttcggcctaagggcgctggctccactacagttaaaatcgtattgaaggagaaacataagaaagcttgtgtccatggcggtaagacttacagtcacggagaggtatggcatcctgcgtttcgagctttcgggccacttccctgcattctttgcacttgtgaagatgggagacaagactgccagcgtgttacctgtccaaccgagtacccttgccgccacccagaaaaagtggccggcaaatgctgtaaaatatgccccgaggataaagcagatcctggacactcagagatctcttcgacgagatgtccaaaggcaccggggagggtcctcgtgcacaccagcgtgtctccatctccagacaatctccggagattcgctttggagcatgaggcctccgacctcgtggagatctacctctggaaacttgtgaaagacgtgtttctcgcccagacacttgaactcaaggtaactgcctcccctgataaagttacaaagacgtag

SEQ ID NO: 182879 - DNA, 498 bp, synthetic construct
  misc_feature 1..498: note = Description of Artificial Sequence: Synthetic coding sequence
  source 1..498: mol_type = other DNA
atggagatgttccagggcctgctgctgctgctgctgctgagcatgggtggtacctgggcgtccaaagaaccgctgcggccacggtgcaggcccatcaacgcaaccctcgctgtcgaaaaagaggggtgtccggtctgtatcaccgtgaatacaacaatctgtgccggctactgccctaccatgactagggttctccaaggcgtgctcccggccctccctcaggtagtgtgtaattatcgggacgttagattcgaaagtattaggctgcccggctgcccccggggcgtgaacccagtcgtctcttacgctgtagccctctcctgtcagtgcgcgttgtgccggcggagcactacagattgcggcggccctaaggatcacccgctgacatgcgacgacccccggtttcaagacagttctagctcaaaggctccccccccctctttgccctccccttccaggctgccaggaccaagcgatacaccaatccttccacagtag

SEQ ID NO: 182880 - DNA, 507 bp, synthetic construct
  misc_feature 1..507: note = Description of Artificial Sequence: Synthetic coding sequence
  source 1..507: mol_type = other DNA
gccccccggatggagatgttccagggcctgctgctgctgctgctgttaagcatgggagggacctgggcctctaaggagcctttgaggcctaggtgcaggccaataaacgccacgctggccgtagaaaaagagggatgcccggtttgcatcacagtgaacacgactatctgcgccggatactgccccactatgaccagggtcctgcaaggggttcttcctgctctcccacaagtcgtgtgtaattaccgtgatgttcggttcgagagcatccgattgcccggttgccctcgtggtgtgaaccccgtagtgtcttatgcagtggctctgagttgccagtgtgcgctgtgccgccgaagtaccacggactgcggcggtcctaaagatcaccccttgacttgtgatgatcccaggttccaggacagcagttcgtccaaagccccaccgccgagcctaccctccccgagtcgcttgcctggaccaagtgataccccaattctgcctcaatag

SEQ ID NO: 182881 - DNA, 654 bp, synthetic construct
  misc_feature 1..654: note = Description of Artificial Sequence: Synthetic coding sequence
  source 1..654: mol_type = other DNA
atggcccccggcagccggaccagcctgctgctggccttcgccctgctctgcctgccatggctgcaggaagctggcgccgttcagaccgtgccactgagtcgcctatttgatcatgcaatgctgcaggcacatagagcacatcaactagcgatcgacacctatcaggaatttgaagaaacctacatccccaaggatcagaagtattcctttttacacgactcacaaacgtctttctgtttctcagattcaatccctactcccagtaacatggaggaaacgcagcaaaagtctaatttggagttgctacgcatctcactcttgctgatcgagtcctggctggagccagtcagattcctccgatccatgtttgccaataacctcgtgtatgatacttctgatagcgatgactatcatctactgaaagacctggaggaaggtattcaaaccctgatgggccgcctcgaagacggcagtcgacgcactggtcaaatactgaaacagacttatagcaagttcgatactaatagccataatcatgacgccctgctgaaaaactatggactcctttactgttttagaaaggatatggacaaagtggaaacatttctccgaatggtccagtgccgctctgtggagggctcttgtgggttttag

SEQ ID NO: 182882 - DNA, 771 bp, synthetic construct
  misc_feature 1..771: note = Description of Artificial Sequence: Synthetic coding sequence
  source 1..771: mol_type = other DNA
atggcccccggcagccggaccagcctgctgctggccttcgccctgttgtgcctgccttggctgcaagaagccggcgcggttcagaccgtgccactgagtcgtctctttgatcatgctatgcttcaagcgcacagagcccatcagctcgccattgatacctatcaggaattcgaagagacgtacattcctaaagatcaaaaatactctttcttgcatgattcccagacctcgttttgtttcagcgactctatacccactccttccaatatggaggaaacccagcagaaatcaaacctggagctattaaggatctctcttttgctgatagagtcctggctcgaacccgtgagattcctgcgcagtatgtttgcaaataacctcgtgtacgatacgtcagacagcgatgactaccacctcctgaaggacctcgaagaaggcatacagacactgatgggggttcgagtggcccctggggtgaccaaccctggtacacccttggcgagtcgtgccggcggcgaaaagtattgctgtcctttatttagttcgaaagcactgacacaggagaatagcccctactcttcgttcagactggtaaatccccccggactgagtcttcacccagaaggggagggggggaagtggattaacgagcggggccgtgaacagtgccctagcgcctggccgcttctgctgtttctgcattttgctgaggctgggaggagacagccgcccgattgggcagacccacaggctgatctacagcaagtgtag

SEQ ID NO: 182883 - DNA, 369 bp, synthetic construct
  misc_feature 1..369: note = Description of Artificial Sequence: Synthetic coding sequence
  source 1..369: mol_type = other DNA
atggcccccggcagccggaccagcctgctgctggccttcgccctgctctgtctgccatggctgcaggaggccggcgcagtgcaaacagtgcctttgtccaggctctttgaccacgcaatgctgcaggcccaccgggcccatcagctggctatcgacacataccaggagtttcgtcttgaagacggctcccgccggacaggtcaaatcttaaaacagacttatagcaagttcgacacaaacagtcataatcacgatgccctgctcaaaaactacggcttgttgtattgcttccgaaaagatatggacaaagtcgagacattcctacgcatggtgcaatgccgttctgtcgagggcagttgcggtttttag

SEQ ID NO: 182884 - DNA, 552 bp, synthetic construct
  misc_feature 1..552: note = Description of Artificial Sequence: Synthetic coding sequence
  source 1..552: mol_type = other DNA
atggcccccggcagccggaccagcctgctgctggccttcgccctgctctgcctaccttggctgcaggaggccgagacctacattccaaaagaccagaaatactccttcctccacgatagtcagacatcattctgttttagtgactctattcccacaccgtctaatatggaagagacacaacagaaaagcaatctggagctcttacgcatctctctcctactgatcgagtcttggctggagcccgtgagattcttacgcagcatgttcgcaaataacctggtatacgatactagtgactcagacgattaccatctacttaaggatctggaggagggaatccaaactctgatgggtcgcctggaagatgggagccggcggaccggccagattctgaagcagacatactcaaaattcgacactaacagccacaaccatgatgccctcttgaaaaactacggcctgctttactgtttccggaaggacatggacaaagtagaaacatttttgcgaatggtccaatgccgatccgttgaaggaagttgcggattttag

SEQ ID NO: 182885 - DNA, 504 bp, synthetic construct
  misc_feature 1..504: note = Description of Artificial Sequence: Synthetic coding sequence
  source 1..504: mol_type = other DNA
atggccgccggcagccggaccagcctgctgctggccttcgccctgctctgcctgccctggctccaggaagccggagctgtccagaccgtaccactatctagactcttcgaccacgccatgctgcaggcccatcgagcccatcaactggctattgacacatatcaggaattcgaagagacatatattccaaaggatcagaagtactcattcctgcatgattctcagacgtcgttttgctttagcgattcaattcccacgccaagcaatatggaggaaacgcagcagaagtccaatcttgagctcctccgcatttctctactgttgatcgagtcctggctggaaccggtgaggtttctgagaagcatgttcgccaacaacctggtgtacgacaccagtgacagtgacgattaccacctgctaaaggacctggaggagggaatccagacactaatgggagttcgtgtggctccaggcgttgcgaacccaggcacccccctagcttag

SEQ ID NO: 182886 - DNA, 369 bp, synthetic construct
  misc_feature 1..369: note = Description of Artificial Sequence: Synthetic coding sequence
  source 1..369: mol_type = other DNA
atggccgccggcagccggaccagcctgctgctggccttcgccctgttgtgtctgccttggctccaagaagccggtgccgtgcaaaccgtgcctctctcacggctattcgatcacgcaatgctgcaagcacacagggctcaccagctggcgatcgatacgtatcaagaattcagacttgaggacggaagcaggcgaaccgggcaaatcttaaagcagacatatagcaagttcgacacaaactcccacaaccacgatgctctcctgaagaattacggacttctttactgttttagaaaggatatggacaaggtggaaacgtttttacgcatggtgcagtgcaggtcggttgaagggtcatgtggcttttag

SEQ ID NO: 182887 - DNA, 654 bp, synthetic construct
  misc_feature 1..654: note = Description of Artificial Sequence: Synthetic coding sequence
  source 1..654: mol_type = other DNA
atggccgccggcagccggaccagcctgctgctggccttcgccctgttatgtctgccatggctacaggaagccggcgctgtgcagactgtgcccctgtcccgactgtttgaccatgcaatgttacaggctcaccgcgcacaccaattggcaattgacacctaccaggaatttgaggagacctatataccgaaagatcagaaatacagctttctgcatgacagccagaccagcttctgctttagcgatagtataccaactccttccaacatggaggagactcagcaaaaatctaatctggagctgctacgtattagcctcttattgatcgagtcttggcttgagcctgtccgtttcctgaggtcaatgtttgccaataatctagtgtatgatacatccgatagtgacgactaccacttgctgaaagatcttgaagagggaatccaaactctgatgggaagactggaagatgggtcacggaggacaggccaaattttgaagcagacatatagtaagtttgacacaaacagtcacaaccacgatgctctccttaaaaactatggcctgctgtactgctttagaaaagacatggacaaggtcgaaacattcctgaggatggtgcagtgcaggtcagttgagggatcctgcggcttttag

SEQ ID NO: 182888 - DNA, 483 bp, synthetic construct
  misc_feature 1..483: note = Description of Artificial Sequence: Synthetic coding sequence
  source 1..483: mol_type = other DNA
atggccgccggcagccggaccagcctgctgctggccttcgccctgctctgcctgccctggctccaggaagccgatagcattcctacaccatctaatatggaggagacacagcagaaatccaatctcgaactgctgcggatttccctgctgctcatcgaatcatggctcgagcctgtgcgatttctgcggtccatgtttgccaataacctggtatacgacacctccgactcggacgattaccacttattaaaggacctggaggaaggaatacagacattaatgggcaggctggaggatggatcaagacggactgggcaaatccttaagcagacttactcaaagttcgacacaaacagtcacaaccatgatgcgctgttaaaaaactatggattactgtattgcttccgcaaggatatggacaaagtggagacattcttaagaatggttcagtgccgctccgttgaagggagttgcggattctag

SEQ ID NO: 182889 - DNA, 498 bp, synthetic construct
  misc_feature 1..498: note = Description of Artificial Sequence: Synthetic coding sequence
  source 1..498: mol_type = other DNA
tgaggcagccggaccagcctgctgctggccttcgccctgctgtgcctcccatggttgcaggaagccggagccgtgcagaccgttccgctctcccggctgttcgaccacgcaatgctacaagcccaccgtgcccatcagctagccatcgacacctaccaagagttcgaggagacgtacattcccaaggaccagaaatattcctttttgcacgactctcaaaccagcttttgcttttctgattctatccccactccgtcgaacatggaggagactcagcagaagtcaaacctggagctgttacgcataagcttactgctgatcgagagctggctggagcccgtaaggtttctccgatcaatgtttgctaataacctggtttacgataccagcgactcagacgactatcacctgctgaaggacctggaggaaggaatccaaacgctgatgggagttagggtggctccaggtgtggcgaatccagggacccctttagcgtag

SEQ ID NO: 182890 - DNA, 669 bp, synthetic construct
  misc_feature 1..669: note = Description of Artificial Sequence: Synthetic coding sequence
  source 1..669: mol_type = other DNA
atggccgccggcagccggaccagcctgctgctggccttcgccctgctgtgtcttccctggcttcaggaagctggggctgtgcagaccgtcccattaagtcgcctattcaaggaggccatgctgcaggcacacagagcacaccagctggcgatcgatacatatcaggagtttatctcttcatggggcatggaggcctacatcactaaagaacaaaaatactcttttttacatgacagccagacctctttctgtttcagcgatagtataccgacaagcagcaatatggaggagacccagcagaaaagcaacctcgaattgttacatatcagtctgttattgatcgagtctcggctggagccagtgcgttttctgagaagcacatttactaataatcttgtctatgacacctctgactccgacgattaccacctgctgaaagacctagaagagggaatccaaatgctaatgggccgcctggaggacggatcacaccttactgggcagacactgaaacagacatacagcaaattcgacacaaatagccataatcacgatgccctcctcaaaaactatggattgttacactgcttcaggaaagacatggataaggtggaaacattcttgcgtatggtgcagtgcaggagcgtcgaaggcagttgtggcttctag

SEQ ID NO: 182891 - DNA, 387 bp, synthetic construct
  misc_feature 1..387: note = Description of Artificial Sequence: Synthetic coding sequence
  source 1..387: mol_type = other DNA
atggaggagacccagcagaagagcaacctggagctgctgcacatctcccttctgctgatcgagagcagactggagccggtcaggttcctgagaagtacgttcacaaacaatctcgtgtatgatacctctgactctgacgactaccatctcctcaaagacctggaggagggtatacagatgctgatgggaagacttgaggatggatcccacctgaccggccagacattaaagcagacttactcaaagtttgatacaaattcacacaatcatgacgcgctccttaagaattatggcttgcttcactgcttccggaaggatatggacaaggtggagacttttcttcggatggttcagtgcaggtcggtggaagggagctgcgggttctag

SEQ ID NO: 182892 - DNA, 522 bp, synthetic construct
  misc_feature 1..522: note = Description of Artificial Sequence: Synthetic coding sequence
  source 1..522: mol_type = other DNA
atggccaccggcagccggaccagcctgctgctggccttcgccctgttatgtctaccttggctccaggaggctggggccgtacaaacagttccactctcccgtctgtttaaggaggccatgctgcaagctcatcgcgcccaccaactcgccatcgatacgtatcaggagtttatctcatcatggggcatgggcgccggacaaggatggcaggagggtgtgaccttcccccactggggatctaacggacgccgcctacgcagctctggcttattcagcgaagcaaagatgcaggccgatgaacaccggctgagccaggtgccgagacgggtgaccgttggagcaggtctccagcaccgcaaacagtggtccttcctcgtcggcggtccaagtccaagaaaaaagccaattagtcaacgcaatcgctccattcacagctgtatgacaccacggccgcctagtgccagccagacgttgttcagacatccccctacgtggaggaaacggtcccggaatccaacttag

SEQ ID NO: 182893 - DNA, 420 bp, synthetic construct
  misc_feature 1..420: note = Description of Artificial Sequence: Synthetic coding sequence
  source 1..420: mol_type = other DNA
atggccgccgacagcatccccaccagcagcaacatggaggagacccagcagaaatcaaaccttgagttactgcacatctctttacttttaattgagtccaggctggaaccagtccgcttcctgcgcagcaccttcactaacaacctggtgtacgatactagcgatagcgacgactaccatctgctcaaggacctggaagaggggattcaaatgctcatgggcaggttagaagatgggagccatttaactggtcaaaccctgaagcagacctatagcaaatttgatactaacagtcataatcatgatgcgctcctgaaaaattacgggctgctccactgcttccggaaagacatggataaggtcgaaacctttctcagaatggtgcagtgcagatccgtggaaggaagttgcggattctag

SEQ ID NO: 182894 - DNA, 1962 bp, synthetic construct
  misc_feature 1..1962: note = Description of Artificial Sequence: Synthetic coding sequence
  source 1..1962: mol_type = other DNA
atggccgacaccctgcccagcgagttcgacgtgatcgtgatcggcacagggctccctgaaagcattatagccgcagcctgttccagatcagggaggagagtgttgcacgtagatagccgctcctattatggaggcaactgggcctccttctctttttcggggctcttgtcctggttgaaggaataccaggagaattccgatattgtgtctgactcccccgtgtggcaggaccagatcttggagaatgaggaagctattgccctcagcaggaaggataaaaccattcaacatgtggaagtattctgctacgcgtctcaagacctacatgaggacgtggaggaggccggagcactgcagaagaaccatgctctcgtcactagtgccaattccacagaggccgccgactcagcgttcttgccaaccgaggacgagagtctgagcacaatgagctgcgagatgctgaccgaacaaacaccatcttccgatccggaaaatgcgctggaagtcaatggcgcagaggtcaccggcgaaaaagagaaccactgtgatgacaagacttgtgtgccctcaacatccgctgaggatatgtccgaaaatgtgcccatagcggaggatacaaccgaacagcccaagaaaaatagaattacttactcccagattatcaaggagggccgcagattcaacatcgacctcgtctcaaaactgttatattctcgcgggctcctgattgatctccttataaaatccaatgtcagccgctatgcggaattcaagaacatcacgaggattctcgcctttcgagagggcagggtagaacaggtcccatgtagtcgggccgatgtcttcaatagtaaacagctaactatggttgaaaaaaggatgctcatgaaatttctgacattctgcatggaatatgaaaagtaccctgacgagtataagggatatgaagagatcacattctacgaatacctaaagacccagaaattgactccgaatcttcagtatatcgtaatgcacagtatcgctatgactagtgaaaccgcaagttccaccattgacggcctcaaagctacgaaaaatttcttacattgcctggggcgttacgggaacacaccttttttattccctctttacgggcagggcgaactgcctcagtgcttttgtaggatgtgcgccgtgttcggcgggatttactgccttcgtcactctgtgcagtgtctagtcgtcgacaaagaaagtcggaagtgtaaagcaataattgaccaattcgggcagcgcataatcagcgagcactttctcgtagaggattcttactttccagaaaatatgtgttctcgggtgcagtatcgccaaatttcacgcgccgtcctcatcaccgatcggtccgtccttaaaaccgactcagaccagcagatttccatcctaacggtgcccgctgaagaacccggcacctttgctgtgcgcgtgattgagctctgctctagcacaatgacctgcatgaagggcacctacttggtccacttaacatgcactagtagcaaaaccgctcgagaagacctggagtcagtggttcaaaaactctttgtgccttacaccgaaatggaaatcgaaaacgagcaggtcgagaagcctagaatcctttgggcgctctacttcaatatgcgtgattcatctgacatctctcggtcgtgctacaatgacctccccagtaacgtttacgtctgtagtggaccagattgtgggcttggtaacgataatgccgtgaaacaggccgaaactttgtttcaggaaatctgtcctaacgaagacttctgtccaccaccaccaaacccagaagacatcatcctggatggagacagtctgcagcccgaagccagcgagtcctcagctattccagaggccaacagcgaaacgtttaaagaatccacgaacttgggtaacttagaggagagctctgaatag

SEQ ID NO: 182895 - DNA, 333 bp, synthetic construct
  misc_feature 1..333: note = Description of Artificial Sequence: Synthetic coding sequence
  source 1..333: mol_type = other DNA
atggccgacaccctgcccagcgagttcgacgtgatcgtgatcggcacaggtctcccagaaagcattatcgccgcagcctgcagtagatctggacgtcgtgtgctgcatgtcgatagccggtcgtactacggcgggaactgggcatcttttagtttcagtgggctgctttcttggctgaaagagtaccaggaaaatagcgatatcgtctcagattcacccgtatggcaggatcagatcctggagaacgaggaagccatcgcacttagccgcaaggataagacaattcagcatgtcgaggtgttctgctacgcccgctccacactgctcctgtag

SEQ ID NO: 182896 - DNA, 1518 bp, synthetic construct
  misc_feature 1..1518: note = Description of Artificial Sequence: Synthetic coding sequence
  source 1..1518: mol_type = other DNA
atgagctgcgagatgctgaccgagcagacccccagcagcgaccccgaaaatgctctggaggttaacggagccgaagtcaccggagagaaagaaaatcactgtgacgacaagacttgcgtgccgtctaccagtgccgaagacatgagcgagaacgtgccgatcgctgaggatacgactgagcagcccaagaagaatcggatcacttatagccagatcataaaagagggaagaaggttcaatattgatctggtctccaaactcttgtactcgcgggggttactaatagacctgctcatcaagagcaatgtgtctcggtacgccgagtttaagaatattaccagaattctagcttttagagagggccgagtggaacaggttccctgcagtcgcgccgacgttttcaattcaaagcagctgaccatggttgagaaacgcatgcttatgaagttcctgactttctgtatggagtacgagaaataccccgacgaatacaagggatacgaggagatcactttctatgagtacctcaaaactcagaaattaactcccaacctacaatacatcgtgatgcattcaatcgcaatgacatctgagactgccagctcaacaattgatggccttaaagccactaagaatttcctgcactgcctgggtagatacgggaacactccgttcctgttccctttatatggacagggcgaactacctcaatgtttctgtaggatgtgtgctgtgttcgggggaatttactgcttgaggcattccgttcagtgcctcgtggtggataaagagtcaagaaagtgcaaagctattatcgatcagtttgggcagcgcattatctccgagcacttcttggtggaagactcctattttccagaaaacatgtgcagccgcgtccagtacaggcaaattagccgagccgttctgatcactgatcggtctgttttaaaaacagactccgaccagcaaatttccatactcactgtgccggccgaggaaccaggaacatttgctgtcagggtcatcgagctttgcagctctacaatgacatgtatgaaggggacctatctggtccacttgacttgcaccagtagtaagacagcccgagaagacctggagtcagtcgtgcagaagctcttcgtcccatatacagagatggaaatcgagaatgaacaagtggaaaagcctcgtattctttgggctttgtatttcaatatgagggacagcagtgacatctctagatcatgctataacgacctgccatccaacgtgtacgtgtgcagcggaccagactgcgggctgggcaacgacaacgccgttaaacaggccgaaacactctttcaggagatttgccctaatgaggacttctgcccaccaccacccaaccctgaagatatcattcttgacggggactcactgcagccggaggctagtgagtctagcgcaattccagaggccaatagtgaaacgttcaaggaaagcacaaatcttggcaatttagaggagagttctgaatag

SEQ ID NO: 182897 - DNA, 1971 bp, synthetic construct
  misc_feature 1..1971: note = Description of Artificial Sequence: Synthetic coding sequence
  source 1..1971: mol_type = other DNA
atggccgacaacctgcccaccgagttcgacgtggtgatcatcggcactggcctccctgagagcatacttgctgccgcttgtagtcgttcagggcagagagtgctgcacattgacagtcgaagctattatggcgggaactgggccagtttctcatttagcgggttgctatcatggttaaaagagtatcagcagaataatgatattggcgaggagtctacagtcgtgtggcaggacctgatacatgaaacagaggaggctataactttgcgaaaaaaggatgaaaccatccagcacactgaggcgttctgctatgcatcccaggacatggaggacaacgtggaggaaatcggggcgttgcagaagaaccctagtctgggcgtgtctaacacctttaccgaagtgctggacagcgctctgcccgaggagtcccaactgagttatttcaattccgatgaaatgcccgcgaagcacacgcagaagtcagacaccgagatctccctcgaggtgactgacgtcgaggagagtgttgaaaaggagaaatattgcggcgacaagacatgtatgcacaccgtttctgacaaggatggggacaaggatgaatctaaaagtacagttgaagacaaagccgacgaaccgattagaaaccgaatcacttactctcagatagtgaaggaaggtcgccggttcaatattgacctggtcagtaaattgctttactcccaaggacttctcatcgatttgctgattaagtctgatgtgtccaggtacgtggagtttaagaacgttacccgaatcctggccttccgagaagggaaggttgagcaggtgccctgctcacgagctgatgtcttcaactccaaggaactcacaatggtggagaagcgtatgctcatgaagttcctgaccttctgtttggaatacgagcaacaccctgatgagtaccaagcttttcggcagtgttccttttctgagtatctgaagacgaagaaactaacaccaaaccttcaacacttcgtgttgcactcaatcgccatgacgtccgagtcatcctgcaccacgatcgacgggctgaacgcaacaaaaaacttcctccagtgtctgggccggtttggaaatacccctttcctctttcctctctatggacagggagaaatccctcagggtttctgcagaatgtgcgcagtctttggcggcatatattgtctgcgccacaaggtacagtgtttcgtggtagacaaagagagtggtcgttgcaaggccattattgaccactttggccagcggattaacgctaagtatttcattgtggaggacagctacctgtctgaagaaacatgttccaacgttcagtataaacaaatttcccgagcggtcctgatcacggatcagtcaatcctcaaaaccgatttagaccagcaaacttcaatattgatcgtgcctcctgctgagccaggagcatgcgcagtgcgagtgaccgagctttgttcttccactatgacctgtatgaaagatacatatctggtgcacctcacctgctcttcatctaagaccgctagagaggacctagagtctgtggtgaaaaagctgtttacaccttacaccgaaaccgagatcaacgaagaggagctgacaaagccccgcctgctgtgggcactgtattttaatatgagagattctagcggtatctctcgcagcagctacaacggtcttccctcgaacgtgtacgtctgctcagggcccgattgcggcctgggcaatgaacacgcagtaaagcaggccgaaacactctttcaagaaatatttccaacagaagagttctgcccccctccaccaaaccccgaggacatcatttttgacggagatgacaaacagcccgaggctcccggcacgaataatgtggtgatggctaaactcgagtccagcgaggaaagcaagaacctggagagccccgagaaacatttacagaattag

SEQ ID NO: 182898 - DNA, 1641 bp, synthetic construct
  misc_feature 1..1641: note = Description of Artificial Sequence: Synthetic coding sequence
  source 1..1641: mol_type = other DNA
atggagcagcggcgggtgaccgacttcttcgcccggcggcggcccgggccccccaggatcgcgccccccaaactcgcatgccggacaccatccccggcccgcccggcgcttagggctcctgcctcagcgacaagtggcagccggaagcgcgcccggcctccagctgctcctgggcgggaccaagcccgcccgcctgccagacgccggctgaggctgtccgtagacgaggtgagctctccctctactcccgaggcccccgacatccctgcatgtcccagtcctgggcagaaaattaaaaaaagtaccccggcggcaggtcagcccccacacttaacatcagcccaagatcaagacacgatctccgagctggcctcctgcctgcagcgcgctcgggaactgggagctcgcgtcagagccctgaaagcatccgcacaggacgcaggcgagtcatgtacccccgaggctgagggacggccggaggagccctgcggcgagaaggctccagcataccagcggttccacgctctcgcccagccaggccttcccggcctggtgctgccatataagtaccaagtgctcgccgagatgtttagaagcatggatacaattgtagggatgttacacaatcgcagtgagacacccacattcgccaaggtccagagaggtgtccaggacatgatgcgccgcagattcgaagaatgtaacgtcgggcagattaaaacggtgtatcccgcttcctatcgttttcgccaggaacgatccgttcccactttcaaggacggcacccgtagatctgactatcagcttacgattgaacctcttctggaacaggaggcagatggggctgcgccacaactgactgcaagtcgcctgcttcaacgccgacagatcttctcgcagaagttagtcgagcatgtcaaagagcatcacaaagctttcttagcgtccctgtcaccagccatggtggtgcctgaagatcagctgaccagatggcatcccagattcaacgtcgatgaggtccccgacattgaacccgccgctctcccgcagcccccggccacagagaaattgaccacggctcaggaggttctcgcgcgagcgcgtaatctcatcagtcccaggatggagaaagcactgagtcagctcgcactgcggagcgctgccccaagctccccaggaagtccccggcctgccctgcctgctacaccaccagctaccccccccgcagcttccccaagtgctctaaagggggtttctcaggacctgcttgagagaattcgggccaaggaggcccagaagcagctggcccaaatgacacgctgtccagagcaggaacagcggttgcaaagactggaaaggcttccagaactagccagagtactgaggtccgtcttcgtgtccgagcgcaaaccagcattgtccatggaagtagcatgtgccagaatggtaggatcctgttgtaccatcatgtctcccggcgagatggagaagcatctgctgctcctgagcgaattgctccctgactggctgtctctgcaccgcatccgtactgacacttatgtcaagttggataaggccgccgatctcgcccacattactgcgcggcttgctcaccaaacccgagcagaggagggtctgtag

SEQ ID NO: 182899 - DNA, 306 bp, synthetic construct
  misc_feature 1..306: note = Description of Artificial Sequence: Synthetic coding sequence
  source 1..306: mol_type = other DNA
atgcagcagcagcagcagctggccagcgcccggaaccggcggctggcgcagcaaatggaaaaccgccccagtgtccaagccgccctaaaactgaaacagaaatcattgaagcagcgtctgggaaagtccaacatccaggccagactgggtcgtcctatcggtgcacttgcgcgaggcgccatagggggcagggggctgccaataatccaacgagggcttccacgcggagggctcagaggcggaagggcgacgcgcacactgctgagaggaggcatgtctctcaggggacagtgttgcgtgccatag

SEQ ID NO: 182900 - DNA, 672 bp, synthetic construct
  misc_feature 1..672: note = Description of Artificial Sequence: Synthetic coding sequence
  source 1..672: mol_type = other DNA
atgctgaagaacaagcagcccacccccgtgaacatccgggccagcatgcaacagcagcaacaactggccagtgctcgcaaccgccgcctagcccagcagatggagaaccgtcccagcgtgcaggcagctctcaaactgaaacaatccctgaagcagcgacttggcaaaagtaatatccaggctcgactcggacgccctataggagccttggcacgcggcgctatcggaggccgggggttgccaatcattcagcggggactccctcgcggcggtttaagagggggccgcgccacaagaaccttattacggggcgggatgagcctgcgggggcagaatctcttaagaggagggagagccgtagctccccgaatgggacttcgtagggggggtgtgcgcgggcgtggaggccccggaagaggtgggttgggccgcggtgccatgggaaggggaggcatcggggggcgcggcagagggatgatcggacggggcaggggcgggtttggcggccgtggccgagggagaggaagaggtaggggcgccctcgcacgcccagtcctcacaaaagagcagttagataaccaattggacgcatacatgtcaaaaacaaagggacaccttgacgcagagttagacgcttatatggcccagacagacccagagaccaacgactag

SEQ ID NO: 182901 - DNA, 609 bp, synthetic construct
  misc_feature 1..609: note = Description of Artificial Sequence: Synthetic coding sequence
  source 1..609: mol_type = other DNA
atggccgcccagagcgcccccaaggtggtgctgaagagcaccaccaaaatgagtctcaacgagagattcactaacatgctgaagaataaacagcctacacctgtcaacatacgggcctcaatgcaacaacaacaacagctggccagcgcccggaacaggaggctagcacagcagatggaaaatcggcccagtgtgcaggctgccctgaagctaaaacagtctctgaagcagcggttggggaagtcaaacatccaggccagactggggcgccctataggcgcattggccagaggggcgatcggaggacggggcttaccaatcatacaacgaggtctacctcggggtggtctgcggggaggccgggctacccgaactttgcttcgcggagggatgagtctgagaggccgcggcatgatcgggagggggcgcggtggctttggggggaggggcagggggagggggcgaggccggggcgcgctcgcaaggcccgttttgactaaagagcagctcgataatcagctggacgcatacatgtccaaaacgaagggccacctggatgctgagctagacgcttacatggctcagacagaccccgaaacgaacgactag

SEQ ID NO: 182902 - DNA, 747 bp, synthetic construct
  misc_feature 1..747: note = Description of Artificial Sequence: Synthetic coding sequence
  source 1..747: mol_type = other DNA
atggccgcccagagcgcccccaaggtggtgctgaagagcaccaccaaaatgtctctgaacgaaagattcaccaatatgctgaaaaacaagcagcctacaccagtgaacatccgcgcctctatgcagcagcagcagcagctagccagtgccaggaacaggcgactggcgcagcagatggaaaatcggccaagcgtgcaggccgccctcaagttaaagcaatccctaaagcagcggcttggtaagtccaatatccaagctagactggggagaccgatcggagcactggcccgaggtgccattgggggaaggggcctgcccataatccagcgtggtctgccacgcggaggattgcggggaggccgggctactagaacgctccttagaggagggatgtcgttgagaggacaaaacttactaaggggcggtcgtgcagtggccccacgaatgggtttacgtcgaggcggagtccgagggcggggcggaccaggtaggggaggtctcggacgaggggccatgggacgggggggaattggagggaggggcaggggaatgatagggcggggccggggaggctttggcgggcggggacgaggacgtgggagaggccggggggccctcgcacggcccgtgttaacgaaagagcagctggacaaccagcttgacgcctacatgtccaagaccaaaggacatctggatgccgaactggatgcttatatggcacagacagatcctgagacgaatgattag

SEQ ID NO: 182903 - DNA, 609 bp, synthetic construct
  misc_feature 1..609: note = Description of Artificial Sequence: Synthetic coding sequence
  source 1..609: mol_type = other DNA
atggccgcccagagcgcccccaaggtggtgctgaagagcaccaccaaaatgtctttaaatgagcgcttcactaatatgttaaaaaataaacagcccacgccagtgaacattagagccagcatgcagcagcagcaacagctcgcgtcagcccgcaacagaaggctcgcccagcagatggaaaacagaccaagtgtgcaggcggcactcaaacttaaacagtccctcaaacagagacttgggaagtccaatattcaggccagactcggtaggccaatcggggccctagccaggggggccatcggcggtcgtggccttcccatcattcagcggggactgccgaggggtggactgagagggggtcgcgccactaggaccctcctgagaggcggaatgtctctgaggggccgcggaatgattggtaggggaaggggggggtttggcgggagagggaggggtcgaggccgaggtcggggcgcacttgctagaccagttcttactaaggagcagctggataatcagctcgatgcctacatgtcaaaaaccaagggccatctggatgccgagttagatgcctatatggcccagactgatccagaaacaaacgattag

SEQ ID NO: 182904 - DNA, 636 bp, synthetic construct
  misc_feature 1..636: note = Description of Artificial Sequence: Synthetic coding sequence
  source 1..636: mol_type = other DNA
atggaggagctgagcagcgtgggcgagcaggtgttcgccgccgagtgtattttatcaaagcgcctacgcaaaggaaaactggagtatttagtgaagtggcggggctggtccagtaaacataattcatgggaaccagaagagaatatcctcgatccccggctgctgttggcttttcagaaaaaggagcatgagaaggaagtgcagaacaggaaacggggtaagcgaccaagaggccgacccagaaagctgactgccatgtcgagctgtagccgccggtcaaagctcaaagtcggcgggtgcgccgggtacgccgatcccacctcccagcatcccttgggcgtggggggccgtcagcgcgaggggctcgggccctcaggccgcggatggcatttctgtcagcaaagcgttccacttctgggaaagcaagagccgcctttctttttgagcctgtcattttgctgccaaggtccccagcccgccgagagctcctctcctcccctacccggagcgtcttgtttcagcttaagctgtaccccgctgtgttgggttgcaggctccaattgttgccgacaggccctgtttcctccccgcgggtccctgggtgacggtaaggaacaggaagcgtgtgtacagtag

SEQ ID NO: 182905 - DNA, 1599 bp, synthetic construct
  misc_feature 1..1599: note = Description of Artificial Sequence: Synthetic coding sequence
  source 1..1599: mol_type = other DNA
atggaggagctgagcagcgtgggcgagcaggtgttcgccgccgagtgcattctgtccaaacgactgaggaaaggtaagctcgagtatctggtaaagtggaggggctggtcgtccaaacataattcttgggaaccagaagaaaacatactggatcctaggttgctgcttgcatttcagaagaaggagcatgaaaaagaggtgcaaaaccggaagaggggaaagcgacctcgcggccggccgagaaagctgaccgccatgtcctcctgcagccgccggtccaaactcaaagagcctgacgcgccttcaaagtctaagtcaagctcctctagtagttcctctacttcatcgtcatcttctagtgacgaagaagatgattccgacttggacgccaagcgaggtcctagaggccgggaaacccatccagtgcctcaaaagaaagcccagatcctggttgcaaagccagaactgaaggaccccattagaaagaagcgcggtcggaagccccttcccccagagcagaaggcaactcgccggccagtcagccttgctaaggtgctgaagacagctaggaaagatctgggagcaccagccagcaagctaccccctcccctgagcgcgcctgtcgccggtctcgccgctctgaaagcacatgccaaagaggcctgcgggggaccctcagctatggccacacccgagaacctggctagcctcatgaagggcatggccagttcacctggtaggggagggatatcctggcaatcaagcattgtccactacatgaaccggatgacccagtcacaggcacaggcagcatcgcgcctggctctcaaagctcaggcaacaaataaatgcggtcttgggctcgacttgaaagtcaggacacaaaaaggcgagttaggtatgagtcctcctggtagtaaaatccctaaggctccctctggcggagccgtcgagcagaaggtaggaaataccgggggaccgccgcatacccatggggcgagccgagtgcccgcagggtgtcccggtccacagcctgcgccaacacaggagctgagtctgcaggttcttgatcttcagtctgttaaaaacggaatgccaggggttgggttgctcgctcgacatgcaaccgccaccaagggcgtccctgcaacaaatcctgcaccaggaaagggaaccggctcaggtctgattggagcatcaggggcaactatgcctacagatacgtcaaagtctgagaaactggcatccagggcagtggctccgcccacccctgcgagtaagcgcgactgcgtgaagggcagtgcaacgccctccgggcaggagagtcgtactgcccctggcgaggctcggaaggccgcaacactgccggagatgtccgccggggaggaatcgagttcatccgacagcgaccccgacagcgcatcaccaccttccaccgggcaaaacccgtccgtttcagttcaaactagtcaggactggaagcctactcgaagtttaatcgaacatgtctttgtaaccgacgttacagctaatctaataacagtgactgtcaaggaatcacctacttctgtgggcttttttaatcttcgacactactag

SEQ ID NO: 182906 - DNA, 1935 bp, synthetic construct
  misc_feature 1..1935: note = Description of Artificial Sequence: Synthetic coding sequence
  source 1..1935: mol_type = other DNA
atggaggccgagcggggccccgagcggcggcccgccgagcggagctccccgggtcagaccccagaagagggcgcccaggccctggcagaatttgcagcccttcacgggccggcacttcgtgcctctggagtacccgagagatattggggtcgcctgctccacaagcttgaacacgaagtgttcgatgctggagaggtgttcggtataatgcaagtggaggaggtggaagaggaggaagatgaagcggcaagagaggtgaggaaacaacagccaaatcccggcaacgagctctgttataaggtgatcgttacgcgggaatcaggcctgcaggctgcacaccccaattcaatttttttgatagatcacgcttggacatgccgagtcgagcacgctcgccagcaactccagcaggtgcccggcctgcttcaccgaatggctaacttgatgggcatcgaattccacggagagctcccctccactgaggctgtcgctttagtgcttgaggaaatgtggaaattcaaccaaacctaccagctggcccatggcacggctgaggaaaagatgcccgtctggtatatcatggacgagttcggcagtcggatccagcacgccgacgtaccatcattcgccaccgcaccttttttttatatgcctcagcaggtggcctacactctgctgtggccactgagggatctcgacaccggagaggaagtaacccgagacttcgcgtacggagaaactgatcctctcattcgcaaatgcatgttattgccatgggcaccgacagatatgttggatctctcctcttgcactccggagccaccggctgagcattaccaagccatcctagaggagaataaggaaaaattgcccctggacatcaatccagtggttcaccctcacggtcacatcttcaaggtatataccgatgtgcagcaggtggcctcatcgttgacacacccacgcttcactctgacacagtccgaggccgatgctgacatcctcttcaacttctctcattttaaggattacagaaaactctcacaggagagacccggcgtcttacttaatcagtttccatgtgaaaacctccttactgtaaaggactgcctggctagcattgctcgcagagctggcggcccggaaggtcccccttggcttccccgaacctttaatcttcggacagagctcccacagttcgtgagctacttccagcagagggagaggtggggggaggacaaccattggatctgcaagccttggaacctagcccggtcccttgatacccacgtcactaaatccttacattccatcatcaggcacagagagagtacacctaaagtggtctccaagtatattgagagtcccgtgcttttcctgagggaagacgtcggcaaagtgaagttcgatattaggtatattgttctcctccggtctgtacggccactgcgtctgttcgtttatgacgtgttttggttgcgtttttcaaaccgagccttcgctctgaacgacctggatgattacgagaagcattttacagtcatgaattatgatcccgacgtggttttgaagcaggttcactgtgaggagtttatccctgagtttgaaaaacagtatccagagttcccttggacagatgtacaggctgagatctttagagcgtttacggaactgtttcaagtggcttgcgccaagccaccccccctaggactgtgtgattacccctcatcaagggctatgtacgccgtggacctgatgctcaagtgggacaacgggcctgatggcagaagagtgatgcaaccacagattctggaggtcaactttaaccctgactgcgaaagggcctgcagatatcacccaacatttttcaacgacgtgttttctactctgttcttggatcagcctggcgggtgccacgtgacttgcttggtgtag

SEQ ID NO: 182907 - DNA, 477 bp, synthetic construct
  misc_feature 1..477: note = Description of Artificial Sequence: Synthetic coding sequence
  source 1..477: mol_type = other DNA
atggagctgagcgccatcggcgagcaggtgttcgccgtggagagcataaggaaaaagagagtgcggaagggcaaggtggagtacctggtcaagtggaaggggtggcccccaaaatattctacttgggagccagaagagcacatactggacccccgcctggtaatggcctacgaggagaaggaagagcgcgacagggcttcaggctaccggaaacggggccccaaaccgaaacgcctcctgctccaggagccgcccgcacctgatgtcctgcaggcagccggcgagtgggagccagccgcacagcctccagaggaggaagctgacgccgacttggccgaagggccacccccatggactcccgccctgccctcaagcgaagtcaccgtgaccgatatcaccgccaactctataaccgtgacctttagggaagcacaggccgcagaagggttctttcgggataggagcggtaagttttag

SEQ ID NO: 182908 - DNA, 366 bp, synthetic construct
  misc_feature 1..366: note = Description of Artificial Sequence: Synthetic coding sequence
  source 1..366: mol_type = other DNA
atggagctgagcgccatcggcgagcaggtgttcgccgtggagagcatccggaagaagagggtcagaaaaggaaaggtggagtacctagttaagtggaagggctggccccctaaggaagagcgagatcgcgcatcgggctaccggaaacgcggtcccaaaccgaaacgactgcttttgcagaggctgtactcaatggatctgcggagctcccacaaagctaagggcaaggagaagctctgtttttccctgacatgcccactgggctccggatcaccagagggcgtcgtcaaggccggggcaccagagcttgtggataaaggcccactcgtgcctacacttcctttcccactgaggaagccgcggtag

SEQ ID NO: 182909 - DNA, 5133 bp, synthetic construct
  misc_feature 1..5133: note = Description of Artificial Sequence: Synthetic coding sequence
  source 1..5133: mol_type = other DNA
atgaacggccacagcgacgaggagagcgtgcggaacagcagcggcgagagtagtcagagcgatgacgactcaggtagcgcttcaggatctggctctggcagttcgagtggcagcagtagcgacggtagcagctcgcaatcgggttcttctgactctgatagtgggtcagagtccggctcccagtctgaaagtgaatctgatacttcccgcgaaaataaagtgcaggcaaagccaccgaaggtagatggcgcggaattttggaagtctagcccttccattctcgcggtgcagagatctgcgatcctaaagaagcagcagcagcagcagcaacagcaacagcaccaagcctcatcaaacagcgggagtgaagaggactccagctccagcgaagattctgacgactcctcctcagaagtcaagagaaagaaacataaggatgaagactggcagatgtccggcagcgggtccccctcgcagagtggctccgattcggagtcggaagaggagcgcgaaaaatcttcttgtgatgaaacggagagcgattacgagcccaaaaacaaggtcaagagccgaaagccacagaacagaagtaagtccaagaatggcaagaagattctcggccagaagaagagacaaatagattcgtcagaggaggatgacgatgaagaggactacgacaacgataagcgaagcagtaggagacaggccacagtcaacgtttcatacaaggaggacgaagaaatgaagaccgatagtgatgatttgctcgaagtgtgtggcgaggacgtccctcaacctgaggaggaagagttcgaaacaatcgaaagatttatggattgcaggataggacgtaaaggtgcgactggggctacaacaactatttatgcggtcgaggccgatggcgacccaaatgccggatttgagaaaaacaaagagcccggagaaatacaatacctgatcaaatggaaagggtggtctcatatccataatacttgggagaccgaggagacactcaagcaacaaaacgtgcgtggaatgaaaaaactcgacaactacaagaaaaaggaccaggaaacaaagcggtggctgaagaatgcttctcccgaggatgtggagtactataactgtcaacaggagctcactgacgatctgcataagcagtaccagattgtcgagagaataatcgcccactccaatcaaaaaagtgccgctggttaccccgactattattgtaaatggcagggattgccctattccgaatgcagttgggaagatggggcgcttatctctaagaagttccaggcatgcattgacgaatatttctcgcgcaaccaatctaaaacaacacccttcaaggattgtaaggtcctgaagcaacggccgagatttgtcgccctgaaaaaacagcctagctacattgggggccatgaaggactggaactcagagattatcagctgaacggcctgaactggcttgcccacagttggtgcaaaggaaactcatgcattctagccgatgaaatggggctcggtaagacaattcagaccatctcttttcttaactacctcttccatgaacaccagctctatggccccttccttctggttgttcccctatctaccctcaccagttggcagagggaaatccaaacctgggccagccagatgaatgccgtggtttatctgggcgacattaactctcgcaatatgatcaggactcacgagtggacccatcatcagacaaagcgattgaagtttaatatcttactgactacatacgagatcctgctgaaggacaaagcgttcttaggaggcttgaactgggccttcatcggagtcgacgaagctcacaggcttaagaatgacgattcgctgctatataagactttgatcgactttaaatcaaaccatcggctgctcattactggtaccccgctgcagaacagtcttaaggagctctggtcgctgctccactttataatgcccgaaaagttttcctcttgggaggattttgaagaagaacacggcaaagggcgagaatacggatacgcctcactgcacaaggagcttgaacccttccttttacgcagagtgaaaaaagacgtggagaaaagccttcctgcaaaggtggagcagattctgcgcatggagatgtcggcactgcaaaagcagtactacaagtggattctaacccggaactacaaagccctatctaaaggcagcaaaggatcaacttcagggttcttgaacattatgatggagctaaaaaagtgctgtaatcattgttatctcatcaaacctccagataataatgaattttacaataaacaggaggctttgcagcatctgattcggtccagcggtaagctcattctgctggacaagctgctgatccgactgcgggaacgcgggaatagggtcttaatattcagccagatggttcgtatgttggacatccttgccgaatacctgaaatataggcaattccccttccaacgtttagacggcagcatcaaaggagaactgcgcaaacaagccttggaccactttaacgcagaggggtctgaagatttctgtttccttttgagtacaagagctggcggcttgggcatcaacttagccagcgctgatacagtcgtgatcttcgattcagactggaatccacagaacgatctacaagctcaggctagggcacaccgcatcggtcagaaaaagcaggtgaatatttatcgactggtaacaaagggaagtgtcgaggaggatatattggagagagctaagaaaaagatggtgctggaccacctggtgatccagagaatggacaccactgggaaaactgtcctgcatacaggttcagcgcctagtagctctacaccctttaacaaagaagaactgagcgccatcctcaaattcggggccgaagaactgtttaaggagccagaaggcgaggaacaagaaccacaggagatggatattgatgagattctgaagcgggcggaaactcatgagaatgagccagggcccctgaccgtgggagacgagctgctttcacagttcaaggttgccaacttcagtaatatggatgaggacgatattgagctggaacctgagagaaattccaagaactgggaggagataatcccagaggaccaacgcaggcgtctcgaagaggaggaaagacagaaagaactggaggagatctacatgcttccgagaatgcggaattgcgcaaaacaaatttccttcaatggaagtgagggcagaagatcacggtcccgacggtattcgggttcagatagcgactcgatttcagaagggaaaaggcctaagaagcgcgggcgcccacgtacaatccccagggagaatattaaaggcttctcggatgccgagatcaggcgctttattaagtcttacaaaaagtttggagggccgctcgagagactagatgccattgcacgggacgccgaactggttgataagtcagaaacagacctgagacggctaggagagttggttcataatggctgtatcaaggctctgaaagactcttccagtggtacggaacgcacaggcggcagactgggtaaggttaaagggcctactttccgcattagcggagtccaggtgaatgccaaactcgtgatttcacacgaggaagaactgatacctttgcacaaatccatccctagcgaccccgaagagcgcaagcagtacacaatcccgtgtcacacgaaagcagcccacttcgatatagactggggaaaggaggatgatagcaatctgttgatcggcatctacgagtatggttatgggagttgggagatgataaagatggatcctgacctgtcactgacacacaaaattttgcctgacgatcctgataagaagccacaggcaaagcaattgcagacaagggccgactatttaattaagctgctgtctcgggatcttgctaagaaagaggccctgtccggcgccggcagctccaagcgcaggaaagcccgagctaaaaagaataaagctatgaagagtatcaaagtgaaggaggagataaagtctgactcttcccctctgccaagtgagaagagcgacgaagacgatgacaaactgtccgaaagcaaatctgacggaagggagcgcagcaagaagtcgtcagtgagtgatgccccagtacacatcactgctagcggcgagcctgtgccaatctccgaagagtcagaagagctcgatcagaagacgttttctatctgcaaggaaagaatgcggcccgttaaagctgccttgaaacaattagaccggccagaaaagggcctctctgaacgtgagcaactcgagcatacgcggcagtgtctcatcaaaattggcgaccacatcacagagtgcctgaaagagtacactaaccccgagcagatcaagcagtggcgcaagaacctgtggatttttgtgagcaagttcactgaattcgatgctagaaaactccataaactttacaaacatgccattaagaaacggcaagagtcccagcagaactccgaccagaactccaatctgaatccgcacgtgataaggaacccagatgtggaaaggctgaaggaaaataccaaccatgatgattctagccgcgacagctatagcagcgatcggcacctgacccagtatcacgaccaccacaaggacaggcatcagggggatagctataaaaaatccgattctcggaagcgcccctactcgtctttctccaatgggaaggaccatcgggattgggaccattataaacaggacagcagatattatagcgaccgtgaaaaacatagaaagttggacgaccatcgcagccgcgaccaccggagtaatctggaaggctcccttaaagatagatctcactctgaccatagatcacacagcgaccaccgcctacactcggatcaccgttcgtccagtgaatacactcatcacaaatcgtccagagattacagatatcatagtgactggcagatggaccaccgtgcctcatcttccggcccacgcagccccctagatcagcgctctccatatggttcccgaagtcctttcgaacactctgtggaacataagtcaacgccagaacatacttggtctagcagaaaaacttag

SEQ ID NO: 182910 - DNA, 903 bp, synthetic construct
  misc_feature 1..903: note = Description of Artificial Sequence: Synthetic coding sequence
  source 1..903: mol_type = other DNA
atgttcagcttcaccggcgtgctggtgatctacgaggtgctgaagaagtgtattggaaagctgatttctctccgggtatgcagcatcgagggctgcgtttgcgtctacgtttttgtgcctggggggaaggaattccatgaaaagctgaacatattccaccaaactaacctcatttgtctgtttctgaactcctcacgcaatctctggattttcgtgtcaaagttcactgaattcgatgcccggaagttgcataaactctacaagcatgcaatcaaaaagcgacaggaatcacagcaaaactctgaccagaactctaatctcaatccacacgttattagaaaccccgatgtggagcgcctaaaggagaacaccaatcacgatgatagctccagggacagctacagctctgaccggcatttgacacaatatcacgatcatcacaaggaccgccaccaaggggactcctataagaaaagcgatagccgaaagagaccatattcttcgttttcaaacgggaaagaccaccgcgactgggaccactataagcaggactctcgctactatagtgatagagagaaacaccggaaactggacgaccatcgaagtagggaccaccgctcgaacctcgaggggtctctcaaggaccgctcgcactctgaccatcgatcccattccgatcaccggctgcacagtgaccatcggagtagctccgagtatacccatcataagagctcacgcgactaccgctatcactcggattggcagatggaccatagggcatcatcaagcgggccacgcagcccactggaccaacggtccccatacgggtccaggagtccattcgaacattctgtggaacacaagtccaccccagagcatacttggagctctcgaaagacctag

SEQ ID NO: 182911 - DNA, 624 bp, synthetic construct
  misc_feature 1..624: note = Description of Artificial Sequence: Synthetic coding sequence
  source 1..624: mol_type = other DNA
atgaacggccacagcgacgaggagagcgtgcggaacagcagcggcgagtcatctcagtctgacgacgactctggctccgcatcgggctccggatccggttcctcctccggtagctccagtgacggcagttcttctcagtccgggtcatccgattcagactcaggctccgagtctgggtcacagtctgagtccgaatccgatacttcgagggaaaacaaggtacaggctaagcccccaaaggtggatggagcagagttttggaaatcatctcccagcatcctggcggtgcagcgctccgccatcctgaaaaaacagcagcagcagcaacagcaacagcagcatcaggcgtctagcaattcgggctcagaggaggactcttcttctagcgaagattcagacgactcatcttctgaggttaagagaaagaagcacaaggatgaggactggcaaatgagcgggagtggaagccctagtcagtccggttccgattcagaatccgaggaggagcgtgaaaaatcttcttgtgatgaaacagagtccgactacgagcctaagaataaagtgaaaagccggaaacctcagaatagatccaagtctaagaatgagaagaagaaaaagaagtag

SEQ ID NO: 182912 - DNA, 660 bp, synthetic construct
  misc_feature 1..660: note = Description of Artificial Sequence: Synthetic coding sequence
  source 1..660: mol_type = other DNA
gtgggcgccgaccgggacagccccaccctgctgcccgccggcggctccaactggcttgcccagcgctttcattgccagaatggctgcatcctgggcgatgaaatgggactgggtaaaacatgtcaaacaattgccctgtttatctacctcgccgggcgacttaacgacgagggcccctttttgatcctgtgtcctctgtcggtggagcagctagaaagacgaaacgctgagatctgttcccggagtttcctatgcaatatttgcggcgacaaagaagagcgcgcctgcctgcaacaggacctgaaacaggagtcccggtttcacgtcctcctgaccacctacgaaatttgcctcaaagatgcgagctttttgaaatccttcccatggtcagtccttgttgttgatgaggcacatcggctaaagaatcagagttcactcctccacaagacactcagcgagttttccgtggtgttctctctgctgctcacaggaacccccatacaaaactccttgcaggaattgtattcactacttagcttcgtcgaacccgatcttttcagcaaggaagagtgggaaatattattcaacgcaacaagaatcctcaggaagaacctatcccagcaagtgaactgtactaactcctgctcccatttctgttag

SEQ ID NO: 182913 - DNA, 1851 bp, synthetic construct
  misc_feature 1..1851: note = Description of Artificial Sequence: Synthetic coding sequence
  source 1..1851: mol_type = other DNA
atgagcgccctgcagaagaagtactacaaggccatcctgatgaaggacttggacgcttttgaaaatgaaaccgcaaagaaagtgaagctccagaatattctctcgcaactgcgcaagtgcgtggaccacccctacctgttcgacggagtggaacccgaaccattcgaagtgggggatcatttgactgaggcgtctggcaagctgcacctcctcgacaagctgcttgccttcctgtacagcggggggcatagagtgcttctgtttagtcagatgacgcagatgttggatattttgcaagactatatggactaccgtggttattcctacgagcgcgttgacggctccgtgagaggcgaggagagacacttagccataaagaactttggtcagcagccaatcttcgtgttcttgctgagcactcgagccggcggcgtgggcatgaacctgaccgctgctgataccgtgattttcgttgattccgactttaatccacagaatgatctccaagccgctgctcgtgctcaccggatcggccagaataaatcagttaaggtcatccgtttaatcggacgggacaccgtggaggaaatcgtgtacagaaaagctgcctccaaattacagttgacgaatatgatcattgaaggcggtcacttcactctgggcgcacagaagcccgccgctgatgccgacctgcagctgtctgagatacttaagttcggcctggataaactgctggcatcggaagggagcacgatggacgaaattgacctcgagtctattctgggggaaacgaaagacggccaatgggtatcagatgccctgccggcggccgaagggggtagtcgggatcaggaagaaggaaagaatcatatgtatctatttgaaggaaaggactactctaaagaacccagcaaggaagatcgcaaatcctttgaacaactcgtgaacctgcagaaaaccctcctggaaaaggcttcacaggaggggagatcactgagaaacaagggctccgttctgatccctggtctggttgaggggtcaactaagcggaagcgggttctctctcccgaggaactggaagatcgccagaagaagaggcaggaggcggcagcaaaacgcaggcggctaattgaagagaaaaaaaggcaaaaggaggaagccgaacacaagaaaaaaatggcttggtgggaaagcaataattaccagagcttttgtctgccatccgaggagtcagagcccgaagatttggaaaacggagaagaatcctcagccgaactggattaccaggatcctgacgcgacttctttaaagtacgtatccggcgacgttacccacccgcaggccggcgctgaagacgccttgattgtgcattgcgttgacgattctggccactggggacggggcggactgtttactgcactggagaagaggtcagccgaacccagaaagatctacgaactcgctggcaagatgaaggacctaagcttggggggggttctcttatttccagtggatgacaaggaatctaggaacaagggtcaagacctgctcgccctaatcgtggcacagcacagagatcggtcaaatgtgctgtcaggtatcaagatggccgccctcgaggaaggactgaagaagatctttctggccgcaaaaaagaagaaggcgagcgttcacctaccacgaataggacatgccactaaggggtttaactggtatggtactgagcgattgatccgcaagcatctcgctgctcgggggatccccacgtacatttactacttcccaagatcgaagagtgccgtgctacacgcccaaagcagctcatcttctagtagacagctcgtgccatag

SEQ ID NO: 182914 - DNA, 2694 bp, synthetic construct
  misc_feature 1..2694: note = Description of Artificial Sequence: Synthetic coding sequence
  source 1..2694: mol_type = other DNA
atggagcgggccggcgccaccagccggggcggccaggcccccggcttcttattacggctgcacaccgaaggacgtgccgaggcggccagggtgcaggagcaggatctcaggcaatggggcctcaccggcatccaccttaggagctaccaacttgaaggcgttaattggctagcgcagcggttccactgccagaacggctgcatcctcggcgatgaaatgggactgggtaaaacatgccagaccattgcgctctttatctacctcgccggcaggctgaacgacgaagggcccttcttgattctctgccccctgtccgtgttgagcaattggaaggaagagatgcaacggtttgcccccgggttatcgtgcgtaacatatgcgggagacaaagaggagagagcttgtctgcagcaggacctcaagcaggagtcacgtttccatgttctgttgacaacatacgagatatgcctgaaagatgcatctttcctgaagtcattcccttggtctgttcttgtggttgatgaggcccataggttgaaaaaccagagctcattactccacaaaacactgagcgagttctctgtcgtcttttccctgctcttaactggcacccccatccagaactccctgcaagagctctatagtctcctgagctttgttgaacccgaccttttttctaaggaagaggtcggtgactttatacagcgctaccaggacatcgagaaagaatcggagagcgcgagcgaactgcataagctactccagcctttcctgctccgtcgcgtcaaggcggaggttgctaccgagctccccaagaaaactgaggtcgtgatttaccacggcatgtccgctctgcagaagaaatattataaagctattctaatgaaggacctggatgccttcgaaaacgagacggcaaagaaggtcaaactgcagaacatattaagccagctgaggaagtgcgtggatcatccttatctattcgatggggtggaacctgaaccctttgaagtcggagaccacttaaccgaggcttccggtaagttgcatttgctcgacaagctgcttgcgttcttgtacagcggcgggcatagggtgctgctgttttctcaaatgacccagatgctcgatatactccaagactatatggactatcggggttacagctacgagagggtggacggctctgtccgcggtgaggaaaggcatctggccattaaaaactttggtcaacagcctatttttgtctttctcctgtccacccgggccggcggagtgggtatgaatttgactgccgccgatacagtgatatttgtagactcagactttaacccccaaaatgacctgcaggcagccgcccgtgcccataggattgggcagaacaagtctgtgaaggtaatccgtcttattggcagagacaccgtagaagaaatcgtgtataggaaggcggccagcaagctgcagctcaccaacatgataatagaaggaggccatttcactctgggcgcacagaaaccagcagcggatgccgatttgcaactgtcggaaattttgaagttcggcctggacaaactccttgcatcagaaggctccactatggatgaaatcgacctggagtctatactgggggaaaccaaggatggacaatgggtgagcgacgctctccctgctgcagaaggaggaagtcgagatcaggaggaaggaaagaatcacatgtacctgtttgaaggtaaagactacagcaaggaacccagcaaggaagatcggaagagcttcgagcagctggttaatctacaaaaaacactcttggagaaggcatcccaggagggaagaagcctgagaaacaaggggagtgtacttatacctggtttggtggaaggctccacgaagcgaaagagagttctgtcgcccgaggagctggaggacaggcagaagaagcgccaggaggccgcggccaagaggagacggcttatcgaggaaaagaaacgccaaaaagaagaagcagaacacaagaagaagatggcttggtgggagagcaacaattaccagagtttctgcctgccttctgaagagtccgagcctgaggatctggagaacggagaagagtcttccgccgaacttgattatcaagatcccgacgcaacttctcttaagtatgtcagtggcgacgtgactcacccacaagcaggcgctgaagatgcactgattgtgcattgtgtcgacgattctggacattgggggaggggcgggctttttaccgccttagaaaaaagaagcgcggagccgcgcaagatctatgaactggcgggaaagatgaaggacctgagccttggcggggtgctcctctttcctgttgacgacaaggaatcgaggaacaagggccaagacctattggctctgatcgtggcgcagcacagggaccgcagcaacgtgctctctgggataaaaatggcagccttggaagagggactgaagaaaatttttctggccgccaagaaaaagaaagcatcagtgcacttaccccggattggacatgcgactaaaggattcaattggtatgggacagagcgccttatacggaagcacctggccgccagaggtattcccacgtacatttattacttcccgcggtctaagtcagctgtgctccatgcacagagcagcagctcttcctccagacagttggtgccttag

SEQ ID NO: 182915 - DNA, 2082 bp, synthetic construct
  misc_feature 1..2082: note = Description of Artificial Sequence: Synthetic coding sequence
  source 1..2082: mol_type = other DNA
atggagcgggccggcgccaccagccggggcggccaggcccccggcttcctgctgagattacatacggagggccgcgccgaggccgcacgcgtgcaagaacaggatcttcgccagtggggactgacagcaagtgagctgcacaaactattgcaaccttttcttctacgcagggttaaggcggaggttgctactgagcttccgaaaaaaaccgaagtcgtgatctatcatggaatgtcagcactgcagaaaaagtattataaggccatcctaatgaaagatctggatgcctttgaaaatgagacagcaaagaaggtgaagctgcagaatatcctttcccagctgcgcaaatgcgttgatcacccctacctgtttgatggagttgagcccgagccgtttgaggttggagaccacctaactgaagcttctggcaaactgcacttactagataaactgctggccttcctgtacagcggaggtcatcgagtgttgctcttttcccagatgacccagatgcttgatattttacaggactacatggactataggggctacagctatgagcgagtggacggctctgttcggggcgaggaacgtcacctggcaatcaaaaacttcggtcagcaaccgatctttgtcttcttactgtcgactagggctggaggagttggcatgaacttgaccgcagccgatacagtgattttcgtcgactctgacttcaaccctcagaatgacttgcaggctgcagccagagctcatcggattggtcagaacaaatctgtcaaggtgatccgtctaatcggtagagacactgttgaggagatcgtttaccggaaagcagcaagcaagcttcagctcactaacatgattatcgagggcggtcattttacccttggtgcccagaagcccgccgcagacgccgaccttcagctcagtgaaatactaaaattcggactcgacaaacttctagcctcggaagggagcaccatggatgagattgatttggagagcatcctaggcgaaacaaaggacggacaatgggtaagtgacgctttaccggccgccgagggggggagtcgagatcaggaggaaggaaaaaaccacatgtacttgttcgaaggaaaggattacagtaaagaacccagtaaggaggaccggaaaagttttgagcagcttgtgaacctccagaagaccctgctggaaaaagcaagtcaggagggaaggtctctgagaaataagggaagtgtgttaatccccggactagtggaaggctcaactaagcgaaagcgagtgctgtctcctgaggagctggaggataggcagaagaaacggcaggaagcagccgctaagagacgtcgcctgatcgaggagaagaagcggcagaaagaagaggccgagcacaagaaaaagatggcctggtgggagtcaaacaactaccaaagtttttgtcttccttcggaggaatccgaacccgaggacctcgaaaatggcgaagagagctcagctgaactcgattatcaggaccccgacgctacttccttgaagtacgtttccggcgacgtgacgcatccacaggccggggcagaggatgctctaatcgtgcattgtgtagacgactcaggtcactggggaagagggggcttgtttactgccctggaaaagcggtctgccgagccccgcaagatctacgagttagctgggaagatgaaagatctttctcttggtggagtgttactgttccctgtagatgataaggagtctcggaataaggggcaagacttgcttgctctgattgtagcccagcaccgagatcggtctaacgtgttgagcggcatcaaaatggccgctctggaggaaggcttgaaaaaaatctttcttgccgccaagaaaaaaaaagcaagcgtgcacctgcctcgcattggccatgccacaaagggatttaattggtacggcaccgaacgattaatacggaaacacctggcagcgagagggatccccacctacatatattacttccctcgctccaagtctgccgtcctgcatgcacagtcaagctcttcatccagccgacagctggtcccatag

SEQ ID NO: 182916 - DNA, 2412 bp, synthetic construct
  misc_feature 1..2412: note = Description of Artificial Sequence: Synthetic coding sequence
  source 1..2412: mol_type = other DNA
atggagcgggccggcgccaccagccggggcggccaggcccccggcttcttgctgcgattgcatacagaagggcgggcagaggccgcacgcgttcaagaacaggacctgcggcaatggggtctgacagggattcaccttcggtcctatcaattggaaggcgttaactggcttgcccaaaggtttcattgtcagaatggctgtatcctcggggacgaaatggggcttggtaaaacctgccaaacaattgccctgttcatctacctggccggccggctgaacgatgaaggacctttcctcatcctctgcccactcagtgtgctcagcaattggaaggaggagatgcaacgatttgcgcctgggctttcttgtgttacctatgccggtgataaggaggagagagcttgtcttcaacaggatctgaaacaggaatcacgttttcacgtgctcctaacaacgtatgaaatttgcttaaaggatgcttcttttctcaagtctttcccctggtctgttcttgtggttgacgaagcccacagactgaagaaccagtccagcttgctgcacaaaaccctctccgagtttagtgtcgtgttttccctgctgcttactggaacccccatccagaactcactgcaggagttgtattcactgctaagttttgttgagccagatttgttttcaaaggaggaggtcggcgacttcattcagcgctaccaggacatcgagaaggagtccgagagtgcctctgagctccacaagctgttacagcccttcctgctgcggcgggttaaggccgaagtagccacggagctaccaaagaagacagaagtcgtcatttaccacggcatgtcagcccttcagaagaaatactacaaggccatactgatgaaagatttagatgcatttgagaatgaaacagccaaaaaagtaaaactgcagaacatactgtcacagctgcggaagtgtgtcgatcatccttatttgtttgatggcggtgtcggaatgaacctgaccgccgcggatactgttatttttgtcgacagtgatttcaatccccaaaacgatttacaggctgctgcaagagcccaccgcattggccagaataagagcgtcaaagtaatcagattaatcggtcgagacacagtggaagagatcgtctaccgtaaggccgcttctaaactgcagttgacaaacatgatcatcgaggggggccattttacactgggggctcagaagcctgccgctgacgccgatctccaattaagtgagattttaaaattcggtctggacaagcttctggcttccgagggttcaactatggacgagatagatcttgagtccatactgggcgagaccaaggatggacagtgggtgagcgacgcactccccgctgctgagggggggtctcgggaccaggaggaggggaagaaccatatgtacttattcgaaggcaaggattattcaaaggagcccagcaaggaggatcggaagtccttcgagcaactggtcaatcttcagaaaacccttctcgagaaggcctcgcaggaaggccgtagtctcaggaacaaaggcagcgtgctgattcccggacttgtcgaagggtcaaccaaacgcaagcgcgtgctctcacccgaggagctggaagacaggcagaaaaaacggcaggaagcggctgcgaagcgccggaggttaattgaggaaaagaagagacagaaggaagaagccgaacacaagaagaagatggcatggtgggaaagcaacaattatcagtcgttttgtctgcccagcgaagagtctgagcctgaagatttagaaaacggcgaggaatctagtgctgaactcgactaccaggaccccgatgcgacaagccttaaatatgtgagcggcgacgttacacatcctcaggccggcgctgaagatgccctcattgtgcattgcgtcgacgactcagggcattggggaagaggagggctgttcacagccctggagaagcggagcgctgagccacggaagatctatgagttggcgggcaaaatgaaggacctatctctgggcggagtgctacttttcccagtggacgataaagaatcccgcaacaaagggcaggatctactggcactgattgtggctcagcatcgcgatagaagcaatgtactgtcaggcataaagatggcggccctcgaggagggtcttaagaaaatttttcttgccgcgaagaagaaaaaggccagtgtgcaccttccccgtatcgggcacgctaccaaggggtttaactggtacggcacggagcggctgatccgcaaacacctggccgcacgtgggatccctacttacatatactattttccaaggtccaaaagtgctgtgctgcacgcacagtcatccagtagctcgtctcgtcaactggttccatag

SEQ ID NO: 182917 - DNA, 1305 bp, synthetic construct
  misc_feature 1..1305: note = Description of Artificial Sequence: Synthetic coding sequence
  source 1..1305: mol_type = other DNA
atggccgtgagctgggagatgcggtgggcctggggccggcccgccagatttgccccaggcttgtcctgtgtgacatatgccggcgacaaggaggaacgagcttgcctgcagcaggatcttaaacaggaatctagattccatgtgcttcttactacctacgaaatatgcctcaaagatgcatctttcctgaagtctttcccttggagcgtcctcgtggtggatgaagcgcaccggctaaagaaccagtcaagcctcctccacaaaactctgagtgaattcagcgtagtgttctccctactgcttactggaacgcctatccagaacagcctgcaggagttgtattcactactaagcttcgtggagcccgacctctttagcaaagaagaggtgggcgactttattcagcgctaccaggacattgagaaggaaagtgagagtgcctctgagctgcataaactgctccaaccgttcctgctccgcagagtaaaagccgaagtagcgaccgagctccccaagaaaacagaagtggtcatatatcatgggatgtcagcccttcaaaaaaaatactataaggcaatccttatgaaagacttagacgcttttgagaacgaaacagctaagaaagtgaagttacaaaatatcctgtctcaacttcgtaaatgtgtggaccatccctacttattcgatggggtggagccagagccgttcgaagtcggggaccatctcacagaagctagtggcaagctccatctacttgacaagctcctggccttcctatattccggaggtcatcgagtcctgctgttctctcagatgacgcagatgctggacatactccaggactacatggactacaggggctactcttatgagcgcgtggacggttccgtgcgaggggaagagagacatctggccatcaaaaactttggccaacagcctatcttcgtgtttttgctgtcaactagggcaggcggcgtcgggatgaatctcacagctgcagatacagttattttcgtagatagcgacttcaatccccagaacgacttgcaggcagcagctcgcgctcacagaattggccagaacaagagtgtgaaggtgatccgccttatcggccgcgatacagtcgaagaaatcgtttacaggaaggctgctagcaagctgcagctgacaaacatgattatcgagggtggccactttacgctcggggctcagaaaccggccgcagatgcggatttgcaggtccgttacagcaacttggtctggataaattgctggcctctccgcggggctccatggatgaagtag

SEQ ID NO: 182918 - DNA, 5487 bp, synthetic construct
  misc_feature 1..5487: note = Description of Artificial Sequence: Synthetic coding sequence
  source 1..5487: mol_type = other DNA
atgatgcggaacaaggacaagagccaggaggaggacagcagcctgcattctaatgcctcttctcatagtgcttcagaagaagccagcggctccgactccggaagccaatccgagtccgaacaaggtagtgaccctggctctggccacgggtctgagtccaattcctcctctgagtctagtgagtcacagtctgagtctgagtctgaatcggcaggcagcaagtctcagcccgtcttgcctgaagctaaagagaaacctgccagcaagaaggaacgtatcgccgacgttaaaaagatgtgggaggagtatcctgacgtgtacggagtgcggcgctcaaatcggtcaaggcaggaaccaagcagatttaatatcaaagaagaggccagtagcggttccgaatccggttctccgaaacggagggggcagcgacagctcaaaaagcaggagaaatggaaacaagaaccatcggaggacgagcaggagcagggcacttccgcagaaagcgagcccgaacagaagaaagtgaaagcaagaagacccgtgccccgccgcacagtcccaaagcccagggtgaagaaacagcctaaaactcaaagaggaaagcgtaagaagcaggacagcagcgatgaagacgacgatgatgacgaggctccgaagaggcaaacaaggagacgagctgccaaaaacgtgagctataaagaagacgacgacttcgaaacagacagtgacgacttgattgaaatgactggtgagggcgttgacgaacagcaggataattccgagaccatagagaaagtgctagatagccggcttgggaagaagggcgccaccggggccagcactacagtctacgcaatagaggcaaacggtgatccctctggagatttcgatacagagaaggatgagggggaaatccaatatctgatcaagtggaagggctggtcttatatacattctacctgggagagtgaggaaagcctccaacagcaaaaagtaaagggactgaagaaacttgaaaatttcaagaaaaaagaagacgaaataaagcagtggttaggtaaggtgtctcccgaagacgtggagtattttaattgccagcaagaactggcctcagaactgaacaagcagtaccagattgtggaacgtgtcatagccgtaaaaaccagcaagagcacactagggcagacggactttcctgcccacagtagaaagcccgccccctcaaatgaacctgaatacctgtgtaagtggatgggtctcccatacagtgagtgttcttgggaggacgaagcactaatcgggaaaaagttccagaattgtatcgactctttccattcacggaacaactcaaaaacaatccccacgcgcgagtgtaaagctttgaagcagaggccgcgtttcgtggcactcaaaaaacagcctgcatatctcggaggtgagaatctggagctccgggattaccaactcgagggcctcaactggctggcccactcatggtgtaagaacaatagcgtcatactcgcagacgagatggggctcgggaagactattcagacaatttcatttctgtcctacctgttccaccagcaccagctgtacggcccattccttatcgtggtgcccctgtctaccctgaccagctggcagagggaatttgagatctgggccccggagattaatgtcgtggtgtacattggcgatctgatgagccggaacacaatacgagagtatgaatggatccactcccagacgaaaagacttaagttcaatgccctcatcacaacctacgagattttactgaaagataagaccgtgttggggtcaatcaactgggcctttctgggagttgacgaggcccaccggctcaagaacgacgacagtctgctatacaagacactgatcgacttcaagagcaaccaccgccttttaatcacaggtactccactgcagaattctctgaaggagctttggagcctgctccacttcatcatgccggagaaatttgaattctgggaggactttgaagaggaccatggtaagggccgggaaaatggctaccaatccctgcacaaagtgctagaacccttcctcctaaggcgtgtcaagaaagacgtcgagaaatcgctgccagccaaagtggaacagattctccgcgtggagatgtcagccttacagaaacaatactataagtggattctgacacggaattataaggcattagctaaaggtacgcgcggcagcacgagtggtttcctgaacattgttatggagctaaagaagtgctgcaatcactgctaccttattaagcctccagaggaaaatgaaagagaaaatggacaggagatactcctctcgctcatccggagttctgggaagctcattctgctcgataagctcttgaccaggctgcgggagaggggcaacagagttcttatcttttcacaaatggttcgcatgctggatatactggccgagtacctcactatcaaacattacccattccagaggctagatgggagtataaagggcgagataaggaagcaggccctggaccactttaatgctgatggttcagaagacttctgcttcctgctctccaccagggcaggaggcctgggaatcaacctcgcgagcgcagacaccgtagtgatcttcgactctgactggaacccacagaatgacctgcaggcccaggcccgggcccatagaattgggcagaagaaacaggtgaatatttaccgcctggtcactaagggtacggttgaggaagagattattgaaagagccaagaaaaagatggtgcttgaccacttggtgatccaaagaatggataccactggaaggactattctcgaaaataactctggtagatctaactccaatcctttcaataaggaggagcttacagcaatcctgaaattcggagcggaagatctgttcaaagaactggagggggaagagagcgagcctcaagaaatggatattgatgaaatcctccgactggccgagactcgggaaaacgaagtctccacctccgcaactgacgagctgctgtcacagttcaaagttgctaattttgccaccatggaggacgaggaggaactggaggaacggccccacaaggattgggatgaaattatccctgaggagcagagaaaaaaagtggaggaggaggagagacaaaaagaattagaggaaatttacatgctaccccgaattcgctcatccactaagaaggctcagaccaacgacagcgactcagacactgagtccaagagacaagcacaacgatctagtgcatcagagtcagagacagaagacagtgacgatgacaaaaaacctaaaaggagaggccgaccgagatccgtgaggaaagacttggtcgaaggcttcaccgatgccgagattcgccggtttatcaaagcatacaaaaaatttggcctgcccttggagcgactggagtgtattgcccgcgacgccgaacttgtagataaatctgtggccgatctgaaacgattaggcgagttgattcacaattcttgtgtctccgctatgcaggaatatgaggaacagctgaaggaaaatgcatccgaaggcaagggcccaggcaagaggcggggtcctaccatcaagattagcggggttcaagttaatgtcaaatccattatccagcacgaggaggagtttgagatgctccacaagagcattcctgtagatcccgaggagaagaagaagtactgcctgacttgtcgtgtgaaggccgcccatttcgacgtggaatggggggttgaggatgactcacggctcctgctggggatatacgagcacgggtacggtaactgggaactcattaagacagatcccgaactgaaattgactgacaagatccttccggtggagacagataagaaaccccaggggaaacagctgcaaacaagagcggattatttgctgaagttgctgcgcaagggcctggagaaaaagggcgccgttacagggggagaggaagctaagctaaaaaagagaaagccaagggtgaaaaaggaaaacaaagtgccaagattgaaggaggaacacggcatagagctgtctagccccagacattccgacaacccttcagaggaaggcgaagtgaaggacgacggtctggagaagtctcctatgaagaaaaagcagaaaaaaaaggagaacaaggagaacaaagaaaagcagatgtcctccaggaaagacaaggaaggcgacaaggagcgcaaaaaatctaaggacaaaaaggaaaagcctaagtccggcgacgctaaatcttctagcaagtccaaaaggtcacaaggccctgtgcacatcaccgctgggtccgaacccgtacctataggagaggacgaggacgatgacctggaccaggaaacctttagtatttgcaaggagcgtatgcgtccagttaaaaaggccctcaaacagcttgataagccggataagggcctgaacgtccaggagcaactggaacatacacggaactgtctgctgaaaattggtgataggattgcagagtgtttgaaggcatatagcgatcaagaacatatcaagctgtggaggcggaacctgtggattttcgtgtcaaagttcactgaattcgatgcccgtaaactgcataagctctataaaatggcccacaaaaagaggagccaagaggaagaagaacagaaaaagaaagatgatgtgacaggaggaaaaaagcccttccgcccagaagcttctggtagctcccgtgactccctgatttcccagtcacatacttcacataacttgcaccctcagaaaccccacttgccagctagtcacggcccacagatgcacgggcacccacgcgataattataaccaccctaacaaaagacactttagcaacgcagaccgcggtgactggcagcgtgaaagaaaattcaactacggaggagggaataataatccaccgtgggggagtgatcggcaccaccaatacgaacaacactggtacaaggaccaccactatggggaccgtcgacatatggatgctcaccggtctgggtcctacagaccgaacaacatgagtcgaaagcgtccctatgatcagtattcttctgatcgagaccatcgggggcatcgcgactactatgatcgccaccaccacgacagtaagcggagacgaagcgatgaattcaggccacaaaactatcaccagcaggatttccggagaatgagcgaccatcgtccagccatgggctatcacggacagggtccgagtgaccattacagaagcttccacaccgataagctcggcgagtacaagcagcctctgccaccactacaccctgcggtctctgacccccggtcccctcctagccagaaatctccccacgatagtaaatcccctctggaccaccgtagtccattggaacgttcactggaacaaaaaaacaacccagattacaactggaacgtgagaaaaacgtag

SEQ ID NO: 182919 - DNA, 1506 bp, synthetic construct
  misc_feature 1..1506: note = Description of Artificial Sequence: Synthetic coding sequence
  source 1..1506: mol_type = other DNA
atgatgcggaacaaggacaagagccaggaggaggacagcagcctgcacagtaacgcttcatctcatagcgccagcgaagaagccagcgggagtgacagcgggtcacagagtgagtctgagcagggaagtgaccccggctccggccacgggagcgagagtaacagtagctccgagagtagcgaatcccagtcagaaagtgaatcagaaagtgcgggctctaaaagtcaacccgtgcttccggaagccaaggagaagcccgcctcaaagaaagaaaggattgccgatgttaagaagatgtgggaagagtatccagacgtttatggagtgcggagatctaaccggtcccgccaggagccttcacgcttcaacatcaaagaggaagcctccagtggtagtgagagcggcagccccaagcgtcgcggccagcgccaactgaagaaacaggagaagtggaagcaggagcctagcgaggacgagcaggagcaggggaccagtgccgaatctgagcccgagcagaaaaaagttaaggcgaggcgtccagtgccaagaaggactgtaccgaagcctcgggtcaagaagcagcctaagactcaacgcggtaagcgcaaaaaacaggattccagcgatgaagatgatgatgatgacgaagcccccaaacgccagacaaggcgtagggctgctaagaatgtctcatacaaagaggatgacgactttgagaccgacagtgacgatctgatcgaaatgacaggcgagggtgtagatgaacagcaggataactctgagactattgaaaaggtgctggactctcggcttgggaaaaagggcgcaaccggcgctagtacaacagtgtacgccatagaggcaaatggtgacccctctggcgactttgacacggaaaaagatgagggtgagatacagtacctgataaaatggaaggggtggagttacattcacagcacatgggagagtgaagagagcttgcaacagcaaaaggtcaaaggactgaaaaaacttgagaacttcaagaaaaaggaagacgaaataaagcagtggttaggaaaggtgtcccctgaggatgtcgagtactttaattgccagcaggaactcgcctccgagttgaacaaacagtatcagatagtggaaagagtgatcgccgttaagacatctaagtccacccttgggcagactgactttcctgcccatagtagaaagcccgcaccctctaatgagcctgagtatctgtgtaagtggatggggcttccctactctgagtgcagttgggaagacgaagccctgatcgggaaaaaattccagaactgtattgattctttccatagccggaataacagcaaaaccattccaacccgcgagtgcaaagccttgaaacagaggcctaggttcgtggccttaaagaagcaacctgcctatctgggcggtgagaatcttgaactgagagattaccagcttgaaggtttgaactggctggcccatagctggtgtaagtag

SEQ ID NO: 182920 - DNA, 1545 bp, synthetic construct
  misc_feature 1..1545: note = Description of Artificial Sequence: Synthetic coding sequence
  source 1..1545: mol_type = other DNA
atggcccacaagcagcgggaggactacctgaacctgagcccctgcgtttttacttggtaccggactttctctcagttggcctttgacggcgaaaaattgtcgcattctgcttctgaggaagcaagcggaagcgactccgggagtcagagcgagagtgaacagggtagcgatccaggttctggacacggcagcgagagcaattcctcgtctgagtcatctgaatcccagagtgagtccgaatctgagagcgccggctcgaagagccagcccgtgctgcccgaggccaaagagaagcctgcgtctaagaaggaaaggattgccgacgtgaagaagatgtgggaagagtatcctgatgtctacggcgtcagaaggagtaaccgatcccggcaggaaccatcgcgctttaacataaaagaggaggcctcctcgggtagcgagtcggggtcgcccaagaggaggggtcagcggcaattgaaaaaacaggaaaagtggaagcaagaacctagcgaggacgagcaagaacagggtactagcgctgagtccgagccagaacaaaaaaaagtgaaagcgaggcggccggttccccgaaggactgtgcctaaaccgcgcgtcaagaagcagcctaagacccaacgcggtaaaaggaagaaacaagattcttctgatgaagatgacgacgacgatgaagccccaaagagacagaccaggcggagagccgccaaaaacgtcagctacaaggaagacgacgattttgagaccgattctgatgacctgattgaaatgacaggagagggtgtagatgaacaacaggataattcagagaccattgaaaaggtactggacagccgcctcgggaagaaaggcgctaccggtgcatcaaccactgtgtacgccatcgaagcaaacggcgatccttcaggtgactttgacactgagaaggatgagggagagattcagtatctgatcaagtggaaaggctggagctacattcacagcacctgggagagcgaggaaagcctgcagcagcagaaggtcaaggggctaaaaaagctcgagaactttaagaagaaagaggacgagatcaagcagtggctcgggaaagtgtcgcccgaagatgtcgaatactttaactgtcaacaagagttagcctcagagctgaacaaacaataccagattgtagaacgggttatcgccgtgaaaacctctaagagcacattgggccagaccgattttccagcacattcaaggaaacctgctccttctaatgagcccgagtacctgtgcaagtggatggggctgccctattccgaatgctcttgggaggacgaagctctgatcggaaagaagttccagaactgcatcgacagctttcattcaaggaacaacagcaagaccattcccacccgggagtgtaaggccctaaagcaacggcccagatttgtcgcacttaaaaagcagcctgcctacctgggcggcgaaaatctggaactgagggattatcagctcgagggcctcaattggttagcccatagctggtgcaagtag

SEQ ID NO: 182921 - DNA, 552 bp, synthetic construct
  misc_feature 1..552: note = Description of Artificial Sequence: Synthetic coding sequence
  source 1..552: mol_type = other DNA
atgatgcggaacaaggacaagagccaggaggaggacagcagcctgcacagtaatgcgagttcacattcagccagcgaggaggcgagtggatcagactctggttcacaaagcgaaagcgaacaagggtctgatccagggagtggccacggatccgaatctaattctagttcggagtctagtgagtcacaatccgagtcagagtctgagagcgcaggctctaagtctcagcccgtgctccctgaggccaaggagaaacctgcttccaaaaaagaacgcattgctgacgtgaagaaaatgtgggaagaatatcccgacgtctacggcgtgcgacggagcaacagatcccgacaagagcctagccgattcaatattaaagaggaggcctcctctgggagcgagagcggatccccgaagcggcggggccagaggcagctgaaaaaacaggaaaaatggaagcaagagccttccgaggacgagcaggaacaggggactagtgctgagtctgaaccggaacagaaaaaagtaaaagcaaggcgcccagtgcctagatag

SEQ ID NO: 182922 - DNA, 5220 bp, synthetic construct
  misc_feature 1..5220: note = Description of Artificial Sequence: Synthetic coding sequence
  source 1..5220: mol_type = other DNA
atgatgcggaacaaggacaagagccaggaggaggacagcagcctgcactctaatgcaagctcccacagtgccagcgaagaggcttcaggaagcgacagtggcagccagtctgagtccgaacagggctccgaccctggtagtggacatggctccgagtcaaatagcagcagcgaatcatctgagagccagtctgagtccgagtccgaaagcgcaggctcaaaaagtcagcctgtgctgcccgaagctaaagagaagcctgcctcaaagaaagagcgcatcgccgacgtcaagaaaatgtgggaggagtaccctgacgtctacggtgtgaggcgctctaaccggagtcgccaggagcccagccggtttaatatcaaggaggaggctagcagcgggagtgagtctgggtcgcccaaacggcgaggccaaaggcaactcaagaaacaggagaagtggaaacaggaaccttctgaagacgagcaggagcagggtaccagtgccgaaagtgagcccgagcagaagaaggtaaaagcccgtaggcccgtacccaggcggacagttccaaagccacgggtgaagaagcagccaaagacgcagagaggcaaaaggaaaaagcaggactcatctgatgaggacgatgacgacgatgaagctccaaagcggcagacccgaaggcgagctgcaaaaaatgtttcttacaaagaagacgatgatttcgagacagacagcgacgatctgatcgagatgacaggcgagggggtggatgagcagcaggataactcagagaccattgagaaagtattggacagtcgactggggaagaagggcgctaccggagcttccaccactgtctatgcaatcgaggcaaacggcgacccttccggagacttcgacaccgaaaaagatgagggagaaatccaatatctgattaagtggaaaggatggagttatattcacagcacttgggaaagcgaggagagcctgcagcagcagaaggtgaagggcctgaagaaactcgagaatttcaagaaaaaggaagacgaaatcaagcagtggctcggaaaggtgtcccccgaggatgtagagtattttaactgccaacaggagttggcaagcgagctgaacaaacaataccagatcgtcgaaagggtgatcgccgttaagacttctaaaagcacactgggacagacagatttcccagcccacagtaggaagcccgctccttcaaatgagccggaatatctctgtaagtggatgggtctgccttacagcgagtgcagctgggaagacgaagccctgatcgggaagaagttccaaaattgcatcgactccttccactcccgcaataactccaagacaatcccgactagggagtgcaaggctctcaagcaacgccctagatttgtggccttgaagaagcagccggcttatctggggggagagaacctagagctgcgagactatcaattggagggattaaattggcttgcccactcctggtgcaagaataactctgtgattctggccgacgagatgggtctgggaaagacaatccagaccataagtttccttagctacctcttccaccagcaccagctgtacggtcctttcctgatcgttgtgccactgagcacactgacgtcttggcagcgggagtttgaaatttgggcgccagagatcaacgtggtggtctacattggggacttgatgagtcggaacactatccgggaatacgagtggatccacagccagactaaacggctcaagttcaacgccttgattacaacctacgaaattctcctgaaggacaaaacagtgttgggctcaatcaattgggcattcctaggcgttgatgaagcccaccgcctaaagaacgatgatagcctgctgtataaaacactaatcgactttaagagtaatcatcggctcctgataactggtacacccctgcaaaacagtctgaaggaactgtggtcactcctccatttcatcatgcccgagaagtttgagttttgggaggacttcgaggaggaccatggaaaagggcgtgaaaatggatatcaatcactgcacaaggtcttggagcccttcctcctgagaagggtcaaaaaggacgtcgaaaagtcactgcctgccaaggtggagcagatcttgcgggtcgagatgtctgctctgcagaaacagtactataagtggatcctaaccaggaactataaggccttggctaagggtaccagagggagcacgtcgggattccttaatatcgtgatggagctgaagaagtgctgcaaccattgttaccttataaaaccccccgaagagaacgagcgtgagaatggacaggagattctgctaagcctgatccgcagcagcggaaagctaatcctgttagacaagctactgacaagattacgtgagaggggaaatcgtgtactcatatttagtcagatggtaaggatgctggacatcctggcggagtacttaacgataaagcactacccttttcagagactggatggcagtattaaaggagaaatccgaaaacaagccctggatcactttaacgcggacgggagcgaggacttttgcttcctgctgagcacccgggcggggggccttggtattaaccttgcgagtgccgacacggtggttatcttcgattctgattggaatccccagaacgacctgcaggcccaggcccgagcgcacaggattggccagaagaagcaggtaaacatctatcgccttgtgacgaaaggaaccgttgaggaagaaatcatcgaacgggctaaaaagaaaatggtcctggaccatctggtcatccaacggatggacactaccgggaggaccatcctcgagaataactctggacggagcaactccaacccttttaacaaggaagagctcaccgcaatcctcaagttcggagcagaggatcttttcaaggaactggagggagaagagagcgaacctcaggagatggatattgacgagattctgagactggcagaaacacgagagaatgaggtgtcaacaagtgctactgatgagctcctgagtcagtttaaggtcgcaaattttgcaactatggaagacgaggaggagttagaggagcgaccccataaggactgggatgagataattcccgaggagcagcggaagaaagtggaggaagaggagcggcagaaggaattggaggaaatctacatgttgccgcggataagatctagcacaaagaaggcccaaacaaatgatagcgattcagataccgaatctaagcgccaggcgcagagatcctcagcttctgaaagcgagacagaagatagcgatgacgataaaaaaccaaagaggcgggggcgcccacggagcgtgagaaaggatcttgtcgagggcttcacagatgcagaaattaggagatttatcaaagcctacaagaaattcggcctcccactggaacggctggaatgtatcgcacgcgatgccgagcttgtcgacaaaagcgttgccgacctcaagcgactaggagagctgatccacaactcatgcgtatccgccatgcaggagtacgaggaacagttgaaagagaatgccagcgaggggaaaggccctgggaagcgcagaggacccactatcaagattagcggagtgcaagtcaatgttaagtccatcatacagcacgaagaagaatttgagatgctccacaaatcaatcccagtggaccccgaggagaagaagaagtattgtctgacttgtagggtcaaggctgcacatttcgacgtggagtggggagttgaagatgatagccgccttctacttggaatttatgagcacggttatgggaattgggagttgattaaaactgatccagagttgaaacttaccgataagatcctccctgttgagacagataaaaaaccgcaagggaagcagcttcagacccgcgccgattatctgctgaaattgttacgaaagggattggaaaagaaaggggctgtgaccggcggcgaggaggctaaactgaagaagcgcaagccacgggtcaagaaggagaataaggtgcctcgcctaaaggaggagcacggaattgagctgagctctcctaggcactcagataatccttcggaggagggggaggtaaaagatgatggcctagagaaaagcccgatgaagaagaaacagaaaaaaaaagaaaataaggagaacaaggagaagcagatgagcagcagaaaggacaaggagggcgataaggagcgtaaaaagtccaaggataagaaggaaaagcctaagtccggggacgcaaaaagctcgtccaagtctaaaaggagccaaggccccgttcacataactgcaggatctgagcccgtgcctattggggaggatgaagacgatgatcttgaccaggagacgtttagcatctgcaaggagaggatgagacctgtgaaaaaggccctgaaacagttggacaaacctgataaagggctgaacgttcaggaacaactcgagcacacgagaaactgcctgctgaagatcggagacagaatcgcagagtgtctgaaagcctacagtgatcaagaacatattaagctgtggcgtcggaacctctggatctttgtgtctaagttcactgagttcgatgccaggaagcttcacaaactgtataagatggcccataagaagaggagccaggaagaggaggaacagaaaaagaaggacgatgtcaccggcgggaaaaaaccttttagacccgaagcttccggttcttcacgtgattcactgatctctcagtcacacacttcccacaatttgcacccacagaaacctcacctccctgcaagtcacgggcctcagatgcacggacaccctagagacaactacaaccatcccaacaaaagacatttcagcaatgccgatcggggcgattggcagcgggaaaggaagtttaattacggcgggggtaataacaatcccccttggggttcagatagacatcaccagtatgaacagcactggtacaaggatcaccactacggagaccggagacacatggacgctcacagatctgggagctatcgaccaaataacatgagccgaaagagaccctatgaccaatactccagcgatcgtgatcacagagggcatagagactattacgatcgatatgcaaaggggtgcgagacaccgggcgcgaacttgtgtcaagaactgtttttagggcgtaaatag

SEQ ID NO: 182923 - DNA, 6003 bp, synthetic construct
  misc_feature 1..6003: note = Description of Artificial Sequence: Synthetic coding sequence
  source 1..6003: mol_type = other DNA
atgaaggccgccgacaccgtgatcctgtgggcccggagcaagaacgaccagctcagaatctccttcccaccaggtctatgttggggggatcggatgccagacaaagacgacattaggctcctgccctctgccctgggggtgaaaaaaaggaagcgcggacctaaaaagcagaaagaaaacaaacctggtaaaccaaggaagagaaagaagcgggactccgaagaggaattcggctctgaaagagatgaatatcgagagaagtcagagtccgggggaagtgaatatggcacgggccccggaagaaaacgtcgtaggaagcacagagaaaaaaaggagaaaaagacgaagaggagaaaaaagggagaaggtgacggcgggcagaaacaggttgagcagaaaagctcagctacactacttttgacttggggcctggaggacgtggagcacgtcttctctgaggaggactatcacacgctgaccaactacaaagcattctctcagtttatgcgcccacttatcgcgaaaaagaaccctaaaataccgatgagtaagatgatgacaattttgggggctaaatggcgcgaatttagcgctaataatccattcaaaggaagtgctgccgccgtcgccgcagcagccgccgccgcggcagctgcagtggccgagcaggtcagcgccgcagtaagcagtgccacacccatcgctcccagcggccctcctgccctgcctccccccccagccgctgacatccagccacctcctatcaggagagctaagacaaaagaaggaaaggggccagggcacaagcgaaggagcaagtcgccaagggtgcccgatggcagaaagaagcttagagggaagaaaatggctccactcaagatcaagctgggcctgctcggagggaaaagaaagaagggaggaagttatgtttttcagtcagacgagggaccagagcccgaggcggaagagtctgacctggacagcggtagcgtccacagcgcatctggaaggcctgacggacctgtgagaaccaagaaactgaagcggggtcgccccggtagaaagaagaagaaagtgctgggttgtccagcggtggcgggcgaggaggaagtagatggctatgagacagaccaccaggactattgtgaggtgtgccagcagggaggcgagataattctttgtgacacttgcccgcgggcctaccatttggtgtgtctcgaccctgagcttgatcgcgctcctgagggaaaatggagctgcccccactgtgaaaaggagggcgtgcaatgggaagcaaaagaagaggaggaggagtatgaggaagagggagaagaagagggggagaaggaggaagaggacgaccacatggaatactgtagggtctgcaaggacggcggagaactactatgctgcgatgcctgcatcagttcctatcatattcattgtcttaatccacccctccccgacattccaaatggcgaatggttatgccctcggtgcacctgccctgtgctcaaggggagagttcagaaaattctgcattggcggtggggcgagcctccggtagcagtgcccgccccccagcaggctgacggtaatcccgatgtccccccgccccgaccccttcagggacgatccgagcgggaatttttcgtgaaatgggtgggcctgtcttactggcattgctcctgggctaaagagctgcagctcgagatatttcaccttgtcatgtatagaaactatcagagaaaaaacgatatggacgaacccccccctctggattacgggagcggagaagacgatggcaaatcggacaagcggaaggtgaaggaccctcactatgccgagatggaagaaaagtattataggttcggcataaagcctgagtggatgacagtacacaggataattaaccattctgtggacaaaaagggcaattaccactaccttgtaaagtggagggatctgccgtacgatcagtccacatgggaggaggatgaaatgaatatcccggaatatgaggagcataagcagtcttattggcgacaccgggagctgatcatgggtgaggacccagcgcagcccagaaaatataaaaagaaaaaaaaggagttacagggagatggtcccccctcttcaccgaccaacgatcccactgtgaaatacgaaactcagccaagatttattactgcgactggcggtaccctgcacatgtaccagctagagggactcaactggttgcgctttagctgggcccagggcactgatacaatcctagcagatgaaatgggattaggcaaaaccattcagaccatcgttttcctgtacagcctttataaagaggggcacaccaaaggtccgtttctggtgagtgctccccttagcaccatcatcaattgggagcgcgagttccagatgtgggccccgaaattctacgtggtcacctacaccggcgataaggactcccgcgctattattcgggaaaacgaattttcatttgaggacaatgctataaaaggcggaaaaaaggcctttaagatgaaacgagaagcacaggttaaattccatgtcctgctgacttcttacgagctcatcaccattgaccaggcagcgctcggctccatccgatgggcttgtctggtggtggacgaggcccataggttgaaaaataaccagtccaaattctttagagtgctgaacggttacaaaattgaccacaaattactgttgacagggaccccgttgcaaaacaatctggaggagctgttccacctgctgaattttcttacacctgaaagattcaataacctcgaaggtttccttgaggagtttgctgacatctcaaaagaggaccaaattaagaagcttcatgacttgttaggacctcacatgctccgccggctgaaagcagacgtatttaaaaatatgcccgctaaaaccgagcttatagtaagggtggagctatcgcctatgcagaaaaaatattacaaatacatactgacacggaattttgaagcactcaactccagaggcggcggcaatcaggtctctctgctgaacatcatgatggatctgaaaaaatgttgcaaccatccctatctttttcctgttgcggccatggagagtcccaagttgccctccggagcgtatgagggtggcgccctgataaaatctagtggcaaactgatgctgctccaaaaaatgctgcgcaagctgaaagagcaaggacatagggtgttaattttctcacagatgaccaaaatgctggacctgctggaagactttttagattatgaggggtacaaatacgagcgcatcgacggtggcattactggagctttgaggcaagaggcgattgataggttcaacgcccctggggcacagcagttctgctttttactctccacacgcgccggcggcctcggaatcaatctcgctaccgcagacacagtaatcattttcgattccgattggaacccccataacgatatccaggcctttagccgggctcacaggattggccaggcaaacaaagttatgatctacagatttgtgacccgagcttcagtggaggagcggatcacccaggttgcaaagaggaaaatgatgctgacacacctcgttgttcgcccgggtctgggctcaaaggcaggctcaatgtccaagcaggagcttgacgacatcctgaagttcggcacagaagagttgttcaaggacgagaacgaaggggagaacaaggaggaggattctagcgtgattcactacgacaatgaggctatagccaggctgctcgaccggaatcaggacgctacagaggatacagatgtacaaaacatgaatgaatacctgtctagctttaaggtcgcacagtacgttgtgagggaagaagataagatcgaagaaatcgaaagggaaatcattaaacaggaggaaaatgtcgaccccgactactgggaaaagctattgcgccaccattacgaacagcagcaggaagacctggcgagaaatctgggtaaaggcaagcgagtgcggaaacaggtgaactataatgacgcagcacaggaggatcaggataatcagagcgagtattccgttggctcagaagaagaagacgaagactttgatgaaaggcccgagggacgtcggcagagcaaacggcagctcagaaatgagaaggataagcccctgccccccctccttgccagggtaggcggcaacatcgaagtactcggcttcaatactcgacaaaggaaggccttcttaaatgccgtgatgcggtgggggatgcctccacaagacgccttcaccactcaatggctcgttagggacctgagggggaagaccgagaaggagtttaaagcctatgtgagccttttcatgcgtcatctctgtgagcccggtgctgacgggagcgagacattcgccgacggagtgcctcgcgagggcttgagcaggcagcaagtgttgactagaataggcgtaatgagtctcgtgaaaaaaaaggttcaggagtttgaacatatcaatggaagatggagcatgcccgagctgatgcctgacccctctgcagatagtaagcgatccagccgtgccagttcacccactaaaacctcccctactacgccagaggcctccgccacaaactcaccttgtaccagtaaacccgctacacccgctcccagcgagaagggcgagggcatccgcaccccactggaaaaagaagaagctgaaaaccaggaagagaaaccggaaaagaactctcggattggcgagaaaatggaaaccgaagctgacgccccatctcccgccccaagcctgggcgagaggttggagccccgcaagatcccccttgaagacgaggttccaggggtcccgggcgagatggagcccgagcccggttacagaggcgaccgcgaaaaaagcgcaacagagtcaacccccggagagcgcggcgaagaaaagcccttggatggacaggagcatagagagcgccctgagggggaaacgggggacctgggaaaacgcgaagacgtcaaaggcgaccgggagctcaggcccggtccgagagacgagccccggagcaacggcaggagagaggaaaagactgagaaaccccgatttatgttcaacatagcggatggcggctttacagagctgcacactctgtggcagaatgaagaacgtgcagctatctcgtccggcaagctaaacgagatctggcacaggcgacacgattattggctcttggctggtattgtgctgcacggctacgccagatggcaagacatacaaaacgatgcccagttcgcgataattaatgaacccttcaagacagaggctaataagggcaatttcctggagatgaagaacaagtttctagctaggcgattcaaactgttggagcaggcccttgtgatcgaggaacagctgcgccgcgcagcttacctgaatctaagccaggaacccgctcatcccgctatggcactgcacgcgagattcgctgaggcagaatgcttggctgaatcacaccagcacctgtccaaggaaagcctggccggcaacaagcctgccaatgccgtgctgcataaagtgttgaaccagctcgaagagctgttgagcgatatgaaggcggacgtcacaagacttcctgctacactgagtcgcataccacccatagcggctcgcttgcaaatgtctgaacggagtattctatcccgcctagcgtctaagggcaccgaaccccaccctactccagcgtatcctccaggcccgtacgcaacgcctccaggctacggggccgccttcagtgcagcgcctgtgggggcactcgccgcggcgggggccaactactcccaaatgccagccggcagcttcataacagccgctacaaatgggccaccggttctggttaagaaggaaaaggagatggtgggagcgttggtgtccgacggcctggaccggaaggagccacgggccggagaggtcatttgcatcgacgattag

SEQ ID NO: 182924 - DNA, 5901 bp, synthetic construct
  misc_feature 1..5901: note = Description of Artificial Sequence: Synthetic coding sequence
  source 1..5901: mol_type = other DNA
atgaaggccgccgacaccgtgatcctgtgggcccggagcaagaacgatcagctccgcatctcctttccgcccggcctatgttggggcgaccgtatgcctgacaaggatgatattagattattgccctcggctctgggagtcaagaagaggaaacgcgggcctaaaaaacaaaaagagaataagcctgggaaaccccgcaagagaaagaaacgggactctgaggaagagtttggatcagagcgtgacgagtaccgcgagaaatcagagtccggtggctcagaatacggaactgggcctggaagaaagcggaggcgcaaacatcgagagaagaaggagaaaaagacaaagaggcgaaagaagggcgaaggcgatggcgggcagaaacaagtggagcagaagagcagtgccaccctgctccttacttgggggctggaggatgttgagcacgtgttttctgaggaggattatcacactctaactaattacaaggcattttcccagtttatgcggccccttatagcaaagaagaaccccaagatcccaatgagcaagatgatgactatcttaggggccaaatggcgggagttcagtgctaacaatccctttaaaggtagcgccgcggccgtcgccgctgccgccgctgctgcggcagcagcggtcgccgaacaggtctccgcagcagtctcaagcgcaacacctattgcgccaagcgggccacccgctctacctcccccaccggctgcggacatccagcctccacctatccggagggccaagacgaaagagggcaaagggcctggacacaaaaggcgatccaaatccccccgagtcccagacgggcggaagaagctccgcggtaagaagatggcacccctgaaaattaaattaggcttgctggggggcaaacgaaaaaaaggcggcagctatgtttttcagtctgatgagggtcccgagccagaggcggaggaatctgatctcgatagcggatctgtgcattctgcctcgggacggccagacggccccgtccgaactaagaagttgaaaagaggccgccctggtaggaagaagaagaaggtgctcggatgtcccgctgttgcgggtgaggaggaggtcgatggttacgagaccgaccaccaggattattgcgaggtctgtcagcaaggcggagagatcatactctgcgacacctgtccacgggcttatcaccttgtttgtcttgaccccgagcttgatagggcccccgaggggaagtggagttgccctcattgcgaaaaagagggcgtccagtgggaagccaaagaggaagaagaggagtacgaggaggaaggtgaagaggagggcgaaaaggaggaagaagatgaccatatggagtactgtcgagtttgcaaagatgggggtgagctgctatgttgtgatgcatgcattagctcgtaccacatccactgtctcaacccccctctaccggacatcccaaatggtgagtggctttgtcctagatgcacttgcccagtgctgaagggtagagtgcagaaaatcctccattggaggtggggcgagccgcccgtcgccgtccctgccccccagcaggctgacggaaatcccgacgtgccacctcccagacctctgcaaggcagatctgagagagagttctttgtgaagtgggtgggtctgtcgtactggcattgctcctgggcaaaagagctgcagctggaaatttttcacctggtcatgtaccggaactatcagcgaaaaaacgatatggacgaaccccccccgcttgattatggctctggggaggacgatggcaagtctgacaaacggaaggttaaagaccctcactacgccgagatggaagagaaatactacaggttcggaataaaacccgagtggatgactgtacaccgtatcattaatcattccgtggacaagaagggtaattaccactacctggtaaagtggcgcgacctcccatacgatcagtccacttgggaagaggacgagatgaacattcccgaatatgaggaacacaagcaatcatattggcggcaccgggagctgattatgggggaggatcccgcccagcccagaaagtacaagaagaaaaagaaagagcttcagggcgatggccccccatcttcccccaccaatgaccccactgtcaagtatgagacccaacctagattcatcaccgccaccgggggcaccttacacatgtaccagctggaagggctgaactggctgcggttcagttgggctcaagggacggatacaattttggccgacgaaatgggacttgggaaaaccatccaaactatcgtcttcctctactcgctgtataaggaggggcacacgaagggcccttttttggtcagtgcccccttgtctactattataaattgggaacgtgagtttcagatgtgggccccaaaattctacgtggtgacgtacacgggcgataaggattctcgggccattattcgggagaatgaattcagcttcgaagataacgccatcaaaggcggaaaaaaagcttttaaaatgaagagagaggcccaggttaagttccacgtgctgctgacctcctacgagctcataactatcgaccaggccgccctgggaagcatcaggtgggcctgtttggtagtagatgaggcccaccgcctgaagaacaaccaaagcaagttttttcgggtgttaaacggatacaagatcgaccacaagttgctgctgacagggacccctctgcaaaacaatctggaagagctgttccacctcctcaattttctaaccccggagcgtttcaacaacttagagggtttcctcgaggagtttgccgatatctctaaggaggatcaaattaaaaaactgcacgacctcctcggacctcacatgctgcgtagattgaaagccgacgtttttaagaacatgcctgccaaaaccgagctcattgtgagagtggaactgtcacctatgcagaagaagtactataagtacattttgacccggaacttcgaagctctgaattcaagaggcgggggaaatcaggtgtctttgcttaacatcatgatggacctcaaaaagtgctgtaaccacccttatctctttcctgtggcagccatggagagccctaagctcccttctggagcatacgaagggggagctttgataaagagcagtggcaagcttatgcttctgcagaaaatgctccggaagttgaaggagcagggtcatagggtgttgattttttcacagatgacgaagatgctagacttactggaggatttcttggattacgaaggatacaagtatgaacgcattgatgggggcatcactggggccctccggcaggaggctatcgaccgattcaatgctccaggagcgcaacaattctgtttcctactttctacaagagcagggggtttgggcatcaacctggccaccgccgacactgttataattttcgatagcgattggaacccccacaacgatattcaggccttctctagggcccaccgcatcgggcaggccaacaaggttatgatataccggttcgtaacccgcgcgtcggtagaggaacgtattacccaggtcgccaagcgcaagatgatgctgacccacctggttgtccggccaggtctggggagcaaagccggaagtatgagcaaacaagagttggatgatatcctaaaatttggtactgaagagctgtttaaagatgagaacgaaggcgaaaacaaagaggaggactcaagcgtgatacactatgataatgaggcgattgcacgactgcttgatagaaatcaggacgcaacagaggacaccgatgtgcaaaacatgaacgagtacctcagctcattcaaagttgctcagtacgttgtgcgggaagaggataagattgaggaaatcgagcgggagatcataaagcaggaagagaatgtggatcccgactactgggaaaagctccttaggcaccactatgaacaacagcaggaggacctagcgcgtaacttaggaaagggaaagagggtgaggaagcaagtgaactataacgatgcggctcaagaggaccaggacaatcagtccgaatacagtgtgggttcagaggaggaggacgaggactttgatgagaggccggagggcagaaggcagtctaagcggcagctgcgaaacgagaaagataaaccgctcccccccctcctcgcgcgtgttggaggcaatattgaggtgttgggcttcaacactaggcagcgtaaggctttcctcaacgcggtgatgaggtggggaatgccaccacaggacgcgttcactactcagtggctggttcgagatctcagagggaaaacagagaaagagttcaaggcatacgtgtccttatttatgagacacctctgcgagcccggcgctgacggcagtgaaacgtttgcagacggggtgccccgcgaaggcctgtctaggcagcaggtgctgacccggatcggagtgatgagcctggtcaaaaagaaagtccaagaattcgagcatattaatggccgctggtcaatgcctgagcttatgcccgatccttccgcagactccaagcgcagcagccgggcctctagccctaccaagacgtccccgactaccccagaagcttccgcaacaaactccccatgtacatcaaaacctgctacgcctgcaccttctgaaaaaggggagggaattcgcacaccacttgagaaagaagaggctgaaaaccaggaagagaagcctgaaaaaaacagtcggattggggagaagatggaaactgaggccgacgcccctagccctgcaccttctctcggggaacgattggaaccaagaaagatcccactggaagacgaagtccccggcgtgccgggcgagatggagcctgaacccggctatcgcggagacagagagaagtccgaggacgtgaagggggatagggaactgcgacccggaccaagggacgaacctcggtcgaatggccggagggaggaaaagaccgagaagccacgatttatgttcaacatcgcagatgggggcttcacagagctacataccttgtggcagaatgaggagcgcgccgcaatttccagcggcaaattgaacgaaatttggcaccggcgccatgactactggcttcttgcagggattgtccttcacgggtatgctaggtggcaggacatccagaatgatgcgcagttcgcaattattaacgaaccatttaagacagaagccaataagggcaattttctcgaaatgaagaacaagtttctagccaggcgatttaaactgctggagcaggccctggtcattgaagagcagcttagaagggctgcttatttgaacctcagccaagagcccgcccatcccgcaatggcacttcacgctcgatttgccgaggctgaatgcttagcagagagtcatcagcaccttagcaaggagagcctggcggggaataagccagctaacgccgtgctacataaggtactgaaccagctggaggagctcctctccgacatgaaggctgacgttactcgactgcccgccacactgtctaggatcccaccaatcgcagctcggctccaaatgagtgaaaggagcatactgtctcggctggcttctaaaggcacggagcctcacccgactccagcataccctcctgggccctacgcgacgcccccgggatacggcgcagcctttagcgctgccccggtgggtgctttggccgcagcgggtgctaattatagccagatgcctgccgggtccttcatcaccgcagccacaaacggtccccccgtcctcgtgaaaaaggaaaaagaaatggttggcgcccttgtctcagacggtctcgaccggaaggagcctagggccggagaagtcatctgcattgatgactag

SEQ ID NO: 182925 - DNA, 6180 bp, synthetic construct
  misc_feature 1..6180: note = Description of Artificial Sequence: Synthetic coding sequence
  source 1..6180: mol_type = other DNA
atggccagccccctgcgggacgaggaggaggaggaggaggagatggtggtgtccgaagaagaagaggaagaggaagaggagggggatgaggaggaagaggaggaggtggaagcagccgacgaagatgatgaagaggacgatgatgaaggagttctgggccgggggccgggacatgataggggcagagaccgacactccccaccagggtgccatctgttcccacccccaccccctccgcctccccctctgcctccccctccccccccaccgccgcctgacaaggacgacatcaggctcctgcctagtgcactgggcgtgaaaaaacgcaaacggggccccaaaaagcaaaaggagaacaaaccaggcaagcctagaaaacggaagaagcgtgatagcgaggaggagtttggcagtgagagagacgagtaccgcgaaaagtcagagtccggagggtctgagtacggcacgggtccaggccgcaagaggcgccggaaacacagggaaaagaaagagaagaagactaagagacgaaaaaagggcgagggtgacggaggccagaagcaagttgaacaaaaaagcagcgccaccctactcctgacgtggggccttgaggacgtggaacacgtattctctgaagaggattaccacacgttgactaactataaggcttttagtcagttcatgaggcctctaatagcaaaaaagaatcctaaaataccaatgagtaagatgatgaccatcttaggcgctaagtggcgcgaattcagcgctaataaccccttcaaaggtagcgcggccgccgtggccgctgctgcggctgcagctgccgcagcagttgccgaacaggtgtccgctgcggtatcttcggccactcccatcgccccctcaggcccccctgctctacccccccccccagccgctgacattcagccccctccaatccgtcgtgcaaaaacgaaagaaggaaagggtcctggacacaagcgccggtcgaaatcccctagggttccggacggtaggaaaaaactcaggggaaaaaaaatggcacctctcaaaattaagctcgggttacttggtgggaagagaaagaaaggcggtagctatgtgtttcagtcggatgaaggccctgagcccgaggctgaggagtccgacctggatagtggctcagtacacagcgcaagcgggaggcccgatgggccagtgaggacaaagaagctgaagcgcggaagacctggcaggaaaaagaagaaagttctggggtgtccggccgttgcaggcgaggaggaggtggatggatacgaaaccgaccaccaggactactgtgaggtatgccaacaagggggggagatcatcctgtgcgacacctgccctagggcctaccatctggtttgtctggaccccgaactcgatcgggctcctgaaggaaaatggagttgtcctcactgtgagaaagagggcgttcaatgggaggcaaaggaggaggaggaggagtacgaggaagagggtgaagaagagggcgaaaaggaagaggaggacgaccacatggagtattgtcgcgtgtgcaaagacgggggagagctcctgtgctgcgacgcatgtatatctagttatcatattcattgcctcaatcctccattgccggacatcccaaatggagagtggttatgcccacggtgtacctgcccagtcctcaaggggcgtgttcagaaaatcctgcactggagatggggagagcctcctgtagccgtccctgctcctcaacaggccgacggaaaccccgacgtaccaccacctagaccactgcagggtcgtagcgagagagagttcttcgttaagtgggtcggactcagttattggcattgttcatgggccaaagaacttcaactggagatttttcatcttgtcatgtacagaaattatcagagaaaaaacgacatggacgagcccccacccctagactacggcagcggagaggatgatggtaaatcagataagcgcaaggttaaagacccccactacgctgagatggaagagaaatactaccggtttggaatcaaacctgaatggatgaccgttcaccgtattatcaatcattccgtggataagaaagggaattatcactacttggtgaagtggcgggatctaccctacgatcagagtacctgggaggaagatgaaatgaacatccctgagtatgaggaacataagcaatcctattggcgacatagagagttgattatgggagaggatcccgcccagccccgcaaatataagaagaaaaagaaggagctgcagggcgacggtcccccatcaagtcccacgaacgacccaaccgtgaagtacgagacacaaccacgcttcatcactgccaccggtggtaccctgcatatgtaccagctggaggggttgaactggctgaggttctcatgggcgcagggcacagataccatattagccgatgaaatgggcctagggaaaaccatccagactatagtctttctatattccttgtacaaggagggacatacaaaggggccctttctagtctcagcccctctgagtacaatcatcaattgggagagagagttccagatgtgggcgcctaaattttatgtggtgacgtataccggggataaagatagccgggcaatcatccgagagaacgagttttcatttgaggacaatgccatcaaagggggaaaaaaggcttttaagatgaagcgagaggcccaggtgaaattccatgtgctgctaacctcatatgagttgatcacaattgaccaggctgctctgggctccatcagatgggcctgcctggttgttgacgaagctcaccggctgaagaacaatcagagtaaattttttcgcgtgttaaatggctacaagattgatcataaattgcttcttacgggcacacctctccagaacaaccttgaagagttgtttcatctcttgaactttcttacacctgagaggtttaacaacttggaaggcttcctggaggagttcgctgatatcagcaaagaggatcagatcaagaaactccacgaccttctcggcccccacatgctgaggcgtctgaaggctgatgtgttcaagaatatgcctgctaagactgagctgattgttagagttgaactctcacccatgcagaaaaaatactacaagtatatccttacaagaaatttcgaggcactgaattctcgcgggggcggtaaccaggtgtctctgcttaatattatgatggatctcaaaaaatgctgcaaccatccatacctctttcctgtcgctgcaatggagagcccaaagcttccttctggtgcttatgaaggaggggctctgattaagagctccggcaagcttatgttactccagaagatgctgaggaagctcaaagaacaaggtcaccgtgtcctcattttctcacagatgacgaagatgctggaccttctggaagacttcctggattatgaaggttacaaatatgagaggatagatgggggaattacgggggcactccgacaggaggcaatcgatcgattcaatgccccaggggcgcaacagttttgctttctgctcagcacgcgggcaggaggactggggatcaacctagccaccgccgacactgtgataattttcgatagcgactggaacccccacaatgacattcaagcctttagcagggcccacagaattggtcaggcaaataaagtgatgatctatagatttgtcacaagagcctccgtagaggagcgtatcacccaggtcgctaaaagaaagatgatgctcacccaccttgtggtgcgccccggcctcggctctaaggccggatctatgtctaagcaggagctggatgatattctgaaatttgggacagaggaactttttaaagatgaaaacgagggagaaaataaggaggaagactcttcagttatccattatgacaacgaggccattgcaaggcttctggaccgtaaccaggatgcaactgaagatacggatgtacagaacatgaacgaatacctgagctccttcaaggtcgcccagtacgttgttcgcgaggaggataagattgaagagattgagagggagatcattaagcaggaggaaaatgtggaccctgactactgggagaaattgcttcgacaccactatgaacagcagcaggaagatctggccaggaatctggggaagggcaaacgcgtgagaaaacaggtcaactacaacgatgctgcccaggaagaccaagataaccagtccgagtactctgttggatccgaagaggaagacgaagacttcgacgagcgtcccgaggggaggcggcagtcaaagagacagctaagaaacgagaaagataaacccctgcctcccttattggcgagggtgggggggaacatagaggttctggggttcaatacaagacagagaaaggcttttctcaatgccgtgatgcggtggggtatgccacctcaagacgctttcacaacacagtggttagtgcgagatcttcggggaaagactgaaaaggaattcaaagcctacgttagcctgttcatgcgtcacctgtgcgaacccggcgccgacggaagtgagacctttgccgatggggtgccgcgggaggggctgtcacgacaacaggttctgacgcgcattggcgtgatgtccttagttaaaaaaaaggttcaggagttcgaacacattaacggtcgctggtcaatgccagagctcatgccagatccgagtgccgactcgaaaaggtcgtctcgggcttcatctccgacaaagacgagccctactacaccagaagcgagcgcgacaaacagtccgtgcacatccaagcctgccacacctgcaccttcagaaaagggcgaaggaattagaacacccctggaaaaggaagaggccgagaaccaggaagagaaaccggaaaagaactccaggataggcgaaaagatggaaactgaagcagacgcccctagtcccgccccatccctcggggaacggttggagccaaggaagatcccattagaagatgaggtgcctggggtccctggcgagatggaacctgaacccggctatcggggggatcgggagaaatccgctaccgaatcaaccccaggtgagagaggtgaggaaaaacctttggacggccaggagcacagggaacggcccgagggggaaacgggtgacttaggaaagagagaggacgtgaagggcgacagagaactccggcctgggcccagagacgaaccgaggtccaacggccgtagagaagagaagacggagaaaccacgctttatgtttaatatcgctgacggtggattcacagagttgcatacgctttggcagaatgaggaacgggcagcaattagttccggaaaattaaatgagatatggcatagacgtcatgattattggttactagcgggcattgtgctgcacggatatgcacgctggcaggatattcagaatgatgcacagtttgcaatcattaacgagcccttcaaaacggaagctaataaagggaatttcttagagatgaagaataagtttctcgcacgacgttttaaactgctcgagcaagcccttgtgatcgaggaacagctccggagagccgcgtatctcaacctttcacaagaacctgcccacccagctatggcgttgcatgctagatttgccgaggcagagtgcttggccgagagccaccagcatctcagcaaggagagtctggccggcaataagcctgccaatgcagttttgcacaaggttctgaatcagttagaggaactgctgtcagatatgaaggccgacgtaacccgccttcctgccaccttgtcgagaatacccccaattgctgctcggctgcagatgtctgagcgatccattctcagccggctggcatcaaagggcactgaaccgcaccccactccggcctaccctccaggcccctacgccacgccacccgggtacggggccgctttcagtgcagctcccgtgggggctcttgctgccgccggcgccaattatagccagatgcctgctggaagtttcattaccgccgccacaaatgggccgccagtcctcgtgaagaaggagaaagaaatggtcggtgcgctcgtaagcgacggcttagataggaaggaaccccgcgccggagaggtcatctgcatcgacgactag

SEQ ID NO: 182926 - DNA, 5865 bp, synthetic construct
  misc_feature 1..5865: note = Description of Artificial Sequence: Synthetic coding sequence
  source 1..5865: mol_type = other DNA
atgcggggccccgtgggcaccgaggaggagctgccccggctgttcgccgaggagatggaaaacgaggatgaaatgtcagaggaagaggatgggggactagaagccttcgacgacttctttccagtggagccagtgtcactgccaaaaaagaagaagcctaaaaagctcaaggagaacaaatgtaagggcaaacgaaaaaagaaggaggggtccaatgacgagctatccgaaaacgaggaagacctggaagaaaagtcagagagcgagggttccgactacagccccaataagaaaaagaagaaaaaactgaaagacaagaaggagaagaaggccaagcggaagaagaaggatgaggatgaggacgacaatgacgacggctgcctcaaggagcccaaaagttcgggccagctgatggctgagtggggcttagatgatgttgattacctcttctccgaggaggactatcatacactcacaaattataaggcatttagccagttcctgaggccactcatcgctaaaaaaaacccaaaaataccgatgagcaaaatgatgaccgtcttgggagccaaatggagggagttcagcgctaataatccattcaaagggtcttccgctgcagctgctgctgccgccgtggctgccgcagtggaaacagtgacaatatcacccccattagctgtgtcccccccccaggtaccccagccagtgcctatcaggaaggccaaaaccaaagagggaaaggggcctggggttcggaagaaaattaaaggctcgaaagatggtaagaaaaaagggaagggcaagaagacagccgggctgaagttcaggtttggcgggatctccaacaagagaaaaaaaggctcatcttctgaggaggatgagagagaggagagtgatttcgacagcgccagcatacacagtgcttccgtgcggtcggagtgtagcgcggctttggggaagaagtctaagaggcggcgtaaaaagaagcggatcgacgacggtgatggttacgaaaccgaccaccaagactattgtgaagtgtgtcagcaggggggggagatcatcctgtgcgatacctgccctagggcgtaccacctggtttgtctcgacccagagcttgagaaagcacccgaaggcaaatggagctgtccccattgcgagaaagaggggatccagtgggagccaaaggacgacgacgacgaggaggaggaagggggatgtgaagaggaggaggacgaccacatggagttttgccgcgtttgcaaggatggaggagagctgctttgctgcgacgcttgtccttctagctaccacttgcattgccttaatccccccctgcccgaaatcccgaatggcgaatggttgtgtccgagatgtacgtgccctcctctgaagggaaaggtccagcgcattcttcactggaggtggacagagccacccgccccattcatggtgggactcccggggccagatgtggagccttccctcccgccacctaagccactggagggcattcctgagagggaattctttgtcaaatgggctggtctatcttactggcactgcagctgggttaaggaactgcagttagaattgtatcatacagtgatgtacaggaactatcaaaggaagaacgacatggatgagcctcctcccttcgactacgggtctggggatgaggatggcaaatccgaaaagcggaaaaacaaagacccattgtacgcaaaaatggaggagcggttctatagatacggaattaagcccgagtggatgatgatccaccggatactaaatcacagcttcgacaagaaaggggatgtccattacctaatcaagtggaaagatctaccatatgatcaatgcacttgggaaatcgacgacatcgacatcccatactacgacaatctgaaacaagcctactggggccaccgcgaattgatgcttggggaggacactcgactgcccaagcgtctgctcaaaaaagggaaaaaattgagggatgacaagcaggagaagcctcctgacacccctatcgtcgatcccactgtgaagtttgacaaacagccttggtatatcgacagcaccggaggaacactccacccatatcagttggaagggttgaattggctacgtttctcctgggcccagggaacagatactatcttagctgatgaaatgggccttgggaaaaccgtgcagacaatcgtgttcttatattccttatacaaagaggggcatagcaaggggccttatctggtctctgcccccctctccacaatcatcaattgggagcgagaatttgaaatgtgggcacctgatttctacgtggtgacctatactggtgataaagagtcccggtcggtgattcgcgaaaacgaattctcattcgaagataatgctatccgatccggaaagaaggtcttccgaatgaagaaggaggttcagattaagttccatgtgcttctcacgtcctatgagcttattaccattgaccaggccatcttgggaagtatcgagtgggcctgtttggtagtggatgaagcacaccgcctgaagaacaatcagagcaaatttttcagagtgttgaactcctataagatagactacaagctgctgctgaccggcactccactgcagaataacctggaggagctgttccacctccttaacttcctgactccagagcggttcaataacctcgaaggcttcctggaagaattcgcagacatctctaaggaggatcaaattaaaaagctgcatgacctactaggtccgcacatgctcagaagactgaaagctgatgtgttcaagaacatgcctgcaaagacagaactcatcgtccgtgtggaactcagtcagatgcagaaaaaatattacaagtttatcctgacgaggaactttgaagctcttaactctaaaggcggcggaaaccaggttagtctcctgaacataatgatggacttgaagaagtgttgcaatcacccttacctgttccctgtcgcagccgtggaagcccccgtgctgcccaacgggtcttacgacggctcttcactcgtgaaaagcagcggcaaactcatgctgctgcagaaaatgctgaagaagttgcgcgacgagggtcatcgtgtgcttatcttttctcaaatgactaagatgttggatttactcgaggacttccttgagtatgagggctataagtacgagagaattgacggcggcataaccggaggtctcaggcaagaggctatcgaccgctttaacgcacctggggcacagcagttctgctttctgttgtccacgcgcgctgggggactgggaataaatctggcgaccgcggatacagtgatcatctacgactcagactggaatccacataacgatattcaagccttcagcagagcacaccggatcggacagaataaaaaggtgatgatatatcgcttcgtgacccgcgcttccgtcgaggagaggatcacccaggtggcaaagaggaaaatgatgcttacccacctggtggttaggcctgggctgggatccaagtctgggagcatgaccaagcaggaattggatgatattcttaagtttggcaccgaagaactgttcaaagacgatgtcgagggtatgatgtctcagggccagaggcctgtcactcctataccagatgtgcagtcatctaagggaggcaacctcgccgccagcgcaaagaagaaacacggttctactccaccgggagacaataaggatgtggaggattcaagtgttattcactacgatgatgctgcaatctcgaagttgctcgacagaaatcaggacgcaactgacgacacagaattacagaacatgaatgagtatctttctagctttaaggtggcccagtacgtggtcagggaggaggatggggtcgaagaggtagagcgggagatcatcaaacaggaggagaacgtcgaccctgattactgggagaagctcctgagacatcattacgaacagcaacaagaagatctggctcgtaacctaggaaaaggcaaacggattagaaagcaagtcaattacaatgatgcctcccaggaagaccaggagtggcaggacgaactctctgacaaccaaagtgagtactccatagggagcgaggacgaagacgaggacttcgaggagaggccggaaggacagagcggacggcgccagagcaggcgccagctcaaatccgacagagataagccgctgccacccttgctggctcgcgtgggggggaatatagaggtgctcggttttaatgcccggcagagaaaggcctttctcaacgctattatgaggtggggtatgcccccccaggacgcgttcaacagccattggctagtgcgggatctccgcggcaaaagtgagaaagaatttcgggcttacgtcagtctgtttatgcggcacctgtgtgagccaggcgctgatggggcggaaacctttgccgatggggtcccaagggagggcttgagtagacagcacgtcctgacacggattggagttatgagcttagtcagaaagaaggtgcaggagttcgaacatgtcaatggtaaatacagtacgccagatctgatacctgagggtcctgagggaaaaaagagtggagaggtgatcagtagtgatcccaacacacctgtgccagcttcccccgcccacctgttgcccgcccccctagggctgcccgacaaaatggaggcccagcttggctatatggacgaaaaggatcctggcgcacagaaaccgcggcagccactggaggttcaagctctcccagctgcccttgatagggtagaatcggaggacaagcacgaaagtccggcctccaaggagcgagctcgggaggaaagacccgaagagacggagaaggcaccccccagcccagaacaactaccaagggaagaagtgcttccggaaaaagagaagatactggacaaacttgagctttcactgatccattctcggggggattcatcagagttacgacctgatgacacaaaggcagaagagaaagagcccatcgagacccagcagaacggcgacaaagaagaagacgatgagggcaagaaggaagacaaaaaagggaagttcaaatttatgtttaacatcgccgacggcggattcaccgaactacataccctctggcagaatgaggagcgcgccgccgtctcttcagggaaaatctacgatatttggcaccgccgtcatgactactggctattggcagggattgtgactcatgggtacgccaggtggcaggatatccagaatgatccaaggtatatgatactcaacgaaccttttaagtcagaggtgcacaaaggcaactatcttgaaatgaagaataagttcctggctcgcaggttcaaattgttggaacaagccctggttatcgaagagcagctgagacgggctgcctatcttaacatgacccaggaccctaatcatcccgcgatggccttgaatgcaaggctggccgaggtggaatgcctcgctgaaagccaccagcatctgtccaaagagtctctggctgggaataagccagcaaacgccgttttgcacaaggttctgaaccaactggaggagctgctgtctgacatgaaggcggatgttacccgactgcccagcatgctgtccaggatcccaccggttgcagctagactacaaatgtcggagagatctattctctcgagattgaccaatagggcaggcgaccccaccatccagcagggagcctttggttcaagtcagatgtactccaataatttcggtcctaatttccgaggacccggccccgggggtattgtgaactacaatcagatgcccttgggcccttatgttaccgacatctag

SEQ ID NO: 182927 - DNA, 2427 bp, synthetic construct
  misc_feature 1..2427: note = Description of Artificial Sequence: Synthetic coding sequence
  source 1..2427: mol_type = other DNA
atgatctaccggttcgtgacccgggccagcgtggaggagcggatcacccaggtcgccaagagaaagatgatgctaacccatctcgtggtccgccctggactggggtccaagtccgggagtatgacaaagcaggagctggacgacatcctgaagtttggcaccgaagagctgtttaaggacgacgtggaaggaatgatgtcacaagggcaacggccagtgacacccatacctgacgtgcagtcctctaaagggggcaacctggcagcctctgcaaaaaagaaacacggctcaactccaccaggtgacaacaaggatgtggaagacagctccgtcatccactacgacgatgcggccatcagcaaattgctcgaccgcaatcaagatgccaccgatgacactgagctccagaacatgaatgaatacctgtcttcttttaaggtggctcaatacgtggtgcgcgaggaggatggggtagaagaggtcgagcgagaaatcattaaacaagaggagaatgtggaccccgactattgggaaaaacttctgcgccaccactacgagcagcagcaggaagatttggcccggaatctgggaaagggaaagcgtattcggaagcaggtcaactacaacgatgcaagccaggaggaccaggagtggcaggacgagttgagtgacaaccaaagcgaatactcaatcggatccgaggatgaagacgaagactttgaagaaaggcctgaagggcagtcagggagaaggcagagccgaagacagttgaagtctgaccgggataaacctttaccccctttgttggcacgcgtgggaggaaacattgaagttctgggcttcaacgcccggcaaaggaaggcctttcttaatgctatcatgaggtggggcatgcccccccaagacgccttcaattcccactggctggtgcgtgatctgaggggcaaaagtgagaaggagttcagggcctatgtgtctctgtttatgcggcacctgtgcgaacccggagccgacggcgcagagaccttcgctgatggagtgccccgtgaagggttgagcagacagcatgtcctgacgagaattggcgtcatgagtttggtccggaagaaggtgcaggagtttgagcacgtcaacgggaagtattctaccccagatctgattccagaggggcctgaaggaaagaaatccggggaggtaatttcttcggacccaaacaccccggtaccagcctctcctgcgcatttattgcccgctcctctgggactaccagacaagatggaggcccagctggggtacatggacgagaaagatcctggcgcacaaaaaccacgtcagccacttgaagtgcaggcgctccccgcagctctcgatcgagttgagagcgaggacaagcacgagtcccccgcatcaaaagagcgagccagagaggagcggccggaagaaacggagaaagcgccaccaagtccagaacagctccctcgagaggaagttctcccagagaaggaaaaaatcttggataagcttgaactctctctaattcactcccggggggattcatctgaactccgccccgacgacacaaaagcagaggaaaaggagccaatagagacgcaacagaatggagacaaggaggaagatgacgaagggaagaaagaagacaagaagggcaaattcaaatttatgtttaacatcgccgatggaggatttacagagttacacacgttgtggcagaatgaggagagagcagctgtgagcagcgggaagatctacgacatttggcataggcgtcatgactattggctgttggcgggcatagtgacacacggatacgcccggtggcaggatatccaaaatgatcctcggtacatgatattgaacgagccatttaaaagcgaagtgcacaagggcaactacctcgagatgaaaaacaaatttcttgcaaggcgctttaagctcttggaacaggccttagtcattgaagaacagctgagaagggctgcctacctgaatatgacccaggaccctaatcatccggccatggcgctgaacgcccgcctcgcggaggtcgagtgtttggcagagtcccaccaacatctcagtaaagagtcactggctggaaacaagccagctaatgcggtgctccacaaggtcttgaatcagttagaagagctcctttcagacatgaaggccgacgtgacccgtctgccctctatgctgtctagaattccgcctgttgccgccaggcttcagatgtcagagcgatccatcctgtcccgactaactaatagggcaggggacccaactattcagcaaatctcttctcggcccagagattttcccgtgctgcagcgctcgtttcccgcggaacccagactccccggtcacttgcctgatccccatggccgggaaaaactgccaccgttctag

SEQ ID NO: 182928 - DNA, 3588 bp, synthetic construct
  misc_feature 1..3588: note = Description of Artificial Sequence: Synthetic coding sequence
  source 1..3588: mol_type = other DNA
atggtgggcctgcccggccccgacgtggagcccagcctgccccccccaaaacctttagaagggatcccagagcgggaattcttcgtcaaatgggcgggcctcagttattggcattgcagctgggttaaggagctccagctcgaactgtaccacaccgtgatgtaccggaactaccagaggaagaacgatatggatgagcctccacccttcgattacggatccggtgatgaagatggaaagagcgagaagaggaagaacaaggatccactgtatgctaaaatggaagaaaggttttaccggtacggcattaaaccagagtggatgatgatacatcggatcctcaaccactcattcgataaaaaaggcgacgttcactatttaattaagtggaaggacttaccttatgatcagtgtacgtgggagatcgatgatatcgacatcccctactacgacaatcttaagcaggcttattggggccatagggaacttatgttaggcgaggacactcgcctgccaaaaagattgctcaagaaggggaagaagctgcgagacgacaagcaggagaagcctcccgacactcccattgttgatcccacagtaaaatttgacaagcaaccctggtatatcgattcgaccgggggcacgctgcacccataccagctggaaggcttaaactggctaagattctcttgggcacaaggaacagacacgatcctcgccgatgagatgggactcggcaaaacagttcagaccatagtgttcctatatagcctgtataaggaaggccacagcaaaggtccttacctggtaagcgcacccctcagtaccatcataaattgggaacgcgaatttgaaatgtgggcacctgacttctacgtcgtcacgtatactggtgacaaggaatctcgatctgtcatccgcgagaatgaatttagttttgaggataatgcgattcggagtgggaagaaagttttcagaatgaagaaagaggtgcaaataaaattccatgtacttcttacttcctacgaattgatcaccattgaccaggccattctggggagtatcgaatgggcctgcttggtggtcgacgaagcccatagactgaaaaacaatcaatctaagttctttagagtgctcaactcttacaagatcgattataaactgctgctcaccgggactccccttcaaaacaacttagaagagctattccatctgctaaatttcttgacccctgaacggtttaataacctcgaggggtttctggaggagttcgccgacatctcaaaagaagaccagataaagaaactgcatgacttgttgggaccccacatgctgagacgtctaaaggccgatgtctttaaaaacatgcccgctaaaacggaactgatcgtcagggttgaactgtcccagatgcagaaaaaatactataagttcattctgacgcgcaacttcgaagctctgaattctaagggcggtggtaatcaggtgtccctacttaacatcatgatggatttgaaaaaatgctgcaatcacccgtatctttttcctgttgcggccgtagaagcccccgtgctgcctaacggatcctatgatggcagctccttagtcaaatcaagcggtaagctgatgttgctccagaaaatgctgaaaaagttgagggacgaaggacatcgggtcctgatattttcacaaatgactaagatgctggatctgctcgaggactttcttgagtacgagggctacaagtatgaaagaattgacggcggaatcaccgggggcctacggcaggaagctattgatcgttttaatgcccccggagcccagcagttttgtttcctcttgtcgaccagagcggggggactgggcattaatctcgcaaccgcggataccgttattatctatgactcagattggaatcctcacaatgacattcaggcctttagtagagcacacagaattgggcaaaacaagaaagttatgatatacagattcgttacacgtgcaagcgtggaagagcgtattacccaggtagcaaagcggaagatgatgctcacccatctggtcgtgaggcctggcctgggctccaaaagcggttctatgacaaagcaggagctagatgacattctcaagttcggaaccgaagaactgtttaaggatgatgtggaggggatgatgtcacagggccaacgaccagtgacacctattcctgatgttcagtccagcaagggaggtaatctggccgcaagcgccaaaaaaaaacacggttcaaccccacctggtgacaacaaggacgtcgaagattcatccgtcatccactacgacgacgccgcaattagcaagctgctcgatagaaaccaggacgctacagacgacacggagctgcagaatatgaacgaatacctttcatctttcaaggtggcacagtatgttgtcagagaggaagatggggtcgaggaagttgaacgcgagattattaaacaggaagagaacgtggatccagattattgggaaaagcttctccgccaccactacgagcagcagcaggaggacctggctagaaacctcggcaagggtaaacggatacgtaagcaggtcaattataatgacgcctcccaggaggatcaggaatggcaggacgagctctcggataaccagtccgagtactcgatcggcagcgaggatgaagacgaggatttcgaggaacggcctgaaggacagtctggaaggcgccagagtaggagacagctcaagagcgacagagataaaccacttcccccactcctggctcgcgtggggggcaatattgaagtgctcggatttaatgcccgacagcggaaggctttcctgaacgccatcatgcgatggggcatgccaccccaggatgctttcaatagccactggctggtccgcgatctgagagggaagtccgaaaaggagtttcgggcctacgttagcctctttatgaggcacctctgcgaaccaggcgcggatggagctgagactttcgccgacggagtgccgagagaaggcctgtctaggcaacatgtgctcaccaggatcggagtcatgagcttagtgcgtaaaaaagtgcaggagtttgagcacgtcaatggcaagtatagcacaccagatctgatacccgaaggccctgaggggaagaaatcaggtgaggttataagttccgatcccaatacacctgttcccgcctcacctgcacaccttctgcctgctccacttggtttgccggacaagatggaggcccagctgggatacatggacgagaaagatcctggcgcccagaaacccagacaacccttagaagtgcaggcacttcccgccgccctcgatagggtggagtctgaggacaagcacgagtcaccagcttccaaggagagagctcgtgaggaaaggccggagcaaacaccaccagctcaggcgcaactcaggggcgggagacctctctctcccgggactgcacccggatggcagagagagggcccgggactaggcgcacgacgggcgaggagcccctcacagggtggccccggaggcggaggcagcagctttggatctcaggccccactgtag

SEQ ID NO: 182929 - DNA, 2427 bp, synthetic construct
  misc_feature 1..2427: note = Description of Artificial Sequence: Synthetic coding sequence
  source 1..2427: mol_type = other DNA
atgatctaccggttcgtgacccgggccagcgtggaggagcggatcacacaggtggccaaaagaaaaatgatgctgactcatctggtcgtgcggccaggcctgggatccaaatctggttcaatgacaaaacaggaattagatgacatcctgaagtttggaactgaggagttgttcaaggacgatgttgaagggatgatgtcccagggccaaaggccagtgacacctataccagacgtccagagtagcaaggggggaaacctggccgccagcgcaaagaaaaagcacggctcgaccccacctggagataacaaggatgtggaagactcctcggtaattcactacgatgatgccgctattagtaagctgctcgaccggaatcaggacgctaccgacgatacagaactccagaatatgaatgagtacctgtctagtttcaaagtggcccagtatgttgtgcgggaggaggacggggtcgaagaggttgagcgggagataattaagcaagaagagaacgtggaccccgactattgggaaaagctcctccgccaccattacgagcagcagcaagaagacctggcccgaaaccttggaaaggggaagcggatcaggaaacaggtgaactataacgatgcctcccaagaagatcaagagtggcaggacgagctgagcgataaccagtctgaatattctattgggagtgaggacgaagatgaggatttcgaggagaggccagagggccagtcaggaagaagacaatcccgtagacagctgaaatcggacagagataagccactgcctcccctgctggcgcgggtaggcggtaatatcgaggtgctgggcttcaatgccaggcagaggaaggcattcctcaatgccatcatgagatgggggatgcctccacaggacgcattcaactcccactggctggttcgagacctccggggcaagagcgagaaagagtttagggcctatgtgtccctgtttatgcgccatttgtgcgagcctggcgctgatggcgcagagacctttgcagatggtgtgccacgagagggcttatcacgccagcacgtgttgacgagaatcggggttatgtctcttgtaagaaagaaggtgcaggagtttgaacatgtgaacggcaaatactcaactcccgatcttatcccagaggggcccgagggcaagaaatctggggaagtaatcagttccgaccctaacacccccgtgccagcttccccagcccacttattgcctgccccacttgggcttcctgataagatggaggctcaattgggctatatggacgaaaaagatccgggcgctcagaaaccacgccagccactggaagtccaggccctaccagccgcattggatcgtgtagagtctgaggataaacacgaatcccctgcatctaaagagcgtgcccgcgaggagcgccccgaagagacggagaaagcccctcccagccccgagcagctccccagggaagaggtgctgcctgagaaagaaaagatccttgataagttggaactaagcctcatccattcacgcggggattctagcgagctgcggcctgatgataccaaggccgaagagaaggagccgatcgagacccaacagaacggggacaaagaggaggatgatgaggggaaaaaagaagacaagaaagggaagttcaagtttatgttcaacattgccgatggaggatttactgagttacacacattatggcaaaatgaggaacgagcagcggtatcaagcggcaagatctacgacatctggcaccggagacatgactactggctgctcgccggcatcgtgactcacggttatgcaagatggcaggatatccagaatgatccccgctatatgattctgaacgaaccttttaagagtgaagtacataagggaaactacctcgaaatgaaaaacaagttcctcgcacgaaggttcaagcttttggaacaggccctggtgattgaagaacagctgagacgcgccgcctacctaaacatgacccaggaccctaatcaccctgccatggccctgaatgctaggcttgcggaggtagaatgtcttgccgaatcccatcagcacctgtccaaggagtctctagcgggtaataaaccggcaaatgcggtactccacaaggtgctgaaccaactggaagaactgctgagcgacatgaaggcggacgtcacccgcctcccttcaatgctatctagaatacctcccgtggccgccagattacagatgtctgagagaagtattctgagcagattgactaatcgcgccggcgatcccacgatacagcagatatcgtcccgcccccgggatttccccgtgcttcaacggagtttccctgccgagcccagactacccggtcacctcccagacccgcatggtagagaaaagctacccccattttag

SEQ ID NO: 182930 - DNA, 3288 bp, synthetic construct
  misc_feature 1..3288: note = Description of Artificial Sequence: Synthetic coding sequence
  source 1..3288: mol_type = other DNA
atgatccaccggatcctgaaccacagcttcgacaagaagggcgacgttcattatctgattaagtggaaggatctcccttacgatcagtgtacatgggaaattgatgatatcgatattccttattacgacaacttaaaacaagcctactgggggcaccgcgagctcatgctaggcgaggatacgaggctgcctaagcggcttcttaagaaaggtaaaaagctcagggacgataaacaggaaaagccccccgacacccccattgtggaccccaccgtcaagtttgacaaacagccttggtacatcgattccactggcggcaccttgcacccctaccagctcgaggggttgaattggttaaggttttcttgggctcagggcactgatacaattctagctgacgagatgggacttgggaagacagtccagacgatagttttcctgtactcactctacaaagagggtcacagtaagggcccttatctggtaagcgcacctctctcaacaatcataaattgggagagggagtttgaaatgtgggctcctgacttctacgtggtgacttacacgggcgacaaggaaagccggtccgtgattcgagagaacgaattctcatttgaggataatgctattaggtccggtaagaaagtttttcggatgaaaaaagaggtacagattaaattccacgtgcttctgacttcctatgagcttatcacaatagatcaggccatcctaggaagtatcgaatgggcgtgcctcgtggtggacgaagcccaccgtctgaagaataatcagtcgaaattttttagagtcctgaactcctataagatcgactacaagctcctgctcactgggacccccttgcaaaataatctagaagagctcttccacttgctgaactttctcacgccagaacgctttaacaacctggagggcttcctggaagaatttgctgacatctccaaggaggatcagatcaagaaattacacgatctgctgggcccccacatgctgcgaaggctcaaagctgatgtttttaaaaatatgccagctaagacggagcttatcgtgcgagtagagctttcacagatgcagaagaagtattacaaattcatcctcacccgcaatttcgaagccctaaacagtaagggcggcggaaatcaagtcagcctgctcaacatcatgatggatctcaagaagtgttgcaatcacccctacttatttccagttgccgccgtggaagctccagtacttccaaacggaagctacgacggaagcagtttggttaagagctccggtaagcttatgctgttgcaaaaaatgttgaaaaaactgagagatgaaggacacagggtgttgattttctctcaaatgaccaaaatgctggatctgctggaggatttcctcgagtacgagggctacaagtatgagcgaattgacgggggcatcaccggcgggctgagacaagaagctattgacaggtttaatgcacctggagcgcagcagttttgcttcctgctatccacgcgggcagggggcctcgggattaacctggcaaccgctgatactgtgatcatttatgatagcgactggaaccctcataatgatattcaagccttctcccgcgctcacaggatcggacagaacaagaaagtaatgatttaccggttcgttacgagggcttccgtagaagagagaataacgcaggtggcaaagcggaagatgatgcttacccacctcgtggtgaggcccggcctcggatctaaatcaggttccatgacgaaacaggaactcgacgacattttgaagttcggtaccgaagagctgtttaaagacgatgtggaggggatgatgtcgcagggtcaacgcccagtcacgcccatacccgacgtgcagagctctaagggtgggaacctcgctgcttcagccaaaaagaagcacggctctactcccccaggcgacaacaaggatgttgaggattcatcagtgattcactacgatgacgccgctatcagcaaactgttggatcgtaatcaggatgctacagatgatactgagctgcaaaatatgaacgagtatctgtcctcatttaaggtggcccagtacgtcgtcagggaggaagatggcgttgaggaagtcgaacgggagataatcaaacaggaagagaacgtcgacccggactactgggagaagttattgcgccaccactacgagcagcagcaggaggacctcgcccgcaatctcggtaagggcaagcggattcgcaagcaggttaactacaacgatgcttctcaggaagaccaggaatggcaggatgaactgagcgacaatcagtccgagtactccattggatctgaggacgaggacgaagacttcgaggaaagacctgagggccagagcggccggcgtcagagtcgcagacagctcaaaagcgaccgtgacaagccactgccaccactgctggcccgtgtaggaggcaacatagaggtgctggggtttaacgctcgtcagcggaaagccttcctgaacgctataatgcgctggggaatgcctccgcaggacgcctttaattctcattggctcgtgcgggacctgcgcggcaagagtgaaaaggaattcagggcatatgtttccctttttatgagacacctttgtgagccgggagctgacggagctgaaacctttgccgatggggtacctcgcgaagggctttccagacagcatgtcctcacacgcatcggagtaatgagcttggtgcgaaagaaggtccaggaatttgaacacgttaatggcaagtactcaacacccgatttaattcctgaagggcccgagggcaagaaatctggggaagtgatcagcagtgaccccaatacacctgtacctgcgagcccagcgcatcttttgcctgccccccttgggttacctgacaaaatggaagctcaactggggtatatggatgaaaaggaccctggagctcagaagccaaggcagcccttagaagtgcaggctttgcccgccgcccttgaccgtgtcgagtcagaagacaagcatgagagtccagcctcgaaggaaagagcccgggaggagcggcccgaagaaaccgaaaaagcgcccccaagtccagaacaattacccagagcctcatgctccgtcacgcaggccggagttcagtggaggcataggctgatgggagcttttatcagttcagctcaggctacactccccccccagctcccagagcagcgccggtgctttcttcgcaggcgtagaagctggacaagctggtcttag

SEQ ID NO: 182931 - DNA, 3258 bp, synthetic construct
  misc_feature 1..3258: note = Description of Artificial Sequence: Synthetic coding sequence
  source 1..3258: mol_type = other DNA
atgatccaccggatcctgaaccacagcttcgacaagaagggcgacgtccactatctgatcaagtggaaagacttaccttatgatcagtgcacgtgggaaattgacgatattgatatcccctactatgacaacttaaaacaggcttactggggccatcgtgagctcatgttgggggaagatacacgactgccaaaaaggcttcttaaaaagggaaaaaaactccgggatgacaagcaggaaaagccccccgacacccctatcgtcgacccaactgttaaattcgataagcaaccatggtacattgactctactggcggaactctgcatccctaccagctcgaaggtctgaactggttacgtttctcctgggcccagggcacagataccatcctcgcagacgaaatgggactcggcaaaacagtccaaaccattgtgttcctgtacagtctttataaggaaggccattcaaaaggcccctatctcgtctcagccccactcagcacgataattaattgggagcgggagtttgagatgtgggcacccgatttttatgtggtcacttatactggcgataaagaatcccgatccgtgatcagggagaatgaattttcgtttgaagacaacgctattcggtctggaaaaaaagtttttcggatgaagaaagaggttcagattaagtttcacgtactgttaaccagctacgaacttatcaccatcgaccaggccattttggggagcatcgagtgggcatgcctcgtggtggatgaggcgcacagactcaaaaataatcaatctaagttctttcgagtgctcaatagctataagatagattataaacttctgcttaccggaacccccttacaaaacaacttggaggagctgttccatctcctgaattttctgactcctgagcggttcaataatttggagggctttctcgaagaattcgcagacatctctaaggaggatcagattaaaaagctgcatgacctgttaggacctcacatgctgaggaggctgaaggctgacgtttttaagaatatgccagccaagaccgagctgatcgtaagggtggagctgagccagatgcaaaaaaaatactataagtttatcctgacgagaaatttcgaggcgctgaactctaaaggcggggggaaccaggtgtccctgctgaacatcatgatggatctgaagaaatgctgcaaccacccttacctgttcccagtagcggccgtagaagctccagttctgccaaatgggagttacgacggaagttcgctggtgaagtcaagcggaaaactcatgctccttcagaaaatgttgaagaagttgagagacgagggccacagggtcctgatcttcagccagatgacaaagatgctggacttgcttgaggatttcctggagtatgaggggtacaagtatgagcggattgacggcggcattacaggcggacttaggcaggaagcaatcgaccgctttaatgcgcccggggcccagcaattctgcttcctcctgtcgacacgggcaggaggcctaggcatcaacctggctaccgcagataccgtgataatctacgactctgattggaacccccacaacgatatacaagccttttcccgcgcccatcgtatcggccagaataagaaagtaatgatctaccggttcgtgaccagggcgtctgttgaggagaggatcacccaggtcgctaagcgtaaaatgatgctcactcatctggtggtacgccctggcctgggtagtaagagcgggtccatgaccaaacaagagctcgacgacatactgaagttcggcacagaggagttgttcaaagacgatgtcgaaggcatgatgtcccagggtcagcgacccgtgacccctattccagacgtgcagagtagcaaaggcgggaatttagccgccagcgccaaaaaaaagcacggttctacgcctccaggagacaataaggatgtggaggacagttctgttatccattacgacgacgctgctatttccaagctcctggatagaaatcaggatgccacggacgacaccgaactccaaaacatgaatgagtatttgagttcatttaaggtggcacaatatgtcgtgcgggaggaagatggcgtggaggaggtagagcgggagataatcaaacaggaagagaatgtggaccctgactactgggaaaaactactccgacatcactacgagcaacagcaggaagacctggcgagaaatctgggtaaaggcaaaaggatcaggaagcaggtgaactataatgatgcctctcaagaagatcaagaatggcaagacgaacttagcgataaccagagtgagtacagtatagggagcgaggatgaggacgaggacttcgaggaacggcctgaaggccagtctggtcggcgacagtctcgcaggcagctgaagtcggaccgagataagcccttgcctcctcttctcgcccgtgtcgggggaaacatcgaggtgctgggatttaacgccaggcaaaggaaagcatttctcaacgcaattatgcgatggggtatgccaccacaggatgccttcaattcccactggctggtgcgtgacctcagaggcaaaagcgagaaagagtttcgggcctacgtcagcctttttatgagacatttgtgcgagccaggagctgatggcgccgaaaccttcgcagatggggtgcccagagaaggtctgtctaggcagcacgtcctgacacggattggcgtaatgtctctggtcagaaaaaaagtccaggagttcgagcacgtcaatgggaaatacagcacccctgacctgatccctgaaggccctgaaggaaagaagtctggagaagtgatctcatccgatcccaatacacccgttcctgcaagcccggcacatctactccccgctccactgggactccccgataaaatggaggctcagctgggctacatggacgagaaggatcccggagctcagaaaccgaggcagccactggaagtacaggcactgcccgcggcgctagatagagtcgaaagcgaggataagcacgaatctcccgcgagcaaagaacgggctcgcgaggagagaccagaagaaactgaaaaggcaccaccaagtccagagcagctgccccgcgcttcctgttccgtcacccaggctggcgtacagtggcggcatttaggctcatgggagccactgtccccaagactgaaacgccctagccacctgagttttttaaaccgcgggggcgccagttag

SEQ ID NO: 182932 - DNA, 8994 bp, synthetic construct
  misc_feature 1..8994: note = Description of Artificial Sequence: Synthetic coding sequence
  source 1..8994: mol_type = other DNA
atggccgaccccggcatgatgagcctgttcggcgaggacggcaacatcttctctgaagggcttgagggtctgggcgagtgcggatatccagagaaccctgttaacccaatgggtcaacagatgcccattgatcagggattcgcctccttgcagccctcattacaccacccttcaacgaaccagaatcagactaagctgacgcactttgaccattacaaccagtacgagcagcagaagatgcacctcatggatcagccaaacagaatgatgtcgaacacaccagggaatggtctagccagcccccattctcagtaccacacccctccagtgccacaggtgcctcacggggggagcggcggaggccagatgggcgtctaccctgggatgcagaatgagagacacggacagtcctttgtggactcctcatctatgtgggggccacgggctgtacaggtgccggaccagattagggctccctaccagcaacagcagccccagccgcagccgccccagcctgctccgtccggcccaccagcccagggccatccccagcacatgcagcaaatgggaagctacatggccagaggggatttttcaatgcagcaacacggtcagccacagcaacggatgagccagttcagccagggccaggagggactgaaccagggcaacccttttatagctaccagtggcccgggccacctcagtcacgtcccacaacagtcaccatccatggcgccatcactacggcactcagtgcagcagtttcaccatcatccttccactgctctccatggagagagcgtcgcccatagccctagatttagtcctaaccctccacagcaaggagcagtcaggccgcagacattgaacttctcttcccgaagccaaaccgtaccatctcccacgattaataacagtggccagtactcccgctatccttattcgaatctgaaccagggcctggtcaacaatactggtatgaatcagaatcttgggctcactaataacacccccatgaaccagtccgtgcctcgatatcctaatgcagtcgggttccctagtaattcgggacaggggctgatgcaccagcagccaatccacccgtctggatccctgaaccaaatgaatacacagaccatgcatcccagccagcctcagggaacttacgcatcaccccctcccatgtctccgatgaaagcgatgtcaaaccctgccggcactccaccacctcaagtgagacctgggagcgcagggatcccaatggaggtgggttcttaccctaacatgcctcacccacagccttcccatcagcctcctggggcgatgggcattggacagaggaacatgggcccacggaatatgcaacaatctcgcccatttatagggatgagcagcgcccctagagagctgacaggtcacatgaggccaaatggctgcccaggtgtcgggctcggagatccacaggccatacaggaacgcctgatccccgggcagcagcaccctggccagcagccatcctttcagcagttgccaacctgcccccctctgcagccccatccaggcctgcaccaccaaagctccccgcctcaccctcaccaccagccatgggcccagctacatcccagcccacagaacactccgcagaaggttccggtgcaccaacactcaccttccgaaccattcttggagaagccagtcccagacatgacacaggtgtcgggccccaacgctcagcttgtgaagagtgatgattacttgccatcaatcgagcagcagccccagcagaagaagaaaaagaagaagaacaaccacatcgttgcagaggatccaagcaaagggttcggaaaggacgactttcccggaggagttgacaatcaggagctgaacaggaactctctcgacggttcccaggaggaaaagaagaaaaaaaagaggagtaaggccaaaaaagatccgaaggagcccaaagagccgaaggaaaagaaagagccaaaagaacctaagacacctaaggcccctaagatcccaaaagagccaaaggaaaaaaaagccaaaacagcaacgcccaaacccaagtcgtcaaaaaaaagttcaaataaaaagcccgattcagaggccagcgcactcaagaaaaaagtgaataaggggaaaactgaagggtccgagaactccgacctggacaagacccctccaccaagtccaccacccgaggaagatgaagatcccggtgttcagaaacgccgctcaagccgtcaggtgaaacgtaagcggtacacagaggacctcgagtttaagatttccgacgaggaagcggatgacgctgatgccgcggggagagatagcccaagcaacacatcccagtctgaacagcaggaatcagttgacgccgagggaccagtggtcgagaaaattatgtcctctcggagcgtgaagaagcaaaaagagagcggtgaggaggtcgaaatcgaggaattttatgtcaaatataaaaacttctcatacttgcactgccagtgggccagcatcgaagatctggagaaggataaaagaatacagcagaaaattaagaggtttaaggcaaagcagggacagaataagttcctgtccgagatcgaggatgagctttttaaccctgactacgttgaggtagataggatcatggatttcgccagaagcaccgatgaccggggtgaacctgtgacccactatctggtaaagtggtgttcactgccctacgaagattctacatgggaacggcggcaagatattgaccaggccaagattgaagagttcgagaaactgatgtctcgcgaaccagaaaccgaacgggttgagaggccaccggccgacgactggaagaaaagcgaaagctctagagagtacaaaaacaacaataaactgcgcgagtatcagctggaaggcgtaaactggcttctgtttaactggtataatatgcggaactgcatcctggccgatgaaatgggcctgggcaaaactattcagtccattacctttctctatgagatctacctcaaggggatacatggaccattcctagttattgcaccactttcaaccattcctaactgggagagggagttcagaacatggacagagctcaacgtggttgtctaccatggatctcaggcttcaagaagaactatccaactgtacgagatgtactttaaggacccacagggtagggttattaaaggttcatacaagttccacgcgattatcactacttttgagatgattttgacagactgccctgagctgaggaacatcccttggcgctgcgtcgtaatcgacgaggctcatagactgaaaaatagaaactgcaagttactcgagggactgaagatgatggacttggaacacaaggtattgctcaccggcacaccgctccaaaacacagttgaagaactgttctccctgctccacttcctggagcctagcagatttccttctgaaaccacattcatgcaggagtttggagatcttaagacagaagagcaagttcaaaagctgcaggccatcttaaagcctatgatgctgcgacggctgaaggaagatgtggagaaaaacctggcaccaaaggaagaaactataatcgaagtggaattgacgaacattcagaaaaagtattatcgggcgattctggaaaaaaattttacttttctatctaagggaggtgggcaggccaacgtgcctaaccttcttaacacgatgatggaactgaggaaatgctgcaatcatccttacctgattaatggggccgaagaaaaaatcctcgaggagttcaaggaaacccacaacgccgagtccccggatttccagttgcaagccatgattcaggctgcaggaaagctggtcctgatagataagctcctgccgaaactaaaggccggcggccatcgagtccttatcttttcacaaatggttcgttgcctagatattttggaagattatctgatccagaggcgctatccatatgagaggatcgacggacgggtaaggggaaacttgcggcaggccgctattgatagattttctaaacccgatagcgacagattcgtgtttctgctatgcaccagggccggaggcctgggaatcaacctcacagctgcagatacctgcatcatatttgacagtgactggaaccctcagaacgatctgcaggcacaggccagatgccacagaataggccagagtaaaagcgtcaaaatttatcggctcattaccaggaatagctatgaacgagagatgtttgacaaggcttcactaaagctcggattagataaagctgtgctgcagagcatgtcaggccgggagaacgccactaacggagtccagcagttgagcaagaaggaaatagaggacttgttacgcaagggcgcctacggtgcattgatggacgaagaggatgaaggttctaaattctgcgaggaggacattgatcagatactgctccgtagaacccacaccataacaatcgaaagtgaaggtaaggggtcaaccttcgccaaagcctcattcgtggccagtggtaataggactgatattagcctggatgacccaaacttttggcagaagtgggctaagaaggcggaactcgatatagatgccctcaacggtcgcaacaatttggtgatagatacaccgcgggtccggaagcaaactcgtctgtacagtgccgtgaaggaagatgaactgatggagttttcagacctggaatccgattccgaggagaagccctgcgcaaaaccaagacggccacaagacaagtctcagggctatgctcgctctgagtgtttccgggttgagaagaacctcctcgtttatggctgggggcgatggaccgatatactgtcccacgggagatataagcgccagctgacagaacaggatgtggagaccatctgtcgaaccattttagtgtactgtctgaatcactacaagggagatgagaacataaagagctttatctgggatttgatcactcctaccgcagacggccagacccgcgctcttgtcaatcactccggcttgagtgctcctgtgccaaggggtaggaaaggcaagaaggtgaaagcacagtccacgcaaccagtggtacaggatgccgactggttggcaagttgtaatcccgatgccctgttccaggaagactcttacaaaaaacaccttaagcaccactgtaacaaggtgttgctcagagtgaggatgttatactatttacgccaggaagtcatcggagatcaggcagacaaaatcttagagggggctgattctagcgaggcggacgtttggattcctgagcctttccacgccgaagtgcctgcggactggtgggataaggaagctgataagagtctactgattggagtgttcaaacatggttatgaaaaatacaattctatgagggctgatccagctctctgcttcctggaacgcgtggggatgcccgatgcaaaggctatagccgcagaacagcgcggcacggatatgctagccgacggaggggacggtggagaattcgatagggaggatgaagatcctgaatacaaacccacacgtaccccatttaaggacgagatagatgagtttgccaacagcccaagcgaggataaggaggagtccatggaaattcacgccaccggaaagcacagcgagtcgaacgctgaactcgggcagctgtactggccgaatacatcaaccctcacgacaagactcagacgcctgatcactgcctatcagagaagttataaacggcagcagatgcgacaggaggctctaatgaagactgacagaaggcggaggaggccgcgggaggaggtacgggcattggaggctgaacgcgaggctatcatttctgagaagcgacagaagtggactagacgcgaggaggccgatttctaccgggtcgtgtccacttttggagtgattttcgatcccgtgaagcagcaatttgattggaatcagtttagggctttcgctcggctggataagaaatccgacgagagtctggaaaagtatttctcatgttttgtagccatgtgtagacgggtctgtcgcatgccagtaaagcctgacgatgaacctcctgacctctcgagtattatagaaccgatcactgaagagagagctagtcgcaccttgtaccggatcgaactgctcaggaagatccgggagcaggttctccatcaccctcagctgggtgaacgcttaaagctctgccaaccgagtcttgacctccccgagtggtgggagtgtggccgccacgacagagatctgttggtcggagcagccaaacacggcgtctctcggaccgattaccacattctgaatgatcctgagctgagcttcctcgacgctcacaagaatttcgcccagaatagaggagctgggaataccagcagcctcaatccactggctgtggggttcgttcagacacctcccgtgatctcctccgcacacattcaggatgagcgcgtcctggaacaggcggaggggaaggtggaggaacctgagaacccagccgccaaagagaaatgcgaagggaaggaagaggaagaggagacggacggcagtggaaaggagtccaaacaggagtgcgaagcagaggcgtcttcagtgaagaatgagctgaagggcgttgaggtgggcgctgatacaggtagcaagtccatcagtgagaagggatccgaggaagatgaggaggaaaagctcgaagacgatgacaaatcggaggagtcttcacagccggaggcaggagccgtttcccgggggaagaactttgatgaggaatcaaacgcaagtatgtccaccgccagagacgagactagggatggtttttacatggaggacggggacccctccgtcgcacagctgctgcacgaaaggacttttgctttttcgttctggcctaaggatagagtgatgattaaccgactggacaatatctgcgaagctgtcctaaaaggaaaatggcccgtgaataggcgacagatgtttgattttcagggactgattcctggatataccccaacgacagttgattcccccctgcagaagaggagttttgcagagctttctatggttggtcaggcatccatctccggaagcgaagatataactaccagcccacaactgtcaaaggaggacgcattgaatcttagtgtcccccgtcagcggagaaggcgtagacgcaaaatcgaaatagaggctgaacgcgccgcaaaaagacgtaatctgatggaaatggtagctcagctaagggaatcacaggtcgtcagcgagaatggtcaagaaaaagtagtcgacttgagcaaagcttcacgagaggccacttcatctacctctaacttcagctccctctccagtaagttcattcttcctaatgtctctacccccgttagcgatgcttttaaaacacagatggagctcctgcaagcaggactctcccggactccaactcgccacctcttgaacgggagtctcgtggacggggagccgcctatgaagcgccgcagggggcggcggaagaatgtggaaggcctggacctgctattcatgagccacaaacgcacttctttgtcggccgaggacgccgaagtgacgaaagcatttgaagaggacatcgaaacgccacccacacgtaatatccctagccctggacagttagatcccgacacaaggatcccagtcatcaatttggaggacggcactaggcttgtgggagaggatgcccctaagaacaaggacctcgtcgagtggctgaagctgcaccctacttacactgtggacatgccttcctacgtcccaaaaaacgcagacgtgctgttttcttcctttcaaaagcctaagcagaaacggcaccgatgccggaacccaaacaagttagacattaacactctcacaggagaagagcgagtccccgtggtaaataagagaaatggtaagaaaatgggcggcgccatggcaccccccatgaaggacttaccacgctggcttgaagagaatccggaattcgccgtggcccccgactggacagatattgtgaagcagagcggttttgttccggaaagtatgtttgaccggttactaaccggaccagttgttcggggtgaaggagcaagccgcagggggcggcgccctaagtcggaaatcgcgcgggccgccgccgctgcagcagcggtggccagtaccagcggcatcaatccacttctcgtgaactcactgtttgctgggatggatctaactagtctgcagaatctgcagaatttgcagtccctgcaactagctggccttatggggttcccccccggcctggctacggccgccaccgccgggggtgatgcaaaaaatcctgccgccgtgctgccgctgatgttgcctggcatggcgggtctaccgaacgtctttggactggggggtcttctgaacaaccccctgtctgctgctaccggcaacacgactactgcaagcagtcagggcgaacccgaggacagcaccagcaaaggcgaagagaagggtaacgaaaacgaggacgagaataaagacagcgaaaaatccacagacgccgtttctgctgccgactcagccaatggttcggtaggcgccgcaacggcacctgccggcctacctagcaacccacttgcgttcaatcccttcctgctcagcactatggccccaggcctgttctatccctctatgttcctcccacccggtctgggaggactgaccctccctggcttccctgctttagcgggactgcagaatgcagtgggctcctctgaggagaaggctgccgacaaagctgagggaggtcctttcaaggacggggaaacactcgaggggtctgacgctgaggagagcttggataagaccgctgaaagctctttgctagaagatgaaattgcacaaggagaggagttggatagtctggacggcggggacgaaatcgagaataacgaaaacgacgaatag

SEQ ID NO: 182933 - DNA, 8994 bp, synthetic construct
  misc_feature 1..8994: note = Description of Artificial Sequence: Synthetic coding sequence
  source 1..8994: mol_type = other DNA
atggccgaccccggcatgatgagcctgttcggcgaggacggcaacattttttctgaaggtcttgaaggccttggcgagtgcggataccccgagaaccctgtgaatcccatgggtcaacagatgcccatcgatcagggctttgcttccctgcaaccgtccctacatcacccgtccacgaaccagaaccagaccaagctcactcatttcgaccactacaaccagtatgaacagcaaaaaatgcatctaatggaccagccgaatcggatgatgtccaacacacctggcaatggcctggcaagtcctcatagccaataccacaccccccctgtaccccaggtccctcacggcgggagcggcggagggcagatgggggtttatccagggatgcagaacgagcggcatgggcagagttttgtggattcttccagtatgtggggcccccgcgctgtgcaggtaccggatcagatcagggccccataccaacaacagcagccccagccccaaccgccacagcctgctccgagcggcccacctgcacagggccatcctcaacatatgcagcagatgggttcgtatatggcccgaggtgacttctccatgcaacagcacgggcagcctcaacaacgaatgtcccagtttagccagggacaagaaggcctgaaccagggaaatcccttcatcgcaacgtctgggccagggcatttgtcacacgtccctcaacaaagcccatctatggctcctagtttaaggcactcagtccagcaattccaccatcatccgtccaccgcccttcatggagagagtgtcgctcattccccgcggttcagtccaaacccgccacaacagggggcagtacggccacagaccctgaatttttccagccggtctcagactgtgccgtccccaacgattaataactctggccagtactctcgctacccttactccaatctcaatcaaggcctggtgaacaacacagggatgaaccagaaccttgggctaaccaataatacccctatgaatcaaagtgtcccccgctacccgaatgcagtaggcttccccagtaactctggccagggcttgatgcaccaacagccaatacatccttcaggctctttgaaccagatgaacactcagacaatgcatccctctcagccacaaggaacttatgcctcgcccccacctatgtccccaatgaaagctatgtccaaccccgctggcaccccgccaccacaggtccgccccgggtccgccggtatccctatggaggtgggcagttacccaaatatgcctcacccccaaccctcacatcagccacctggcgcgatgggcatcgggcaaaggaatatgggcccccgtaatatgcagcagtcgagacccttcattgggatgagttctgctcccagggagctgaccggccacatgcgacctaacggttgccctggggtcggtttaggcgatccgcaggcaattcaggagagactcattcccggccaacagcaccccggccagcagccttccttccagcagcttccaacatgtccccccctccagccgcaccccggactccatcaccagtcatctcccccacatccccaccatcagccttgggctcagttgcacccttcacctcagaacaccccgcagaaggtccccgtgcatcagcattccccctctgaaccttttctggaaaaaccagtacccgacatgacacaggtctcagggcccaacgcccaactggtgaagagcgatgactatttaccttctatcgagcaacagcctcaacagaagaaaaagaaaaagaagaacaaccacattgtggccgaagatccctccaagggatttgggaaagatgattttccaggaggtgtggataaccaggaacttaacagaaacagtcttgacggctcgcaagaggagaagaagaagaagaaacgcagcaaagctaaaaaggaccccaaggaacctaaagagccaaaggagaaaaaagagccaaaggagcctaagacacctaaggcccctaagataccaaaggaacctaaagagaagaaggcaaaaaccgccaccccgaagccaaagtcttcaaagaaatcttccaataagaagcctgacagcgaggcctccgccttgaagaagaaggtgaacaagggcaaaaccgaggggtctgaaaactctgacctcgacaagactcccccccccagcccaccccccgaagaagatgaagacccaggagtgcagaagagacggagcagccgccaggttaaacgcaagagatacaccgaggacctggaatttaaaatctctgatgaagaggcggatgacgcagacgctgccggacgcgatagtccatccaacacctcacaaagcgagcagcaagagtcggtcgacgcggagggcccagtggtggaaaaaattatgtcatcacgctccgtcaagaagcagaaggaatccggggaggaagttgagattgaagagttttacgtaaaatataagaacttcagctacctgcactgccagtgggcatcaatcgaagatctggagaaggacaagcgcattcagcagaaaatcaagaggttcaaagccaaacagggtcaaaacaagtttctatccgaaattgaggatgagctgttcaaccctgattacgttgaggtggataggattatggacttcgccagatccactgacgatagaggggaacccgtcacccactacctggtgaaatggtgtagcctgccgtacgaggacagcacatgggaacggcgtcaggacatcgatcaggcaaagatcgaggagttcgagaaacttatgtctagggagccagagacagaaagagtggaaaggcctcctgccgacgattggaagaaatctgagtccagcagggagtacaaaaacaacaacaaactgagagagtatcagttagagggggtgaactggctgctgtttaactggtacaacatgaggaattgcatcttggctgatgagatgggccttggaaaaaccatccaaagtataacgttcttatatgagatctacttgaagggcatccatggcccttttctcgtgatcgccccactgtctactattcctaactgggagcgggagtttcgcacttggaccgaactgaacgtggtggtttatcacgggtcacaagccagtcggagaacgatccaactatatgagatgtactttaaagatccacaggggcgcgtgatcaagggcagctacaagtttcacgcaattattacaacatttgagatgatcctcactgattgcccagagctgcgaaatatcccctggcgttgcgtcgtgatcgatgaagcccaccggctcaagaatcgtaattgtaaactcctggagggcctgaaaatgatggatctcgagcacaaggtgctcctcacgggcaccccacttcagaacactgtcgaggaactgttctcactgttgcacttcctcgaaccctctaggtttccgtcagagacaacattcatgcaagagtttggcgatctgaagaccgaggagcaggtgcagaagctgcaggccattctgaagccgatgatgctgcggcgattgaaagaggacgtggaaaaaaatctggctccaaaggaagaaacgattattgaggtggagcttactaacatccagaaaaagtattaccgtgcgattctagagaaaaacttcactttcctcagtaagggcggagggcaggctaacgttccaaatctgctgaatacaatgatggagctaagaaagtgctgcaatcatccgtacctcattaacggagccgaggaaaagatactagaggagtttaaagagacccacaatgccgagtcgcctgacttccagcttcaagccatgatccaggctgctggtaagctggtgctgattgataaactgctccctaagttaaaagctggcggacatcgcgtcttaatcttttctcagatggtgcgctgtctggacatcctcgaggattacctaatccagcgccgctacccttatgaacgcatcgacggccgtgtcaggggtaacctgcgccaggctgcaattgacaggttttctaagcccgatagcgaccgcttcgtgttcctgctgtgcaccagggcaggtggcctgggtataaatctcactgcagccgatacctgtattattttcgactctgactggaatccccaaaatgatctgcaggctcaagcccgctgccataggatcgggcagagcaaatctgttaaaatctataggttgataacccgcaacagctacgaaagagagatgttcgacaaggcttctctgaaactgggactggataaagccgtcctccagtccatgtcaggccgcgaaaacgcaaccaatggcgtgcagcagttgtctaaaaaggaaatcgaagatctcttaaggaagggtgcttacggtgcgcttatggacgaagaagacgagggctctaagttctgtgaggaggatatcgaccagatcttgctgaggcgcacacacacaatcaccatcgagtccgaggggaagggttctacctttgccaaggcgagctttgttgcatctggtaacaggaccgatatttccttggatgatcccaatttttggcagaagtgggctaagaaagcagagctggacatagatgctctgaatggccgaaacaatttggtcatagatactcctagagtgagaaagcagactcggctctacagcgccgtgaaagaggatgaactgatggagttctccgacctcgagagtgacagcgaggagaaaccgtgcgccaaacctcgccgcccacaggacaaaagccaagggtatgcgcgaagcgaatgctttagagtcgagaagaatcttctcgtgtacggttgggggcgctggactgatattctgtcccacgggaggtacaagcgacagctgactgagcaggatgtcgagactatctgtcgtaccatcttagtctactgcctaaatcattacaagggcgatgagaacatcaagtctttcatttgggacctgattacacctactgctgacggccagactcgcgccctggttaatcatagcggcctgtccgcccctgtgccaaggggcaggaagggaaaaaaggtaaaagctcaatcaacgcagccagtggtgcaggatgcggattggcttgccagctgtaacccggacgcgttgttccaagaggactcttataaaaagcacctcaaacaccactgtaataaggtcctgttgcgcgttcggatgctgtactatctcagacaggaggtgattggagaccaggccgataagattctggaaggggctgactcctccgaagcagatgtctggattccagaaccctttcacgctgaggtgcccgccgactggtgggataaagaagctgacaagtctctgctaattggcgtgtttaaacacgggtatgaaaaatacaacagtatgcgagccgaccctgcattatgctttctggagcgggtgggcatgcccgatgcgaaggccattgctgcagagcagagggggactgatatgctggctgatgggggggatggcggagaatttgaccgtgaagacgaagaccccgaatataagcctacaagaactccgtttaaagacgagatcgatgaattcgctaattcccctagtgaagataaggaagaatctatggagatccacgccactggcaaacatagtgagagtaacgcagagctgggccagttgtactggcctaatacttctacactgactacgcggcttcgccggctcattaccgcatatcaacggagctataagagacagcaaatgcgacaggaagccctgatgaaaaccgatcggcggcggcgacggccacgcgaggaggtgcgggctttggaggcagaaagagaggcaattattagtgaaaaacgccagaaatggactaggcgagaagaggctgacttttacagagttgtgagcacatttggtgtcattttcgacccggtaaaacagcaatttgactggaatcagttccgcgctttcgcccgcctcgataagaagtccgatgagagcctcgagaaatatttcagttgtttcgtggccatgtgtcgccgggtatgccggatgccagtcaagcccgatgacgaaccccctgacctctccagtatcattgagcctataaccgaggaacgggccagccgtactctgtatcggatcgagttactgcgcaaaattcgggagcaggtcttacatcacccacagctaggcgagcggctgaaactctgccaaccctccttggaccttcctgaatggtgggagtgtggccggcacgatcgtgatcttcttgtgggagctgcaaaacacggcgtctctcgaaccgattaccatatccttaatgaccccgaactgtccttcttggacgctcacaaaaattttgcccagaaccggggcgccggaaacacatcttcgctgaatccgctggcagtaggtttcgtgcagacaccaccggtgatttcatcagctcacattcaggacgagagagtgctcgaacaggcggagggaaaggtggaagaaccggagaaccctgctgctaaagaaaagtgtgagggcaaggaagaggaagaggaaacggacggcagcggcaaagagtccaaacaggaatgtgaggcagaggcgtcctctgtcaagaacgagttgaagggggtggaggttggcgctgacactggatccaagtcaatcagcgaaaagggttccgaggaggatgaggaggagaagctggaggatgacgacaagagtgaggagtcctcccaaccagaagccggtgccgtcagtagagggaagaatttcgatgaggagtcgaacgcttctatgagtaccgccagagacgagacccgggacggcttctacatggaggacggcgatccttcagtagctcaactgcttcacgaaagaactttcgcgttctccttctggcctaaggaccgggtcatgatcaacagactggacaatatctgtgaagcagtccttaagggcaaatggccggttaatagacggcagatgtttgacttccaaggactaatccctggatatacccctaccaccgttgattcacccctgcagaaaaggagttttgcagagctttcgatggttgggcaagcctccattagcggcagcgaagacataactacctcaccccagctgtccaaagaagatgccttaaacctgtctgttcctcgccaacgcagacgccggaggagaaagatcgagatcgaagccgagcgggcagccaaacggcggaatctgatggagatggtggcccagcttagagagagtcaagttgttagcgagaacggccaggaaaaagtggtcgacctgtcaaaggcgtcccgggaggccacgagtagtactagtaatttctcctccctctcaagtaagttcatcctcccgaacgtaagcactccagtgtctgacgctttcaagacccagatggaactgctgcaagctggactgtccagaacccctactcgtcacctcttaaatggcagcctggtagacggcgagcctccgatgaagcgaagacgcggtcgccggaaaaacgttgaaggtctggatctgctcttcatgtcgcacaaaagaactagtctgtctgcggaagatgccgaagtgactaaggccttcgaagaggatatcgagacgccccccactcgtaatatccccagccccggccagctcgacccagatactagaatacccgtcatcaatctcgaagacggaactcggctggtcggagaagacgcaccaaaaaataaagatctggtggaatggctcaagctccatccgacctatacagtggatatgccttcgtatgttccaaagaacgctgatgttctgttctcttccttccagaaacccaaacaaaaacgacataggtgccggaacccgaacaaattggacatcaatacattgaccggtgaagagcgggtccccgttgttaacaaaagaaatggtaagaaaatgggcggcgctatggccccgcctatgaaggacctcccacggtggctcgaggagaaccctgagttcgcggtggccccagactggacagacattgttaagcagtccgggttcgtccccgagagcatgtttgatcggttgttgactggccctgtggtgaggggagagggcgcctctagacgggggcgacggccaaagagtgaaatagctcgcgcagccgctgctgcggctgcagtggcgagtacctcaggtatcaacccccttttggtgaattctctgttcgccggaatggacctcacaagccttcagaatctgcagaatctgcagagtcttcagctggccggcctgatgggcttcccgccaggtcttgccaccgctgcaacagccggcggggacgccaagaaccccgccgccgtgctgcccctgatgctccctggcatggccggcctaccaaacgtgtttggacttggcggactgcttaataatccgctctccgctgctactggtaacacaacaacagcgagctcgcagggtgaaccagaagactctacaagcaagggagaggagaaagggaatgaaaatgaggatgaaaataaagactcagaaaagtcaacagatgccgtgagcgccgcggactccgccaacggcagcgtcggggccgccaccgctccagccgggctaccttccaatcctctcgcctttaacccatttctgctctccacgatggcaccaggtctgttttacccctctatgttcctgcctcctgggctgggcggactaactctgccagggtttcctgccttggccgggttacagaacgcagtaggctcctcagaagaaaaggctgccgacaaggctgagggtggcccatttaaggacggcgaaaccttggaggggagtgatgccgaagagtccctcgacaagacggcagaatcctccctgttagaagacgagatcgcacagggggaggagcttgatagtctcgacggaggggatgagatcgaaaataatgaaaatgatgaatag

SEQ ID NO: 182934 - DNA, 102 bp, synthetic construct
  misc_feature 1..102: note = Description of Artificial Sequence: Synthetic coding sequence
  source 1..102: mol_type = other DNA
atggccgaccccggcatgatgagcctgttcggcgaggacggcaacatattcagcgagggcttggagggtctcggggagtgtgggtaccccgagaatccatag

SEQ ID NO: 182935 - DNA, 6906 bp, synthetic construct
  misc_feature 1..6906: note = Description of Artificial Sequence: Synthetic coding sequence
  source 1..6906: mol_type = other DNA
aagggcgagagcaagcggatcaccctggtgctgcagcagccccagtccgggggacctcaggggcaccgacacgtggtactaggttcactcccagggaagatcgttctccagggtaatcaactggctgcgctgactcaggcaaagaatgcacaaggacagcccgctaaggtggtgaccatacagctgcaagtacagcaaccacaacaaaaaatccagatcgtgcctcagcccccctcgtcacagccccagccacagcagccaccctccactcagcccgtgaccctgtctagcgttcaacaggcacagattatgggtcccggacagagtcccgggcagcgcctgtccgtgcctgtgaaagtggtactgcagcctcaggccgggtcatctcagggcgccagctctggactatccgtagtgaaagtgctgagtgcctctgaggtggcagcactaagctctccagcctcgtctgctccacactcaggcgggaaaacaggaatggaagaaaaccgccggctcgagcaccaaaaaaagcaagaaaaagctaatcgtattgtggccgaggcgattgcacgtgcccgcgccagaggggagcagaacatcccacgcgttttaaatgaggacgagttacctagcgtccggccagaggaagagggcgagaagaaacgtagaaaaaaatcagctggggagcgccttaaggaagagaagccaaaaaagtccaagacttccggcgcttccaagacaaagggcaaatctaaacttaacactatcacccccgtagtgggcaagaagagaaagcggaatacgtctagcgacaatagcgacgtggaggtgatgccagcccaatcacccagagaggatgaagagagtagcatacagaagagaaggagcaatcggcaggtgaagcgcaagaagtacactgaagatcttgatattaagatcactgacgacgaagaggaggaggaagtcgatgtcactgggcctataaaacctgaaccaatcctgcccgagcccgttcaagaaccggatggcgaaacgctcccaagtatgcagttcttcgtcgaaaacccatctgaggaggatgctgccatcgtcgacaaagtgctaagcatgcgcatcgttaagaaggagctccccagtggacaatatacagaggcagaggagttttttgtcaagtacaaaaattacagctacctgcactgcgagtgggccaccattagtcaactggagaaggataaacggatccaccagaagttgaagcgttttaagacgaaaatggcccaaatgcgccacttcttccacgaggacgaggagccgttcaatcctgattatgtggaagtggatcgcattctggatgagtcccatagtatcgacaaagataacggcgagcccgtgatttactaccttgtgaaatggtgctccttaccatatgaggactcaacatgggagcttaaggaggatgttgatgagggcaagattagggagttcaagagaatccagagccgtcatcccgaactgaagagggtcaatcgccctcaggccagtgcctggaaaaaactggagttgtcccacgagtacaagaacaggaatcaacttagggagtatcaattggagggcgtgaactggctcttattcaactggtataacagacaaaattgcatattagccgacgagatgggattgggcaagactattcagagcatcgccttcctccaggaagtgtataatgtgggaattcatgggcccttcctggtgatcgcaccactgtcgacaatcacaaattgggagcgggaatttaacacatggacggagatgaacaccattgtctatcatgggtccctggccagcagacagatgatacagcagtatgaaatgtactgcaaagatagcagaggccgcctgataccaggggcatataagtttgacgctcttataaccaccttcgagatgatcctgtcggattgtccggaactaagagagatcgaatggaggtgtgtcatcattgatgaagcacaccgtttgaagaatcgcaattgtaagctgctcgatagcctcaaacatatggaccttgagcacaaagtcctgctgactggtacgcctctacaaaatactgtggaagaactgttcagtctgctccatttcctcgaaccgagccaatttccatcagaaagtgaatttctgaaagattttggggatctcaagacagaagaacaggtgcagaagcttcaagccatcttgaaacccatgatgctgcgccggctgaaagaggacgttgagaagaatcttgcccctaaacaggaaacgataatcgaagttgaactgaccaatattcaaaagaagtactaccgagccatcctggagaaaaatttctctttcttgagcaagggtgcaggacatactaacatgcccaacctcctcaacaccatgatggaactcaggaagtgttgtaatcacccttatcttatcaatggagccgaggagaaaattttgaccgaatttagggaagcatgtcatataattcctcatgattttcacttgcaagcgatggtgagaagcgccggaaaactggtgcttatcgacaagttgctacccaagctgaaagctggggggcacaaggttctgatattctctcaaatggtgcgatgcttggatatcttagaagattatttgatacagagaaggtacctttatgaacgtatcgacgggcgcgttcggggaaacctgagacaagcggccattgaccgattctctaaacctgattcggatcgttttgtctttctcctgtgcacccgcgccgggggcctcggtataaacctcaccgccgccgacacatgcatcatcttcgacagcgactggaacccccagaacgatctccaagcccaagctcggtgccacaggatcgggcagagcaaagctgtcaaagtgtaccggctaattaccagaaattcttacgaacgcgagatgtttgacaaagcaagcctcaagcttggtctagacaaagctgtgctccaatccatgagtggacgtgatggaaacattactggcatccagcagttctccaaaaaggaaatcgaggatttgctgcggaagggagcttatgccgcaatcatggaagaggacgacgaagggagcaagttttgtgaggaggatatagaccagattctgctgcgtcgcactaccacaatcacaatcgagagtgaaggcaaaggctctaccttcgccaaagcctcgtttgtggcgagcgaaaatcgcaccgacatcagtctggatgaccctaacttctggcagaaatgggcaaagaaagcggatctcgacatggatctgttgaattctaagaataacttagtgatagacacaccccgagtgcggaaacagacgaggcactttagtacactgaaagatgacgacctcgtggagttctccgacctagagtctgaggacgacgagaggccgcggtcacggaggcatgatcgccaccacgcttatggcaggacagactgttttagggtggagaaacacttgctcgtgtatggctggggaagatggagagatatcctaagccacggccggtttaaacgcagaatgacagagcgcgacgttgaaactatctgcagggccattctggtttattgtctgcttcactataggggagatgaaaatatcaaaggcttcatttgggacctgatctcccccgctgaaaacgggaaaaccaaagagctccagaatcactccggcttgagcatccctgtcccacggggccgtaaaggcaagaaagtcaagagccagtcgacattcgacatccataaagccgattggatcaggaaatataatcctgacacgttgtttcaggatgagtcttacaagaaacatttaaaacatcagtgtaacaaggtgttattgagggtcaggatgctatactaccttagacaggaggtcatcggagatcaggcagaaaaagtgcttggcggcgccattgcttccgaaattgatatttggttccccgtcgtcgatcaactggaagttccaacaacatggtgggatagcgaagccgacaaatcactactgatcggcgtcttcaagcacggttacgagaaatacaataccatgagggctgacccggctctctgtttcctggagaaggctggccgaccagatgacaaagctatcgctgcagagcatcgagtgttagacaacttttccgacatcgtggaaggggtggatttcgataaggattgcgaggaccctgagtacaaacctctccagggacccccaaaggaccaagacgatgaaggcgatccgttgatgatgatggatgaggaaatatcagtaatcgatggagatgaagctcaggtgactcagcagcccgggcatcttttctggcctcccggcagcgcgctgacagcaagactgcgccgtctggtgacggcctaccagcggagttataagcgggagcagatgaagatcgaagcagccgaacggggagacagacggcgcagacgatgcgaggccgcctttaagttgaaggaaattgcacgtcgagagaaacaacagcggtggaccagacgggagcagacagacttttaccgcgtcgtgtcaacttttggagtcgagtacgatcctgatacgatgcaatttcactgggatcgctttagaactttcgctaggctggataaaaagactgatgagagcctgaccaaatactttcacggattcgttgctatgtgccgacaggtatgccggttaccccctgctgccggtgatgagcccccagatcctaacctgttcattgaaccaatcacagaagaacgcgcttcaaggacgctatatagaattgagctattgagacggctcagggaacaggttctctgtcaccccctcctcgaggaccgtcttgccctgtgccagccgcccgggcctgagcttccgaagtggtgggagcccgtgagacatgacggcgagctgctccgaggcgccgcccgccatggagttagtcagactgattgcaatattatgcaggaccccgatttcagttttctagctgcacgcatgaactatatgcaaaaccaccaagctggcgcgcctgcccccagcctttcacgatgctctacccctctgctgcatcaacagtacacctcacgtaccgccagcccactacctctgagacccgacgcgcccgtggagaaatcccctgaagagaccgctacccaagtgccatcgttggaatctctgaccctgaagctggagcatgaggtggtggccagatcacgaccaacaccgcaggactatgagatgcgtgtgtcccctagcgacacaaccccactggtcagccggtccgtgccacctgtgaagctggaggatgaagatgattccgactctgaactggatctctctaaacttagcccttcctcttcttcgagctcctcaagcagcagctcttcaagtagtactgatgaatcagaagatgagaaagaggagaaattgacggatcaatcacgtagcaagctctacgacgaagagagccttctgagtcttaccatgtcacaggacggcttcccaaacgaggatggcgagcaaatgaccccagagctgcttctcctgcaggagagacagcgggcgtcagagtggccaaaggacagagtactgatcaatcgcattgatctcgtgtgtcaggctgtcctatccgggaagtggccgtcttctaggagaagccaggagatggtgacaggtggcatcctgggacccgggaaccacctgcttgactctccttccttgacacccggagaatacggcgacagtcctgttccaaccccacgatccagcagcgccgctagtatggccgaggaggaggcttcagcagtctcgaccgccgctgcacagttcacgaagctgaggagagggatggacgagaaagagtttaccgtgcaaatcaaggatgaggagggccttaaacttacatttcagaagcataaactgatggctaatggtgttatgggagatggccacccactgttccataaaaagaaggggaaccggaagaaactggttgagctggaggtcgaatgtatggaggagccaaaccatctggacgttgacctcgaaacccgcatccccgtgatcaacaaggttgacggtacgctgctggtaggcgaggacgctcctcgcagggcggagctcgaaatgtggctacaaggtcacccagagttcgctgtcgaccctcgtttcctagcctatatggaggaccgacgtaagcagaagtggcagcgatgtaagaagaataacaaggccgaactgaactgtctggggatggaacctgtccagacagcgaactctcgaaatgggaagaagggccatcacactgaaaccgtgtttaatcgggtgctcccaggccctattgcccctgagtcgagcaaaaaaagggcccgcaggatgaggccagacctcagtaaaatgatggctctgatgcagggaggaagcacagggagccttagtctccataacacatttcaacatagctcctccgggctgcagagtgtttcttccctggggcatagttcggcaaccagcgcttcactgccctttatgccatttgttatggggggcgctccttcttcacctcacgtagatagcagtaccatgctacatcaccatcatcatcatcctcacccccaccatcaccaccaccatcaccctggtttgcgggccccagggtatccctcttctccagtgacaactgccagcggtacaactctgaggttacctcccctgcaaccagaggaggatgatgacgaagacgaagaggatgatgatgacctgtcgcaaggatacgatagttcagagcgggacttctcgttaattgatgatccgatgatgccggctaattcagatagtagtgaggacgccgacgactag

SEQ ID NO: 182936 - DNA, 7746 bp, synthetic construct
  misc_feature 1..7746: note = Description of Artificial Sequence: Synthetic coding sequence
  source 1..7746: mol_type = other DNA
atggccgaccccatcatggacctgttcgacgaccccaacctgttcggccttgattctctcaccgatgacagctttaaccaggtgacgcaggaccccattgaggaggctcttggcttgcccagttcacttgacagtctagaccaaatgaatcaagacggggggggcggtgatgtcggtaattcctcagcttccgaacttgtgccaccccctgaggagacagcccctacagaactgtctaaggaatcaacagcccctgcccctgaatctattactctgcacgactatactacgcagccagctagccaggaacagccagctcagccagtgctacaaacctctacccctactagcggtctgttgcaggtcagcaagtctcaggagatcttgtcacagggcaatcctttcatgggcgtctcggcaactgccgtctcctcctctagcgccggagggcagcctccacaaagcgcccctaaaattgtgatccttaaagcaccaccctccagctctgtcaccggcgcccatgttgcacaaattcaggctcagggaattacatcaacggcccagccactggtggcaggaacagccaatggtggaaaagtcacctttactaaggtgctgactggcaccccactccggcccggtgtgtccattgtgagtggcaatacggtacttgccgctaaggtgcccggcaaccaggccgccgtgcagcggattgtccagcccagccgcccggttaaacagctggtgttgcagcccgttaaaggctcggcacccgctggcaaccccggcgctactggtccccctcttaaacctgcagtcacgctgaccagcaccccgactcagggagagtcaaagcgaattaccttagttttacaacagcctcaaagtggtggtccccagggccaccggcatgtcgttctgggctccctccctggaaagattgtgttgcaagggaaccagctagctgccttaacccaagcgaagaacgctcagggacagcccgctaaagttgttaccattcagctacaggtgcagcagccccagcagaaaatccaaattgttccccagccccctagcagccagcctcagcctcagcagcccccatccactcagcccgtcaccttatcttctgttcagcaggcgcaaatcatgggtccaggccaatcgcccggtcagcggctcagtgtcccagttaaagtggtgctacagccacaggcaggttcaagtcagggggcgagttctggattgtccgtggttaaagtactctctgctagcgaggtggcggccctttcttcccctgcgtcaagtgccccacacagcggtggcaagaccggcatggaggaaaatcgcaggctggagcatcagaagaagcaggagaaggccaatcggatagttgcagaggccatcgccagggcacgagctcgaggcgagcagaacattcccagagtgctcaacgaggacgagctcccctccgtcaggcctgaggaagaaggcgagaagaaacgacgcaaaaaatccgccggagagcgcttaaaggaggagaagcccaagaagagtaaaacatctggggctagcaaaacaaaggggaaatcgaagctaaatacgataaccccagtggtgggaaagaaaaggaaacgaaacacgtcaagcgacaattccgacgtagaggtgatgcctgctcagtctccaagggaggacgaggagtcttccattcagaaacgcagaagcaacaggcaggtgaaacgtaaaaagtatacggaggatctggacattaaaattacagacgatgaggaggaggaggaggttgatgtgaccgggcctatcaagcctgagcctatcttgccggagcccgtgcaggaacccgatggagagacactgccttcaatgcagttttttgtcgagaacccatccgaagaggacgcagctatcgtggacaaggtgctctcaatgcggatcgtgaagaaagaactgccctcagggcaatacaccgaagcagaggaatttttcgtgaagtacaaaaactattcatacctgcactgcgagtgggccacgatttcacagctggaaaaggacaagcgaatacatcagaagttaaaacgtttcaaaaccaagatggcccagatgcgccacttcttccacgaggatgaagagccttttaaccctgactacgtggaggtagatcggatcctagacgagagtcacagcatcgacaaggataatggcgaacccgtgatttactacttggttaagtggtgtagcctgccttacgaggactcaacgtgggaactgaaggaggacgtagatgagggcaaaatcagagaattcaagaggatccagtcaaggcaccccgagctcaaacgggtcaacagaccacaggcctctgcctggaagaaattggaactcagtcatgagtacaagaatcgaaaccaactgcgggagtaccaactggaaggggtcaactggctgctgtttaattggtacaatcggcaaaattgtatactcgccgatgagatgggactcggaaagaccatccagtcaattgcgtttcttcaggaggtgtataacgtcggaatacacggacctttcttagtgatcgcaccactgtccacaattacaaactgggaacgcgagttcaacacttggaccgagatgaacaccatcgtttatcacggcagcctggcgtctagacagatgatccagcaatacgagatgtactgcaaagactcccggggccgcctgatccctggggcatacaaatttgacgctctaattactacattcgagatgatccttagtgattgtccggagctaagggaaattgagtggagatgcgtcatcatcgatgaagcccatcgtctaaaaaaccgcaattgcaagctccttgactctctaaaacatatggacctcgaacacaaggtgttgctgacgggcacaccgctccaaaatacagttgaggaattattttcgttgttgcattttctggaaccgtcgcagtttccatcagaaagcgagttcctcaaagattttggcgatctgaaaacagaggaacaggtccagaagctgcaggccatcctaaagcccatgatgctaagacgccttaaagaggacgttgaaaagaatctagcccctaaacaggagacaatcatcgaggtagagctgacaaatatccagaagaagtactaccgtgcaatactggaaaaaaactttagctttctgtccaaaggagccgggcacaccaatatgccgaacttgttgaatactatgatggagctaaggaagtgctgcaaccacccatacctgattaacggtgccgaagaaaaaatcctcacggaattcagagaggcttgtcacataatcccccatgactttcatctgcaggccatggtgcggtcagcagggaagctggtgttaattgacaagctgttgcccaagctcaaagccggtggacacaaagtgttgatttttagccagatggtgcgctgtctggatattttagaggactacctgatccagagacgttatctgtacgagcgaattgatggccgagtgcgaggcaacctgcggcaggcggccatagaccgattcagcaaacctgacagcgatcgctttgttttccttctctgcacaagggcggggggattgggcattaatttgacagctgcagacacctgtattattttcgattcggactggaaccctcagaatgacctgcaagctcaagcgaggtgccacagaattggccagagcaaagccgtgaaggtttacaggctcatcaccagaaacagctatgagagggaaatgttcgacaaggcatcactgaagctgggtcttgacaaagcagtcctccagagcatgagcggcagggatgggaacatcactggaatacagcaattttcaaagaaggagattgaggacctccttagaaagggggcctacgcggcaatcatggaggaagacgatgagggcagcaagttttgcgaggaggacatcgaccagatcttgcttcgccgcaccacaacaatcacgatcgagtccgaaggtaaggggtccacatttgcgaaggcatcctttgtggccagcgaaaataggactgacatttctctggacgaccctaacttttggcagaagtgggcaaaaaaggccgacttggacatggatctcctcaactccaagaataatctcgtgatagatacaccaagagtcaggaaacagaccaggcacttctcaacgctgaaagatgacgacctggttgagttctcagatctagagtcggaggatgacgagagacctaggtctcgaagacacgatagacatcatgcttacggccggactgactgcttccgcgtggaaaagcacctgctcgtctacggatggggtcgctggcgcgacatcttgtctcatggccggtttaagcggcgcatgactgaacgggacgtcgaaacgatctgtcgggccatcctagtctactgtctactccactatagaggagatgagaatatcaagggcttcatctgggacctgatcagtccagccgaaaatgggaagactaaagagctgcagaatcacagcggactctccattccagtaccccgtggaaggaaaggtaagaaggtcaaaagtcaatcaaccttcgatattcataaagccgactggatccgaaagtacaatccagatactctcttccaggacgagagctataagaagcatctgaaacaccaatgtaataaagtgcttcttcgggtgaggatgctgtattatctgcgacaggaagtgattggcgatcaggccgaaaaggtcctcggcggggccatcgccagcgagattgacatttggtttccagtagttgatcagctggaggttcccactacttggtgggattccgaggccgacaagagcttacttatcggcgtctttaagcacggttacgaaaaatataataccatgagggcagatcccgcattgtgctttcttgaaaaagccggacgccccgacgacaaagccattgctgcagagcaccgcgtgctggacaacttctccgacatcgttgagggtgtagattttgacaaagattgcgaggatcccgaatataaacctctgcaaggcccacctaaggatcaagacgacgaaggcgatcccctgatgatgatggacgaagagatttcagttatagacggcgacgaggcccaggtgacacagcaaccaggccatctgttctggccacccggatccgccctcaccgcacgactgagacgactagtgactgcctaccagaggagctacaagcgcgagcaaatgaaaatcgaggctgcagagagaggggacaggagacggcgcaggtgcgaggcagcttttaagcttaaggaaattgcacgccgggagaagcaacaacgctggaccaggcgtgaacaaacagacttttacagagtggtgtccacatttggtgtagagtacgaccccgatactatgcagttccactgggacaggttccggactttcgcacgtctggataagaaaaccgatgaatcattaactaaatattttcacggttttgtggcaatgtgccgccaagtgtgtcgtttaccgcctgctgcgggggacgaaccacccgatcctaacctgtttattgagccaattactgaggagagagcctccagaaccctctaccgcatcgagctgttgcgtagactgcgcgagcaggtcttatgtcatcccctcctggaggatcgtcttgctctgtgtcagccaccggggccagagctgcctaaatggtgggagcccgttagacacgacggagagctgctacgcggggccgctcggcacggagtttctcaaacagactgcaacattatgcaggaccctgacttctcctttctcgctgctcgcatgaactatatgcagaaccatcaggctggagcccctgcaccctccctcagcagatgctccaccccactcttgcatcaacagtatactagtcgaaccgccagtccactcccacttcgaccggacgctcccgtagaaaagagcccagaggagactgctacacaggtgccgtccttggaatcgttgaccctgaagttagaacacgaagtagtggccaggtcacggccaactcctcaggactacgaaatgagagtgagcccctcagataccactcccctcgtgtctagaagcgtgcctcctgttaagttagaggacgaggatgactctgattctgagttggacctttcaaaactgtccccatcgtcctcatcaagttccagctcaagtagttcctctagttccactgacgagtcagaagacgaaaaagaagaaaagctgacagatcagagcaggtcaaagttgtatgacgaggaaagcctcttgtctctcactatgagtcaggacggcttcccaaatgaagatggagaacagatgacccccgagctgctacttctccaggagcggcagcgggcatccgaatggccaaaagacagagtcctgatcaaccgcattgatctggtgtgccaagcggtcctgagcgggaagtggcccagctcgaggcggtcccaggagatggtcacaggcgggatactcggacctgggaatcacctgttggattccccaagtttgacacccggtgagtatggcgactctccagttcctacaccccgctcttcctcggcggcgtccatggccgaggaggaggccagcgcagtctccactgctgcagcccagtttactaagctccgccggggcatggacgagaaagagtttacggtacagattaaggatgaggaaggactgaagctgacttttcagaaacacaagttaatggcgaacggagtgatgggagacggccatcctctcttccacaaaaagaagggaaaccgaaaaaagctggttgagctagaggttgaatgtatggaggaacccaatcatctcgatgtggatcttgaaactcggatcccagtgatcaacaaggttgacggaactctgctagtgggcgaagatgccccaagaagggcagagcttgaaatgtggttgcaggggcaccctgagttcgcagttgaccccagatttctggcatatatggaggaccggaggaagcagaagtggcaacgctgcaagaaaaataacaaggctgaactgaactgcctgggcatggaacccgtccagaccgcaaactctaggaatggcaagaagggccaccacactgagactgtgtttaatagagtccttccaggtccaatagcccccgagagcagcaagaagcgcgcccgccgaatgagacctgatctcagcaagatgatggctctgatgcagggaggaagtaccggctccctttctttacacaatacttttcagcacagcagcagtggattgcaatcggtgagcagcctagggcactcctcagccacctctgcatctctcccatttatgccgttcgtcatgggcggcgctccctcatcaccccacgtggatagctctaccatgctccatcatcaccatcaccaccctcacccgcaccaccaccatcaccatcacccaggattacgggccccaggctacccctctagccccgtcacaaccgcctcgggaactacgttaaggcttcctcctttgcagcccgaggaagatgacgacgaggatgaagaagacgatgacgacctgagtcagggatatgactccagcgagagggatttctccttgattgatgatcctatgatgcccgccaactccgattccagcgaggatgccgatgactag

SEQ ID NO: 182937 - DNA, 6909 bp, synthetic construct
  misc_feature 1..6909: note = Description of Artificial Sequence: Synthetic coding sequence
  source 1..6909: mol_type = other DNA
atgaagggcgagagcaagcggatcaccctggtgctgcagcagccccaaagtggcggccctcaaggtcaccgccacgtggtactaggctcactgcctggtaagattgtgctacaaggcaaccagctggctgctctgacccaggccaaaaatgcccagggtcaacctgccaaggtggtgaccattcagctgcaagtccagcaaccccagcagaaaattcagattgtgccacaacccccttcttcgcagccgcagccgcagcagcctcctagcacacaaccggttacgctgagtagcgtgcaacaggctcagataatgggacccggacagtctcccggacaacgcctctccgtgccggtaaaggtggtactccagccccaggcaggtagttcacagggcgcaagctctggcctgtctgtggtaaaagtcttatcagcctctgaagtggctgctttatcaagtcccgcctcctctgcgccacattctggcggaaagaccggcatggaggagaaccgccgcttagagcatcagaaaaagcaggagaaggccaatcgaatcgtggcagaagccatcgctcgcgcccgcgcacgcggcgagcagaatatacccagggttttgaatgaggacgagcttcccagcgttcgcccggaggaggagggagagaagaaacgccgcaaaaaatcggccggcgaaagactgaaagaggaaaaaccaaagaaaagcaagactagcggcgcttcaaaaaccaagggaaagagtaaactgaacactatcacccctgtggtgggcaaaaaacggaagagaaatacttcttccgataactcagacgtggaggtgatgccagcccaatcgccgcgtgaggacgaggaaagctccattcaaaagagaaggtctaaccgccaagtgaagcgcaagaagtacaccgaagatttggatattaagatcactgatgacgaagaggaggaggaagtggacgtgacaggccccatcaagcctgagcccatcctgcccgagccagtgcaggagcccgacggcgaaacacttcctagtatgcaatttttcgtggaaaacccctctgaggaggatgccgcaattgttgataaagtgctgtcaatgcgtattgttaagaaagaactgccctccggccagtacacagaggccgaggagttttttgtgaagtacaagaactactcttacctgcactgcgagtgggctactattagtcagctggaaaaggataagaggatccaccagaagctaaagcgattcaagactaagatggctcagatgagacacttttttcacgaggacgaggaaccatttaaccctgattatgtggaagtggatcgtatcctcgacgagagccactctatcgacaaggacaacggggagcccgtgatttattacctggtgaaatggtgctctctcccctacgaagactccacttgggaactgaaagaagatgtagacgagggcaagattagggaattcaagcgcatccaatcacggcaccccgaattgaaacgggttaaccggccccaggcctccgcctggaagaagttggagctttcccatgagtataaaaacaggaaccaactcagggaatatcagctggagggcgtgaattggctgctcttcaactggtacaacaggcagaactgcatcctggcagatgagatgggccttggcaaaaccatccagagcattgcattcctgcaggaagtctataacgtaggaatccacggtccattccttgtaatcgcccctctttctacgattactaactgggaacgtgagtttaatacatggactgaaatgaacaccatagtgtaccatggctctctggcctccagacagatgattcagcagtacgagatgtactgcaaagactctcgtggccgattaatcccaggcgcttataagttcgacgctctaataacgacctttgagatgattctcagtgactgtccggaactcagggagatcgagtggaggtgtgtcatcatcgacgaagcccaccgtctgaaaaaccgaaactgtaagctcctggactctctgaaacatatggacctcgagcataaggtcctgctgacagggacccctctgcagaatacggtcgaagagttgttcagtctcctgcacttcctcgaaccttctcagtttccttctgagagtgagtttctcaaggatttcggagatctgaagacggaggaacaggttcagaaactgcaggctattttgaaaccgatgatgctcagaagattgaaagaagacgttgaaaaaaatctggcccctaaacaggaaacaatcattgaagttgagctgaccaatatccagaaaaaatattatagggcgatccttgaaaagaatttctcttttttgtcgaagggagctgggcacactaacatgcctaatctgttgaataccatgatggaactgcggaaatgctgtaatcacccttatctgatcaacggcgctgaggaaaaaatcctcaccgaattcagagaagcgtgtcatattattccccacgacttccatctgcaggcgatggtgcgctcagcgggcaagctggtgctgattgacaaactgctccctaagttgaaagctggggggcataaggttctcatcttttcccaaatggtacgctgcctagatattttagaggactaccttattcaaaggaggtacttgtacgaacgcatcgacgggcgggtgcgcgggaatttgcggcaggctgcaatagaccgcttctccaagcccgactccgatcggttcgtgttcttactctgtactcgggccggaggcctcggcataaatcttactgccgccgatacctgcattatcttcgacagcgattggaacccacagaacgatcttcaagcgcaggcacgctgtcaccggatagggcagagcaaagctgtcaaggtgtaccggctgataacacggaatagctatgaacgtgagatgttcgacaaggcttccctgaagctggggttggataaggccgtgttgcagagtatgagtggccgtgatggcaatattaccggcatacaacaattttcaaagaaggaaatcgaagatctgctccggaagggggcatacgcagccattatggaggaggacgatgaagggagcaagttctgcgaggaagacatcgatcagattttattaaggaggacaactacgatcacaattgaatcagaggggaaaggcagcacatttgccaaggccagctttgtagcctctgagaaccggacagacatcagcctggacgaccccaatttctggcagaaatgggctaaaaaagccgacttggacatggacctgctgaatagtaagaataatttggttatcgacaccccccgcgtccgtaagcagactagacacttcagcacattaaaggatgacgacttagtggaattctccgacttagagagcgaggacgacgagcgtcctaggtcacgacgacacgaccgacaccacgcttacggacggacagactgtttccgcgtggagaagcatctgttggtgtacgggtgggggcgctggcgcgatatcttgtcacacgggcgatttaagagacggatgacagaaagggatgtagagaccatctgtagggctatcctcgtttactgcttgctgcactaccggggagatgaaaacatcaaagggtttatttgggacctgatctctccagctgaaaatggaaagaccaaagaactacaaaaccacagtggattgagcattccagtgccaagaggtaggaagggcaaaaaggtgaaatcacagtcaacctttgatatccacaaggccgattggattcgaaagtataaccccgatactctatttcaggatgagtcatataaaaaacacctaaagcatcaatgtaacaaggttctcctgagggtgagaatgctttactatctgaggcaagaggttattggcgaccaggcagagaaggtcctcggcggagccattgcatctgagattgacatctggtttcccgtggttgaccagctggaagtccctacgacgtggtgggattccgaagcagacaaatcactcctgatcggggtgttcaagcatggttatgagaaatacaacacgatgcgcgcagatcctgccctgtgctttctagaaaaggcgggcagacctgacgacaaagcaatcgccgccgaacatcgcgtcttggacaatttctccgatatcgtggagggtgtcgactttgacaaggattgtgaggaccccgagtataaaccgctgcaggggccccccaaagatcaagatgatgaaggcgaccctctaatgatgatggacgaggagatttcagtgatcgacggcgatgaggcccaggtaactcagcagccgggtcacctcttttggccccccgggtcagctttgaccgcccgcctgagacggcttgtgactgcttaccagaggagctacaagagggaacagatgaagatcgaggctgccgagcggggcgatcgtaggcggagaagatgtgaagcggcattcaagctgaaagagatcgccagacgtgagaagcagcagaggtggacaaggcgcgagcagaccgatttctacagggtggtctccacttttggtgtggagtatgatcccgacacaatgcagtttcattgggatcggttcagaacgttcgcccgcctcgataagaagacagacgaaagcctgacaaagtattttcacggctttgtcgctatgtgtcgtcaagtgtgcagactgccacccgcagctggcgacgagccacctgacccgaacctgttcattgagcccattactgaagaaagggcctccagaacattgtacaggatcgaactgctgagaaggcttcgtgagcaggtgctgtgccatcctctcctcgaggatcgcttagcactgtgccagccccctggtcccgagctgccaaaatggtgggagccagtcagacacgatggagagctgctgcgtggggcagcaaggcatggagtcagtcagaccgactgcaatattatgcaagacccggacttttcttttctggctgcacgtatgaactacatgcaaaatcaccaggccggcgccccagcgccatctctgtctagatgctctacacctttgctgcaccagcagtatactagccgcactgcatccccccttccactgaggcctgatgcccccgtcgaaaagtcacctgaggaaaccgccacccaagtgccttcactggagtctttgactctgaaactcgaacacgaggtagttgccagatcaagaccaaccccccaggattatgagatgcgagtcagtccctccgatacaacccctttagtctcacgctctgtgcctcccgtgaaactggaagatgaagacgattccgactccgaactcgatttatctaagctgtcaccatcttccagctcatcctctagctccagctcctcctcatcatcaacagatgagagcgaggatgaaaaagaggagaagctgaccgaccagtcacggagtaagctctacgacgaagagtcattactgagccttacaatgtcgcaggatggcttccccaacgaagatggagagcagatgactcccgagctccttctgctccaggaacgccaacgggcatccgagtggccaaaggatcgcgtactgatcaaccgtatcgatctcgtgtgccaggcagtgttgagtggaaagtggccctcttcccggaggtctcaggaaatggtgactggggggatcctgggcccaggcaaccatctcctggatagcccttccttgactccaggagagtatggtgattccccggtgcccacccctcggtcgagcagcgcagcatctatggctgaggaggaagcatcggccgtctctacagccgccgcacagttcaccaaattaaggagaggtatggacgagaaggaatttaccgtgcagattaaggatgaggagggcctcaaactgacgttccaaaaacacaagcttatggccaacggggttatgggcgacggccacccgctttttcataagaagaaaggcaataggaagaagttggtagaactggaagtggaatgcatggaagaacctaatcacttagacgtcgatctagagacaaggattccagtgattaacaaggtggatggtactctgctggttggtgaagatgccccacggagggctgagttagagatgtggttgcaaggtcatcctgagttcgctgtagacccccggtttctggcatatatggaggatcgaaggaagcaaaagtggcaacggtgcaaaaaaaacaataaagcggaactgaactgcttaggcatggagcctgtgcagactgccaattcaagaaatggcaaaaaaggccaccatactgagaccgtattcaatagagttctgcctggtcctatcgctccagagtcatctaagaaacgggcccggcgcatgcgtcctgatctttccaagatgatggccctcatgcagggaggttctacaggcagtctgtctctccacaataccttccagcactccagctctggcctgcagagtgtgtccagcctcggacacagttccgctacaagcgcttctttacccttcatgccttttgtgatgggtggggcgccctcatctccacacgtcgactctagcactatgctccaccaccaccaccaccacccccatcctcatcaccatcatcaccatcatccgggtctgagagcacccggctacccatcctcccctgtaacaacggctagcggaaccactttgagactaccccctctgcagcctgaagaagatgacgatgaagatgaagaggacgacgacgacctgtcccaggggtacgattcatctgagcgcgactttagtctgatagatgatcctatgatgcctgccaatagcgacagctccgaggatgcagatgactag

SEQ ID NO: 182938 - DNA, 7746 bp, synthetic construct
  misc_feature 1..7746: note = Description of Artificial Sequence: Synthetic coding sequence
  source 1..7746: mol_type = other DNA
atggccgaccccatcatggacctgttcgacgaccccaacctgttcggcctggacagtctgaccgatgactcctttaatcaggtgacacaggaccctatcgaggaggctctaggcctgcctagtagtctggatagccttgatcagatgaatcaggacggaggggggggtgacgtgggcaatagctctgccagtgaactagtgcctccaccagaagaaacggcaccaaccgagctgagtaaggagtccactgcgccagcccctgagagcataacgctgcatgattacacaacacaacccgccagccaggagcagccggcacagcctgtactgcaaacctcaacacctacgtcggggcttctacaggtatctaaaagccaagagattctgagtcaggggaacccttttatgggagtctcggcaactgccgtctctagttctagtgcaggaggtcagccgccccaaagcgccccgaaaattgttatcttgaaagcacctcctagcagctctgtgacgggcgcacatgtggctcagatacaggctcagggaatcaccagcacagctcagcctctggtggccggtacagcgaatggagggaaagttactttcacaaaagtgctcactggcaccccactgagacccggtgtctcaattgtgtctggcaacacggtgttggccgctaaggtccctggtaatcaagccgctgtccagcgcatcgtccagccgagccgacccgtcaaacagcttgtcctacagccggtgaaaggctcagcccccgctggaaacccaggtgctacggggccacccctgaagccagcagtcactctcacgagcaccccaactcagggagaaagtaagaggattactttggtcctccagcaaccacaatccgggggaccccaaggccatcgacacgtcgtcctcgggtccttgcctggtaagattgtgctgcaagggaaccagctagctgctctgacacaagccaagaacgcccagggccagccagctaaagtggtgacaattcagcttcaggtacagcagcctcagcaaaaaattcagatagtccctcagcctccaagcagccaaccacagccacagcagcctcccagtactcagccagttacgctgagctcagtgcaacaggcacagattatggggcccggccagtctccgggacagcgactgtccgtgccagtcaaggtggtgttgcaacctcaggcaggaagctctcagggcgcctctagtggcctttctgtggtcaaggtgctgtccgcctcagaggtcgctgcattgtcaagccccgcctcttctgcacctcatagcggaggcaagactggtatggaagagaatcggcgcctggagcatcaaaagaaacaggagaaagccaacagaattgtcgcagaggccattgctcgagcccgcgccaggggcgaacagaatattcccagggtgctgaacgaagatgaacttccaagcgtacggcctgaggaggagggagagaagaagagacggaaaaaatccgccggtgagcggctcaaggaggaaaagcctaagaagtctaaaacctcaggcgcctcgaaaaccaaggggaagtccaagctcaataccattactccagtagtgggtaagaagcgaaaacggaacaccagttccgacaacagcgacgtcgaagtgatgcccgctcagtctcctcgcgaggacgaagagtctagtatccagaagagacgctctaacaggcaggtgaagagaaagaaatacaccgaggatctggacataaagatcaccgacgatgaagaggaggaggaagtagatgtgactgggcctattaaacccgagcccatcttacccgagccagtgcaggaacctgatggggagactttgccctctatgcagtttttcgtcgaaaacccgtcggaggaagacgctgccatcgtcgacaaggtgttgtccatgcgcatagtgaagaaggaactgccctctgggcagtatacggaggccgaagaattctttgtaaagtacaagaattattcgtacctgcattgtgaatgggctacaatctcacagctggaaaaggacaaacgaatccaccagaagctcaagagattcaaaaccaagatggcacagatgagacacttttttcacgaggatgaggagccctttaatcccgactatgtggaagtggatagaattcttgacgagtcccacagcattgataaggacaatggcgagccagtgatatactacttagtcaaatggtgtagcctcccgtacgaggactctacctgggagctgaaagaggatgtagacgagggcaagattcgggagttcaaacgcatacaatcaaggcacccagagttgaagcgggtgaataggccccaggcatcggcctggaagaaactggagctgtctcatgagtacaaaaaccggaatcaacttcgagagtaccagctggagggcgtcaattggttgctgttcaattggtataatcgccagaactgtatcctggccgatgagatgggccttggtaaaactatccagagcattgcgttcctccaagaagtctacaacgttgggattcacggacctttccttgttatcgcccctttgtccaccatcaccaattgggaaagagagtttaatacctggacagagatgaatacaatcgtctatcatggcagccttgcaagtcggcagatgatccagcagtacgaaatgtattgtaaggattctcgggggcggttgattcccggcgcctataagtttgatgcactgattactactttcgaaatgatcttgagcgactgccccgagctcagagagattgagtggagatgtgtgatcatcgacgaggcccacagactgaagaaccgtaactgtaagctgctcgacagcctgaaacacatggacttggaacacaaggttttgcttaccgggacgcccctacagaatactgttgaggagctattttcgcttctccatttcctggagccctcccagtttccatccgaatccgaatttctgaaggacttcggggacctgaaaacagaagagcaggtgcagaaattacaggcaatcctgaagcccatgatgctgaggaggctcaaggaagatgtggagaaaaaccttgcccctaaacaagagacaataatagaagtagagctcacgaatatacagaaaaaatactatagggccatcttggaaaaaaacttctccttcttatctaagggagctgggcacaccaacatgcccaacctactgaacaccatgatggagctgcgaaaatgctgcaatcacccttatcttattaacggggctgaagagaaaatcctgacggaatttcgcgaggcctgccacataattccccacgacttccatctgcaggctatggtacggtccgccggaaaactggtccttatagacaagctactgcctaaacttaaagccggggggcacaaggtgctgattttcagtcaaatggttcgatgcctcgatatcttagaagattatctgatacagcggcgatacctgtatgagagaattgacggtcgggtgcggggtaacttaaggcaggccgcaatcgacagattttccaaaccagactctgatcgattcgtctttctcttatgtacaagagccggaggcctgggtatcaatcttaccgccgctgatacctgtataattttcgattccgattggaacccccagaacgatctgcaggcccaagctcggtgccacaggattggtcaatcaaaggctgtgaaagtgtacaggctcattacccggaattcttacgagcgtgaaatgtttgataaagctagtctcaagctgggcctcgataaagccgtcttacaaagtatgagcggcagagatggcaatattactggcatacagcaattttcaaaaaaggaaatcgaagatcttctccgaaagggcgcatatgccgcaatcatggaggaggacgatgaagggtcgaagttctgcgaagaagacattgatcagatcctcctccgacggaccacaacaattacgatcgagtccgagggaaagggcagcacattcgccaaggcgtcattcgtagcctccgagaacaggaccgacatcagtctggacgatcccaacttctggcagaaatgggcgaaaaaggcggacctcgacatggacctgctcaattccaaaaacaacctggtcatcgacactccccgcgtcagaaaacagactagacatttcagcactctgaaggacgacgatctggtggagtttagcgacttggaatctgaggatgacgaacgaccaagatctagacgtcacgacagacatcatgcctatgggcgtaccgattgtttccgggtggaaaaacaccttctggtgtacgggtggggccgctggagagacatcctttcacatggtcggtttaaacgtagaatgactgaaagggatgtggagacaatctgcagagccatcctagtatactgccttctgcactaccgcggggatgagaacattaaaggcttcatttgggatctgattagccctgccgaaaacggtaagacaaaggagttacagaatcattccggactcagcatccccgtgccccgcggaagaaagggcaaaaaggtaaaaagccagtcgacatttgacattcataaggctgattggatacgcaagtataaccccgataccctgtttcaggatgaaagctacaagaaacacctcaaacaccagtgcaataaggtgcttctccgcgtacgaatgctctattacctgaggcaggaagtaattggggatcaggccgaaaaggtgctcgggggtgccatcgctagcgagattgacatttggttccccgtggtcgaccagttggaagtgcctactacgtggtgggattcagaggcagataaatctctccttatcggcgtgtttaaacatgggtacgaaaaatacaacaccatgagagctgaccctgcgctgtgttttctcgagaaggcgggaagaccagacgacaaagctatcgcggcggaacatcgggtgttggataatttctctgacatcgtagagggggtcgacttcgataaggattgtgaagacccggagtataaaccattgcagggccctcctaaggatcaggatgacgagggggatccactgatgatgatggatgaagagatttctgtgattgacggagacgaggctcaagtgactcaacagccagggcatctcttttggcctcctggttctgcacttactgctaggctaagacgcctggtgactgcctaccaacgatcctacaaacgggagcagatgaagatagaggccgctgagcgcggcgacagacgcagacgtagatgcgaggcggctttcaagttaaaagaaatcgccaggcgtgagaagcagcagagatggactagacgtgagcaaacagatttttaccgtgtcgtctccacctttggcgtggagtacgatcccgatacaatgcaattccattgggataggttcagaactttcgcacgccttgacaagaagactgacgagagtttaacgaagtatttccatggattcgttgccatgtgtcgccaggtgtgtcggctgccacctgccgcgggagatgaaccacctgatcccaacctgttcatagaaccaattaccgaggagcgcgcctccaggaccctgtacagaattgagttgctccgtcgcctacgcgagcaggtactttgccatccgttgctcgaagacaggttagccttgtgtcaaccccctgggcccgagctgcctaaatggtgggagcctgtccgccatgacggggagctgttacgaggagctgcaagacacggtgtgtctcaaactgactgcaatatcatgcaagatcctgatttctccttcttagccgcacgcatgaactatatgcagaaccatcaggcaggagctccggcaccctccctctccaggtgcagtacgcctctgttgcaccaacagtacaccagccgaacagcttcgcctctccccttacgtccagatgctcctgtggagaaaagtccagaggagacagctacgcaggtgccgtcacttgagagcctgacactgaaactggaacatgaggtcgtggcacgatctcggccgacaccccaggattacgagatgagggtctcccccagtgacacaactccgctcgttagcagatctgttccacccgtgaagttagaagatgaagatgattctgactccgaacttgacctatccaaactcagtccatcctcttcctcctcatcaagcagctccagttcttcatcctctaccgacgaaagcgaagacgagaaggaggagaaactgacagatcagtctcgctctaaactttatgacgaggagtccctgctttctcttacgatgagtcaggacggatttccaaacgaggacggtgagcagatgacccctgagctgcttctgctgcaggaacgccagcgcgcctccgagtggccaaaggacagagtgctgataaatcgtattgacctggtgtgtcaggccgtgctgtcaggaaagtggcccagcagtcgacggtcacaggagatggtgacagggggtattttgggtccaggtaatcatctgctggactcaccttcacttacccccggggagtacggcgattctccggtccccactcctagatcttcttccgccgctagtatggctgaggaagaagccagcgccgtgtcaaccgctgctgcacagttcaccaagcttcgtcgtggaatggacgagaaggagttcacagtgcaaatcaaagatgaggagggtctgaagctgaccttccagaagcataagcttatggctaacggggtgatgggggacgggcacccattattccacaaaaagaaagggaataggaagaaactcgtggagctggaagtggagtgtatggaggagcccaaccatttagacgttgacttagagaccagaatccctgtgatcaataaagtcgatggaactctgctggttggagaggacgcccctaggcgggccgagctggaaatgtggctgcagggccatccagagtttgccgttgatccacgcttcctggcttacatggaagatagacgcaaacagaagtggcagcgttgcaagaagaataacaaagctgagctgaactgcctcgggatggaacccgttcagaccgcaaactctcggaatggaaaaaaaggacaccacactgagacggtattcaacagggtgctccccgggcccattgccccggagagcagcaagaaacgtgcccgacgtatgcgcccagatctttccaagatgatggcccttatgcaaggcggcagcacggggtccctttctctgcacaatacgtttcaacattccagctctgggcttcagagtgtctcttctctggggcattcatcagcaacatctgcaagcctaccttttatgccctttgtgatggggggtgccccatcctcacctcacgtggactccagcaccatgcttcaccatcaccatcaccacccccatcctcatcaccaccatcaccaccacccaggcctccgtgctcctggctacccatcttccccagtgaccacagcctctggaacaactctgagactaccgccattgcagcctgaggaagatgacgatgaagatgaagaagatgacgacgacctaagtcagggatacgatagtagcgaacgcgactttagtctcatcgatgaccccatgatgccagcaaactcagactccagcgaagacgcggacgattag

SEQ ID NO: 182939 - DNA, 1797 bp, synthetic construct
  misc_feature 1..1797: note = Description of Artificial Sequence: Synthetic coding sequence
  source 1..1797: mol_type = other DNA
atgaccttccaggccagccaccggagcgcctggggcaagagccggaagaagaattggcagtatgaaggccctacccagaagctgttcctgaaaagaaacaacgtgtccgcgcccgatggcccatcagacccgtctatttctgtgtccagcgagcagtctggagctcagcagccccccgccttgcaggtggagaggatcgttgataagcgtaagaataagaaaggtaagacagagtatctcgtacggtggaaggggtatgactccgaagacgacacctgggagccagagcaacacctagttaactgtgaagaatatatccacgattttaacaggcggcacactgagaagcagaaggagagcactctgacgagaactaatagaaccagtccaaacaacgcacgcaagcaaatctctcgcagcacgaattcaaattttagcaaaacaagccccaaggcactagttatcggaaaagatcacgaaagcaagaatagccaactctttgcagcatctcagaagttcagaaaaaacacagctccaagtctctcgtctagaaagaatatggacctggcaaagtctggaataaagattttggtccctaagagccctgtcaaatcccgcacagctgttgatgggtttcaatccgaaagtccagaaaagctggatcccgtggagcagggccaggaagatactgtggcaccagaggtagccgcagaaaagcctgttggagccctgctgggccccggcgcagaacgcgcacggatgggctctcgcccaagaattcaccccctggtaccacaggtccccgggccagtaaccgcggctatggccaccggtctggcagtcaatgggaaagggaccagcccgttcatggatgcactaactgctaacggtaccaccaatatccagacctccgtgactggcgtcaccgccagcaaaagaaagttcatcgacgataggcgcgaccagcccttcgataagaggctacgtttttccgtcaggcaaacagagtcagcatacaggtacagagatatcgtggttaggaagcaggatggcttcactcacattctcttaagcactaaaagtagtgagaacaattctctcaaccctgaagtgatgagggaagtgcagtcagcactgagcacagctgctgcggatgattctaagctcgttctgctcagtgcagttgggtccgtgttttgttgcgggctggacttcatatatttcatccgccgtcttaccgatgaccggaaacgcgagtccactaagatggccgaggccatcaggaatttcgtgaatacatttattcagtttaaaaagcctattatcgtggctgtgaacgggcctgctattggcttgggggccagtattctgcccttgtgcgacgtggtgtgggccaacgagaaggcctggttccagactccatacaccaccttcgggcagtcaccggacggctgctcaaccgtaatgttcccaaagattatgggaggggcctccgccaatgagatgttactctccggtcgcaagctgaccgcccaggaggcctgcggcaaggggctagtcagccaggttttttggcccggaacctttacccaggaagtcatggttcgcattaaggaactcgcctcctgtaatccggtggtgcttgaggagagtaaggccctggttagatgcaacatgaagatggagttagagcaggccaacgaaagagagtgcgaggtcctcaagaagatctggggttctgctcaaggaatggactctatgctcaagtacttacaaaggaaaatcgacgagttctag

SEQ ID NO: 182940 - DNA, 1239 bp, synthetic construct
  misc_feature 1..1239: note = Description of Artificial Sequence: Synthetic coding sequence
  source 1..1239: mol_type = other DNA
atggacctggccaagagcggcatcaagatcctggtgcccaagagccccgtcaaaagcaggaccgccgttgacggctttcagtcggagagcccagagaaacttgaccccgtggagcaaggccaggaggacactgtcgcacccgaagtggcagctgaaaaaccggtgggagcacttcttggccctggtgcagaacgggctaggatgggcagccgccctaggatccacccgttagttccccaggtgcccggccctgttacagctgcgatggctactggattggcggtgaatgggaaaggcacttcccccttcatggatgcactgaccgctaatggtacgacgaacatccaaacctctgtgacaggtgtcaccgccagtaagcgaaaattcatcgacgacagacgtgatcagccgtttgataagaggctcagattttctgtgcggcagactgagtctgcttatcgctaccgtgacattgtcgtacggaagcaggacggatttacacacatcctgctgtctaccaaatcttctgagaacaatagcctcaatcctgaagtgatgcgagaagtgcaaagcgctctctctaccgccgccgctgatgattctaaactggtgctgctgagcgcagtgggatccgtcttctgctgcgggctggatttcatctattttatacgccggctgaccgacgataggaaacgggagagtacaaaaatggctgaggcgattagaaattttgtcaacacgtttattcagttcaagaagccaatcatcgttgcggtgaacgggccggccatcgggctcggcgcaagcatccttcctctttgcgacgtcgtctgggcaaatgaaaaagcatggttccagacaccatatactacattcgggcagtctcccgacggctgctccacagtcatgttcccaaaaattatgggaggagccagtgctaatgagatgctcctttcaggccggaagctgacagcacaagaggcatgtggcaaaggcctggtgtcccaggtgttttggccaggcacctttacccaggaagttatggtgagaataaaagaacttgcgtcttgtaaccccgtggtgctcgaggagtccaaggccctggtgcggtgcaacatgaagatggagctggagcaggctaatgagagagaatgcgaagtactaaaaaagatctggggctccgcccagggaatggactctatgctgaaatatctgcagcggaagatcgacgaattctag

SEQ ID NO: 182941 - DNA, 1635 bp, synthetic construct
  misc_feature 1..1635: note = Description of Artificial Sequence: Synthetic coding sequence
  source 1..1635: mol_type = other DNA
atggccagcgaggagctgtacgaggtggagcggatcgtggacaagaggaagaataaaaagggtaaaactgagtatcttgtccgctggaagggttacgactcagaggatgacacatgggagcccgagcagcacttggtaaattgtgaagaatacatccacgacttcaaccggcgccataccgagaaacagaaggagagcacactgacacggacaaacaggacttccccaaacaacgccagaaaacaaatcagtaggtcgacaaactctaacttttcaaagacatcacccaaggcacttgtgatcggcaaggaccatgagtctaaaaattctcagctgtttgccgctagccagaaatttcgtaaaaatacggcaccatcgctttcttctaggaaaaacatggatttagcgaagtccggcataaagattctggtccccaagtcccccgtgaaatcccgtactgcggtggacggattccaatcagagtctcccgaaaaactcgacccagttgagcaaggccaggaggacactgtggcccccgaggtagccgctgagaagcccgtgggcgcactccttgggccaggcgcagagagagctaggatggggtcaagacctagaatacacccactcgtgccacaggtgcctggaccagttacagcggctatggcaaccggtctggccgttaatggtaagggcacctccccgttcatggacgcgttaacggcgaacggcacaacaaatattcagaccagtgtgaccggggtaaccgcctccaagcggaaattcatcgacgatcgacgtgaccaaccgtttgacaagaggctccgcttctcggtgaggcagactgagagcgcctacaggtaccgggatatcgtggtgagaaaacaagatggtttcactcacatactgctgagtacaaaatcaagtgagaataattctctgaatccagaggttatgcgcgaagtgcaaagtgctctgagcaccgcggccgccgatgattccaaactagttctgctaagcgcagtgggatctgtgttctgctgtggactcgacttcatctacttcatcagacgattaaccgatgatagaaaacgcgagagtactaagatggctgaagctattaggaatttcgtcaacaccttcatccagtttaaaaagcccataatcgtggccgttaatgggcccgccattggattgggcgcttcaatcctaccgctctgtgacgtggtttgggcaaacgagaaggcttggtttcagaccccatacacgacatttggacagtctcctgacgggtgctctaccgttatgttcccaaagattatgggcggcgcctcggccaacgaaatgttgctctctggccgaaagctgacggcccaggaggcttgcggcaagggcttagttagccaggtgttttggcccggcactttcacccaggaggtgatggttaggatcaaggaattagcctcgtgcaaccctgtagtacttgaagagtccaaggcattggttcggtgcaacatgaaaatggagcttgagcaagccaatgagcgggagtgtgaggtcttaaaaaagatatggggttctgcacaagggatggattccatgctgaagtacctgcaacggaagattgacgagttttag

SEQ ID NO: 182942 - DNA, 1239 bp, synthetic construct
  misc_feature 1..1239: note = Description of Artificial Sequence: Synthetic coding sequence
  source 1..1239: mol_type = other DNA
atggacctggccaagagcggcatcaagatcctggtgcccaagagccccgtgaagtcgcggaccgcagtagatggtttccagagtgaatcaccagagaaattggacccagtcgagcaaggtcaagaggacactgtggctcccgaggttgcggctgagaagccagttggcgcccttctggggccaggtgctgaacgggctcgcatgggctcgagacctaggatccaccccctagttccgcaggtccctggcccagtcacggcggccatggccaccgggttggcggtcaatggaaagggcacctccccctttatggatgcactcacggcgaacggtaccacgaatattcaaacgtccgttacaggggtgaccgcttccaaaagaaaattcatcgacgaccggagggatcaaccattcgataaacgcctgagatttagcgttcgccagaccgaatcagcttatcggtatagggatattgtcgtgcggaagcaggatggcttcacgcacatcctgctgtcaacgaaaagtagcgagaacaattctctgaatccggaagtcatgcgcgaagtgcagtccgcactgagcaccgcagccgccgatgactcaaagctggtcctgctgtcagctgtgggctcagttttttgttgcggtctggactttatttacttcatcaggagactcaccgacgacaggaagagggagtctaccaaaatggccgaggccatcaggaatttcgtcaacacgttcatccagtttaagaagcccattattgttgccgtgaacgggcccgctattgggctcggagcatctatcttaccactgtgcgacgtagtttgggctaatgagaaggcgtggttccaaacaccttacactaccttcggtcagtcacccgacgggtgttccaccgtaatgttccctaagattatgggcggcgctagcgcgaatgaaatgctgttgtccggtaggaaactcactgcgcaggaagcctgcggtaaaggcctggtcagccaggtcttctggcctggcacctttacccaggaagtgatggtgaggatcaaggagcttgcttcctgtaaccctgtggtactcgaagagtcgaaagcgctggtccggtgtaacatgaaaatggagctggaacaggcgaacgagcgtgagtgtgaggtgttgaaaaagatttggggatctgctcagggtatggactcaatgctgaagtatctgcagcggaagattgatgagttctag

SEQ ID NO: 182943 - DNA, 1665 bp, synthetic construct
  misc_feature 1..1665: note = Description of Artificial Sequence: Synthetic coding sequence
  source 1..1665: mol_type = other DNA
atggccagccaggagttcgaggtggaggccatcgtggacaagcggcaggacaaaaatggcaatacacaatatctggtacgttggaagggttatgataaacaagacgatacgtgggagcccgaacaacacttgatgaactgcgagaagtgtgtccatgactttaacaggagacagaccgagaagcaaaaaaaacttacctggaccactacttcaagaatcttttccaacaatgctaggagaaggacatcacgaagtaccaaagccaactactccaagaattccccaaaaacaccggttacggataagcaccacagatccaaaaatcgaaaactgttcgctgctagtaagaatgtgagacggaaggctgcgtctatattaagcgacacgaaaaacatggagatcattaatagcacaatagagacgctcgcaccagatagcccttttgaccacaagaccgttagcggattccaaaagctggaaaaactcgaccccatcgccgctgaccagcaggatacggtggttttcaaggttacggaaggcaaattactccgcgatcccctctcaaggccaggcgccgaacagaccggaatccagaacaagacgcagatccaccccctcatgtctcagatgtccggctccgttaccgccagcatggctaccgggtcagctacccgcaagggaattgtagtcctgattgacccactggcggcaaatggcacaactgatatgcacacctcagtgcctcgagtgaaaggcggacagcgcaatatcacggatgactctagagatcaaccatttatcaaaaaaatgcacttcactatccgtctgacggagtcagccagtacctaccgagatatcgtagtgaaaaaagaagacgggttcactcaaattgtgctctcaactcggagcaccgagaaaaacgcgctgaatacggaggtcattaaggagatcgtgaatgctttgaattctgccgctgctgatgatagcaaactagttctctttagcgctgcagggtcagttttctgctgtggcctagattttggctatttcgtcaaacatctgcggaacaaccgaaatactgcatctctagagatggtggataccatcaaaaattttgtgaacacattcattcagttcaagaaaccgatcgttgtctccgtgaatgggcctgctatcggcttgggggcctcaattctccctctctgtgatttagtgtgggcaaatgaaaaagcatggttccaaactccctacacaactttcgggcagtctccagacgggtgctcatctatcacctttccgaagatgatggggaaggccagtgcgaatgaaatgctgatagccggccgcaaactcaccgccagagaggcatgcgcgaaggggttggtcagtcaagtgttcctgacagggacattcacccaggaggtgatgatccaaattaaggagttagcctcttacaatccaattgttctggaagagtgtaaggcccttgtgcggtgtaatatcaagctggaactcgagcaagctaatgagcgtgaatgcgaggtgttgaggaaaatctggtcatccgcccaaggaatagagagcatgctgaagattccgttgttgggctataaggctgcctttccaccacggaaaactcagaatgatcaacgttggtgcccttag

SEQ ID NO: 182944 - DNA, 1623 bp, synthetic construct
  misc_feature 1..1623: note = Description of Artificial Sequence: Synthetic coding sequence
  source 1..1623: mol_type = other DNA
atggccagccaggagttcgaggtggaggccatcgtggacaagcggcaagataagaatgggaacacacagtatctcgtgaggtggaagggatacgacaaacaggatgatacttgggaacccgaacagcacctgatgaattgtgagaagtgtgtgcacgactttaatcggcgccagaccgagaaacagaagaaattgacctggactaccacatctaggatattttctaacaatgccaggcggaggacatcgcgcagcaccaaggccaattatagtaaaaacagtcccaaaacaccagttacagataaacaccatagatctaaaaaccgcaagttgtttgctgcttccaagaatgtacgcagaaaggctgcaagcatactttccgacacaaagaatatggagattataaattctactattgagacactggcaccggatagccctttcgaccataagactgtctcgggtttccaaaaactagagaagctggaccccattgctgcagatcagcaggatacagtggttttcaaggtgaccgagggaaaattgctgcgtgaccctttaagccggccaggtgcagaacaaaccggaatccagaataaaactcagatccaccctctgatgagccagatgtcggggtctgtgaccgcctctatggccacggggtcagctactcggaagggcattgtcgtgctcatcgacccccttgccgcgaacgggaccacagacatgcacacctctgtaccccgtgtcaaaggaggccaacgtaatattacagatgattcgcgggatcagccattcattaagaagatgcatttcacaatacgtctcacggagtccgcaagtacctatcgtgatattgtggtgaagaaggaggacggattcacacagatagtgctttcaacccgcagtactgagaagaatgctttgaacactgaagtaatcaaggaaatagttaacgcactgaacagcgccgccgcagatgactccaaactggtgcttttcagtgcggccggctccgtcttttgttgcggactcgatttcgggtatttcgtgaaacacctgcgaaataaccgcaataccgccagcctggagatggtggataccatcaaaaattttgtgaacacctttattcagtttaaaaaaccaatcgttgtgtctgtgaatggtccagccattggcctgggagcttctatactccccctctgcgacctggtctgggcaaatgaaaaagcatggttccagaccccatatacaacgtttggacaatcccctgacggctgttcttctatcactttcccaaagatgatgggcaaggctagcgccaatgaaatgctgatagcaggccggaaactgacagccagggaggcttgtgcaaaaggtctggtaagccaggtattcttgaccggaactttcacccaggaggtgatgatccagattaaggaactagcaagctataaccccattgtacttgaggagtgcaaagcattagtaagatgtaatatcaagttagagctggagcaggctaatgaaagggagtgcgaggtgctgaggaagatttggtctagtgcgcagggaattgaaagcatgcttaaatacgtggaaaataagattgatgagttctag

SEQ ID NO: 182945 - DNA, 1170 bp, synthetic construct
  misc_feature 1..1170: note = Description of Artificial Sequence: Synthetic coding sequence
  source 1..1170: mol_type = other DNA
atgggcaagatggccgccgccgtgggcagcgtggccaccctggccaccgagcctggagaagacgcctttcggaaactttttagattctataggcagtcaagacccgggactgcagatctagaaggagttatcgacttttctgcagcccacgcagcaagaggtaagggtccaggcgcacagaaggtcatcaagagccagcttaatgtgagtagcgttagtgaacagaacgcttaccgggccggtttacaacccgttagcaaatggcaagcgtatgggcttaagggatacccaggttttatcttcatacctaatccgtttcttcccggttaccagtggcattgggtgaagcaatgtctaaagctctacagtcaaaaaccaaacgtctgcaacttggacaagcacatgagcaaggaagagactcaagatctgtgggagcagtcaaaagaattcctaaggtataaagaggctaccaaaagaagacctcgtagcctgctggaaaaattaagatgggtgactgtcggataccactataactgggattctaaaaagtactctgcggaccattacaccccattcccgagcgatctcggctttttgtccgaacaggtggccgcagcttgtggattcgaggacttcagagccgaggccggaatactcaattattaccggctggactccacactgggcatacatgtggaccgtagtgaactcgatcactccaagcctcttctctcgttctctttcggacaaagtgctatttttttgctaggcgggctacagcgcgatgaggcacccacagccatgtttatgcatagtggggacattatgattatgtcaggatttagccggctgttaaaccacgccgtgcctagagtgctcccaaatccagagggagagggacttccccattgcctggaagcacccctccctgcagttttaccaagagactctatggtggaaccgtgtagtatggaagattggcaggtgtgcgcttcctacctgaaaacggctagggtgaatatgaccgtcagacaggttcttgctactgaccagaatttccctttggagcccattgaggacgagaaaagagatatctccactgaggggttttgccacctggacgaccagaactctgaggtcaagagggccaggattaatcctgactcctag

SEQ ID NO: 182946 - DNA, 921 bp, synthetic construct
  misc_feature 1..921: note = Description of Artificial Sequence: Synthetic coding sequence
  source 1..921: mol_type = other DNA
atgcggagcgccgccgtgctggccctgctgctgtgcgccggccaggtcactgcccttcccgtgaatagcccaatgaacaagggagacacagaggtgatgaaatgtatcgttgaagtcatatccgacacactgtcaaagccatctccgatgcccgtgagccaggaatgcttcgaaactttgcggggcgatgagcgtatactcagcatcctaaggcatcagaacctgctgaaggaacttcaggatttggcactgcagggggctaaggaaagggcccatcagcaaaagaagcactctgggttcgaggatgaactgagcgaggtgctggaaaatcagtcttcgcaggcggaactcaagggaaggagcgaagccctcgccgtggatggggccggcaagccaggcgccgaggaggctcaagaccccgagggaaagggcgagcaagaacacagccagcagaaggaggaagaggaggagatggccgtggtccctcaaggattgttcaggggcggcaagagtggggagcttgagcaagaggaggagcgtctcagcaaggagtgggaagactccaagcgctggtctaagatggatcagcttgccaaggagcttacagcagagaagagactcgaaggccaagaagaggaggaagacaatagggattctagcatgaagttatcgtttagagcccgtgcttatggatttcgcggcccgggaccccagttgaggaggggctggcggccttctagccgagaggatagccttgaagcgggactgcccttgcaggtaaggggatatccagaggagaagaaggaggaagagggaagcgccaaccggagacctgaggaccaggagctcgaatcactgtcagcaattgaggccgagcttgaaaaggtcgcccatcaactccaagccctgagacgggggtag

SEQ ID NO: 182947 - DNA, 2034 bp, synthetic construct
  misc_feature 1..2034: note = Description of Artificial Sequence: Synthetic coding sequence
  source 1..2034: mol_type = other DNA
atgcagcccaccctgctgctgagcctgctgggcgccgtgggcctggcggccgttaatagcatgccagtggataaccggaaccataacgagggtatggtaactagatgtattattgaagtactgtccaatgccctgtctaagtcgagcgctccccctatcacccctgaatgcaggcaggtgcttaagacctcacgcaaggatgttaaggacaaagagacaacagaaaacgagaacaccaagtttgaggtgagactgctacgcgaccctgccgacgcctctgaagcccacgaaagctcatcgcgcggagaagcaggtgcacctggggaggaggatattcaaggccccaccaaagctgatactgaaaagtgggccgagggaggcggtcacagccgagagagagccgacgagccgcagtggtcactgtatccatctgactctcaagtgagcgaagaggtgaagacaaggcactcggagaaatcacagagggaagatgaggaagaagaagagggagagaactatcaaaagggagaaaggggagaagacagctctgaggagaagcatctggaagaacctggggaaacccagaatgcctttctcaatgagagaaagcaggccagcgccatcaaaaaagaggagctagtagcgaggtcagagacgcacgccgcaggccattctcaggaaaagacacatagccgcgagaaatccagccaagaatctggcgaagagactggaagtcaggaaaatcacccccaagaatcaaaggggcagccccgctcccaagaggagagtgaggaaggcgaagaagacgccaccagcgaggtggataaacggcgcacaagacccagacatcatcatggaagaagtcgccccgataggtccagtcaagggggctcacttccctccgaggaaaagggccacccacaggaggagagcgaggaatctaatgtgagtatggcttcccttggcgaaaagagagatcaccatagcactcattatagagcctccgaagaggaacccgagtacggggaagaaatcaagggataccccggagtgcaagcgcccgaggatctcgaatgggaacgataccgtggaagggggtcagaagaatatagagctcccaggcctcagtccgaggaaagctgggacgaggaggataagagaaattacccctctctggagttagataaaatggcccacggatacggggaggagtcggaggaagagcgaggcctggaaccaggtaagggcagacaccaccgtggacgaggtggcgagcccagagcatatttcatgagcgacacaagagaagaaaaaaggttcctgggggaaggtcatcacagagtgcaggagaaccagatggataaggccaggcgacatccacagggcgcatggaaagaacttgataggaattacctgaattatggagaggaaggggcccccggcaaatggcaacaacagggcgacctccaagatacaaaggaaaatcgagaggaggcgcgttttcaggataaacaatactcctctcaccacaccgcagagaaaaggaaacggctgggggagctttttaatccctattacgaccccttgcagtggaaaagctctcacttcgaacggcgggacaatatgaacgataatttcttggaaggcgaagaggaaaacgagttgaccctcaatgaaaagaatttttttcccgaatacaattacgactggtgggagaagaagcctttttcggaagatgtgaactgggggtatgagaagagaaatctcgcaagagttcccaaactggatcttaagcgccagtatgaccgagtggctcagctcgaccaactactgcactaccgcaagaaatcagcagagtttcctgatttttacgattcggaggaaccggtcagcacccatcaggaggcggagaacgaaaaggatcgggcggaccagactgttctaacagaagatgaaaaaaaggagctggaaaacttagcagcaatggacctcgagctgcagaaaattgctgaaaagttttctcagagagggtag

SEQ ID NO: 182948 - DNA, 870 bp, synthetic construct
  misc_feature 1..870: note = Description of Artificial Sequence: Synthetic coding sequence
  source 1..870: mol_type = other DNA
atgcccgtggacaaccggaaccacaacgagggcatggtgacccggtgtataatagaagtgctgagtaacgctttgtccaagagcagcgcgccacctatcactccagagtgccgccaggtgctgaaaacatcacggaaggacgtcaaggataaagaaactactgagaatgaaaacaccaagtttgaggtgcggctgctgcgtgatcctgctgatgcatctgaagctcacgaaagctcctccagaggtgaggcaggggccccaggcgaggaagatatccaaggccctaccaaagccgacaccgagaagtgggcggagggcggtggtcacagcagagaaagagcggatgagccccagtggtctttatatccgagtgactctcaggtgagcgaggaggttaaaacgaggcatagtgagaagtcacagcgcgaggatgaagaagaagaagagggagagaactaccaaaagggggagcgtggggaggatagctcagaggagaagcacctagaggaacccggcgaaacgcagaatgcttttcttaacgagcggaaacaggcaagcgccatcaagaaagaagagctggtcgcgaggtctgaaacacacgctgccggacactctcaggagaagactcatagtagagaaaagtccagccaagagtccggagaagaaactggctctcaggaaaaccacccccaggagtctaagggacagccgcgctcccaggaagaaagcgaggagggtgaagaggatgcgacgtcagaggtagataaacggcgcacacgccctcgacatcaccacggccgatcccgtcccgatcgttcctcccagggcggcagcctccccagcgaggagaaagggcatccccaggaatag

SEQ ID NO: 182949 - DNA, 1806 bp, synthetic construct
  misc_feature 1..1806: note = Description of Artificial Sequence: Synthetic coding sequence
  source 1..1806: mol_type = other DNA
atgcccgagcgggagctgtggcccgccggcaccggcagcgagcccgtaacacgagtaggtagctgtgatagtatgatgtctagtactagtaccaggagtggtagctccgacagttcatatgacttcctgtccaccgaagagaaggaatgtctgttgtttcttgaggaaaccattgggtcactcgataccgaggccgacagtgggctatccaccgacgagtccgaacctgctaccacaccgaggggttttcgtgccctaccaatcacccagcccactccccggggagggcccgaagagacgatcacccaacaggggagaactccccgaacggtaacagaatcaagctcatcgcacccgcctgaacctcagggactgggcttgcgctcaggctcatacagccttcctcgcaacatccatattgctcgctctcagaactttcggaagtcaactacccaggcatctagtcacaacccgggggagccaggcagactagcaccagagccagagaaggagcaggtatcccagtcttctcagccccgtcaagctcccgccagccctcaggaggcggctctggacctcgatgtggtgctgatacctcctcctgaagccttccgggatactcaacccgagcagtgtagggaggctagtctacccgagggacccggccagcaaggtcacacaccacagttacacacaccatcctcttctcaagagcgcgaacaaacaccgagtgaggcaatgtcacagaaggcaaaggagacagtgagcactcggtacactcagccacagccccctcctgcagggctccctcagaatgccagggctgaggatgcacctctgtccagcggtgaggacccaaactcgcgacttgcaccactgaccacccctaaacccagaaagttgcctccaaatattgttctcaagtcttcccgaagcagcttccattctgatccccagcattggctgtcccgacacacagaagcagctcctggggatagcggcctcatctcatgctcgctgcaggagcagaggaaggctcgcaaggaagcactggaaaagctgggcctcccacaggaccaggacgaacccggactgcatctgtcaaagcccactagctccatcagaccaaaggaaactagggcccaacatctcagccctgcccctggtctcgcccagccagccgctcccgcgcaggcgtccgccgccatccccgctgcagggaaagcactggcccaggcacccgccccagcccctggacctgcccaaggtccgctgccaatgaagagtcccgccccaggtaacgtagcagcctccaagtccatgcctatttctatcccgaaggcaccccgcgcaaacagcgccctcaccccccctaagcctgagagcggcttgacgctgcaggaatctaacaccccaggattaagacagatgaacttcaagtccaatacactggagcggtcaggtgtgggcttgagttcctaccttagcactgagaaagacgcgtctccaaagacttccactagcctcggtaagggatcatttttggacaaaatcagcccatctgtgcttcggaactctagacccaggccagcatctctcggcaccggaaaggatttcgcaggcattcaggtggggaagctggcggaccttgaacaggagcaatcctcgaagcgactgagttatcagggtcagtccagagacaagctgccacgcccaccttgtgtgtccgtgaaaataagtcctaagggcgttcccaacgagcaccgccgcgaagcgctcaagaaactaggactgctgaaagagtag

SEQ ID NO: 182950 - DNA, 1068 bp, synthetic construct
  misc_feature 1..1068: note = Description of Artificial Sequence: Synthetic coding sequence
  source 1..1068: mol_type = other DNA
atgagccagaaggccaaggagaccgtgagcacccggtacacccagccccaacctcctccagccggcttgccccagaatgccagagccgaggatgcccctttgagcagcggtgaggacccaaactcccgacttgctccgttaactacgccgaagcctcggaagctgccgcccaatattgttctaaaaagcagcagatctagttttcacagcgacccacaacattggctatccagacacaccgaggcagcacctggcgatagcggactgatttcttgtagcctccaggagcaacgaaaagcaaggaaggaggccctcgagaagcttggcctgccgcaggatcaggacgaacctgggctacatctgtctaagcccacgtctagcatccggcccaaggaaacaagggctcagcatctcagcccggcacccgggctagcccagccagcagcccccgcacaggctagcgcagcgatccccgcagcggggaaggcgcttgctcaagccccggcaccagcccctggcccagcacagggcccgctgccaatgaagtcaccagctcccggcaatgtggcagcctctaagtcaatgccgatttccattcccaaggcaccacgagctaatagcgcgctgacacctccgaagcccgaaagcggactgaccctacaggagtctaatacacccggcctgcgtcagatgaatttcaagtccaacacattggagaggtccggcgtcgggttatcttcatatcttagcaccgagaaagacgcttcaccgaaaacctcaacaagcctgggaaaggggtctttcttggacaagatttctccctcggtgctgcggaattcgagacccagacctgcctccctagggaccgggaaagattttgccggaatccaagtcggcaagctggccgacctggagcaggagcagagctctaaacgcctgtcctatcagggacagtcccgggataaactcccccggcctccgtgcgtgagtgtgaagatttcacctaagggagtgccgaacgagcataggcgggaggccttaaaaaagctcggcctgctcaaggagtag

SEQ ID NO: 182951 - DNA, 1050 bp, synthetic construct
  misc_feature 1..1050: note = Description of Artificial Sequence: Synthetic coding sequence
  source 1..1050: mol_type = other DNA
atggccggccccgccatccacaccgcccccatgctgttcctggtgttgctgctgcccctggaactgtctctagcgggtgcgctggccccaggcactccagcccggaacctccccgaaaatcacatcgatctacctgggccagccttgtggacaccacaagcttcccaccatcggcgccgcgggcctgggaagaaagagtggggtccaggcttaccttcccaggcccaggacggagcagtggtcacagctaccaggcaggctagcaggttgcccgaggccgaggggctgctgcctgaacagagccccgccggactcctgcaggacaaggatctcctcttgggcctcgccctcccctatcccgagaaggaaaaccgtccccctgggtgggaacgaacacgaaagcgatcaagggagcacaagagaagacgcgatagactgcgactacatcaaggcagagctctcgtcagaggcccctctagcctgatgaaaaaagcagagctgtccgaagcccaggtgctggacgctgccatggaagaaagttcaacttcattagcaccaaccatgttttttctcacaacttttgaggccgcgcccgccaccgaggaaagtctcatactacctgtgactagcctgcgccctcagcaagctcagcctagatcagatggggaggtgatgcctaccctggacatggcactatttgactggacagactatgaggacctcaaaccagatggatggccctctgctaaaaaaaaggagaagcatcgcggaaaacttagctcagacggaaacgagacttcccccgccgagggagagccttgtgaccaccaccaagattgcctgcctggcacctgttgtgacctcagagagcacctctgcacacctcataataggggtctgaacaacaaatgtttcgacgattgtatgtgtgtggaaggtcttaggtgctacgccaaatttcacaggaatcgtcgcgtgacccggcggaaaggtcgatgtgtcgaacctgagactgccaacggagatcagggaagcttcatcaatgtttag

SEQ ID NO: 182952 - DNA, 477 bp, synthetic construct
  misc_feature 1..477: note = Description of Artificial Sequence: Synthetic coding sequence
  source 1..477: mol_type = other DNA
atgtgcttcagccgggccgacgccgccgacaactaccccttcggcacttgccagcaacgcaaactctttcctcactttcatccacctaatctgatcggcaacaagttcgtgcctctgcgcgggtctccacaccgaggtcccgggtgctactttagcgacgaaatgacaccccacgccggcagatatcaaaaggtttccccccaacaggaaaagcacaagcaaaacttcgctccgttcaacgtgctcgtcccacggtttaaaaattacccgaaggacacatactatccctcccccggggcctacaatcccgagaaaaaaccaccacccaaaattgcctggcctatgaaattcggaagccctgactgggcacaggttccttgtcttcagaagcggaccctaaaggccgaactgagcacagataaagactttcgaaaacacaggaacagagttgcttacctgtctctatattacaattag

SEQ ID NO: 182953 - DNA, 576 bp, synthetic construct
  misc_feature 1..576: note = Description of Artificial Sequence: Synthetic coding sequence
  source 1..576: mol_type = other DNA
atgtgcttcagccgggccgacgccgccgacaactaccccttcggcacatgccagcagcggaagctgttcccccatttccatccaccaaatttaattggaaacaagttcgtccctctcagggggagccctcatcgcgggccaggatgctatttttctgacggttatggcttggcctatgacttgtccaagatccccacgagtatcaagggatataccctgggagcccggaccgcagttagattcaaacccatccagaaggaaatgacccctcacgccggccgatatcagaaagtcagtccacagcaagaaaaacataaacagaattttgcacccttcaacgtattagtccctagattcaaaaactaccccaaagatacctattacccatctccaggagcctacaatccggaaaaaaaacctccccctaaaattgcttggccaatgaaatttggctcgcccgactgggcccaggttccttgtctgcagaaaagaacgcttaaggccgagctgtcgacagataaggacttccgaaaacaccggaatcgggtcgcctacctgagcctttattataattag

SEQ ID NO: 182954 - DNA, 2055 bp, synthetic construct
  misc_feature 1..2055: note = Description of Artificial Sequence: Synthetic coding sequence
  source 1..2055: mol_type = other DNA
atgtgggtgctgctgcggagcggctaccccctgcggatcctgctgcccctgcgcggggagtggatgggccggaggggcctgccgagaaacttggccccagggcctccccgaagaaggtatcggaaggagaccctacaggctctagacatgcctgtccttccagtgacagccaccgagatccgtcagtatttacgtggacatggaatccccttccaagacggccattcatgcctcagggcactgtcacccttcgccgagagctcccagttgaaaggccaaaccggcgtgaccacctccttttctttgttcattgataagactaccggtcatttcctttgtatgaccagtctcgctgagggatcctgggaggacttccaagccagtgtggaaggcagaggggacggtgctagggaaggtttcctgctgtctaaggctcccgagtttgaagattcagaagaggtccgaagaatttggaatcgggctattcctctctgggagttacctgaccaggaggaagttcagctcgccgacactatgttcggactaaccaaagttaccgatgacaccctcaaacgctttagcgttcggtacttacggcctgcccgatccctagtctttccatggtttagcccgggaggctctggactgcgcggtctgaaactgcttgaggctaaatgtcaaggggatggcgtgtcttatgaggagaccacaatcccaaggcctagtgcataccacaaccttttcggcctgccccttatatcccgccgagacgccgaagttgtgctcacatcccgcgagctggactctctggctctgaaccagagcacagggcttccgaccctcacactgccccgcgggacaacgtgcctgccgccggccctgctcccatacctcgagcagtttcgccggatcgtgttttggctcggcgatgaccttcgcagttgggaagccgcgaagctatttgcccgaaaactaaatccaaaacgatgcttcctagtcagacccggggaccaacagcccagacctttggaggctctcaatgggggtttcaacctctcccggatcctgcgcacagcacttccggcctggcataaaagtatcgtatcttttaggcagctaagagaggaagtgctcggggagctatctaatgtggaacaggctgctgggctccggtggagcagattccctgacctgaataggattctaaagggccatcggaagggtgagctaacagtattcacagggccaactgggtctggcaaaacaacatttatttcggagtatgccctggacctctgttctcagggtgtaaataccttgtggggctcctttgagatttcaaacgtgaggttagctagagtcatgctcacccagtttgccgagggacggctcgaggatcagttagataaatatgaccattgggctgaccggttcgaggatcttccactctactttatgactttccacggccagcagagtatccgaactgtgatcgacacgatgcagcacgcagtctacgtctacgacatctgccacgtgattattgataacctacaattcatgatggggcacgagcagctatccacagaccggattgctgctcaagattacattattggagtcttcaggaaattcgctacagacaacaactgtcacgtgaccctggtaattcaccctaggaaagaggatgacgacaaagagttacagacggcaagcatctttgggtcagccaaggcaagtcaggaagccgacaacgtgctgattctccaggaccgaaagctggtaaccggtcccggcaagaggtatctacaagtgagcaagaaccgctttgacggcgacgtgggggtgtttcccctcgaattcaataagaacagtttgacgttttccatcccacctaagaacaaggcacggctgaagaaaataaaagacgacactggcccagtcgcaaaaaaaccttcaagcggaaaaaaaggcgctacgacccaaaatagtgaaatttgctccgggcaggcacctacccccgaccaacccgatacctctaagagaagtaaatag

SEQ ID NO: 182955 - DNA, 1749 bp, synthetic construct
  misc_feature 1..1749: note = Description of Artificial Sequence: Synthetic coding sequence
  source 1..1749: mol_type = other DNA
atgtgggtgctgctgcggagcggctaccccctgcggatcctgctgccactgcggggcgaatggatgggacgtcgcgggctgcctcggaatcttgctccagggcctccacgtaggcgctaccgaaaagagaccctccaggcgctcgatatgcccgtgctccctgtcactgccactgagatcagacaatacttacgtggtcatggtattccgtttcaggacgggcacagttgcctgcgggccctctctccgtttgcagaatcatcccagttaaaaggacaaacaggggtgacaacaagtttttccctgttcattgataagacgacgggacatttcttatgtatgaccagcttggctgaaggcagctgggaagacttccaagcatcagtagaagggaggggtgacggcgccagggaaggcttcctgttgagtaaagcccccgagttcgaagattccgaggaggttcggagaatatggaatagagctattccactttgggagctgccggatcaggaggaagtccaattggcagacacgatgttcggtctgacaaaggtgacagacgatacgctgaagaggttttctgtccgatatttaaggcctgcaagaagtttagttttcccctggttcagccccggcggcagcggcctgcgtggcttaaagctgctggaagcgaagtgtcagggggacggcgtttcttatgaggaaacaactatcccccgcccttccgcctatcacaatttattcggcctgccactcataagtaggcgggatgcagaggtggtgctgacatcccgagagctggactccctggctcttaatcaatccaccgggcttcctactcttaccctgcctagggggacgacctgccttccgcctgcactgttaccctacttggagcagttccgtcggatcgtgttttggctcggagacgacctccggtcatgggaagctgccaaattgtttgcacgaaagctgaatcctaagcgatgcttcctcgtgaggccaggtgatcagcagcccagacctttggaggcactgaatggaggcttcaacctgtcccgcatacttcgcactgccttgcctgcatggcacaaaagcattgtgtcatttaggcagctgcgagaggaggtgctcggggaactgagcaacgtcgagcaggccgccggcctcaggtggagtagatttcctgatcttaataggatactgaaaggacaccgaaaaggggaactcaccgtcttcaccggccctactggtagcggcaaaactaccttcatctctgaatatgcactggatctctgtagccagggagtcaacactctttgggggtctttcgaaatatcaaacgtaaggcttgctcgggtgatgttaactcagtttgcggaggggaggttggaagaccaattggacaagtacgatcactgggctgaccggttcgaggatctgcctctgtacttcatgacgttccatggccagcagtccatcagaacagtgatcgataccatgcaacacgccgtgtacgtctacgatatctgccacgtgatcatcgataatctacagtttatgatgggacatgaacaactttccaccgaccggatcgctgctcaggactatatcattggagtgtttcggaagtttgcaacagacaataattgtcatgttacactcgtgattcacccccggaaggaggacgatgataaggaactgcagacagcaagcatcttcggctcggccaaggtgagtggtttgtag

SEQ ID NO: 182956 - DNA, 1029 bp, synthetic construct
  misc_feature 1..1029: note = Description of Artificial Sequence: Synthetic coding sequence
  source 1..1029: mol_type = other DNA
atgcccttcctgctgggcctgcggcaggacaaggaggcctgcgtgggaactaataatcaatcatatatttgcgatactggtcattgctgcgggcaaagccagtgctgcaactactactacgaattatggtggttttggttggtgtggacgattattatcatactttcctgttgttgcgtttgtcaccataggcgcgctaagcaccgcctgcaagcccagcagcgccagcatgagatcaacctgatagcctacagggaagctcacaactacagtgcgctacctttttattttcgtttcctgcccaattacctccttcctccttatgaagaagtggtgaaccgcccccccacacctccacctccttactctgcctttcagcttcagcaacagcagctgctgccaccgcagtgtgggcccgccggagggtcacccccaggtatcgatccaacccgcggctcacagggggcacagtctagccccttatctgaaccctcacggagctctacgcgacctccatccattgccgacccagacccctcagacctccctgtagatagagcagcaacgaaggctcctggcatggagcccagtggcagcgtggctgggctgggggagttggaccctggagcctttctggacaaagatgccgagtgccgggaagaattgcttaaggatgatagttcagagcatggcgctccagacagcaaggagaagactccagggcgacacagaagatttacaggcgactctggaatcgaagtttgcgtttgtaacagaggccaccacgatgacgacctgaaggagttcaataccctcatagacgacgcactggatggtccacttgacttttgtgactcgtgccatgttcgacccccaggtgatgaagaggagggcctgtgccagagcagcgaggagcaggccagggagccaggccacccacatcttcctagaccgccggcctgtctcctgttgaacactattaatgaacaggatagtccaaatagccagtcaagctccagcccatcctag

SEQ ID NO: 182957 - DNA, 1092 bp, synthetic construct
  misc_feature 1..1092: note = Description of Artificial Sequence: Synthetic coding sequence
  source 1..1092: mol_type = other DNA
atggagcggcggcggctgctgggcggcatggccctgctgctgctgcaggccctgccctcccctctttctgctagggctgaacccccgcaggacaaagaagcatgcgtgggtaccaataatcaatcttatatctgtgacaccgggcattgctgtggccagagccagtgctgcaactattattacgagctctggtggttctggcttgtttggaccattatcataattttatcttgttgctgcgtatgccaccaccgccgggcaaagcaccggctgcaagcccaacaaaggcagcacgagatcaatcttatcgcatacagggaagctcataactattcagcactgcctttttactttcggttccttcctaactatctgcttcccccatatgaagaagtggttaatcggcccccaacccctcctcccccatacagtgccttccagctccagcagcagcagcttctgcctccacagtgcggccctgccggtggatcgccaccaggtatcgaccccacacgtggtagccaaggtgcacaatcctcccccctgtccgagccgagcagaagttccacccgcccaccctccatcgccgatccggatcctagtgacctgcctgttgatcgagcggctaccaaagcccctggtatggagcccagcggtagtgtagccggactcggggagttagatcccggggcctttctggataaggacgcagaatgcagagaagagctactgaaggatgactcgtcagagcatggcgcaccggacagtaaagagaagactcctggcaggcataggagattcacaggcgattccgggatcgaggtctgtgtgtgcaatcgggggcaccatgacgacgatctcaaggaattcaacactttgatcgatgacgctctggacggtcccctcgatttttgcgactcctgccacgtcagacctcccggcgatgaagaggagggtctgtgccagtcgagtgaggagcaggctagagagccgggacacccccacctcccgcgccccccggcctgtctgttgctcaacactatcaatgaacaggacagtccaaatagtcagtcctcgtccagcccttcttag

SEQ ID NO: 182958 - DNA, 1056 bp, synthetic construct
  misc_feature 1..1056: note = Description of Artificial Sequence: Synthetic coding sequence
  source 1..1056: mol_type = other DNA
atggccaccgacgtgcagctggccgactaccccctgatgagccccaaggcggagctaaagcttgaaaagaagagcggccggaagcctcgctccccaagggattcgggaccccagaaggagctggttatccccggcatcgttgacttcgaaaggatcagaagagccctcagaacacccaagccacaaacacctgggacgtattgctttggacggctgtcccatcactccttctttagcagacaccatcctcaccctcagcatgtgacccacatacaggatctcactggtaagccagtctgtgtggtgcgcgactttccggctccgctgccagagtcaacagtgttcagcggttgtcaaatgggaatccccaccatttcagtcccaatcggcgacccacagagcaacagaaatcctcaactaagtagcgaagcttggaaaaaagagcttaaggagctagcctctcgagtcgcgtttttaacaaaggaggacgagctcaagaagaaagagaaggagcaaaaggaggagcctctgcgagaacagggggccaaatatagcgcagaaacaggccggctgattcctgcttcgactcgcgcagtgggccggagaaggagtcatcaaggacagcaaagccagtcttcttcgcggcatgaaggtgttcaggcattcctgctccaggaccaggagctcctggttctggaactgctgtgtaggatcctcgagacagacctgctttcagccattcagttctggctgctctatgcaccccccaaagaaaaggacctggcacttggcctcctgcagactgccgtcgcccagctgctgccacaaccactagtcagcatccccactgaaaaactgctaagccagctgcctgaggtccacgaaccaccccaggagaagcaggaacccccgtgctcccaatccccgaagaagacaaaaatcagccctttcactaagtccgaaaaacccgagtacattggcgaagcgcaggttctgcaaatgcatagctcacagaacaccgagaaaaagacctccaagccacgcgctgagagctag

SEQ ID NO: 182959 - DNA, 321 bp, synthetic construct
  misc_feature 1..321: note = Description of Artificial Sequence: Synthetic coding sequence
  source 1..321: mol_type = other DNA
cagtgcgccgagctgtggggcagcgtgcggaagaacagcgacaagttccttctgtctcgcaaccttcacccaagtaaggaggagtacagacagcaaataaaaactccaggcgaggagtggagacagattttggtgcattggagaagctcttccccaccggatgctttcaaacctgaacatagagaggaggatatagaagcggaaggccgcgagcttagggggcctaatacatgtacatgcctggcccaggagcagcctcagggatttagaggtgtctctgtgtcgaccaccttcactgccgtgcccgactctctgccatag

SEQ ID NO: 182960 - DNA, 753 bp, synthetic construct
  misc_feature 1..753: note = Description of Artificial Sequence: Synthetic coding sequence
  source 1..753: mol_type = other DNA
atggccaccgacgtgcagctggccgactaccccctgatgagccccaaggctgaactgaagctggaaaagaagagtggccgaaaacccaggtctcctcgggactccgggccgcaaaaagaactggtcatacctgggatcgtggattttgagagaatccgccgtgccctcagaacccccaagccccagacacccggcacatattgttttgggcggttatctcatcactccttcttcagccgccatcacccccatcctcagcacgtaactcatatccaggatctcaccggaaagcccgtctgtgtggtccgggactttcccgcacctctcccggaatcaacagtatttagtgggtgtcaaatgggtatccccaccattagcgtgcccataggagatccccagagcaatcggaacccacagttgagctcagaggcttggaaaaaagaattgaaagaactggcaagtcgggtagcctttctcacaaaggaagacgagctgaaaaaaaaggaaaaagagcaaaaggaagagcccctgagggaacagggggccaaatactctgccgagacaggtcgcctcatacccgcttccacccgggccgtgggtcgaaggcggtcccaccagggccagcagagccagtcctcatccagacacgagggggtgcaggccttcctgctgcaggatcaagaactcctgaaaaaaacaagtctgtgggactcctgtagacagcaatggctctcttctttcccatccccttag

SEQ ID NO: 182961 - DNA, 951 bp, synthetic construct
  misc_feature 1..951: note = Description of Artificial Sequence: Synthetic coding sequence
  source 1..951: mol_type = other DNA
agccccaaggccgagctgaagctggagaagaagagcggccggaagcctcgatcccctcgggactctggcccccagaaagagctggttatacccggcatagtcgactttgagcgcattcgccgagcccttcggacgcctaaaccacagacaccaggaacctattgtttcgggcggctgtctcaccactcattcttctcccgccaccatccacacccccaacatgtcacccatattcaagatctgacgggaaagcccgtgtgcgtggttcgggactttcctgccccgctccctgaatctaccgtcttctccgggtgccagatgggcataccgacaatttcagttcccattggggatccccagagcaaccgcaatccgcagctctcctctgcttggaagaaagagctcaaggagctggcctctagagttgcctttctcaccaaagaagacgaactcaaaaaaaaggaggatactacgtccctgaactggaattgtaagtccagacggcctcaagcccccggactgtccgggaccgatctgggcgctgccgaactcggaattaaaaaggagcagaaggaagagccactgagagagcagggtgccaagtactctgccgagaccggtcggctcattcctgcatctacacgagctgtggggcgtagacgttcacaccagggacagcagtcacagtcttcaagccggcacgagggcgtgcaggcctttctccttcaggatcaggaactcctgggtggattgacctcccccggcgcgcccgtgtccgacccaggtaaccggctggcaaagcggaaccctgttctggcggcactacgaagcgcccagggtaagaggccaaggagcggtacacccgctgattcctcaggcagcgctccctctcctgcccctagtctccatccatatagaaaagcaccaaaaccagcatcccggtctgcttag

SEQ ID NO: 182962 - DNA, 498 bp, synthetic construct
  misc_feature 1..498: note = Description of Artificial Sequence: Synthetic coding sequence
  source 1..498: mol_type = other DNA
atgtacatcagccccaaggccgagctgaagctggagaagaagagcggccgcaaaccccggtcacctagagactctggacctcagaaggaactggtcattcccggaatcgtcgatttcgagcgtatcaggcgggccctgcggacccccaagcctcaaacccccggcacttactgctttggaaggttgtcccatcacagttttttctcacgacaccatccccatccccagcatgtgacgcatatccaggacttaactggtaagcctgtgtgtgttgttagggatttccccgcaccgctcccagagtcaaccgtcttctctggctgtcaaatgggtattccaaccattagcgtccctattggagaccctcagtcgaatcgcaacccacagttgtcctcagcctggaaaaaggagctgaaggaactcgcaagtcgcgtcgccttcctgacgaaagaagacgaactgaagaagaaggaagtcggcgccgagcaccgtagctag

SEQ ID NO: 182963 - DNA, 672 bp, synthetic construct
  misc_feature 1..672: note = Description of Artificial Sequence: Synthetic coding sequence
  source 1..672: mol_type = other DNA
atgctgtgggtgcagcggaagcggcggcggaaggagaccagcgagtgtccctccgataaggacaaatctccagaaagtcataaggccaaaaatgaaagttggattaaatctcatttttcgagactgtcagaagagaagctggcacttgacaacaatgcctcagctagtgggaatgcgacccagaccgagagcggttcggaagaggtatccagtactgtgcacatcgaaactttcactacgagacatggggaggttggctcagccctacacagggaaagcttcaccagccggcagaagacatccggacccagtgtgatccaggagatccaccaggagtctggaaaggccccatccacagacgaggccacatgggccgctgtagcagcatgcactaaagaaattgacacgcaaggacggcacttggcacattctatgctacagcgggcgattgcgtatcagcactccggacacctagagagcaaggacatcaaccaggaagaactgcgggccctggaagaagtggaaatgaagcttcaaaagaacttccttacacagcgtgagaatacaatcgccggagctaaccatacccatactttctatgggcatagccaccactcccatcacgggcacccctcccaccagtcccattctttgcccaaccgccgccattag

SEQ ID NO: 182964 - DNA, 399 bp, synthetic construct
  misc_feature 1..399: note = Description of Artificial Sequence: Synthetic coding sequence
  source 1..399: mol_type = other DNA
atgggccggacctggtgcggcatgtggcggcggcggcggcccggccgacgttctgcagttccacgctggccacatctctcgtcacagtcaggcgttgaaccccctgaccgctggaccggcacccctggttggccgtcccgcgaccaggaagcaccaggctcaatgatgccgccagccgcagcacaacctagtgcccatggggctctagtaccccccgccactgcacatgagccagtcgaccatccagctttgcactggttggcctgctgctgctgcttaagcctgcccgggcagttgcccctcgctatcagattgggatgggatctcgacctcgaggccggacccagctctggcaagctgtgcccccgcgcgcgtcgctggcaacccctgccatcctag

SEQ ID NO: 182965 - DNA, 537 bp, synthetic construct
  misc_feature 1..537: note = Description of Artificial Sequence: Synthetic coding sequence
  source 1..537: mol_type = other DNA
atggccagcttcctggtgtggcccctgcggaccgccctgcggggcggtaaatcgtgggcgggcccaggagtaggctgtggcggcgacggagctcggggcggcggagagttgtctctgagtaacttggatctccctggcgctggagaggctggccttgaacatcaccccctgttagggcacctctttatcagtgctgttcctcgttggccgcacttaagcagccagtcaggggtcgagccacccgacaggtggaccggtacgcccggctggcctagcagagaccaggaggcgccaggttcaatgatgcctcctgcagccgcgcaaccgtccgcacatggcgcattagtgcctcctgccacagcccacgaaccagtggatcatccggccctccactggcttgcgtgctgttgctgcttaagcttgccaggccagctgcctcttgccattcgcctagggtgggacctggatttggaagctggacccagctcaggcaagctctgtccccgagctagacgctggcagcccctgccatcttag

SEQ ID NO: 182966 - DNA, 1350 bp, synthetic construct
  misc_feature 1..1350: note = Description of Artificial Sequence: Synthetic coding sequence
  source 1..1350: mol_type = other DNA
atgtggaccgccctggtgctgatctggatcttcagcctgagcctgagcgaatcccatgccgctagtaatgatcctcgaaacttcgtgccgaataagatgtggaagggcctcgtaaagagaaacgcatctgtcgagacagtagacaacaaaacatctgaagatgtgaccatggctgcagcctcccctgtgacactgactaaaggcaccagcgctgcccatcttaattccatggaggtgaccacagaggatacatcacgaaccgacgtgtccgaacctgcgactagcggcggcgcagccgatggtgtgactagtatcgctcccaccgctgtagcgtcttcaactacagcagcttccataacgacagctgcatcgagcatgacggtggcctcaagcgcgccaactacagccgcctcctcaacaaccgtcgcaagtatcgctccaacaaccgctgccagcagcatgaccgccgcaagctctacacccatgactctggctctccccgcccctacatcgacttccacaggacggaccccgagtactaccgcaacggggcacccaagtctgtctaccgcattagcacaggtacctaagtcaagtgcactcccgcggaccgccaccctggctacgctggcaacccgggctcagactgttgcgaccactgcaaatacgtctagtcccatgagcacccgtcccagtccttccaaacatatgccgagtgatacagcagcctctcctgtccccccaatgcgtccacaggcccaaggacctatctcacaagtcagcgtggaccaacctgtggtcaacacaaccaataaatctacacccatgccaagtaataccactcctgaaccagctccaactccaactgtggtgacaaccacgaaggcccaggcaagggagcccactgcctctcctgtgcctgtgccccacacttcccccattcccgagatggaggcaatgtcccctaccacccagccatcacccatgccgtatacccaacgggccgccggccctggcacttctcaggcccccgagcaggttgagacggaggccacccctggaacggattccacaggacccacaccaaggagtagcggaggaactaaaatgcccgccaccgattcctgccagccatcaactcaggggcagtacatggtcgtcaccacagaaccgctcacacaagcagtggtggataagaccctcctccttgtagtgctcctgctcggagtgacgctttttatcaccgtgctagttctgtttgcacttcaggcgtatgaatcctacaaaaagaaggattatacgcaggtagactacctgatcaatggaatgtatgccgattctgagatgtag

SEQ ID NO: 182967 - DNA, 78 bp, synthetic construct
  misc_feature 1..78: note = Description of Artificial Sequence: Synthetic coding sequence
  source 1..78: mol_type = other DNA
atgtggaccgccctggtgctgatctggatcttcagcctgagcctgagtgagagccacgcggcttctaacgatccatag

SEQ ID NO: 182968 - DNA, 3969 bp, synthetic construct
  misc_feature 1..3969: note = Description of Artificial Sequence: Synthetic coding sequence
  source 1..3969: mol_type = other DNA
atgcccgtggtgtggcccaccctgctggacctgagccgggacgagtgtaaaaggatcttacgaaagttggagctggaagcctatgccggagttattagtgcattgcgtgcccagggcgacctcacaaaggagaaaaaggatctgctgggcgaactcagcaaggtactctctatcagcaccgagcgccatcgcgccgaggtcagacgtgcagttaacgacgagagactcaccacgatcgcacataacatgtctggtcccaacagctccagtgagtggtcgattgaaggacgacggctagtgcctttaatgcctaggcttgtgccccaaaccgccttcaccgtgaccgccaacgctgtggccaatgccgcaatccagcataatgctagtttacccgttcccgccgaaaccggctcaaaagaggtcgtttgttatagttacacgagcacgacgtcaacgccaacctcaacgccggtaccctccgggtctattgctactgtgaagtctccacggccagcctcaccagcctcaaatgtggttgtcctgccttcaggttctacagtttacgtcaagtccgtaagttgctcagacgaagacgaaaagcctcgtaaacgaagacgcacgaacagcagttcaagtagtccagttgtattgaaagaggtccctaaggcagtcgttcctgttagtaaaaccatcaccgtgccagtgtctggcagccctaaaatgagcaatattatgcagtcaatcgccaatagtctaccacctcacatgtcaccagttaagatcacattcacaaagcccagcacccagaccaccaacacgactactcaaaaagtgattatagtaacaacctcaccctcttccactttcgtgccgaatattctaagtaaatcccacaattacgctgcagtgaccaagctggtgccgacaagcgtaatcgcctctacaacacagaaaccccccgtggttatcaccgctagccagtcctctttggtgtcaaattcctctagtggaagctcttcttctacaccaagccccattcctaatacggtggcagttactgctgtggtctctagcactcccagcgtggtaatgagcacagtggcccagggcgttagtacttccgcgatcaaaatggcctcaactcggctgccgtcgccgaaaagcctggtctcagcaccaactcagatcctggcccagttcccaaagcaacaccagcaaagccccaagcagcaactgtaccaggtccaacagcagactcaacaacaggtagcgcaacccagccccgtcagccaccagcaacaacctcaacagagtcccctccctcctggaattaaacccaccatacagatcaagcaggaaagcggggtgaaaattattacccagcaggtgcagccaagcaagatcttaccaaaacccgttacagccaccctgcccacttccagcaacagccccattatggtcgtgagctccaatggggcgattatgacaactaagctggtgacgacccctacagggacccaggctacctatactagacctaccgtctctccttctatcggccgtatggcagctactcctggcgccgccacctatgtcaagactacttccggcagcatcatcacagtggtgccaaagtctctggcaaccttaggcgggaagattataagcagtaatattgtatcgggaacgactacaaaaattaccactatcccaatgacttccaagcctaacgtcattgtcgtgcagaaaactaccgggaaaggcacaaccatccaaggtcttcccggcaagaatgtggtcacaacgctcctaaacgcgggaggcgaaaagactattcaaacagtgcctaccggagcaaaacctgcgatcctgacggcaactagacctatcacaaaaatgatcgtaacacagccgaagggcatcggatctactgtccagcccgccgctaaaattataccaaccaaaatcgtgtacggccagcaggggaagacccaggtgttgattaaaccaaagccggtcacttttcaagccacagtggtgtctgagcaaaccaggcagcttgtcaccgaaaccctacagcaggccagcagggtggctgaggccgggaacagcagtattcaggaagggaaagaagagccacagaactacaccgactcttccagttccagtacagagtcctctcagagtagccaggactctcagccggttgtgcatgttattgcgtcaaggaggcaggactggtccgagcacgaaatcgccatggagaccagtcccacaattatttatcaggacgtgtcctctgagtctcaatcggcgacaagcacaataaaggctctgctcgagctgcagcagaccactgtcaaggaaaaactcgagtccaagcctcgtcaaccaaccatcgatttgtcccagatggcggtcccaatccagatgacccaggaaaagagacatagtccagagtccccttcaattgccgtggtcgaaagcgagctcgtggccgaatacatcactactgagcgtacagacgagggcacagaggtagcttttccacttcttgtgtcccatcgatcgcagcctcagcagccatcccagccacagcgaacacttttacaacatgttgctcagagccagacggctacacagacgtcggttgtggtgaagagtattcctgctagtagcccgggcgccatcacccatatcatgcagcaggccttaagctcccataccgcgtttaccaagcattctgaggaacttggcacagaggagggagaagtagaagagatggacaccctggatccgcagaccgggctcttctacaggagcgccttgacccagagccagagtgcgaaacagcagaagctcagtcagcctcccttggaacagacccagctgcaggtcaaaaccctccagtgctttcagactaagcagaagcagacaattcatctccaggctgaccagcttcaacataaactgccgcagatgcctcagctttctatacggcatcaaaagctcactcccttacagcaggagcaggctcagcccaaacctgacgtgcaacatacccagcatccgatggtggcaaaggatcgccaactgccaaccctgatggcacagccaccccagactgtggttcaggtgctcgccgtgaaaacaacacaacagctgccaaaattgcagcaggccccaaatcagcccaagatttatgtacagccgcagaccccccagtctcagatgtctctgcctgcttcttcggaaaagcaaaccgcttcccaggtggagcagcctattatcacccaagggagttctgtaacaaagatcacttttgagggacgacaaccgccgacagtgacaaagataaccggaggcagttccgtccccaagttgacctcacctgtgacgagcatttcaccaattcaggccagtgaaaagactgccgtgtcggacatcctcaagatgtccttgatggaggcccagattgatactaatgtggagcatatgatcgttgacccacctaaaaaggccctcgctacatccatgctgacaggggaggctggctcgcttccttcaacccacatggtggtggccggcatggccaatagcacgccgcaacagcaaaaatgccgggaatcatgctccagcccatcaaccgtcggctcatcacttactacgaggaagatagatcctcctgcggttcccgctacaggacagtttatgcgcattcagaacgtgggacagaaaaaggcagaagagagtccggcagaaattattatacaagcgataccacagtatgctattccatgtcactcgtcttctaacgttgtggtggaaccaagcggcttgctggaactcaacaattttacatcccaacagctcgatgatgaagaaacggcaatggaacaagacatagactctagtactgaagatggcactgaaccaagtccaagccagtcaagcgccgaacggagttag

SEQ ID NO: 182969 - DNA, 3468 bp, synthetic construct
  misc_feature 1..3468: note = Description of Artificial Sequence: Synthetic coding sequence
  source 1..3468: mol_type = other DNA
atgcccgtggtgtggcccaccctgctggacctgagccgggacgagtgcaagcggattctgaggaagctggaactggaagcctatgccggggttatatcagctttacgtgcccagggcgatctcaccaaagagaagaaggacctattgggcgagctgtctaaggtgttgtccatatccactgaacgccaccgcgccgaggttcgacgcgccgtgaacgatgagcgtctgaccacaatcgcccacaacatgagcggacctaacagctcctcagagtggagcattgagggtaggcgcctggtgccattaatgccacggcttgtcccacagaccgcgttcactgttactgcgaacgcggtggctaatgcagccatacagcacaacgcttctttgccagtgccagccgaaacggggagcaaggaggtcgtgtgctattcctatacaagtaccacatcaacgccaacgtctaccccagtccctagtggaagtatcgccacagtgaaaagccccagacccgcgagcccggcatcaaacgtcgtagtgctgccttcaggctccacagtttatgtcaagagtgtatcctgctccgacgaagacgagaaaccccgcaagcgaaggaggacgaacagctcctcgagttctccagtggtattgaaagaggtgcccaaagcagtagtgccagtctccaagacaatcaccgtgccagtttctggttcgcctaaaatgagcaacatcatgcaatcgatcgcaaatagcctgcctccacacatgtcgcccgttaaaattacgtttaccaaaccatccacacaaacaacaaacactacaactcagaaggttattatcgtgaccacttctccaagctcgacttttgtaccaaatattttgtctaagagtcataattacgcagctgtaactaagctggttcctacttccgtaatcgcctctaccactcaaaagcctcccgttgtcatcacagcctcccagagttcactagtgtccaactcttcttctggttctagctctagcacccccagcccaattccaaacaccgtggccgttaccgccgtcgtgagctcaacaccgagtgtggtcatgtcaaccgtggcccagggcgtttctacttctgcaattaagatggcatccacacggctcccttcacctaagtccctcgtctcagcacccactcagatcctggcccaatttccgaagcaacaccagcagagcccaaagcagcagctgtatcaggtccagcaacagacacaacagcaggttgcccaaccaagtcccgtgtcacatcagcagcagccacagcagtctcctctgcctcctggcattaagcctacgatacagataaaacaagaaagcggggtcaaaattataacacagcaggtccagccctccaagatcctgcccaaacccgttaccgccacactccccactagtagcaacagcccaataatggtggtgagtagtaatggcgcaatcatgactaccaaacttgtcaccaccccaaccggtacacaggctacatacacaaggcccaccgtgtcaccaagcatcggcaggatggctgctacccctggcgctgccacttacgttaaaactaccagcgggagcataatcactgtggtgccaaaatcacttgctacgttgggaggtaagatcatctcctcaaatatcgtgagcggaactacgactaagatcactaccattcccatgacttccaaacccaacgtcatcgtcgttcagaagaccactggcaaggggaccaccattcagggtctaccaggcaaaaatgtggttaccaccttgcttaacgcaggcggtgagaaaacgattcagacagtccctaccggcgccaagcccgccatcctgacagccactagacccatcacgaaaatgatcgttacccagcctaaaggaattggctccactgtccaaccggccgcaaagattatcccaaccaagattgtgtatgggcagcagggaaagacccaggtcctgattaagcctaaacctgtgaccttccaagccacggtggtgagcgaacagacacgtcagttggtaactgagacccttcaacaagcttccagagtagccgaggcaggtaacagctctatacaagaaggaaaagaggaacctcaaaattataccgatagtagttcctccagcaccgagagttcccagtcatctcaggactcccagcctgtggttcatgtgatcgcatcgcgcaggcaggactggtcagagcatgaaatcgcaatggagacatcacccacaatcatttaccaagatgtatcttccgaatctcagagtgctaccagcacaattaaggccctgctagagcttcaacaaaccacagtgaaagaaaagttggaaagcaagcctcggcaaccaaccattgacctgtctcagatggctgtgcctattcagatgacccaggagaagcgacacagtccagagagccccagcattgcagtggtcgagtcagagctggttgccgaatacatcactacagagcgcacagatgagggcacggaagtggcattcccattactcgtgtcacatcggtcccaacctcaacaaccttctcagcctcagcgtaccctcctccagcatgttgcccagagccagaccgccacccagaccagtgtggtcgtgaagagtattccagcatctagccctggcgcaatcactcatattatgcagcaggcactgtccagtcatactgcgtttacgaaacactccgaggagcttggtacagaagaaggcgaggtggaggagatggacacacttgacccccagaccggtctgttctatcgttcggcactaacccaatcccagagtgcgaaacaacagaagctgtctcagccaccactggaacaaacccagttacaagtcaagactctgcagtgcttccaaaccaagcagaaacagacaattcacctgcaagccgatcagcttcaacacaaattaccacagatgccgcagctgagcatacgccaccagaagctcaccccattacagcaagagcaggcccagcccaaacccgatgtccaacatactcaacatcccatggtggctaaggaccgacagctgccaaccctgatggcacaacccccccagaccgtggtccaggttctcgctgtgaagaccacccagcagctccctaaactacagcaagcccctaaccagcccaagatttatgtccagcctcaaaccccacaaagccagatgagcttaccagcctcgtcggaaaagcagaccgcgagtcaggccataccacagtacgctatcccttgtcatagtagttcaaacgtcgtagtcgagccgtccggactcctggaactgaataactttacaagccaacagctggacgatgaagaaacagctatggagcaagatatcgactcatctacggaggacgggaccgagcccagcccaagtcagtcatccgccgagcggtcctag

SEQ ID NO: 182970 - DNA, 3015 bp, synthetic construct
  misc_feature 1..3015: note = Description of Artificial Sequence: Synthetic coding sequence
  source 1..3015: mol_type = other DNA
atgcccgtggtgtggcccaccctgctggacctgagccgggacgagtgtaaaaggatcctgcggaaactcgaactggaagcctacgccggcgtgatctcagcactgcgtgcacaaggtgacctgactaaggaaaagaaagaccttctgggggaactgtcaaaagtcctttccatctctactgaacgccatcgcgctgaggtccggagagccgtgaatgacgagaggctgacaacaattgcgcataacatgtcaggcccgaattcatcctcagaatggagcattgagggtcgtaggctggtccctctgatgccccgactggtgccccagactgcattcactgtcacagcaaatgcggtcgctaacgcagccattcaacataatgcctctctcccggtcccagccgagacggggtccaaagagggcgtgagctgctcagatgaagatgagaaacccaggaaacgccgtagaaccaactcgagtagcagttcaccagttgttctcaaagaggttccaaaagccgtggttccagtgtccaagacaatcaccgtccctgttagtgggtcccccaagatgtccaacatcatgcagtccatcgcaaatagtttgccgccccatatgtcaccggtaaagattaccttcacaaaacccagtacacagaccaccaacactacaacccaaaaggtgataatagtgacaaccagcccctcatccacctttgttcctaacatattgagcaagtctcataactatgctgctgtcacaaagctcgtgccgacaagcgttatagcctcaaccacacaaaaaccccccgtcgtgatcaccgctagtcagtccagcctggtcagcaattcttcatcaggtagttcatcctctaccccatccccaatccctaacaccgtggcagtgactgccgtggtgtctagtaccccttcagtggtaatgagtacagtggcacaaggtgtatctaccagcgccatcaagatggcaagtactcgactgccctctcccaagtcactggttagcgctcccacccaaatactggcacagttccccaagcagcaccagcagagccctaagcagcagctctaccaggtgcagcaacagacccagcagcaagtcgcccagcccagccctgttagccaccagcagcagccacagcaatctcctctcccacctggcatcaagccaaccatccagatcaaacaggaaagcggggttaaaatcatcacacagcaggtgcaaccctctaagatcttgcccaagcccgtgacggctattctgaccgccacgagaccaatcacgaagatgatcgtgactcagccgaagggcataggaagcactgtccaaccggccgccaagatcataccaacaaagatcgtctacgggcagcaagggaaaacacaagttctaattaagccgaagcccgtaaccttccaggcaactgtagtgagtgagcagactcgccagttggtcaccgagacgctccaacaggccagcagagtcgccgaagccggtaattcatccatccaagagggcaaggaagagccccagaattataccgatagttcgagctcttcgaccgaaagtagccaaagtagccaggttagccaccggtcccaaccacagcaaccatcccagcctcaacgcaccttactgcagcacgttgcccaatctcagaccgcaacgcaaacatctgtggtggtcaaaagtattcccgcaagctctccaggcgccatcacacacatcatgcagcaagcacttagctctcacactgcatttaccaagcacagcgaggagctgggcaccgaagagggcgaagtggaagagatggacaccctggatccccagactgggcttttctataggtccgccctcacccaatcccagagcgccaaacagcagaagctgtcacagccaccgctggagcagacacagctccaggtaaaaactctgcaatgctttcaaactaaacagaagcaaaccatccatttgcaggctgaccaactccagcacaagttgcctcaaatgccacagcttagtatacgccatcaaaagctgacccccctccaacaagagcaggctcaacctaagccagatgtccagcacacgcaacacccgatggtcgctaaagaccgccaactgcccaccttgatggctcagccaccccaaacggtggttcaagtactcgccgtgaaaacaacccagcaactgccgaagctgcagcaagcacctaaccaaccgaaaatttacgtacagccacagacaccacagtcccaaatgtctctcccggcttcctcagagaaacagaccgcatcacaggtggagcagccgatcataactcaggggtcaagtgtgaccaagattacgtttgaaggccgtcagcctccaaccgtgaccaagatcacgggagggtctagcgtgccgaaactcacctcaccagtaacctccatttctcctatccaagcatctgaaaaaaccgccgtttctgatattctaaagatgtctctcatggaagcccaaattgacaccaatgtggagcacatgatagttgaccccccgaagaaagccctcgccacctcaatgctgactggggaagcagggtcattgccgagcactcatatggtggtcgctggaatggccaattctaccccccagcagcaaaaatgtagagaaagctgttcttcacctagcaccgtcggatcctccctgactacccggaagatcgatcctccagccgtcccggctacaggccagtttatgcgcattcagaacgttggacagaaaaaagccgaagagagccctgccgagatcatcattcaggctatcccccagtacgctattccctgtcatagctcctcgaacgtcgttgtagagccttcaggactcctggagctgaataacttcacaagtcaacagcttgatgacgaggagaccgcaatggaacaggatatcgactcatccacagaagacggaactgagccctccccttctcagagcagtgccgagcggagctag

SEQ ID NO: 182971 - DNA, 3969 bp, synthetic construct
  misc_feature 1..3969: note = Description of Artificial Sequence: Synthetic coding sequence
  source 1..3969: mol_type = other DNA
atgcccgtggtgtggcccaccctgctggacctgagccgggacgagtgcaaacggatcctccggaaactcgaactggaggcctatgccggagttatttctgccttacgcgcacagggcgacttgaccaaagaaaaaaaggacctcctgggagaactctcaaaggtcctcagtattagcacagaacggcacagggccgaggtgcgaagggctgtcaatgatgagagattgaccaccatcgcccataatatgagtgggcctaacagcagctccgagtggtccatagagggccgcagactggtgccacttatgccccggctggtgcctcagacggccttcactgttactgctaatgctgtcgctaacgccgccattcagcataacgctagcctccctgtgcccgcggagacaggcagtaaagaggtcgtgtgttattcatacacaagcactaccagtactcctacatccacacctgttccctccggaagcattgctacagtaaaaagtcctcgtcccgctagcccagccagtaatgtggtggtcctcccctctggctcaaccgtctatgtcaaatccgtgagctgctcagacgaagatgagaagccccgtaaacggcggaggacgaatagtagcagcagctcccccgtggtgctaaaggaggttccgaaggccgtcgttcctgtctctaaaacaataaccgtgccggtgagcggttcccccaagatgagtaacattatgcaaagcatcgcaaatagcttgcctcctcacatgtcccctgtgaaaatcactttcaccaaacctagcacccagactaccaacaccaccactcagaaggtaatcattgtcacaacatctcccagcagcaccttcgtgcctaatattctgtcaaaaagccacaactacgctgctgtgaccaagttggtgcccactagtgtgatcgcgagcacaacacagaagcccccagttgtgattaccgcttcacaatcatcacttgtatctaattcgagcagcggtagttcctctagcacacctagtcctatacctaacacagtggccgtaactgcagtcgtcagtagcaccccatccgtggtcatgtctacagtggcccagggggtcagtacatccgcgattaagatggcctcaacccggttaccgagcccaaagagcctggtgagtgcaccaacccaaatcctggctcagtttcctaaacagcaccaacagagtcccaagcagcaactgtaccaggttcagcagcagactcagcagcaggttgcccagccgtcccctgtgtcccaccagcagcagcctcagcaatctccgctgccgcctggcatcaagcccacgatccagatcaagcaggaatctggcgtgaagatcatcactcagcaggtgcagccttccaagattctgccaaagccagtcaccgccaccctgcctactagctccaattcacccattatggtggtgtcttctaatggcgccatcatgaccactaaactggtcacaaccccaacaggtacacaggcgacatacacaagacccaccgtcagccccagcataggtcggatggccgctactcctggggccgcaacctacgtcaagacaacatctggttccattatcaccgtggtgcccaagtctcttgccaccctcggtggcaaaatcattagcagcaatattgtgtctggtaccactactaaaattacaacaattcctatgacttccaagcccaatgtgattgtggtacaaaaaacaactggcaagggtacaacgatccagggcctccccggcaagaacgtggtaaccaccctccttaacgctgggggcgaaaagactatccagaccgtgcccaccggagccaaacccgcaatcctcaccgccacacgacctattaccaagatgattgtgacgcagccaaaggggatcggttccactgttcagccagcggccaagatcataccgaccaagatagtctacggccagcaggggaagacacaagttttaatcaaacccaagccggtgacttttcaggccacagtggtgtccgaacagaccaggcagttagttacggagactctgcagcaggctagccgcgtcgcagaggcaggaaatagctctattcaggaagggaaagaagagcctcagaactacactgactctagcagcagcagcactgagtcctcacaaagctctcaggatagccagcccgtggtccacgtgatcgcctcgcgacggcaggattggagtgaacatgaaatcgctatggagacttctcctaccataatatatcaggatgtgagctcggaatctcagtctgccacatccacaatcaaggctcttctggagctgcagcagacaaccgtcaaagagaaactcgagtctaagccgcgacagccaactatcgacctgtcgcaaatggccgtgcccattcagatgacccaggagaagcgtcattctcctgaaagtccttcaattgctgttgtcgagagtgaacttgtagccgagtacattaccacagaacgcaccgacgaaggcacagaggtcgctttcccattgctcgtgagccacaggagccagcctcagcagccttcccagccccagagaactctgctgcagcacgtcgcacagagccagacggctacacaaactagcgtcgtggtaaagagcattcccgcatcaagtcccggcgccattactcacataatgcagcaggccctaagtagccatactgcctttaccaaacacagtgaggagctgggcaccgaagagggtgaagtagaagaaatggacaccctcgacccacaaacgggcctcttctatcgttcagcgcttacccagagtcagtcagcaaagcaacagaagctcagtcagccccccttagaacagacccaactgcaggtgaaaacccttcaatgttttcagacgaaacagaagcaaaccattcatctgcaggcagatcagctgcagcataaactgccacaaatgccccaattgtccatacggcaccagaaactgacgccactgcaacaggagcaggcccagcccaagcccgacgtacagcacacgcagcatccaatggtcgccaaagaccgccaactgcccacacttatggcacagccccctcaaacagtggttcaggtgctcgcggtcaagactacgcagcagctgccaaaactccagcaagccccaaatcagcccaaaatctacgtgcaacctcagacaccacaaagtcagatgtcgctgccagcatcgtctgagaaacagacagcctcgcaagtggagcagccaattattacacaggggagtagcgtcaccaaaatcactttcgagggtaggcaaccaccaaccgtgaccaagattaccgggggatcctcggtgccaaaattaacttctcccgtcacgtctatatcacctattcaggcttccgaaaagacggccgtgagcgatatactaaagatgtcattaatggaagcccagattgatacgaacgttgagcatatgatagtggatcctccgaagaaggctctggccacctcgatgttgacaggcgaagcaggatctctgccgtcgacccatatggttgttgctggaatggctaatagcactccccagcagcagaagtgcagagagtcctgttcaagccccagcacggtgggctcctctttgacgactcgcaaaattgacccccccgccgtacccgcaactgggcagttcatgcggatacagaatgtggggcagaaaaaggccgaggaaagccctgccgagataatcatacaggctatcccacagtatgcaattccttgccacagctccagcaatgtcgtggtcgaacccagtggtttgctggaactcaacaactttacttctcagcagctggacgacgaggaaactgcgatggagcaagacatcgatagctcaactgaagacgggacagagccatccccttctcaatcttcggccgaaagaagttag

SEQ ID NO: 182972 - DNA, 624 bp, synthetic construct
  misc_feature 1..624: note = Description of Artificial Sequence: Synthetic coding sequence
  source 1..624: mol_type = other DNA
atggccgtgttccacgacatgctgctgcagcccctgggcatgttcctgtgcctgtctctgcagctgtcatcagccacattcatacggtattcctccacttgctttaccttcgatgaatactatactatcaccttagacattaaagcctcaagccatatatacgagagcaatgcagtgtacagtgtgtttgttccagtgaacgactctgtttatgcagtagtcatgaagacacttgatgagaactcggacagcgcaggcctctggcagagagctgacaagaactgctattctaattccacgtactatgtgaaagaccaatatatgacagtgttggaggcccagtggcaagcaccggaaccagaaaatattacggaagtcgaaatccaggcctttactgtgcagatcagagcgctgccaatattgtcgaccctgaaactacgagagaaactatccacactggcattagcggccaagataccgcagtcatcagctttcaagccattctttatgattacccccaagtcaatcagactggagggattggctaaccaggtcttttcttcaccaattacggaggccatctacattctcctcgctttccttaccagtactctgttattttag
